United States Patent Application Publication US 2017/0114356 A1 - sequence listing, part 27

SEQ ID NO: 35263 - DNA, 1372 bp, Zea Mays
atgacctggtgactcagtgagacagctctcaccattgcgccaggcccgcccttcttaggaatatagtaaaattatgttggatgttgaaatggatgagagctaacctgtgcaaccgcagaaatgataaggatgggtaacgttgccaatgcaacaagagcaacacgccattgtagtaacataccaagaagaagtgcaacaagaatggccgatgtatcctgaatgaatatagaaagtctgttactgaaagcagcgcggacaaatgttgcatcatttgcaagtctcattgataatatgtctgcactattttcttcgtcgtcaaaccaaccaacttcattgcgcagaattgctggaatacaataaacagaatttgagaactctgatatttcaacaatggtttactataatctatacacaatagaacttagcagcattgtttcttgtgttcaatactcatgaatatgtgctttatttatggatgttaaactagatagtttataagagctgaggttgcaccatcaaatatgggactacaaaagtaacataaaggaaaagacggtcataccagaaaacatcatccttctgacacgctcggtcattttctctcccattataccaaagtagaagtgctgcaagaagttggctagtacagtaattatacccatgccaacaatgaatgagcagtacttattcacttcggcatgtacatcacggacccctattttgtagtaggccactactataagagatattgtataagcaagaagaggattaaatgaaccgaaacaagcagccccagcacttcctaacagagcataaaaatattccgcaaaactaagctctgcaagcctccaaaaagatggtgcttttgtgtgctgctgcttggaatcctcagcatgaaaactatcaaagatgacaagaggccggctgaaagtttttgagtgggagcgctcattttttggatcagaagtcaacaatggagatattggagattctgggtctgatgtatttgacgactgtcgatgcagcgggacatcaattttgggaagatcaggcaatttcatttcaaaactgtcctgccttttgatggatggagctctctcagatgcaaccattggtagcctggcttctgccatttgctctgaaggggggctttgaatatttggtgattcatgtgagttatgattggcatctgaagttcggaatgtgagaaagccatgtgttttctgaagtgatggcgattttgacatctttggagaagatgattcttgaaagttgtgacctgctgacgaatccctttcaatttggaaggagcttggctctttataatttctcatcggtgttctgaaacagttcaggagagaaaattgtcttg

SEQ ID NO: 35264 - DNA, 1003 bp, Zea Mays
aaatcctttttacgcagcgacaacgagccaggcacctccacctcatccgctgacagacaagagcgcaatcacccgcgggccttgggcttgggccttggaatagggtaccaccaaccaatcaatcgaagaagaggcccgccggccgccgcggtttgctcgctatcgctcccttgctggctgcggtgcgggtgcgccgccgtcgacgagggagtccctggctccctccctccgggttcgaattcgggttgcttccttagggttcagtggcagtacatagcatggccctaaagctcggctggaggagaggaggaggaggctggcttgcgcttccattggggaatcggaccaccgcgtcttcctccgcatgcagcagctccaacttgttcgtcggcggtctttcctacgacactaacgagacagctctcaaggatgttttctctcaatgtggtgatgttattgcgcgaaggttatatgccatcccacaagcggcaagtcgaaaggatttggttttgtcaagttttcttcgcaaaaccaagctgacgcagcattgcaaaagatgaacggtcaggtgcttgatggaaggaaaattcgggtgcactatgcaaacgggactggatgacttgtgatttagaaacagatagaaaatgagatgagcaggtgatgattgatgagcatccagcggctggatcttaaaaatccgcattcgccattgaagttttgttgagatctcgaagctgtaaaaactcggacgaactcaagcgagacaaagatttctcttggtgacacggactgttataagatgttttctgtgaggaaaaagttagtctatcatatttttacttgccactatttttatttggtttgtaaaataaaatgagttgatccactcatagttagttaatactaaggttatcttcagtaacatcctctaaattttattccctaaaagaatattttttgtcctttacaaatcactctaaaagattccgtcctctatattttc

SEQ ID NO: 35265 - DNA, 1035 bp, Zea Mays
acgagaatgttacgaagtcaaataactccccttccccacagcacaaggaacaaatcctttttacgcagcgacaacgagccaggcacctccacctcatccgctgacagacaagagcgcaatcacccgcgggccttgggcttgggccttggaatagggtaccaccaaccaatcaatcgaagaagaggcccgccggccgccgcggtttgctcgctatcgctcccttgctggctgcggtgcgggtgcgccgccgtcgacgagggagtccctggctccctccctccgggttcgaattcgggttgcttccttagggttcagtggcagtacatagcatggccctaaagctcggctggaggagaggaggaggaggctggcttgcgcttccattggggaatcggaccaccgcgtcttcctccgcatgcagcagctccaacttgttcgtcggcggtctttcctacgacactaacgagacagctctcaaggatgttttctctcaatgtgcgaaggttatatgccatcccacaagcggcaagtcgaaaggatttggttttgtcaagttttcttcgcaaaaccaagctgacgcagcattgcaaaagatgaacggtgcttgatggaaggaaaattcgggtgcactatgcaaacgggactggatgacttgtgatttagaaacagatagaaaatgagatgagcaggtgatgattgatgagcatccagcggctggatcttaaaaatccgcattcgccattgaagttttgttgagatctcgaagctgtaaaaactcggacgaactcaagcgagacaaagatttctcttggtgacacggactgttataagatgttttctgtgaggaaaaagttagtctatcatatttttacttgccactatttttatttggtttgtaaaataaaatgagttgatccactcatagttagttaatactaaggttatcttcagtaacatcctctaaattttattccctaaaagaatattttttgtcctttacaaatcactctaaaagattccgtcctctatattttc

SEQ ID NO: 35266 - DNA, 1040 bp, Zea Mays
acgagaatgttacgaagtcaaataactccccttccccacagcacaaggaacaaatcctttttacgcagcgacaacgagccaggcacctccacctcatccgctgacagacaagagcgcaatcacccgcgggccttgggcttgggccttggaatagggtaccaccaaccaatcaatcgaagaagaggcccgccggccgccgcggtttgctcgctatcgctcccttgctggctgcggtgcgggtgcgccgccgtcgacgagggagtccctggctccctccctccgggttcgaattcgggttgcttccttagggttcagtggcagtacatagcatggccctaaagctcggctggaggagaggaggaggaggctggcttgcgcttccattggggaatcggaccaccgcgtcttcctccgcatgcagcagctccaacttgttcgtcggcggtctttcctacgacactaacgagacagctctcaaggatgttttctctcaatgtgcgaaggttatatgccatcccacaagcggcaagtcgaaaggatttggttttgtcaagttttcttcgcaaaaccaagctgacgcagcattgcaaaagatgaacggtcaggtgcttgatggaaggaaaattcgggtgcactatgcaaacgggactggatgacttgtgatttagaaacagatagaaaatgagatgagcaggtgatgattgatgagcatccagcggctggatcttaaaaatccgcattcgccattgaagttttgttgagatctcgaagctgtaaaaactcggacgaactcaagcgagacaaagatttctcttggtgacacggactgttataagatgttttctgtgaggaaaaagttagtctatcatatttttacttgccactatttttatttggtttgtaaaataaaatgagttgatccactcatagttagttaatactaaggttatcttcagtaacatcctctaaattttattccctaaaagaatattttttgtcctttacaaatcactctaaaagattccgtcctctatattttc

SEQ ID NO: 35267 - DNA, 1969 bp, Zea Mays
ctcaccttccaactaacctgtttcaatttgtattgggagccttgccgtgccggaatattcccctccggcagcctccctggcttcctccccgcgccgccccgccaaccaaacccaacggtggcaccacctcttccttcctcctcctttccttccgcgacaggagaccccctcgcccccgaattaattgcagctgaaggaacccaaggcggcatccatcgatgatgatgctcaccaaggagttcgccctatcgccgccgccaggtgtcgtgccgcgccggaggccgtcggcgagggtcgcacccaccgccgctcgagggggttcgccggtgcccgacctatggctgcggaccgccgcccccgtccccgcttccgccgccgccggcttcgccagcagccacagccacgacggcgactgcgacctggccatgctcgtcaccgacttcctcgagaacggggccaccgccggttccggagactcccgcaatagcagcgacagtgaatccggtctccctgacctcgcccacctcgcggacacgatctcgggtggagacgagaaagaaaacgagctgctcgccatggtccactcgctactcctctctatccatgagccgcagcttcagcctttcaaaacaggccaatgtggaggcagctgcatccgccatttgcttgtcaagctcttgagatactcgggaaacgacgcagcagtttgcacatccaaatggcaggggtttgacaagatacctggaggtacttgagatgacaacttggcttatctatctatgcttcctactgagagaagagagcacctgattaagtacggtgttctaggctaaactgtttgtggtttccccaatcaggtgactacgagtacattgatgtcataatgcacggtgatactacagctccagagcgtctaatcgttgatatcgacttcagaagccactttgaaattgccagggcagttgattcttatggcaccctgttgaattcgctcccagtggtctttgttggcacccttccgcgactgaagcagttcctgcatgtgatggtagatgctgcaaaatggtccctgaagcaaaactcaatgccccttcctccctggagatccttgccttacctccaagcgaaatggcagtccaagtatgagaggaaagattccattaccgagggaggcttccagagcacatcttctgatcacgcgctgtgcattgggcacctgaagaggctgaaaacgtccctgcagttagagcttgagaccgcaggattactgatgatgccaatcaaggccaacaagaagaggatgccaaagtcatctgagaggcggaggcggcgttcccttctcagctgttgatttatgttccttggacacataagaatactataaaggagaaggaacaacagcttgctgctggctatttttgtttcctcagaaaatggagaaatgagaggcttttttcatccgtccaatacataatggtggagactcttcttacaggtttggagtttacagattaggtaaaacagaaggtggatactaacaggccatgttagtgccagtttttttttttccttttccctttttgaaggcacataagaaaaggacgaagaaaatagttttttttgtttgttttagtttttgcttctttccggcagagatggatatgctagtggtgaatctgctgcactgcatatgccacgtacaagtgagagttagtattacaaaatcaaactttccccgctatatattgatttttttggtgacccattttggtactccagaaactgatagacacgattgattgccgcattgtaaccgtagaatgcacaagttgggtgatacgcttattgaagttgaagaatattcgttgttcgtttgtaattgtaaactggtgatagtggttgagaatgagaagttctctgttcaggcagtgttggtgctagacagctagagcctttaattttatgagag

SEQ ID NO: 35268 - DNA, 2382 bp, Zea Mays
ctcaccttccaactaacctgtttcaatttgtattgggagccttgccgtgccggaatattcccctccggcagcctccctggcttcctccccgcgccgccccgccaaccaaacccaacggtggcaccacctcttccttcctcctcctttccttccgcgacaggagaccccctcgcccccgaattaattgcagctgaaggaacccaaggcggcatccatcgatgatgatgctcaccaaggagttcgccctatcgccgccgccaggtgtcgtgccgcgccggaggccgtcggcgagggtcgcacccaccgccgctcgagggggttcgccggtgcccgacctatggctgcggaccgccgcccccgtccccgcttccgccgccgccggcttcgccagcagccacagccacgacggcgactgcgacctggccatgctcgtcaccgacttcctcgagaacggggccaccgccggttccggagactcccgcaatagcagcgacagtgaatccggtctccctgacctcgcccacctcgcggacacgatctcggtacgcctcacgcccctcttcccctacctggctcgtgctttccttccatttccattagctagctttgccatgcaaatatgcaatcatgcttacggagtttctgttgatgatttgatttgctttgaccctaaacaaccgaaccaatgcccccgtggctttgtatgatgtttgagattgattgcgcacccagtcgacattactgctttatttactagactagatggatacactactctcgtgtagatcatcacgcttcaaattaatttctgtttctagtttttcacaccacgtgctgtcatcatcatcatcatcatacatgacaccaaaattcacctgtatccttaccatagtgtctttctcggtctgttcaaaacattgttctcctgccatcacctaatgtttgtgactttcattgcatcgtgcccttctaatatgtcctttcagccttacaatttgcctctacatttgtatgcctcaacttacactacctggcccctgcaccctgatttagatgttgaagcagggtggagacgagaaagaaaacgagctgctcgccatggtccactcgctactcctctctatccatgagccgcagcttcagcctttcaaaacaggccaatgtggaggcagctgcatccgccatttgcttgtcaagctcttgagatactcgggaaacgacgcagcagtttgcacatccaaatggcaggggtttgacaagatacctggaggtgactacgagtacattgatgtcataatgcacggtgatactacagctccagagcgtctaatcgttgatatcgacttcagaagccactttgaaattgccagggcagttgattcttatggcaccctgttgaattcgctcccagtggtctttgttggcacccttccgcgactgaagcagttcctgcatgtgatggtagatgctgcaaaatggtccctgaagcaaaactcaatgccccttcctccctggagatccttgccttacctccaagcgaaatggcagtccaagtatgagaggaaagattccattaccgagggaggcttccagagcacatcttctgatcacgcgctgtgcattgggcacctgaagaggctgaaaacgtccctgcagttagagcttgagaccgcaggattactgatgatgccaatcaaggccaacaagaagaggatgccaaagtcatctgagaggcggaggcggcgttcccttctcagctgttgatttatgttccttggacacataagaatactataaaggagaaggaacaacagcttgctgctggctatttttgtttcctcagaaaatggagaaatgagaggcttttttcatccgtccaatacataatggtggagactcttcttacaggtttggagtttacagattaggtaaaacagaaggtggatactaacaggccatgttagtgccagtttttttttttccttttccctttttgaaggcacataagaaaaggacgaagaaaatagttttttttgtttgttttagtttttgcttctttccggcagagatggatatgctagtggtgaatctgctgcactgcatatgccacgtacaagtgagagttagtattacaaaatcaaactttccccgctatatattgatttttttggtgacccattttggtactccagaaactgatagacacgattgattgccgcattgtaaccgtagaatgcacaagttgggtgatacgcttattgaagttgaagaatattcgttgttcgtttgtaattgtaaactggtgatagtggttgagaatgagaagttctctgttcaggcagtgttggtgctagacagctagagcctttaattttatgagag

SEQ ID NO: 35269 - DNA, 396 bp, Zea Mays
agaaaacgacaaatgatccaaaggagagggggaggggaggagatgagatgagatgtgtgcggtcgtccttgtacagctgacagttgtatgccaataaccaaatggcaatctggaggggtagaatcaataactggcaccgacatgcggaagagaatgaacaggatccgatccgtcctatataatccctcttctcccacctccgtctccgtctccgtccgtatataagaagccagatttcgaattccctcctcctccgcctctcccgcagtccctctcctcctttccctcccccgtcgcgatcgctctgtgctccgcctccgtccgtcaaggcctgctcttgcgccgttcctcctcgcccaatccgccaggggatggccacattcgagctctggcgga

SEQ ID NO: 35270 - DNA, 377 bp, Zea Mays
cctgaaccagaagtaccaggagcagatcgttagactgcctgtaaaatcggccgaacctcacaaacaaggctccaaaacccaccgagcatcaactttgttgtaggctcaggacgtgctgctatactcacgggcgcgcggggaggttagggtttcggagaaaacttggggataaagctggatgcaagagggagagggagggatagagaggaggatacatcctcaccggtgagaggcggtcgacgacgcgaggagaggcggcggcgcgaagggaggcgactgcacgagtggaggcggcgtgaggagaggaatgcgagggagttcacacgggggagacgataccgtcacgaaggcatcggtatggattcactgggtagatg

SEQ ID NO: 35271 - DNA, 276 bp, Zea Mays
tttcattggattcattgttcatgacgatgcaaagaagatggacaagggactgaagaaccgttacacggtttgatcccagagagtagtagcatgtagggtggttctttccgattccgtagcaccttgcagagtgtgttgaaggttctctatttgctgaggagttgcttaagcataatctaacatgatgtcgaatgtattcctgtatgttccataggtcagtcacctaggtgcctaggtgttgtttttgtctcagctttgtgtgtgtgtgtgtgtgtg

SEQ ID NO: 35272 - DNA, 1034 bp, Zea Mays
gacgaccacaaaatcgtagtagtcacagaagttggaagaacaacaactgtgtataatacaagtgatcaatggaaccatgtttagcttaaaaaaagaccgcagacccgcagactgtcagccgttaaaaaaaagaaaaaggaaaaaataaaaaccagacagccagccccgagccccaaacggccaaacctccttggacacgactcgccgcacccatccccatccgccgccgctgccatggccgacgagattgacacgaggccggcctccgcgggctcccgcggccgtcctgcgcacgctaccgaggacgacgaccgggaggagggcgagatcgccgccgacgccccctcgcccgccctccccgccgcgcacccgctcgagcactcgtggaccttctggttcgacaacccgcacggcaagaacaagatggccgcctgggggagctccatccgacccatccacaccttctccaccgtagaggacttctggggcctctacaataatatccatcaccctagcaagttgatcggtggagctgacttccattgcttcaagaacaagattgagccaaaatgggaagaccctatttgtgctaatggcggtaaatggaccatcagctgtggaagaggaaaatctgacacgctgtggctgcacaccctgttggctatgatcggcgaacaattcgactatggtgatgaaatttgtggagcagtagtcagcgtgcgtagcaagcaggaaagaatagctatctggacaaaaaatgctgctaatgaagctgctcaggacgatgcaaagaagatggacaagggactgaagaaccgttacacggtttgatcccagagagtagtagcatgtagggtggttctttccgattccgtagcaccttgcagagtgtgttgaaggttctctatttgctgaggagttgcttaagcataatctaacatgatgtcgaatgtattcctgtatgttccataggtcagtcacctaggtgcctaggtgttgtttttgtctcagctttgtgtgtgtgtgtgtgtgtg

SEQ ID NO: 35273 - DNA, 2261 bp, Zea Mays
gacgaccacaaaatcgtagtagtcacagaagttggaagaacaacaactgtgtataatacaagtgatcaatggaaccatgtttagcttaaaaaaagaccgcagacccgcagactgtcagccgttaaaaaaaagaaaaaggaaaaaataaaaaccagacagccagccccgagccccaaacggccaaacctccttggacacgactcgccgcacccatccccatccgccgccgctgccatggccgacgagattgacacgaggccggcctccgcgggctcccgcggccgtcctgcgcacgctaccgaggacgacgaccgggaggagggcgagatcgccgccgacgccccctcgcccgccctccccgccgcgcacccgctcgagcactcgtggaccttctggttcgacaacccgcacggcaagaacaagatggccgcctgggggagctccatccgacccatccacaccttctccaccgtagaggacttctgggggtgcgtccgactatctctctctgacacatgcacacctcttaacctcctttccctcctctcacactctcacaactactggtacaagtccagattcacaatatacgagccaaatctgccatggtttacggatcttggatctctagattaattaacgcattagtttctgactatgcctaatccatagcactctcattcagcttctaacacttgtttatacagcgggaaagatcaattctgagagcatagttactgtcttagcttcatttgcaaggcgcctatccgaagcagatattcattttcacatgttttttgctcacctagttattctagccatttagagatttatccccgaaaccacgcaaacctgttgttctgatgttgcgagctgtctctgcactttttacatgtttttgcccctgctatatcatagatattagccttctcatttgcctttttagaagcagctgtcgatcaatcttacacctctttcggtttgattcatgcacatactgtatgaaatctttattgggtaagcatggtatgtttccattctcaaacatctccagacctacctgctagtccttgttcatactcaaacacacgccttgacaagtctacagtcagtggtggatccaggaatggatcaaaagaggggctataaggcacacttgacggagacgccagcgtatgcggcggacgtcttaggggcagccagcggtgtgctgcaggcttggcgtgctgcagcagcctgcctgcagcttgtgccttgcattggtcgctgagcacctgtgcgctgctagctgctgtagctgctttaggtgtgtcggccatccacactgctagctgctgtggatgcccgcgctgccgcgctggtactagcggcgtggacggaggccggacgcaggtgctgaatggcgcggccaggaaggaggttgtgacctattttagttggactttgtgggctaaaatgatggtatagtataggtgctattgggctgcgactggggcttcaaccctagccctagattcgcccctgtctacagctacagttggtattaagtcaaagtgacacccgcctcatggatctagtttatatgagaaaattcaatctctgtcatgacgcaaaatctgtaatgtatatttttttatattcagaacccgagattcgatttgatctgatgaactgagcttcataggttattggctctcttgcttgacttcctgtcgagtttcttaacggttgtggtgcgtgatcgaaagttggaaggtctgatatttaataacccttcctctcttccttgtgataagtgctcttggtctaatcccgtgtcagacatgtgctgatctatctttggtttggtccttttgtgtccccgtccaactttggctttcgtctataaatatattccatctaatggatctgtgatttcgcagcctctacaataatatccatcaccctagcaagttgatcggtggagctgacttccattgcttcaagaacaagattgagccaaaatgggaagaccctatttgtgctaatggcggtaaatggaccatcagctgtggaagaggaaaatctgacacgctgtggctgcacaccctgttggctatgatcggcgaacaattcgactatggtgatgaaatttgtggagcagtagtcagcgtgcgtagcaagcaggaaagaatagctatctggacaaaaaatgctgctaatgaagctgctcaggtacggtcgtatgggtgctgcagcctgcagtcgcatctctttctaag

SEQ ID NO: 35274 - DNA, 2064 bp, Zea Mays
atcttcatctgcctgctggtgccggactgacggttagagatggcccacccctccgccgccgccgccgccgtatcctccacggcgcccgctgcaaaccctagttctggcgcccgcgaggaaggaggcgcccgctctccgccgtcgccgtctccgtctcagagggggcgggccaaggtggtgatcgttatgggcgccacgggcgccggcaagtcgcggctggccgtcgacctcgcggcccacttcgccggcgtcgaagtggtcagcgccgactccatgcagctctaccgcggcctcgacgtcctcaccaacaaggctcccctccacgagcagaacggtgttcctcatcatctacttagcgtgattgatccctctgtcgagttcacttgccgtgatttccgcgaccgtgccgtgccgattatacaggaaatagtggaccgcggtggcctccctgtggttgtcggcggcacaaacttctacatccaggctctcgttagcccattcctcttggatgatatggcagaagaaatgcagggctgtactctgagagatcacatagatgatggtcttactgatgaagatgaaggcaatgggtttgaacgcttgaaggagatcgatcctgtggctgcgcagaggatccatccaaacgaccatagaaaaatcaaacgctacctcgagttgtatgcaaccacgggtgccctacccagcgatctgttccaaggagaggccgctaagaacagaaatggggtcggcctagtaactccagactcgactgctgtttcctgtgggtagatgctgatcttcaagtcctggacagttatgtcaacaaaagggtcgattgcatgatggatggtggcctgctggacgaagtatgcagcatatatgatgcggatgctgtctatacccaggggctgcggcaggctattggggttcgtgagtttgacgagtttttcagagcatatttacccagaaaagaatctggtgagggttcctgtgcaagcctgttaggtatgcatgacgatcagcttaagagcttgttggacgaagctgtttcccagctgaaggcaaacactcgtagactagttcgacgtcaaacttcttagcgtttctttttttttctccattaaataaaagagacggagattgcatcggctgagtaaagattttgggtggaacttgcatcgtgttgacgcaaccgaagcattcttctgtgccactgacgactcatggcaaaagaaagttgtcaaaccatgtgtggatgtcgtaagaaggtttttgtcggacaattccactgttttgccaagcacaagcgcaagtgacccctcttcaagagagctgtggacgcaatatgtgtgcgaggcctgcggcaaccgggtgctgcgaggtgcgcacgagtgggagcagcacaggcaagggcgaggccaccggaagcgagtgcagcgcctgaagcagaagagcctgaggccatggccatcgctgctgccccaagaccgcagctgatggtaactttttcacagcagaaccggcgagaagtgggacggggacgttgacgtggacatggtcgtctcgtcccacccaaaaaagcgtgccagcctgacagcgacatgctttcccaatcccgaattcctggcacgtcgacggggggactacctccatgccttttagcagcggaagaagcaggcaccaaagaactgcttatcaaaagtattgtaccacacgtacgacgggtctagaagccacagaaacgtagtgtggaagtggatagatacttgaacaatggtccatctttctatactgctaaagtttagcatatgctaaggaggtgtttaagattgctaaaatctctattttcaaaaccgaagtattgcaaatactgtagttattttaagctattctaaacttaggtctggaccttagtttgcaaaactgtattgaccacagtttgtaaaactgtattatttcaaactgtggtattgtaattactaaagtaaaaactgtattatttcaaactgtggtattgtaatgactaaagtatattatagtattttaaaaactgtggtttctaaa

SEQ ID NO: 35275 - DNA, 2200 bp, Zea Mays
ccacataccacctcaatccactcccatctgagattatctaaacaagtccttaggaaaattgtgttcctaaactagcacttagagatgctctaattttactagcattttttatcaactaactattagctccaaacaccccctaattttagtagcaagagcaaggaaaacccccagccatcttcatctgcctgctggtgccggactgacggttagagatggcccacccctccgccgccgccgccgccgtatcctccacggcgcccgctgcaaaccctagttctggcgcccgcgaggaaggaggcgcccgctctccgccgtcgccgtctccgtctcagagggggcgggccaaggtggtgatcgttatgggcgccacgggcgccggcaagtcgcggctggccgtcgacctcgcggcccacttcgccggcgtcgaagtggtcagcgccgactccatgcagctctaccgcggcctcgacgtcctcaccaacaaggctcccctccacgagcagaacggtgttcctcatcatctacttagcgtgattgatccctctgtcgagttcacttgccgtgatttccgcgaccgtgccgtgccgattatacaggaaatagtggaccgcggtggcctccctgtggttgtcggcggcacaaacttctacatccaggctctcgttagcccattcctcttggatgatatggcagaagaaatgcagggctgtactctgagagatcacatagatgatggtcttactgatgaagatgaaggcaatgggtttgaacgcttgaaggagatcgatcctgtggctgcgcagaggatccatccaaacgaccatagaaaaatcaaacgctacctcgagttgtatgcaaccacgggtgccctacccagcgatctgttccaaggagaggccgctaagaacagaaatggggtcggcctagtaactccagactcgactgctgtttcctgtgggtagatgctgatcttcaagtcctggacagttatgtcaacaaaagggtcgattgcatgatggatggtggcctgctggacgaagtatgcagcatatatgatgcggatgctgtctatacccaggggctgcggcaggctattggggttcgtgagtttgacgagtttttcagagcatatttacccagaaaagaatctggtgagggttcctgtgcaagcctgttaggtatgcatgacgatcagcttaagagcttgttggacgaagctgtttcccagctgaaggcaaacactcgtagactagttcgacgtcaaagacggagattgcatcggctgagtaaagattttgggtggaacttgcatcgtgttgacgcaaccgaagcattcttctgtgccactgacgactcatggcaaaagaaagttgtcaaaccatgtgtggatgtcgtaagaaggtttttgtcggacaattccactgttttgccaagcacaagcgcaagtgacccctcttcaagagagctgtggacgcaatatgtgtgcgaggcctgcggcaaccgggtgctgcgaggtgcgcacgagtgggagcagcacaggcaagggcgaggccaccggaagcgagtgcagcgcctgaagcagaagagcctgaggccatggccatcgctgctgccccaagaccgcagctgatggtaactttttcacagcagaaccggcgagaagtgggacggggacgttgacgtggacatggtcgtctcgtcccacccaaaaaagcgtgccagcctgacagcgacatgctttcccaatcccgaattcctggcacgtcgacggggggactacctccatgccttttagcagcggaagaagcaggcaccaaagaactgcttatcaaaagtattgtaccacacgtacgacgggtctagaagccacagaaacgtagtgtggaagtggatagatacttgaacaatggtccatctttctatactgctaaagtttagcatatgctaaggaggtgtttaagattgctaaaatctctattttcaaaaccgaagtattgcaaatactgtagttattttaagctattctaaacttaggtctggaccttagtttgcaaaactgtattgaccacagtttgtaaaactgtattatttcaaactgtggtattgtaattactaaagtaaaaactgtattatttcaaactgtggtattgtaatgactaaagtatattatagtattttaaaaactgtggtttctaaa

SEQ ID NO: 35276 - DNA, 3750 bp, Zea Mays
gagtaaccaaaccaagcaccacgcgcggccatggccttccccgccgacgcgctggttctagagatcaccgacacatcatcctccgccaccgccgccgccgcccgtgctccatcctcaccttctcccccgccgctgtccatctccgacctcgcgctaatcgagagctcctcctacttccgcgcgctcctcggcggcagcttcagtgaatccggcagagagcatgtgcgtgtgggctgcaatttggaggctgctgtgcaagtgctgcgctacctttttgagccttccgagagctttaacatcacgcacaacaatttcctccccctgttggagggagctttgtttcttgctgttgagagccttctagtggagtgtcaaagatggttcggcaccatagcctctcaaacttctgccatgtcagttccattagatttcataattgaagtctggtactttgctgaagagcatggtgttacttttgttcaagacatttgccaaaaatttctagctcagaattttgtagaaaatatgaaagcctgtgaacaatcaaaccccaactcagtagatggccacctcttcattcttagcaagcaggtgaagatatgccttttaccattaggatttgcggcagggacaatgaggcattggtttgactttggaaacaagatcatatgcactattcttgatcttctcaaagacagtttgaaaactttattggatgctgttgatgatggtaacttggatcgatattgcattcgaataacagaatattcaaagaacatagtgctttcaggatgtccccaagtaactacagcattcttgtacatatctgttctccctaatgatctgagtgtttcattgaagagaaggatagtgagttcatacacccaggttgatcatcaaaccttcgttctttatgaggaattagagaaggctactaaaaccttatcatttaagaatgtacacatggtggatatttcaaaatgtccaaacgttcattttggcgcagcaattgactggttgaagttgggttttccagaattaagggtattcagggtttcacattgtttatcatttcaatttgatgatttactatatctgttaatgagatgtccatggattgatgaaattgatatgactattgatacaagcactgtaacacccagacattcagtaatctcgtctagttctgaagtcctaagcaaggcaaaaccaaatcagaaaagatatggcatacattgttcagcatatgacaggcaaccaaattcggttttcttaaatatatcaagattgacattggaaggcagaaatgatattgatggtaattgaaaagttttatacttattatgtcttgctttgcagctgtgtgtattgttattaccttaccaagctagtgacttcattgttagcgcgtgtgcagatatggacttgttggagatatctgtcctgaaaaattctctgtgctatataaacattagaaactgcttcctgttgacggatgatggtatttctaaccttctgatgaagtgtacaaagatccattcgatggttctttcttatacttcttttggaaatcgatcaattcaaatgctatgcgctgccaatccttctggccacaacagtggacatgctcatgttatggcatcttatatgcaagaattacatctggatggctgcaaagctagtgagcattataagtatcacaaagtttttgagcttaagggaaacatcacttacagatggtgcactctgcaagtttgttggctctagtctggagtatcttgacgtttcagagactgtggtgcgatactgattatgtaatttagttttgtgcttctaataatcaagcactacaattgaccaattgatgaaacattcatactggaacattcactgagctaggagactattgatgagtaatacatagtgtgctgggggctattatttctattatctggttgatatgttatactcctatactgtaggcagggtatagacgtatattgtgttcatgaacttttctgctactttattttagtatgacagctatcacttttttatcttcgctacctccagagggcaaaccccaaaagtttatgattatgtttttatttttgcataccatattagagtgcttaattctttttttctgtccattgacttgcagatttctatggtatcattagcaccagttattcaaagaaactgtaaattgaactgtctgaaaacagctggatgctgtagtcttctgttgcaatgtgctaatgtagaacatatcaatggtaacaagtatggagattttctacaggagttaggaactacctactgtctggaggatgttgaaatgggctggggattttgccctattcgaatcgaagaccttgttccttcttttagtaaagtaaggaagatgaaaattggtctcggcacatcattagcggagaatgttctgtgtgctcttcctatgatttgcccattcctcgagtctttgattctaaggtttcaggtgatatctgacagagttgttagacgtctattggaatcagcaacaaatcttcaggtgctttgcctgcactattgtcttggaagtttaacttcatttagtttccaaacaaaggcacctgcattaagagtattgcggcttcattgggtaacttcatggcttacaaatgatgacttgacaatccttacagagaattgcaatttggctgaactttcactttctggttgcaaacttcttgactccagctctcaagacattatctcatctgggtggccaaacttggcacttttacaccttgaggaatgtggtaaagtaactgttgaaggggtttcttcttttttcaactgtaaggctttggaagacgtcctactacggcacacggtgagtatgaaaaatatcgtagcaggttcttggtatatagttctggtgaatcttaaaacacaacgtagaaccatactaaatgacgtgacatggctacagctgaaacaaaatttcaccatgctgttgcaaaattgcagtccatctgtgcatgtcatttccaggacttctaccggtgtaacttttctccgttgaaaaagttgaattgttgattcacttgattggttatatagtttctgagagttgggaaccgcagggtaggggcatcggaaggagcatcatagacgatgctatcagagagttaccactactgcggaagctggctttggatctttgcgatgcctgtgaagacggttacgatagcccaaacgatgcggaagggaagatgattagaagtgtaaggatgagtcgatgcaagaagatggcggggtcgtgtttggaggtccccagacaagggtcttcaacttcaaggccggtgcacaaggacactgtagtgctggaatggagcagcagaatgttcacaaccaccatagtgaaagaaagagtgtgatgagcctcttctgtagttttgtccctgatgaagaacacaagagcaggccacaatatatatgacttgtatgaatggtctccccgcttctgattttgaatgctttgtatgtggacatatcctcgtgtgtgaatgtatttgtatggtatcaaacgaagatcatcttttgcagtcgtactgtacccatgcactcttatgttgatccacgaacaaagtttggaatttttaggtgaccgtgttcatgtttgaaaattattgttgtactagtccttggtaaaataaaggaggcaaggcaggagccaaaaaaaaagacaaaaaacttaat

SEQ ID NO: 35277 - DNA, 3319 bp, Zea Mays
gagtaaccaaaccaagcaccacgcgcggccatggccttccccgccgacgcgctggttctagagatcaccgacacatcatcctccgccaccgccgccgccgcccgtgctccatcctcaccttctcccccgccgctgtccatctccgacctcgcgctaatcgagagctcctcctacttccgcgcgctcctcggcggcagcttcagtgaatccggcagagagcatgtgcgtgtgggctgcaatttggaggctgctgtgcaagtgctgcgctacctttttgagccttccgagagctttaacatcacgcacaacaatttcctccccctgttggagggagctttgtttcttgctgttgagagccttctagtggagtgtcaaagatggttcggcaccatagcctctcaaacttctgccatgtcagttccattagatttcataattgaagtctggtactttgctgaagagcatggtgttacttttgttcaagacatttgccaaaaatttctagctcagaattttgtagaaaatatgaaagcctgtgaacaatcaaaccccaactcagtagatggccacctcttcattcttagcaaggtgaagatatgccttttaccattaggatttgcggcagggacaatgaggcattggtttgactttggaaacaagatcatatgcactattcttgatcttctcaaagacagtttgaaaactttattggatgctgttgatgatggtaacttggatcgatattgcattcgaataacagaatattcaaagaacatagtgctttcaggatgtccccaagtaactacagcattcttgtacatatctgttctccctaatgatctgagtgtttcattgaagagaaggatagtgagttcatacacccaggttgatcatcaaaccttcgttctttatgaggaattagagaaggctactaaaaccttatcatttaagaatgtacacatggtggatatttcaaaatgtccaaacgttcattttggcgcagcaattgactggttgaagttgggttttccagaattaagggtattcagggtttcacattgtttatcatttcaatttgatgatttactatatctgttaatgagatgtccatggattgatgaaattgatatgactattgatacaagcactgtaacacccagacattcagtaatctcgtctagttctgaagtcctaagcaaggcaaaaccaaatcagaaaagatatggcatacattgttcagcatatgacaggcaaccaaattcggttttcttaaatatatcaagattgacattggaaggcagaaatgatattgatgcgcgtgtgcagatatggacttgttggagatatctgtcctgaaaaattctctgtgctatataaacattagaaactgcttcctgttgacggatgatggtatttctaaccttctgatgaagtgtacaaagatccattcgatggttctttcttatacttcttttggaaatcgatcaattcaaatgctatgcgctgccaatccttctggccacaacagtggacatgctcatgttatggcatcttatatgcaagaattacatctggatggctgcaaaggtattgactctgttgctttgtcgcagctagtgagcattataagtatcacaaagtttttgagcttaagggaaacatcacttacagatggtgcactctgcaagtttgttggctctagtctggagtatcttgacgtttcagagactgtgatttctatggtatcattagcaccagttattcaaagaaactgtaaattgaactgtctgaaaacagctggatgctgtagtcttctgttgcaatgtgctaatgtagaacatatcaatggtaacaagtatggagattttctacaggagttaggaactacctactgtctggaggatgttgaaatgggctggggattttgccctattcgaatcgaagaccttgttccttcttttagtaaagtaaggaagatgaaaattggtctcggcacatcattagcggagaatgttctgtgtgctcttcctatgatttgcccattcctcgagtctttgattctaaggtttcaggtgatatctgacagagttgttagacgtctattggaatcagcaacaaatcttcaggtgctttgcctgcactattgtcttggaagtttaacttcatttagtttccaaacaaaggcacctgcattaagagtattgcggcttcattgggtaacttcatggcttacaaatgatgacttgacaatccttacagagaattgcaatttggctgaactttcactttctggttgcaaacttcttgactccagctctcaagacattatctcatctgggtggccaaacttggcacttttacaccttgaggaatgtggtaaagtaactgttgaaggggtttcttcttttttcaactgtaaggctttggaagacgtcctactacggcacacggtgagtatgaaaaatatcgtagcaggttcttggtatatagttctggtgaatcttaaaacacaacgtagaaccatactaaatgacgtgacatggctacagctgaaacaaaatttcaccatgctgttgcaaaattgcagtccatctgtgcatgtcatttccaggacttctaccggtgtaacttttctccgttgaaaaagttgaattgttgattcacttgattggttatatagtttctgagagttgggaaccgcagggtaggggcatcggaaggagcatcatagacgatgctatcagagagttaccactactgcggaagctggctttggatctttgcgatgcctgtgaagacggttacgatagcccaaacgatgcggaagggaagatgattagaagtgtaaggatgagtcgatgcaagaagatggcggggtcgtgtttggaggtccccagacaagggtcttcaacttcaaggccggtgcacaaggacactgtagtgctggaatggagcagcagaatgttcacaaccaccatagtgaaagaaagagtgtgatgagcctcttctgtagttttgtccctgatgaagaacacaagagcaggccacaatatatatgacttgtatgaatggtctccccgcttctgattttgaatgctttgtatgtggacatatcctcgtgtgtgaatgtatttgtatggtatcaaacgaagatcatcttttgcagtcgtactgtacccatgcactcttatgttgatccacgaacaaagtttggaatttttaggtgaccgtgttcatgtttgaaaattattgttgtactagtccttggtaaaataaaggaggcaaggcaggagccaaaaaaaaagacaaaaaacttaat

SEQ ID NO: 35278 - DNA, 3212 bp, Zea Mays
gagtaaccaaaccaagcaccacgcgcggccatggccttccccgccgacgcgctggttctagagatcaccgacacatcatcctccgccaccgccgccgccgcccgtgctccatcctcaccttctcccccgccgctgtccatctccgacctcgcgcgcttcgacccgctcccatccccaaccgttgccgttcgcgtcgaccggcacaggctaatcgagagctcctcctacttccgcgcgctcctcggcggcagcttcagtgaatccggcagagagcatgtgcgtgtgggctgcaatttggaggctgctgtgcaagtgctgcgctacctttttgagccttccgagagctttaacatcacgcacaacaatttcctccccctgttggagggagctttgtttcttgctgttgagagccttctagtggagtgtcaaagatggttcggcaccatagcctctcaaacttctgccatgtcagttccattagatttcataattgaagtctggtactttgctgaagagcatggtgttacttttgttcaagacatttgccaaaaatttctagctcagaattttgcacatgctatctcaggaaggtcatttaataaaataccttatgatttgctatgttcagcgatcaaatgtccacatctgacagtggatagtgaaaaacaattgtgtgaagcaattttgtattgggtttcagaaaatatgaaagcctgtgaacaatcaaaccccaactcagtagatggccacctcttcattcttagcaagcaggtgaagatatgccttttaccattaggatttgcggcagggacaatgaggcattggtttgactttggaaacaagatcatatgcactattcttgatcttctcaaagacagtttgaaaactttattggatgctgttgatgatggtaacttggatcgatattgcattcgaataacagaatattcaaagaacatagtgctttcaggatgtccccaagtaactacagcattcttgtacatatctgttctccctaatgatctgagtgtttcattgaagagaaggatagtgagttcatacacccaggttgatcatcaaaccttcgttctttatgaggaattagagaaggctactaaaaccttatcatttaagaatgtacacatggtggatatttcaaaatgtccaaacgttcattttggcgcagcaattgactggttgaagttgggttttccagaattaagggtattcagggtttcacattgtttatcatttcaatttgatgatttactatatctgttaatgagatgtccatggattgatgaaattgatatgactattgatacaagcactgtaacacccagacattcagtaatctcgtctagttctgaagtcctaagcaaggcaaaaccaaatcagaaaagatatggcatacattgttcagcatatgacaggcaaccaaattcggttttcttaaatatatcaagattgacattggaaggcagaaatgatattgatgatatggacttgttggagatatctgtcctgaaaaattctctgtgctatataaacattagaaactgcttcctgttgacggatgatggtatttctaaccttctgatgaagtgtacaaagatccattcgatggttctttcttatacttcttttggaaatcgatcaattcaaatgctatgcgctgccaatccttctggccacaacagtggacatgctcatgttatggcatcttatatgcaagaattacatctggatggctgcaaagctagtgagcattataagtatcacaaagtttttgagcttaagggaaacatcacttacagatggtgcactctgcaagtttgttggctctagtctggagtatcttgacgtttcagagactgtgatttctatggtatcattagcaccagttattcaaagaaactgtaaattgaactgtctgaaaacagctggatgctgtagtcttctgttgcaatgtgctaatgtagaacatatcaatggtaacaagtatggagattttctacaggagttaggaactacctactgtctggaggatgttgaaatgggctggggattttgccctattcgaatcgaagaccttgttccttcttttagtaaagtaaggaagatgaaaattggtctcggcacatcattagcggagaatgttctgtgtgctcttcctatgatttgcccattcctcgagtctttgattctaaggtttcaggtgatatctgacagagttgttagacgtctattggaatcagcaacaaatcttcaggtgctttgcctgcactattgtcttggaagtttaacttcatttagtttccaaacaaaggcacctgcattaagagtattgcggcttcattgggtaacttcatggcttacaaatgatgacttgacaatccttacagagaattgcaatttggctgaactttcactttctggttgcaaacttcttgactccagctctcaagacattatctcatctgggtggccaaacttggcacttttacaccttgaggaatgtggtaaagtaactgttgaaggggtttcttcttttttcaactgtaaggctttggaagacgtcctactacggcacacgggtaggggcatcggaaggagcatcatagacgatgctatcagagagttaccactactgcggaagctggctttggatctttgcgatgcctgtgaagacggttacgatagcccaaacgatgcggaagggaagatgattagaagtgtaaggatgagtcgatgcaagaagatggcggggtcgtgtttggaggtccccagacaagggtcttcaacttcaaggccggtgcacaaggacactgtagtgctggaatggagcagcagaatgttcacaaccaccatagtgaaagaaagagtgtgatgagcctcttctgtagttttgtccctgatgaagaacacaagagcaggccacaatatatatgacttgtatgaatggtctccccgcttctgattttgaatgctttgtatgtggacatatcctcgtgtgtgaatgtatttgtatggtatcaaacgaagatcatcttttgcagtcgtactgtacccatgcactcttatgttgatccacgaacaaagtttggaatttttaggtgaccgtgttcatgtttgaaaattattgttgtactagtccttggtaaaataaaggaggcaaggcaggagccaaaaaaaaagacaaaaaacttaat

SEQ ID NO: 35279 - DNA, 3209 bp, Zea Mays
gagtaaccaaaccaagcaccacgcgcggccatggccttccccgccgacgcgctggttctagagatcaccgacacatcatcctccgccaccgccgccgccgcccgtgctccatcctcaccttctcccccgccgctgtccatctccgacctcgcgcgcttcgacccgctcccatccccaaccgttgccgttcgcgtcgaccggcacaggctaatcgagagctcctcctacttccgcgcgctcctcggcggcagcttcagtgaatccggcagagagcatgtgcgtgtgggctgcaatttggaggctgctgtgcaagtgctgcgctacctttttgagccttccgagagctttaacatcacgcacaacaatttcctccccctgttggagggagctttgtttcttgctgttgagagccttctagtggagtgtcaaagatggttcggcaccatagcctctcaaacttctgccatgtcagttccattagatttcataattgaagtctggtactttgctgaagagcatggtgttacttttgttcaagacatttgccaaaaatttctagctcagaattttgcacatgctatctcaggaaggtcatttaataaaataccttatgatttgctatgttcagcgatcaaatgtccacatctgacagtggatagtgaaaaacaattgtgtgaagcaattttgtattgggtttcagaaaatatgaaagcctgtgaacaatcaaaccccaactcagtagatggccacctcttcattcttagcaaggtgaagatatgccttttaccattaggatttgcggcagggacaatgaggcattggtttgactttggaaacaagatcatatgcactattcttgatcttctcaaagacagtttgaaaactttattggatgctgttgatgatggtaacttggatcgatattgcattcgaataacagaatattcaaagaacatagtgctttcaggatgtccccaagtaactacagcattcttgtacatatctgttctccctaatgatctgagtgtttcattgaagagaaggatagtgagttcatacacccaggttgatcatcaaaccttcgttctttatgaggaattagagaaggctactaaaaccttatcatttaagaatgtacacatggtggatatttcaaaatgtccaaacgttcattttggcgcagcaattgactggttgaagttgggttttccagaattaagggtattcagggtttcacattgtttatcatttcaatttgatgatttactatatctgttaatgagatgtccatggattgatgaaattgatatgactattgatacaagcactgtaacacccagacattcagtaatctcgtctagttctgaagtcctaagcaaggcaaaaccaaatcagaaaagatatggcatacattgttcagcatatgacaggcaaccaaattcggttttcttaaatatatcaagattgacattggaaggcagaaatgatattgatgatatggacttgttggagatatctgtcctgaaaaattctctgtgctatataaacattagaaactgcttcctgttgacggatgatggtatttctaaccttctgatgaagtgtacaaagatccattcgatggttctttcttatacttcttttggaaatcgatcaattcaaatgctatgcgctgccaatccttctggccacaacagtggacatgctcatgttatggcatcttatatgcaagaattacatctggatggctgcaaagctagtgagcattataagtatcacaaagtttttgagcttaagggaaacatcacttacagatggtgcactctgcaagtttgttggctctagtctggagtatcttgacgtttcagagactgtgatttctatggtatcattagcaccagttattcaaagaaactgtaaattgaactgtctgaaaacagctggatgctgtagtcttctgttgcaatgtgctaatgtagaacatatcaatggtaacaagtatggagattttctacaggagttaggaactacctactgtctggaggatgttgaaatgggctggggattttgccctattcgaatcgaagaccttgttccttcttttagtaaagtaaggaagatgaaaattggtctcggcacatcattagcggagaatgttctgtgtgctcttcctatgatttgcccattcctcgagtctttgattctaaggtttcaggtgatatctgacagagttgttagacgtctattggaatcagcaacaaatcttcaggtgctttgcctgcactattgtcttggaagtttaacttcatttagtttccaaacaaaggcacctgcattaagagtattgcggcttcattgggtaacttcatggcttacaaatgatgacttgacaatccttacagagaattgcaatttggctgaactttcactttctggttgcaaacttcttgactccagctctcaagacattatctcatctgggtggccaaacttggcacttttacaccttgaggaatgtggtaaagtaactgttgaaggggtttcttcttttttcaactgtaaggctttggaagacgtcctactacggcacacgggtaggggcatcggaaggagcatcatagacgatgctatcagagagttaccactactgcggaagctggctttggatctttgcgatgcctgtgaagacggttacgatagcccaaacgatgcggaagggaagatgattagaagtgtaaggatgagtcgatgcaagaagatggcggggtcgtgtttggaggtccccagacaagggtcttcaacttcaaggccggtgcacaaggacactgtagtgctggaatggagcagcagaatgttcacaaccaccatagtgaaagaaagagtgtgatgagcctcttctgtagttttgtccctgatgaagaacacaagagcaggccacaatatatatgacttgtatgaatggtctccccgcttctgattttgaatgctttgtatgtggacatatcctcgtgtgtgaatgtatttgtatggtatcaaacgaagatcatcttttgcagtcgtactgtacccatgcactcttatgttgatccacgaacaaagtttggaatttttaggtgaccgtgttcatgtttgaaaattattgttgtactagtccttggtaaaataaaggaggcaaggcaggagccaaaaaaaaagacaaaaaacttaat

SEQ ID NO: 35280 - DNA, 3438 bp, Zea Mays
gagtaaccaaaccaagcaccacgcgcggccatggccttccccgccgacgcgctggttctagagatcaccgacacatcatcctccgccaccgccgccgccgcccgtgctccatcctcaccttctcccccgccgctgtccatctccgacctcgcgctaatcgagagctcctcctacttccgcgcgctcctcggcggcagcttcagtgaatccggcagagagcatgtgcgtgtgggctgcaatttggaggctgctgtgcaagtgctgcgctacctttttgagccttccgagagctttaacatcacgcacaacaatttcctccccctgttggagggagctttgtttcttgctgttgagagccttctagtggagtgtcaaagatggttcggcaccatagcctctcaaacttctgccatgtcagttccattagatttcataattgaagtctggtactttgctgaagagcatggtgttacttttgttcaagacatttgccaaaaatttctagctcagaattttgtaggcacatgctatctcaggaaggtcatttaataaaataccttatgatttgctatgttcagcgatcaaatgtccacatctgacagtggatagtgaaaaacaattgtgtgaagcaattttgtattgggtttcagaaaatatgaaagcctgtgaacaatcaaaccccaactcagtagatggccacctcttcattcttagcaaggtgaagatatgccttttaccattaggatttgcggcagggacaatgaggcattggtttgactttggaaacaagatcatatgcactattcttgatcttctcaaagacagtttgaaaactttattggatgctgttgatgatggtaacttggatcgatattgcattcgaataacagaatattcaaagaacatagtgctttcaggatgtccccaagtaactacagcattcttgtacatatctgttctccctaatgatctgagtgtttcattgaagagaaggatagtgagttcatacacccaggttgatcatcaaaccttcgttctttatgaggaattagagaaggctactaaaaccttatcatttaagaatgtacacatggtggatatttcaaaatgtccaaacgttcattttggcgcagcaattgactggttgaagttgggttttccagaattaagggtattcagggtttcacattgtttatcatttcaatttgatgatttactatatctgttaatgagatgtccatggattgatgaaattgatatgactattgatacaagcactgtaacacccagacattcagtaatctcgtctagttctgaagtcctaagcaaggcaaaaccaaatcagaaaagatatggcatacattgttcagcatatgacaggcaaccaaattcggttttcttaaatatatcaagattgacattggaaggcagaaatgatattgatgatatggacttgttggagatatctgtcctgaaaaattctctgtgctatataaacattagaaactgcttcctgttgacggatgatggtatttctaaccttctgatgaagtgtacaaagatccattcgatggttctttcttatacttcttttggaaatcgatcaattcaaatgctatgcgctgccaatccttctggccacaacagtggacatgctcatgttatggcatcttatatgcaagaattacatctggatggctgcaaaggtattgactctgttgctttgtcgcagctagtgagcattataagtatcacaaagtttttgagcttaagggaaacatcacttacagatggtgcactctgcaagtttgttggctctagtctggagtatcttgacgtttcagagactgtgatttctatggtatcattagcaccagttattcaaagaaactgtaaattgaactgtctgaaaacagctggatgctgtagtcttctgttgcaatgtgctaatgtagaacatatcaatggtaacaagtatggagattttctacaggagttaggaactacctactgtctggaggatgttgaaatgggctggggattttgccctattcgaatcgaagaccttgttccttcttttagtaaagtaaggaagatgaaaattggtctcggcacatcattagcggagaatgttctgtgtgctcttcctatgatttgcccattcctcgagtctttgattctaaggtttcaggtgatatctgacagagttgttagacgtctattggaatcagcaacaaatcttcaggtgctttgcctgcactattgtcttggaagtttaacttcatttagtttccaaacaaaggcacctgcattaagagtattgcggcttcattgggtaacttcatggcttacaaatgatgacttgacaatccttacagagaattgcaatttggctgaactttcactttctggttgcaaacttcttgactccagctctcaagacattatctcatctgggtggccaaacttggcacttttacaccttgaggaatgtggtaaagtaactgttgaaggggtttcttcttttttcaactgtaaggctttggaagacgtcctactacggcacacggtgagtatgaaaaatatcgtagcaggttcttggtatatagttctggtgaatcttaaaacacaacgtagaaccatactaaatgacgtgacatggctacagctgaaacaaaatttcaccatgctgttgcaaaattgcagtccatctgtgcatgtcatttccaggacttctaccggtgtaacttttctccgttgaaaaagttgaattgttgattcacttgattggttatatagtttctgagagttgggaaccgcagggtaggggcatcggaaggagcatcatagacgatgctatcagagagttaccactactgcggaagctggctttggatctttgcgatgcctgtgaagacggttacgatagcccaaacgatgcggaagggaagatgattagaagtgtaaggatgagtcgatgcaagaagatggcggggtcgtgtttggaggtccccagacaagggtcttcaacttcaaggccggtgcacaaggacactgtagtgctggaatggagcagcagaatgttcacaaccaccatagtgaaagaaagagtgtgatgagcctcttctgtagttttgtccctgatgaagaacacaagagcaggccacaatatatatgacttgtatgaatggtctccccgcttctgattttgaatgctttgtatgtggacatatcctcgtgtgtgaatgtatttgtatggtatcaaacgaagatcatcttttgcagtcgtactgtacccatgcactcttatgttgatccacgaacaaagtttggaatttttaggtgaccgtgttcatgtttgaaaattattgttgtactagtccttggtaaaataaaggaggcaaggcaggagccaaaaaaaaagacaaaaaacttaat

SEQ ID NO: 35281 - DNA, 3670 bp, Zea Mays
gagtaaccaaaccaagcaccacgcgcggccatggccttccccgccgacgcgctggttctagagatcaccgacacatcatcctccgccaccgccgccgccgcccgtgctccatcctcaccttctcccccgccgctgtccatctccgacctcgcgctaatcgagagctcctcctacttccgcgcgctcctcggcggcagcttcagtgaatccggcagagagcatgtgcgtgtgggctgcaatttggaggctgctgtgcaagtgctgcgctacctttttgagccttccgagagctttaacatcacgcacaacaatttcctccccctgttggagggagctttgtttcttgctgttgagagccttctagtggagtgtcaaagatggttcggcaccatagcctctcaaacttctgccatgtcagttccattagatttcataattgaagtctggtactttgctgaagagcatggtgttacttttgttcaagacatttgccaaaaatttctagctcagaattttgcacatgctatctcaggaaggtcatttaataaaataccttatgatttgctatgttcagcgatcaaatgtccacatctgacagtggatagtgaaaaacaattgtgtgaagcaattttgtattgggtttcagaaaatatgaaagcctgtgaacaatcaaaccccaactcagtagatggccacctcttcattcttagcaagcaggtgaagatatgccttttaccattaggatttgcggcagggacaatgaggcattggtttgactttggaaacaagatcatatgcactattcttgatcttctcaaagacagtttgaaaactttattggatgctgttgatgatggtaacttggatcgatattgcattcgaataacagaatattcaaagaacatagtgctttcaggatgtccccaagtaactacagcattcttgtacatatctgttctccctaatgatctgagtgtttcattgaagagaaggatagtgagttcatacacccaggttgatcatcaaaccttcgttctttatgaggaattagagaaggctactaaaaccttatcatttaagaatgtacacatggtggatatttcaaaatgtccaaacgttcattttggcgcagcaattgactggttgaagttgggttttccagaattaagggtattcagggtttcacattgtttatcatttcaatttgatgatttactatatctgttaatgagatgtccatggattgatgaaattgatatgactattgatacaagcactgtaacacccagacattcagtaatctcgtctagttctgaagtcctaagcaaggcaaaaccaaatcagaaaagatatggcatacattgttcagcatatgacaggcaaccaaattcggttttcttaaatatatcaagattgacattggaaggcagaaatgatattgatgatatggacttgttggagatatctgtcctgaaaaattctctgtgctatataaacattagaaactgcttcctgttgacggatgatggtatttctaaccttctgatgaagtgtacaaagatccattcgatggttctttcttatacttcttttggaaatcgatcaattcaaatgctatgcgctgccaatccttctggccacaacagtggacatgctcatgttatggcatcttatatgcaagaattacatctggatggctgcaaaggtattgactctgttgctttgtcgcagctagtgagcattataagtatcacaaagtttttgagcttaagggaaacatcacttacagatggtgcactctgcaagtttgttggctctagtctggagtatcttgacgtttcagagactgtggtgcgatactgattatgtaatttagttttgtgcttctaataatcaagcactacaattgaccaattgatgaaacattcatactggaacattcactgagctaggagactattgatgagtaatacatagtgtgctgggggctattatttctattatctggttgatatgttatactcctatactgtaggcagggtatagacgtatattgtgttcatgaacttttctgctactttattttagtatgacagctatcacttttttatcttcgctacctccagagggcaaaccccaaaagtttatgattatgtttttatttttgcataccatattagagtgcttaattctttttttctgtccattgacttgcagatttctatggtatcattagcaccagttattcaaagaaactgtaaattgaactgtctgaaaacagctggatgctgtagtcttctgttgcaatgtgctaatgtagaacatatcaatggtaacaagtatggagattttctacaggagttaggaactacctactgtctggaggatgttgaaatgggctggggattttgccctattcgaatcgaagaccttgttccttcttttagtaaagtaaggaagatgaaaattggtctcggcacatcattagcggagaatgttctgtgtgctcttcctatgatttgcccattcctcgagtctttgattctaaggtttcaggtgatatctgacagagttgttagacgtctattggaatcagcaacaaatcttcagagaattgcaatttggctgaactttcactttctggttgcaaacttcttgactccagctctcaagacattatctcatctgggtggccaaacttggcacttttacaccttgaggaatgtggtaaagtaactgttgaaggggtttcttcttttttcaactgtaaggctttggaagacgtcctactacggcacacggtgagtatgaaaaatatcgtagcaggttcttggtatatagttctggtgaatcttaaaacacaacgtagaaccatactaaatgacgtgacatggctacagctgaaacaaaatttcaccatgctgttgcaaaattgcagtccatctgtgcatgtcatttccaggacttctaccggtgtaacttttctccgttgaaaaagttgaattgttgattcacttgattggttatatagtttctgagagttgggaaccgcagggtaggggcatcggaaggagcatcatagacgatgctatcagagagttaccactactgcggaagctggctttggatctttgcgatgcctgtgaagacggttacgatagcccaaacgatgcggaagggaagatgattagaagtgtaaggatgagtcgatgcaagaagatggcggggtcgtgtttggaggtccccagacaagggtcttcaacttcaaggccggtgcacaaggacactgtagtgctggaatggagcagcagaatgttcacaaccaccatagtgaaagaaagagtgtgatgagcctcttctgtagttttgtccctgatgaagaacacaagagcaggccacaatatatatgacttgtatgaatggtctccccgcttctgattttgaatgctttgtatgtggacatatcctcgtgtgtgaatgtatttgtatggtatcaaacgaagatcatcttttgcagtcgtactgtacccatgcactcttatgttgatccacgaacaaagtttggaatttttaggtgaccgtgttcatgtttgaaaattattgttgtactagtccttggtaaaataaaggaggcaaggcaggagccaaaaaaaaagacaaaaaacttaat

SEQ ID NO: 35282 - DNA, 3213 bp, Zea Mays
gagtaaccaaaccaagcaccacgcgcggccatggccttccccgccgacgcgctggttctagagatcaccgacacatcatcctccgccaccgccgccgccgcccgtgctccatcctcaccttctcccccgccgctgtccatctccgacctcgcgcgcttcgacccgctcccatccccaaccgttgccgttcgcgtcgaccggcacaggctaatcgagagctcctcctacttccgcgcgctcctcggcggcagcttcagtgaatccggcagagagcatgtgcgtgtgggctgcaatttggaggctgctgtgcaagtgctgcgctacctttttgagccttccgagagctttaacatcacgcacaacaatttcctccccctgttggagggagctttgtttcttgctgttgagagccttctagtggagtgtcaaagatggttcggcaccatagcctctcaaacttctgccatgtcagttccattagatttcataattgaagtctggtactttgctgaagagcatggtgttacttttgttcaagacatttgccaaaaatttctagctcagaattttgtaggcacatgctatctcaggaaggtcatttaataaaataccttatgatttgctatgttcagcgatcaaatgtccacatctgacagtggatagtgaaaaacaattgtgtgaagcaattttgtattgggtttcagaaaatatgaaagcctgtgaacaatcaaaccccaactcagtagatggccacctcttcattcttagcaaggtgaagatatgccttttaccattaggatttgcggcagggacaatgaggcattggtttgactttggaaacaagatcatatgcactattcttgatcttctcaaagacagtttgaaaactttattggatgctgttgatgatggtaacttggatcgatattgcattcgaataacagaatattcaaagaacatagtgctttcaggatgtccccaagtaactacagcattcttgtacatatctgttctccctaatgatctgagtgtttcattgaagagaaggatagtgagttcatacacccaggttgatcatcaaaccttcgttctttatgaggaattagagaaggctactaaaaccttatcatttaagaatgtacacatggtggatatttcaaaatgtccaaacgttcattttggcgcagcaattgactggttgaagttgggttttccagaattaagggtattcagggtttcacattgtttatcatttcaatttgatgatttactatatctgttaatgagatgtccatggattgatgaaattgatatgactattgatacaagcactgtaacacccagacattcagtaatctcgtctagttctgaagtcctaagcaaggcaaaaccaaatcagaaaagatatggcatacattgttcagcatatgacaggcaaccaaattcggttttcttaaatatatcaagattgacattggaaggcagaaatgatattgatgatatggacttgttggagatatctgtcctgaaaaattctctgtgctatataaacattagaaactgcttcctgttgacggatgatggtatttctaaccttctgatgaagtgtacaaagatccattcgatggttctttcttatacttcttttggaaatcgatcaattcaaatgctatgcgctgccaatccttctggccacaacagtggacatgctcatgttatggcatcttatatgcaagaattacatctggatggctgcaaagctagtgagcattataagtatcacaaagtttttgagcttaagggaaacatcacttacagatggtgcactctgcaagtttgttggctctagtctggagtatcttgacgtttcagagactgtgatttctatggtatcattagcaccagttattcaaagaaactgtaaattgaactgtctgaaaacagctggatgctgtagtcttctgttgcaatgtgctaatgtagaacatatcaatggtaacaagtatggagattttctacaggagttaggaactacctactgtctggaggatgttgaaatgggctggggattttgccctattcgaatcgaagaccttgttccttcttttagtaaagtaaggaagatgaaaattggtctcggcacatcattagcggagaatgttctgtgtgctcttcctatgatttgcccattcctcgagtctttgattctaaggtttcaggtgatatctgacagagttgttagacgtctattggaatcagcaacaaatcttcaggtgctttgcctgcactattgtcttggaagtttaacttcatttagtttccaaacaaaggcacctgcattaagagtattgcggcttcattgggtaacttcatggcttacaaatgatgacttgacaatccttacagagaattgcaatttggctgaactttcactttctggttgcaaacttcttgactccagctctcaagacattatctcatctgggtggccaaacttggcacttttacaccttgaggaatgtggtaaagtaactgttgaaggggtttcttcttttttcaactgtaaggctttggaagacgtcctactacggcacacgggtaggggcatcggaaggagcatcatagacgatgctatcagagagttaccactactgcggaagctggctttggatctttgcgatgcctgtgaagacggttacgatagcccaaacgatgcggaagggaagatgattagaagtgtaaggatgagtcgatgcaagaagatggcggggtcgtgtttggaggtccccagacaagggtcttcaacttcaaggccggtgcacaaggacactgtagtgctggaatggagcagcagaatgttcacaaccaccatagtgaaagaaagagtgtgatgagcctcttctgtagttttgtccctgatgaagaacacaagagcaggccacaatatatatgacttgtatgaatggtctccccgcttctgattttgaatgctttgtatgtggacatatcctcgtgtgtgaatgtatttgtatggtatcaaacgaagatcatcttttgcagtcgtactgtacccatgcactcttatgttgatccacgaacaaagtttggaatttttaggtgaccgtgttcatgtttgaaaattattgttgtactagtccttggtaaaataaaggaggcaaggcaggagccaaaaaaaaagacaaaaaacttaat

SEQ ID NO: 35283 - DNA, 3326 bp, Zea Mays
gagtaaccaaaccaagcaccacgcgcggccatggccttccccgccgacgcgctggttctagagatcaccgacacatcatcctccgccaccgccgccgccgcccgtgctccatcctcaccttctcccccgccgctgtccatctccgacctcgcgctaatcgagagctcctcctacttccgcgcgctcctcggcggcagcttcagtgaatccggcagagagcatgtgcgtgtgggctgcaatttggaggctgctgtgcaagtgctgcgctacctttttgagccttccgagagctttaacatcacgcacaacaatttcctccccctgttggagggagctttgtttcttgctgttgagagccttctagtggagtgtcaaagatggttcggcaccatagcctctcaaacttctgccatgtcagttccattagatttcataattgaagtctggtactttgctgaagagcatggtgttacttttgttcaagacatttgccaaaaatttctagctcagaattttgcacatgctatctcaggaaggtcatttaataaaataccttatgatttgctatgttcagcgatcaaatgtccacatctgacagtggatagtgaaaaacaattgtgtgaagcaattttgtattgggtttcagaaaatatgaaagcctgtgaacaatcaaaccccaactcagtagatggccacctcttcattcttagcaagcaggtgaagatatgccttttaccattaggatttgcggcagggacaatgaggcattggtttgactttggaaacaagatcatatgcactattcttgatcttctcaaagacagtttgaaaactttattggatgctgttgatgatggtaacttggatcgatattgcattcgaataacagaatattcaaagaacatagtgctttcaggatgtccccaagtaactacagcattcttgtacatatctgttctccctaatgatctgagtgtttcattgaagagaaggatagtgagttcatacacccaggttgatcatcaaaccttcgttctttatgaggaattagagaaggctactaaaaccttatcatttaagaatgtacacatggtggatatttcaaaatgtccaaacgttcattttggcgcagcaattgactggttgaagttgggttttccagaattaagggtattcagggtttcacattgtttatcatttcaatttgatgatttactatatctgttaatgagatgtccatggattgatgaaattgatatgactattgatacaagcactgtaacacccagacattcagtaatctcgtctagttctgaagtcctaagcaaggcaaaaccaaatcagaaaagatatggcatacattgttcagcatatgacaggcaaccaaattcggttttcttaaatatatcaagattgacattggaaggcagaaatgatattgatgatatggacttgttggagatatctgtcctgaaaaattctctgtgctatataaacattagaaactgcttcctgttgacggatgatgttttatgtctgtcttccactacttagtcatgctggctaacattacatatatgtcaatgtgtaggtattgactctgttgctttgtcgcagctagtgagcattataagtatcacaaagtttttgagcttaagggaaacatcacttacagatggtgcactctgcaagtttgttggctctagtctggagtatcttgacgtttcagagactgtggtgcgatactgattatgtaatttagttttgtgcttctaataatcaagcactacaattgaccaattgatgaaacattcatactggaacattcactgagctaggagactattgatgagtaatacatagtgtgctgggggctattatttctattatctggttgatatgttatactcctatactgtaggcagggtatagacgtatattgtgttcatgaacttttctgctactttattttagtatgacagctatcacttttttatcttcgctacctccagagggcaaaccccaaaagtttatgattatgtttttatttttgcataccatattagagtgcttaattctttttttctgtccattgacttgcagatttctatggtatcattagcaccagttattcaaagaaactgtaaattgaactgtctgaaaacagctggatgctgtagtcttctgttgcaatgtgctaatgtagaacatatcaatggtaacaagtatggagattttctacaggagttaggaactacctactgtctggaggatgttgaaatgggctggggattttgccctattcgaatcgaagaccttgttccttcttttagtaaagtaaggaagatgaaaattggtctcggcacatcattagcggagaatgttctgtgtgctcttcctatgatttgcccattcctcgagtctttgattctaaggtttcaggtgatatctgacagagttgttagacgtctattggaatcagcaacaaatcttcagagaattgcaatttggctgaactttcactttctggttgcaaacttcttgactccagctctcaagacattatctcatctgggtggccaaacttggcacttttacaccttgaggaatgtggtaaagtaactgttgaaggggtttcttcttttttcaactgtaaggctttggaagacgtcctactacggcacacgtttctgagagttgggaaccgcagggtaggggcatcggaaggagcatcatagacgatgctatcagagagttaccactactgcggaagctggctttggatctttgcgatgcctgtgaagacggttacgatagcccaaacgatgcggaagggaagatgattagaagtgtaaggatgagtcgatgcaagaagatggcggggtcgtgtttggaggtccccagacaagggtcttcaacttcaaggccggtgcacaaggacactgtagtgctggaatggagcagcagaatgttcacaaccaccatagtgaaagaaagagtgtgatgagcctcttctgtagttttgtccctgatgaagaacacaagagcaggccacaatatatatgacttgtatgaatggtctccccgcttctgattttgaatgctttgtatgtggacatatcctcgtgtgtgaatgtatttgtatggtatcaaacgaagatcatcttttgcagtcgtactgtacccatgcactcttatgttgatccacgaacaaagtttggaatttttaggtgaccgtgttcatgtttgaaaattattgttgtactagtccttggtaaaataaaggaggcaaggcaggagccaaaaaaaaagacaaaaaacttaat

SEQ ID NO: 35284 - DNA, 3235 bp, Zea Mays
gagtaaccaaaccaagcaccacgcgcggccatggccttccccgccgacgcgctggttctagagatcaccgacacatcatcctccgccaccgccgccgccgcccgtgctccatcctcaccttctcccccgccgctgtccatctccgacctcgcgcgcttcgacccgctcccatccccaaccgttgccgttcgcgtcgaccggcacaggctaatcgagagctcctcctacttccgcgcgctcctcggcggcagcttcagtgaatccggcagagagcatgtgcgtgtgggctgcaatttggaggctgctgtgcaagtgctgcgctacctttttgagccttccgagagctttaacatcacgcacaacaatttcctccccctgttggagggagctttgtttcttgctgttgagagccttctagtggagtgtcaaagatggttcggcaccatagcctctcaaacttctgccatgtcagttccattagatttcataattgaagtctggtactttgctgaagagcatggtgttacttttgttcaagacatttgccaaaaatttctagctcagaattttgcacatgctatctcaggaaggtcatttaataaaataccttatgatttgctatgttcagcgatcaaatgtccacatctgacagtggatagtgaaaaacaattgtgtgaagcaattttgtattgggtttcagaaaatatgaaagcctgtgaacaatcaaaccccaactcagtagatggccacctcttcattcttagcaaggtgaagatatgccttttaccattaggatttgcggcagggacaatgaggcattggtttgactttggaaacaagatcatatgcactattcttgatcttctcaaagacagtttgaaaactttattggatgctgttgatgatggtaacttggatcgatattgcattcgaataacagaatattcaaagaacatagtgctttcaggatgtccccaagtaactacagcattcttgtacatatctgttctccctaatgatctgagtgtttcattgaagagaaggatagtgagttcatacacccaggttgatcatcaaaccttcgttctttatgaggaattagagaaggctactaaaaccttatcatttaagaatgtacacatggtggatatttcaaaatgtccaaacgttcattttggcgcagcaattgactggttgaagttgggttttccagaattaagggtattcagggtttcacattgtttatcatttcaatttgatgatttactatatctgttaatgagatgtccatggattgatgaaattgatatgactattgatacaagcactgtaacacccagacattcagtaatctcgtctagttctgaagtcctaagcaaggcaaaaccaaatcagaaaagatatggcatacattgttcagcatatgacaggcaaccaaattcggttttcttaaatatatcaagattgacattggaaggcagaaatgatattgatgatatggacttgttggagatatctgtcctgaaaaattctctgtgctatataaacattagaaactgcttcctgttgacggatgatggtatttctaaccttctgatgaagtgtacaaagatccattcgatggttctttcttatacttcttttggaaatcgatcaattcaaatgctatgcgctgccaatccttctggccacaacagtggacatgctcatgttatggcatcttatatgcaagaattacatctggatggctgcaaaggtattgactctgttgctttgtcgcagctagtgagcattataagtatcacaaagtttttgagcttaagggaaacatcacttacagatggtgcactctgcaagtttgttggctctagtctggagtatcttgacgtttcagagactgtgatttctatggtatcattagcaccagttattcaaagaaactgtaaattgaactgtctgaaaacagctggatgctgtagtcttctgttgcaatgtgctaatgtagaacatatcaatggtaacaagtatggagattttctacaggagttaggaactacctactgtctggaggatgttgaaatgggctggggattttgccctattcgaatcgaagaccttgttccttcttttagtaaagtaaggaagatgaaaattggtctcggcacatcattagcggagaatgttctgtgtgctcttcctatgatttgcccattcctcgagtctttgattctaaggtttcaggtgatatctgacagagttgttagacgtctattggaatcagcaacaaatcttcaggtgctttgcctgcactattgtcttggaagtttaacttcatttagtttccaaacaaaggcacctgcattaagagtattgcggcttcattgggtaacttcatggcttacaaatgatgacttgacaatccttacagagaattgcaatttggctgaactttcactttctggttgcaaacttcttgactccagctctcaagacattatctcatctgggtggccaaacttggcacttttacaccttgaggaatgtggtaaagtaactgttgaaggggtttcttcttttttcaactgtaaggctttggaagacgtcctactacggcacacgggtaggggcatcggaaggagcatcatagacgatgctatcagagagttaccactactgcggaagctggctttggatctttgcgatgcctgtgaagacggttacgatagcccaaacgatgcggaagggaagatgattagaagtgtaaggatgagtcgatgcaagaagatggcggggtcgtgtttggaggtccccagacaagggtcttcaacttcaaggccggtgcacaaggacactgtagtgctggaatggagcagcagaatgttcacaaccaccatagtgaaagaaagagtgtgatgagcctcttctgtagttttgtccctgatgaagaacacaagagcaggccacaatatatatgacttgtatgaatggtctccccgcttctgattttgaatgctttgtatgtggacatatcctcgtgtgtgaatgtatttgtatggtatcaaacgaagatcatcttttgcagtcgtactgtacccatgcactcttatgttgatccacgaacaaagtttggaatttttaggtgaccgtgttcatgtttgaaaattattgttgtactagtccttggtaaaataaaggaggcaaggcaggagccaaaaaaaaagacaaaaaacttaat

SEQ ID NO: 35285 - DNA, 3162 bp, Zea Mays
gagtaaccaaaccaagcaccacgcgcggccatggccttccccgccgacgcgctggttctagagatcaccgacacatcatcctccgccaccgccgccgccgcccgtgctccatcctcaccttctcccccgccgctgtccatctccgacctcgcgctaatcgagagctcctcctacttccgcgcgctcctcggcggcagcttcagtgaatccggcagagagcatgtgcgtgtgggctgcaatttggaggctgctgtgcaagtgctgcgctacctttttgagccttccgagagctttaacatcacgcacaacaatttcctccccctgttggagggagctttgtttcttgctgttgagagccttctagtggagtgtcaaagatggttcggcaccatagcctctcaaacttctgccatgtcagttccattagatttcataattgaagtctggtactttgctgaagagcatggtgttacttttgttcaagacatttgccaaaaatttctagctcagaattttgtagaaaatatgaaagcctgtgaacaatcaaaccccaactcagtagatggccacctcttcattcttagcaaggtgaagatatgccttttaccattaggatttgcggcagggacaatgaggcattggtttgactttggaaacaagatcatatgcactattcttgatcttctcaaagacagtttgaaaactttattggatgctgttgatgatggtaacttggatcgatattgcattcgaataacagaatattcaaagaacatagtgctttcaggatgtccccaagtaactacagcattcttgtacatatctgttctccctaatgatctgagtgtttcattgaagagaaggatagtgagttcatacacccaggttgatcatcaaaccttcgttctttatgaggaattagagaaggctactaaaaccttatcatttaagaatgtacacatggtggatatttcaaaatgtccaaacgttcattttggcgcagcaattgactggttgaagttgggttttccagaattaagggtattcagggtttcacattgtttatcatttcaatttgatgatttactatatctgttaatgagatgtccatggattgatgaaattgatatgactattgatacaagcactgtaacacccagacattcagtaatctcgtctagttctgaagtcctaagcaaggcaaaaccaaatcagaaaagatatggcatacattgttcagcatatgacaggcaaccaaattcggttttcttaaatatatcaagattgacattggaaggcagaaatgatattgatgatatggacttgttggagatatctgtcctgaaaaattctctgtgctatataaacattagaaactgcttcctgttgacggatgatggtatttctaaccttctgatgaagtgtacaaagatccattcgatggttctttcttatacttcttttggaaatcgatcaattcaaatgctatgcgctgccaatccttctggccacaacagtggacatgctcatgttatggcatcttatatgcaagaattacatctggatggctgcaaagatttctatggtatcattagcaccagttattcaaagaaactgtaaattgaactgtctgaaaacagctggatgctgtagtcttctgttgcaatgtgctaatgtagaacatatcaatggtaacaagtatggagattttctacaggagttaggaactacctactgtctggaggatgttgaaatgggctggggattttgccctattcgaatcgaagaccttgttccttcttttagtaaagtaaggaagatgaaaattggtctcggcacatcattagcggagaatgttctgtgtgctcttcctatgatttgcccattcctcgagtctttgattctaaggtttcaggtgatatctgacagagttgttagacgtctattggaatcagcaacaaatcttcaggtgctttgcctgcactattgtcttggaagtttaacttcatttagtttccaaacaaaggcacctgcattaagagtattgcggcttcattgggtaacttcatggcttacaaatgatgacttgacaatccttacagagaattgcaatttggctgaactttcactttctggttgcaaacttcttgactccagctctcaagacattatctcatctgggtggccaaacttggcacttttacaccttgaggaatgtggtaaagtaactgttgaaggggtttcttcttttttcaactgtaaggctttggaagacgtcctactacggcacacggtgagtatgaaaaatatcgtagcaggttcttggtatatagttctggtgaatcttaaaacacaacgtagaaccatactaaatgacgtgacatggctacagctgaaacaaaatttcaccatgctgttgcaaaattgcagtccatctgtgcatgtcatttccaggacttctaccggtgtaacttttctccgttgaaaaagttgaattgttgattcacttgattggttatatagtttctgagagttgggaaccgcagggtaggggcatcggaaggagcatcatagacgatgctatcagagagttaccactactgcggaagctggctttggatctttgcgatgcctgtgaagacggttacgatagcccaaacgatgcggaagggaagatgattagaagtgtaaggatgagtcgatgcaagaagatggcggggtcgtgtttggaggtccccagacaagggtcttcaacttcaaggccggtgcacaaggacactgtagtgctggaatggagcagcagaatgttcacaaccaccatagtgaaagaaagagtgtgatgagcctcttctgtagttttgtccctgatgaagaacacaagagcaggccacaatatatatgacttgtatgaatggtctccccgcttctgattttgaatgctttgtatgtggacatatcctcgtgtgtgaatgtatttgtatggtatcaaacgaagatcatcttttgcagtcgtactgtacccatgcactcttatgttgatccacgaacaaagtttggaatttttaggtgaccgtgttcatgtttgaaaattattgttgtactagtccttggtaaaataaaggaggcaaggcaggagccaaaaaaaaagacaaaaaacttaat

SEQ ID NO: 35286 - DNA, 3239 bp, Zea Mays
gagtaaccaaaccaagcaccacgcgcggccatggccttccccgccgacgcgctggttctagagatcaccgacacatcatcctccgccaccgccgccgccgcccgtgctccatcctcaccttctcccccgccgctgtccatctccgacctcgcgcgcttcgacccgctcccatccccaaccgttgccgttcgcgtcgaccggcacaggctaatcgagagctcctcctacttccgcgcgctcctcggcggcagcttcagtgaatccggcagagagcatgtgcgtgtgggctgcaatttggaggctgctgtgcaagtgctgcgctacctttttgagccttccgagagctttaacatcacgcacaacaatttcctccccctgttggagggagctttgtttcttgctgttgagagccttctagtggagtgtcaaagatggttcggcaccatagcctctcaaacttctgccatgtcagttccattagatttcataattgaagtctggtactttgctgaagagcatggtgttacttttgttcaagacatttgccaaaaatttctagctcagaattttgtaggcacatgctatctcaggaaggtcatttaataaaataccttatgatttgctatgttcagcgatcaaatgtccacatctgacagtggatagtgaaaaacaattgtgtgaagcaattttgtattgggtttcagaaaatatgaaagcctgtgaacaatcaaaccccaactcagtagatggccacctcttcattcttagcaaggtgaagatatgccttttaccattaggatttgcggcagggacaatgaggcattggtttgactttggaaacaagatcatatgcactattcttgatcttctcaaagacagtttgaaaactttattggatgctgttgatgatggtaacttggatcgatattgcattcgaataacagaatattcaaagaacatagtgctttcaggatgtccccaagtaactacagcattcttgtacatatctgttctccctaatgatctgagtgtttcattgaagagaaggatagtgagttcatacacccaggttgatcatcaaaccttcgttctttatgaggaattagagaaggctactaaaaccttatcatttaagaatgtacacatggtggatatttcaaaatgtccaaacgttcattttggcgcagcaattgactggttgaagttgggttttccagaattaagggtattcagggtttcacattgtttatcatttcaatttgatgatttactatatctgttaatgagatgtccatggattgatgaaattgatatgactattgatacaagcactgtaacacccagacattcagtaatctcgtctagttctgaagtcctaagcaaggcaaaaccaaatcagaaaagatatggcatacattgttcagcatatgacaggcaaccaaattcggttttcttaaatatatcaagattgacattggaaggcagaaatgatattgatgatatggacttgttggagatatctgtcctgaaaaattctctgtgctatataaacattagaaactgcttcctgttgacggatgatggtatttctaaccttctgatgaagtgtacaaagatccattcgatggttctttcttatacttcttttggaaatcgatcaattcaaatgctatgcgctgccaatccttctggccacaacagtggacatgctcatgttatggcatcttatatgcaagaattacatctggatggctgcaaaggtattgactctgttgctttgtcgcagctagtgagcattataagtatcacaaagtttttgagcttaagggaaacatcacttacagatggtgcactctgcaagtttgttggctctagtctggagtatcttgacgtttcagagactgtgatttctatggtatcattagcaccagttattcaaagaaactgtaaattgaactgtctgaaaacagctggatgctgtagtcttctgttgcaatgtgctaatgtagaacatatcaatggtaacaagtatggagattttctacaggagttaggaactacctactgtctggaggatgttgaaatgggctggggattttgccctattcgaatcgaagaccttgttccttcttttagtaaagtaaggaagatgaaaattggtctcggcacatcattagcggagaatgttctgtgtgctcttcctatgatttgcccattcctcgagtctttgattctaaggtttcaggtgatatctgacagagttgttagacgtctattggaatcagcaacaaatcttcaggtgctttgcctgcactattgtcttggaagtttaacttcatttagtttccaaacaaaggcacctgcattaagagtattgcggcttcattgggtaacttcatggcttacaaatgatgacttgacaatccttacagagaattgcaatttggctgaactttcactttctggttgcaaacttcttgactccagctctcaagacattatctcatctgggtggccaaacttggcacttttacaccttgaggaatgtggtaaagtaactgttgaaggggtttcttcttttttcaactgtaaggctttggaagacgtcctactacggcacacgggtaggggcatcggaaggagcatcatagacgatgctatcagagagttaccactactgcggaagctggctttggatctttgcgatgcctgtgaagacggttacgatagcccaaacgatgcggaagggaagatgattagaagtgtaaggatgagtcgatgcaagaagatggcggggtcgtgtttggaggtccccagacaagggtcttcaacttcaaggccggtgcacaaggacactgtagtgctggaatggagcagcagaatgttcacaaccaccatagtgaaagaaagagtgtgatgagcctcttctgtagttttgtccctgatgaagaacacaagagcaggccacaatatatatgacttgtatgaatggtctccccgcttctgattttgaatgctttgtatgtggacatatcctcgtgtgtgaatgtatttgtatggtatcaaacgaagatcatcttttgcagtcgtactgtacccatgcactcttatgttgatccacgaacaaagtttggaatttttaggtgaccgtgttcatgtttgaaaattattgttgtactagtccttggtaaaataaaggaggcaaggcaggagccaaaaaaaaagacaaaaaacttaat

SEQ ID NO: 35287 - DNA, 3109 bp, Zea Mays
gagtaaccaaaccaagcaccacgcgcggccatggccttccccgccgacgcgctggttctagagatcaccgacacatcatcctccgccaccgccgccgccgcccgtgctccatcctcaccttctcccccgccgctgtccatctccgacctcgcgcgcttcgacccgctcccatccccaaccgttgccgttcgcgtcgaccggcacaggctaatcgagagctcctcctacttccgcgcgctcctcggcggcagcttcagtgaatccggcagagagcatgtgcgtgtgggctgcaatttggaggctgctgtgcaagtgctgcgctacctttttgagccttccgagagctttaacatcacgcacaacaatttcctccccctgttggagggagctttgtttcttgctgttgagagccttctagtggagtgtcaaagatggttcggcaccatagcctctcaaacttctgccatgtcagttccattagatttcataattgaagtctggtactttgctgaagagcatggtgttacttttgttcaagacatttgccaaaaatttctagctcagaattttgtaggcacatgctatctcaggaaggtcatttaataaaataccttatgatttgctatgttcagcgatcaaatgtccacatctgacagtggatagtgaaaaacaattgtgtgaagcaattttgtattgggtttcagaaaatatgaaagcctgtgaacaatcaaaccccaactcagtagatggccacctcttcattcttagcaagcaggtgaagatatgccttttaccattaggatttgcggcagggacaatgaggcattggtttgactttggaaacaagatcatatgcactattcttgatcttctcaaagacagtttgaaaactttattggatgctgttgatgatggtaacttggatcgatattgcattcgaataacagaatattcaaagaacatagtgctttcaggatgtccccaagtaactacagcattcttgtacatatctgttctccctaatgatctgagtgtttcattgaagagaaggatagtgagttcatacacccaggttgatcatcaaaccttcgttctttatgaggaattagagaaggctactaaaaccttatcatttaagaatgtacacatggtggatatttcaaaatgtccaaacgttcattttggcgcagcaattgactggttgaagttgggttttccagaattaagggtattcagggtttcacattgtttatcatttcaatttgatgatttactatatctgttaatgagatgtccatggattgatgaaattgatatgactattgatacaagcactgtaacacccagacattcagtaatctcgtctagttctgaagtcctaagcaaggcaaaaccaaatcagaaaagatatggcatacattgttcagcatatgacaggcaaccaaattcggttttcttaaatatatcaagattgacattggaaggcagaaatgatattgatgatatggacttgttggagatatctgtcctgaaaaattctctgtgctatataaacattagaaactgcttcctgttgacggatgatggtatttctaaccttctgatgaagtgtacaaagatccattcgatggttctttcttatacttcttttggaaatcgatcaattcaaatgctatgcgctgccaatccttctggccacaacagtggacatgctcatgttatggcatcttatatgcaagaattacatctggatggctgcaaaggtattgactctgttgctttgtcgcagctagtgagcattataagtatcacaaagtttttgagcttaagggaaacatcacttacagatggtgcactctgcaagtttgttggctctagtctggagtatcttgacgtttcagagactgtgatttctatggtatcattagcaccagttattcaaagaaactgtaaattgaactgtctgaaaacagctggatgctgtagtcttctgttgcaatgtgctaatgtagaacatatcaatggtaacaagtatggagattttctacaggagttaggaactacctactgtctggaggatgttgaaatgggctggggattttgccctattcgaatcgaagaccttgttccttcttttagtaaagtaaggaagatgaaaattggtctcggcacatcattagcggagaatgttctgtgtgctcttcctatgatttgcccattcctcgagtctttgattctaaggtttcaggtgatatctgacagagttgttagacgtctattggaatcagcaacaaatcttcagagaattgcaatttggctgaactttcactttctggttgcaaacttcttgactccagctctcaagacattatctcatctgggtggccaaacttggcacttttacaccttgaggaatgtggtaaagtaactgttgaaggggtttcttcttttttcaactgtaaggctttggaagacgtcctactacggcacacgggtaggggcatcggaaggagcatcatagacgatgctatcagagagttaccactactgcggaagctggctttggatctttgcgatgcctgtgaagacggttacgatagcccaaacgatgcggaagggaagatgattagaagtgtaaggatgagtcgatgcaagaagatggcggggtcgtgtttggaggtccccagacaagggtcttcaacttcaaggccggtgcacaaggacactgtagtgctggaatggagcagcagaatgttcacaaccaccatagtgaaagaaagagtgtgatgagcctcttctgtagttttgtccctgatgaagaacacaagagcaggccacaatatatatgacttgtatgaatggtctccccgcttctgattttgaatgctttgtatgtggacatatcctcgtgtgtgaatgtatttgtatggtatcaaacgaagatcatcttttgcagtcgtactgtacccatgcactcttatgttgatccacgaacaaagtttggaatttttaggtgaccgtgttcatgtttgaaaattattgttgtactagtccttggtaaaataaaggaggcaaggcaggagccaaaaaaaaagacaaaaaacttaat

SEQ ID NO: 35288 - DNA, 3221 bp, Zea Mays
gagtaaccaaaccaagcaccacgcgcggccatggccttccccgccgacgcgctggttctagagatcaccgacacatcatcctccgccaccgccgccgccgcccgtgctccatcctcaccttctcccccgccgctgtccatctccgacctcgcgctaatcgagagctcctcctacttccgcgcgctcctcggcggcagcttcagtgaatccggcagagagcatgtgcgtgtgggctgcaatttggaggctgctgtgcaagtgctgcgctacctttttgagccttccgagagctttaacatcacgcacaacaatttcctccccctgttggaggtgctaccctaagtctccaacttcacttatcatccagggagctttgtttcttgctgttgagagccttctagtggagtgtcaaagatggttcggcaccatagcctctcaaacttctgccatgtcagttccattagatttcataattgaagtctggtactttgctgaagagcatggtgttacttttgttcaagacatttgccaaaaatttctagctcagaattttgcacatgctatctcaggaaggtcatttaataaaataccttatgatttgctatgttcagcgatcaaatgtccacatctgacagtggatagtgaaaaacaattgtgtgaagcaattttgtattgggtttcagaaaatatgaaagcctgtgaacaatcaaaccccaactcagtagatggccacctcttcattcttagcaagcaggtgaagatatgccttttaccattaggatttgcggcagggacaatgaggcattggtttgactttggaaacaagatcatatgcactattcttgatcttctcaaagacagtttgaaaactttattggatgctgttgatgatggtaacttggatcgatattgcattcgaataacagaatattcaaagaacatagtgctttcaggatgtccccaagtaactacagcattcttgtacatatctgttctccctaatgatctgagtgtttcattgaagagaaggatagtgagttcatacacccaggttgatcatcaaaccttcgttctttatgaggaattagagaaggctactaaaaccttatcatttaagaatgtacacatggtggatatttcaaaatgtccaaacgttcattttggcgcagcaattgactggttgaagttgggttttccagaattaagggtattcagggtttcacattgtttatcatttcaatttgatgatttactatatctgttaatgagatgtccatggattgatgaaattgatatgactattgatacaagcactgtaacacccagacattcagtaatctcgtctagttctgaagtcctaagcaaggcaaaaccaaatcagaaaagatatggcatacattgttcagcatatgacaggcaaccaaattcggttttcttaaatatatcaagattgacattggaaggcagaaatgatattgatgatatggacttgttggagatatctgtcctgaaaaattctctgtgctatataaacattagaaactgcttcctgttgacggatgatggtatttctaaccttctgatgaagtgtacaaagatccattcgatggttctttcttatacttcttttggaaatcgatcaattcaaatgctatgcgctgccaatccttctggccacaacagtggacatgctcatgttatggcatcttatatgcaagaattacatctggatggctgcaaaggtattgactctgttgctttgtcgcagctagtgagcattataagtatcacaaagtttttgagcttaagggaaacatcacttacagatggtgcactctgcaagtttgttggctctagtctggagtatcttgacgtttcagagactgtgatttctatggtatcattagcaccagttattcaaagaaactgtaaattgaactgtctgaaaacagctggatgctgtagtcttctgttgcaatgtgctaatgtagaacatatcaatggtaacaagtatggagattttctacaggagttaggaactacctactgtctggaggatgttgaaatgggctggggattttgccctattcgaatcgaagaccttgttccttcttttagtaaagtaaggaagatgaaaattggtctcggcacatcattagcggagaatgttctgtgtgctcttcctatgatttgcccattcctcgagtctttgattctaaggtttcaggtgatatctgacagagttgttagacgtctattggaatcagcaacaaatcttcaggtgctttgcctgcactattgtcttggaagtttaacttcatttagtttccaaacaaaggcacctgcattaagagtattgcggcttcattgggtaacttcatggcttacaaatgatgacttgacaatccttacagagaattgcaatttggctgaactttcactttctggttgcaaacttcttgactccagctctcaagacattatctcatctgggtggccaaacttggcacttttacaccttgaggaatgtggtaaagtaactgttgaaggggtttcttcttttttcaactgtaaggctttggaagacgtcctactacggcacacgggtaggggcatcggaaggagcatcatagacgatgctatcagagagttaccactactgcggaagctggctttggatctttgcgatgcctgtgaagacggttacgatagcccaaacgatgcggaagggaagatgattagaagtgtaaggatgagtcgatgcaagaagatggcggggtcgtgtttggaggtccccagacaagggtcttcaacttcaaggccggtgcacaaggacactgtagtgctggaatggagcagcagaatgttcacaaccaccatagtgaaagaaagagtgtgatgagcctcttctgtagttttgtccctgatgaagaacacaagagcaggccacaatatatatgacttgtatgaatggtctccccgcttctgattttgaatgctttgtatgtggacatatcctcgtgtgtgaatgtatttgtatggtatcaaacgaagatcatcttttgcagtcgtactgtacccatgcactcttatgttgatccacgaacaaagtttggaatttttaggtgaccgtgttcatgtttgaaaattattgttgtactagtccttggtaaaataaaggaggcaaggcaggagccaaaaaaaaagacaaaaaacttaat

SEQ ID NO: 35289 - DNA, 3238 bp, Zea Mays
gagtaaccaaaccaagcaccacgcgcggccatggccttccccgccgacgcgctggttctagagatcaccgacacatcatcctccgccaccgccgccgccgcccgtgctccatcctcaccttctcccccgccgctgtccatctccgacctcgcgcgcttcgacccgctcccatccccaaccgttgccgttcgcgtcgaccggcacaggctaatcgagagctcctcctacttccgcgcgctcctcggcggcagcttcagtgaatccggcagagagcatgtgcgtgtgggctgcaatttggaggctgctgtgcaagtgctgcgctacctttttgagccttccgagagctttaacatcacgcacaacaatttcctccccctgttggagggagctttgtttcttgctgttgagagccttctagtggagtgtcaaagatggttcggcaccatagcctctcaaacttctgccatgtcagttccattagatttcataattgaagtctggtactttgctgaagagcatggtgttacttttgttcaagacatttgccaaaaatttctagctcagaattttgcacatgctatctcaggaaggtcatttaataaaataccttatgatttgctatgttcagcgatcaaatgtccacatctgacagtggatagtgaaaaacaattgtgtgaagcaattttgtattgggtttcagaaaatatgaaagcctgtgaacaatcaaaccccaactcagtagatggccacctcttcattcttagcaagcaggtgaagatatgccttttaccattaggatttgcggcagggacaatgaggcattggtttgactttggaaacaagatcatatgcactattcttgatcttctcaaagacagtttgaaaactttattggatgctgttgatgatggtaacttggatcgatattgcattcgaataacagaatattcaaagaacatagtgctttcaggatgtccccaagtaactacagcattcttgtacatatctgttctccctaatgatctgagtgtttcattgaagagaaggatagtgagttcatacacccaggttgatcatcaaaccttcgttctttatgaggaattagagaaggctactaaaaccttatcatttaagaatgtacacatggtggatatttcaaaatgtccaaacgttcattttggcgcagcaattgactggttgaagttgggttttccagaattaagggtattcagggtttcacattgtttatcatttcaatttgatgatttactatatctgttaatgagatgtccatggattgatgaaattgatatgactattgatacaagcactgtaacacccagacattcagtaatctcgtctagttctgaagtcctaagcaaggcaaaaccaaatcagaaaagatatggcatacattgttcagcatatgacaggcaaccaaattcggttttcttaaatatatcaagattgacattggaaggcagaaatgatattgatgatatggacttgttggagatatctgtcctgaaaaattctctgtgctatataaacattagaaactgcttcctgttgacggatgatggtatttctaaccttctgatgaagtgtacaaagatccattcgatggttctttcttatacttcttttggaaatcgatcaattcaaatgctatgcgctgccaatccttctggccacaacagtggacatgctcatgttatggcatcttatatgcaagaattacatctggatggctgcaaaggtattgactctgttgctttgtcgcagctagtgagcattataagtatcacaaagtttttgagcttaagggaaacatcacttacagatggtgcactctgcaagtttgttggctctagtctggagtatcttgacgtttcagagactgtgatttctatggtatcattagcaccagttattcaaagaaactgtaaattgaactgtctgaaaacagctggatgctgtagtcttctgttgcaatgtgctaatgtagaacatatcaatggtaacaagtatggagattttctacaggagttaggaactacctactgtctggaggatgttgaaatgggctggggattttgccctattcgaatcgaagaccttgttccttcttttagtaaagtaaggaagatgaaaattggtctcggcacatcattagcggagaatgttctgtgtgctcttcctatgatttgcccattcctcgagtctttgattctaaggtttcaggtgatatctgacagagttgttagacgtctattggaatcagcaacaaatcttcaggtgctttgcctgcactattgtcttggaagtttaacttcatttagtttccaaacaaaggcacctgcattaagagtattgcggcttcattgggtaacttcatggcttacaaatgatgacttgacaatccttacagagaattgcaatttggctgaactttcactttctggttgcaaacttcttgactccagctctcaagacattatctcatctgggtggccaaacttggcacttttacaccttgaggaatgtggtaaagtaactgttgaaggggtttcttcttttttcaactgtaaggctttggaagacgtcctactacggcacacgggtaggggcatcggaaggagcatcatagacgatgctatcagagagttaccactactgcggaagctggctttggatctttgcgatgcctgtgaagacggttacgatagcccaaacgatgcggaagggaagatgattagaagtgtaaggatgagtcgatgcaagaagatggcggggtcgtgtttggaggtccccagacaagggtcttcaacttcaaggccggtgcacaaggacactgtagtgctggaatggagcagcagaatgttcacaaccaccatagtgaaagaaagagtgtgatgagcctcttctgtagttttgtccctgatgaagaacacaagagcaggccacaatatatatgacttgtatgaatggtctccccgcttctgattttgaatgctttgtatgtggacatatcctcgtgtgtgaatgtatttgtatggtatcaaacgaagatcatcttttgcagtcgtactgtacccatgcactcttatgttgatccacgaacaaagtttggaatttttaggtgaccgtgttcatgtttgaaaattattgttgtactagtccttggtaaaataaaggaggcaaggcaggagccaaaaaaaaagacaaaaaacttaat

SEQ ID NO: 35290 - DNA, 3109 bp, Zea Mays
gagtaaccaaaccaagcaccacgcgcggccatggccttccccgccgacgcgctggttctagagatcaccgacacatcatcctccgccaccgccgccgccgcccgtgctccatcctcaccttctcccccgccgctgtccatctccgacctcgcgcgcttcgacccgctcccatccccaaccgttgccgttcgcgtcgaccggcacaggctaatcgagagctcctcctacttccgcgcgctcctcggcggcagcttcagtgaatccggcagagagcatgtgcgtgtgggctgcaatttggaggctgctgtgcaagtgctgcgctacctttttgagccttccgagagctttaacatcacgcacaacaatttcctccccctgttggagggagctttgtttcttgctgttgagagccttctagtggagtgtcaaagatggttcggcaccatagcctctcaaacttctgccatgtcagttccattagatttcataattgaagtctggtactttgctgaagagcatggtgttacttttgttcaagacatttgccaaaaatttctagctcagaattttgtagaaaatatgaaagcctgtgaacaatcaaaccccaactcagtagatggccacctcttcattcttagcaaggtgaagatatgccttttaccattaggatttgcggcagggacaatgaggcattggtttgactttggaaacaagatcatatgcactattcttgatcttctcaaagacagtttgaaaactttattggatgctgttgatgatggtaacttggatcgatattgcattcgaataacagaatattcaaagaacatagtgctttcaggatgtccccaagtaactacagcattcttgtacatatctgttctccctaatgatctgagtgtttcattgaagagaaggatagtgagttcatacacccaggttgatcatcaaaccttcgttctttatgaggaattagagaaggctactaaaaccttatcatttaagaatgtacacatggtggatatttcaaaatgtccaaacgttcattttggcgcagcaattgactggttgaagttgggttttccagaattaagggtattcagggtttcacattgtttatcatttcaatttgatgatttactatatctgttaatgagatgtccatggattgatgaaattgatatgactattgatacaagcactgtaacacccagacattcagtaatctcgtctagttctgaagtcctaagcaaggcaaaaccaaatcagaaaagatatggcatacattgttcagcatatgacaggcaaccaaattcggttttcttaaatatatcaagattgacattggaaggcagaaatgatattgatgatatggacttgttggagatatctgtcctgaaaaattctctgtgctatataaacattagaaactgcttcctgttgacggatgatggtatttctaaccttctgatgaagtgtacaaagatccattcgatggttctttcttatacttcttttggaaatcgatcaattcaaatgctatgcgctgccaatccttctggccacaacagtggacatgctcatgttatggcatcttatatgcaagaattacatctggatggctgcaaaggtattgactctgttgctttgtcgcagctagtgagcattataagtatcacaaagtttttgagcttaagggaaacatcacttacagatggtgcactctgcaagtttgttggctctagtctggagtatcttgacgtttcagagactgtgatttctatggtatcattagcaccagttattcaaagaaactgtaaattgaactgtctgaaaacagctggatgctgtagtcttctgttgcaatgtgctaatgtagaacatatcaatggtaacaagtatggagattttctacaggagttaggaactacctactgtctggaggatgttgaaatgggctggggattttgccctattcgaatcgaagaccttgttccttcttttagtaaagtaaggaagatgaaaattggtctcggcacatcattagcggagaatgttctgtgtgctcttcctatgatttgcccattcctcgagtctttgattctaaggtttcaggtgatatctgacagagttgttagacgtctattggaatcagcaacaaatcttcaggtgctttgcctgcactattgtcttggaagtttaacttcatttagtttccaaacaaaggcacctgcattaagagtattgcggcttcattgggtaacttcatggcttacaaatgatgacttgacaatccttacagagaattgcaatttggctgaactttcactttctggttgcaaacttcttgactccagctctcaagacattatctcatctgggtggccaaacttggcacttttacaccttgaggaatgtggtaaagtaactgttgaaggggtttcttcttttttcaactgtaaggctttggaagacgtcctactacggcacacgggtaggggcatcggaaggagcatcatagacgatgctatcagagagttaccactactgcggaagctggctttggatctttgcgatgcctgtgaagacggttacgatagcccaaacgatgcggaagggaagatgattagaagtgtaaggatgagtcgatgcaagaagatggcggggtcgtgtttggaggtccccagacaagggtcttcaacttcaaggccggtgcacaaggacactgtagtgctggaatggagcagcagaatgttcacaaccaccatagtgaaagaaagagtgtgatgagcctcttctgtagttttgtccctgatgaagaacacaagagcaggccacaatatatatgacttgtatgaatggtctccccgcttctgattttgaatgctttgtatgtggacatatcctcgtgtgtgaatgtatttgtatggtatcaaacgaagatcatcttttgcagtcgtactgtacccatgcactcttatgttgatccacgaacaaagtttggaatttttaggtgaccgtgttcatgtttgaaaattattgttgtactagtccttggtaaaataaaggaggcaaggcaggagccaaaaaaaaagacaaaaaacttaat

SEQ ID NO: 35291 - DNA, 3541 bp, Zea Mays
gagtaaccaaaccaagcaccacgcgcggccatggccttccccgccgacgcgctggttctagagatcaccgacacatcatcctccgccaccgccgccgccgcccgtgctccatcctcaccttctcccccgccgctgtccatctccgacctcgcgctaatcgagagctcctcctacttccgcgcgctcctcggcggcagcttcagtgaatccggcagagagcatgtgcgtgtgggctgcaatttggaggctgctgtgcaagtgctgcgctacctttttgagccttccgagagctttaacatcacgcacaacaatttcctccccctgttggagggagctttgtttcttgctgttgagagccttctagtggagtgtcaaagatggttcggcaccatagcctctcaaacttctgccatgtcagttccattagatttcataattgaagtctggtactttgctgaagagcatggtgttacttttgttcaagacatttgccaaaaatttctagctcagaattttgtagaaaatatgaaagcctgtgaacaatcaaaccccaactcagtagatggccacctcttcattcttagcaaggtgaagatatgccttttaccattaggatttgcggcagggacaatgaggcattggtttgactttggaaacaagatcatatgcactattcttgatcttctcaaagacagtttgaaaactttattggatgctgttgatgatggtaacttggatcgatattgcattcgaataacagaatattcaaagaacatagtgctttcaggatgtccccaagtaactacagcattcttgtacatatctgttctccctaatgatctgagtgtttcattgaagagaaggatagtgagttcatacacccaggttgatcatcaaaccttcgttctttatgaggaattagagaaggctactaaaaccttatcatttaagaatgtacacatggtggatatttcaaaatgtccaaacgttcattttggcgcagcaattgactggttgaagttgggttttccagaattaagggtattcagggtttcacattgtttatcatttcaatttgatgatttactatatctgttaatgagatgtccatggattgatgaaattgatatgactattgatacaagcactgtaacacccagacattcagtaatctcgtctagttctgaagtcctaagcaaggcaaaaccaaatcagaaaagatatggcatacattgttcagcatatgacaggcaaccaaattcggttttcttaaatatatcaagattgacattggaaggcagaaatgatattgatgatatggacttgttggagatatctgtcctgaaaaattctctgtgctatataaacattagaaactgcttcctgttgacggatgatggtatttctaaccttctgatgaagtgtacaaagatccattcgatggttctttcttatacttcttttggaaatcgatcaattcaaatgctatgcgctgccaatccttctggccacaacagtggacatgctcatgttatggcatcttatatgcaagaattacatctggatggctgcaaaggtattgactctgttgctttgtcgcagctagtgagcattataagtatcacaaagtttttgagcttaagggaaacatcacttacagatggtgcactctgcaagtttgttggctctagtctggagtatcttgacgtttcagagactgtggtgcgatactgattatgtaatttagttttgtgcttctaataatcaagcactacaattgaccaattgatgaaacattcatactggaacattcactgagctaggagactattgatgagtaatacatagtgtgctgggggctattatttctattatctggttgatatgttatactcctatactgtaggcagggtatagacgtatattgtgttcatgaacttttctgctactttattttagtatgacagctatcacttttttatcttcgctacctccagagggcaaaccccaaaagtttatgattatgtttttatttttgcataccatattagagtgcttaattctttttttctgtccattgacttgcagatttctatggtatcattagcaccagttattcaaagaaactgtaaattgaactgtctgaaaacagctggatgctgtagtcttctgttgcaatgtgctaatgtagaacatatcaatggtaacaagtatggagattttctacaggagttaggaactacctactgtctggaggatgttgaaatgggctggggattttgccctattcgaatcgaagaccttgttccttcttttagtaaagtaaggaagatgaaaattggtctcggcacatcattagcggagaatgttctgtgtgctcttcctatgatttgcccattcctcgagtctttgattctaaggtttcaggtgatatctgacagagttgttagacgtctattggaatcagcaacaaatcttcagagaattgcaatttggctgaactttcactttctggttgcaaacttcttgactccagctctcaagacattatctcatctgggtggccaaacttggcacttttacaccttgaggaatgtggtaaagtaactgttgaaggggtttcttcttttttcaactgtaaggctttggaagacgtcctactacggcacacggtgagtatgaaaaatatcgtagcaggttcttggtatatagttctggtgaatcttaaaacacaacgtagaaccatactaaatgacgtgacatggctacagctgaaacaaaatttcaccatgctgttgcaaaattgcagtccatctgtgcatgtcatttccaggacttctaccggtgtaacttttctccgttgaaaaagttgaattgttgattcacttgattggttatatagtttctgagagttgggaaccgcagggtaggggcatcggaaggagcatcatagacgatgctatcagagagttaccactactgcggaagctggctttggatctttgcgatgcctgtgaagacggttacgatagcccaaacgatgcggaagggaagatgattagaagtgtaaggatgagtcgatgcaagaagatggcggggtcgtgtttggaggtccccagacaagggtcttcaacttcaaggccggtgcacaaggacactgtagtgctggaatggagcagcagaatgttcacaaccaccatagtgaaagaaagagtgtgatgagcctcttctgtagttttgtccctgatgaagaacacaagagcaggccacaatatatatgacttgtatgaatggtctccccgcttctgattttgaatgctttgtatgtggacatatcctcgtgtgtgaatgtatttgtatggtatcaaacgaagatcatcttttgcagtcgtactgtacccatgcactcttatgttgatccacgaacaaagtttggaatttttaggtgaccgtgttcatgtttgaaaattattgttgtactagtccttggtaaaataaaggaggcaaggcaggagccaaaaaaaaagacaaaaaacttaat

SEQ ID NO: 35292 - DNA, 3553 bp, Zea Mays
gagtaaccaaaccaagcaccacgcgcggccatggccttccccgccgacgcgctggttctagagatcaccgacacatcatcctccgccaccgccgccgccgcccgtgctccatcctcaccttctcccccgccgctgtccatctccgacctcgcgctaatcgagagctcctcctacttccgcgcgctcctcggcggcagcttcagtgaatccggcagagagcatgtgcgtgtgggctgcaatttggaggctgctgtgcaagtgctgcgctacctttttgagccttccgagagctttaacatcacgcacaacaatttcctccccctgttggagggagctttgtttcttgctgttgagagccttctagtggagtgtcaaagatggttcggcaccatagcctctcaaacttctgccatgtcagttccattagatttcataattgaagtctggtactttgctgaagagcatggtgttacttttgttcaagacatttgccaaaaatttctagctcagaattttgtaggcacatgctatctcaggaaggtcatttaataaaataccttatgatttgctatgttcagcgatcaaatgtccacatctgacagtggatagtgaaaaacaattgtgtgaagcaattttgtattgggtttcagaaaatatgaaagcctgtgaacaatcaaaccccaactcagtagatggccacctcttcattcttagcaaggtgaagatatgccttttaccattaggatttgcggcagggacaatgaggcattggtttgactttggaaacaagatcatatgcactattcttgatcttctcaaagacagtttgaaaactttattggatgctgttgatgatggtaacttggatcgatattgcattcgaataacagaatattcaaagaacatagtgctttcaggatgtccccaagtaactacagcattcttgtacatatctgttctccctaatgatctgagtgtttcattgaagagaaggatagtgagttcatacacccaggttgatcatcaaaccttcgttctttatgaggaattagagaaggctactaaaaccttatcatttaagaatgtacacatggtggatatttcaaaatgtccaaacgttcattttggcgcagcaattgactggttgaagttgggttttccagaattaagggtattcagggtttcacattgtttatcatttcaatttgatgatttactatatctgttaatgagatgtccatggattgatgaaattgatatgactattgatacaagcactgtaacacccagacattcagtaatctcgtctagttctgaagtcctaagcaaggcaaaaccaaatcagaaaagatatggcatacattgttcagcatatgacaggcaaccaaattcggttttcttaaatatatcaagattgacattggaaggcagaaatgatattgatgatatggacttgttggagatatctgtcctgaaaaattctctgtgctatataaacattagaaactgcttcctgttgacggatgatgttttatgtctgtcttccactacttagtcatgctggctaacattacatatatgtcaatgtgtaggtattgactctgttgctttgtcgcagctagtgagcattataagtatcacaaagtttttgagcttaagggaaacatcacttacagatggtgcactctgcaagtttgttggctctagtctggagtatcttgacgtttcagagactgtggtgcgatactgattatgtaatttagttttgtgcttctaataatcaagcactacaattgaccaattgatgaaacattcatactggaacattcactgagctaggagactattgatgagtaatacatagtgtgctgggggctattatttctattatctggttgatatgttatactcctatactgtaggcagggtatagacgtatattgtgttcatgaacttttctgctactttattttagtatgacagctatcacttttttatcttcgctacctccagagggcaaaccccaaaagtttatgattatgtttttatttttgcataccatattagagtgcttaattctttttttctgtccattgacttgcagatttctatggtatcattagcaccagttattcaaagaaactgtaaattgaactgtctgaaaacagctggatgctgtagtcttctgttgcaatgtgctaatgtagaacatatcaatggtaacaagtatggagattttctacaggagttaggaactacctactgtctggaggatgttgaaatgggctggggattttgccctattcgaatcgaagaccttgttccttcttttagtaaagtaaggaagatgaaaattggtctcggcacatcattagcggagaatgttctgtgtgctcttcctatgatttgcccattcctcgagtctttgattctaaggtttcaggtgatatctgacagagttgttagacgtctattggaatcagcaacaaatcttcaggtgctttgcctgcactattgtcttggaagtttaacttcatttagtttccaaacaaaggcacctgcattaagagtattgcggcttcattgggtaacttcatggcttacaaatgatgacttgacaatccttacagagaattgcaatttggctgaactttcactttctggttgcaaacttcttgactccagctctcaagacattatctcatctgggtggccaaacttggcacttttacaccttgaggaatgtggtaaagtaactgttgaaggggtttcttcttttttcaactgtaaggctttggaagacgtcctactacggcacacgtccatctgtgcatgtcatttccaggacttctaccggtgtaacttttctccgttgaaaaagttgaattgttgattcacttgattggttatatagtttctgagagttgggaaccgcagggtaggggcatcggaaggagcatcatagacgatgctatcagagagttaccactactgcggaagctggctttggatctttgcgatgcctgtgaagacggttacgatagcccaaacgatgcggaagggaagatgattagaagtgtaaggatgagtcgatgcaagaagatggcggggtcgtgtttggaggtccccagacaagggtcttcaacttcaaggccggtgcacaaggacactgtagtgctggaatggagcagcagaatgttcacaaccaccatagtgaaagaaagagtgtgatgagcctcttctgtagttttgtccctgatgaagaacacaagagcaggccacaatatatatgacttgtatgaatggtctccccgcttctgattttgaatgctttgtatgtggacatatcctcgtgtgtgaatgtatttgtatggtatcaaacgaagatcatcttttgcagtcgtactgtacccatgcactcttatgttgatccacgaacaaagtttggaatttttaggtgaccgtgttcatgtttgaaaattattgttgtactagtccttggtaaaataaaggaggcaaggcaggagccaaaaaaaaagacaaaaaacttaat

SEQ ID NO: 35293 - DNA, 3128 bp, Zea Mays
gagtaaccaaaccaagcaccacgcgcggccatggccttccccgccgacgcgctggttctagagatcaccgacacatcatcctccgccaccgccgccgccgcccgtgctccatcctcaccttctcccccgccgctgtccatctccgacctcgcgcgcttcgacccgctcccatccccaaccgttgccgttcgcgtcgaccggcacaggctaatcgagagctcctcctacttccgcgcgctcctcggcggcagcttcagtgaatccggcagagagcatgtgcgtgtgggctgcaatttggaggctgctgtgcaagtgctgcgctacctttttgagccttccgagagctttaacatcacgcacaacaatttcctccccctgttggagggagctttgtttcttgctgttgagagccttctagtggagtgtcaaagatggttcggcaccatagcctctcaaacttctgccatgtcagttccattagatttcataattgaagtctggtactttgctgaagagcatggtgttacttttgttcaagacatttgccaaaaatttctagctcagaattttgtaggcacatgctatctcaggaaggtcatttaataaaataccttatgatttgctatgttcagcgatcaaatgtccacatctgacagtggatagtgaaaaacaattgtgtgaagcaattttgtattgggtttcagaaaatatgaaagcctgtgaacaatcaaaccccaactcagtagatggccacctcttcattcttagcaagcaggtgaagatatgccttttaccattaggatttgcggcagggacaatgaggcattggtttgactttggaaacaagatcatatgcactattcttgatcttctcaaagacagtttgaaaactttattggatgctgttgatgatggtaacttggatcgatattgcattcgaataacagaatattcaaagaacatagtgctttcaggatgtccccaagtaactacagcattcttgtacatatctgttctccctaatgatctgagtgtttcattgaagagaaggatagtgagttcatacacccaggttgatcatcaaaccttcgttctttatgaggaattagagaaggctactaaaaccttatcatttaagaatgtacacatggtggatatttcaaaatgtccaaacgttcattttggcgcagcaattgactggttgaagttgggttttccagaattaagggtattcagggtttcacattgtttatcatttcaatttgatgatttactatatctgttaatgagatgtccatggattgatgaaattgatatgactattgatacaagcactgtaacacccagacattcagtaatctcgtctagttctgaagtcctaagcaaggcaaaaccaaatcagaaaagatatggcatacattgttcagcatatgacaggcaaccaaattcggttttcttaaatatatcaagattgacattggaaggcagaaatgatattgatgatatggacttgttggagatatctgtcctgaaaaattctctgtgctatataaacattagaaactgcttcctgttgacggatgatgttttatgtctgtcttccactacttagtcatgctggctaacattacatatatgtcaatgtgtaggtattgactctgttgctttgtcgcagctagtgagcattataagtatcacaaagtttttgagcttaagggaaacatcacttacagatggtgcactctgcaagtttgttggctctagtctggagtatcttgacgtttcagagactgtgatttctatggtatcattagcaccagttattcaaagaaactgtaaattgaactgtctgaaaacagctggatgctgtagtcttctgttgcaatgtgctaatgtagaacatatcaatggtaacaagtatggagattttctacaggagttaggaactacctactgtctggaggatgttgaaatgggctggggattttgccctattcgaatcgaagaccttgttccttcttttagtaaagtaaggaagatgaaaattggtctcggcacatcattagcggagaatgttctgtgtgctcttcctatgatttgcccattcctcgagtctttgattctaaggtttcaggtgatatctgacagagttgttagacgtctattggaatcagcaacaaatcttcaggtgctttgcctgcactattgtcttggaagtttaacttcatttagtttccaaacaaaggcacctgcattaagagtattgcggcttcattgggtaacttcatggcttacaaatgatgacttgacaatccttacagagaattgcaatttggctgaactttcactttctggttgcaaacttcttgactccagctctcaagacattatctcatctgggtggccaaacttggcacttttacaccttgaggaatgtggtaaagtaactgttgaaggggtttcttcttttttcaactgtaaggctttggaagacgtcctactacggcacacgggtaggggcatcggaaggagcatcatagacgatgctatcagagagttaccactactgcggaagctggctttggatctttgcgatgcctgtgaagacggttacgatagcccaaacgatgcggaagggaagatgattagaagtgtaaggatgagtcgatgcaagaagatggcggggtcgtgtttggaggtccccagacaagggtcttcaacttcaaggccggtgcacaaggacactgtagtgctggaatggagcagcagaatgttcacaaccaccatagtgaaagaaagagtgtgatgagcctcttctgtagttttgtccctgatgaagaacacaagagcaggccacaatatatatgacttgtatgaatggtctccccgcttctgattttgaatgctttgtatgtggacatatcctcgtgtgtgaatgtatttgtatggtatcaaacgaagatcatcttttgcagtcgtactgtacccatgcactcttatgttgatccacgaacaaagtttggaatttttaggtgaccgtgttcatgtttgaaaattattgttgtactagtccttggtaaaataaaggaggcaaggcaggagccaaaaaaaaagacaaaaaacttaat

SEQ ID NO: 35294 - DNA, 3608 bp, Zea Mays
gagtaaccaaaccaagcaccacgcgcggccatggccttccccgccgacgcgctggttctagagatcaccgacacatcatcctccgccaccgccgccgccgcccgtgctccatcctcaccttctcccccgccgctgtccatctccgacctcgcgctaatcgagagctcctcctacttccgcgcgctcctcggcggcagcttcagtgaatccggcagagagcatgtgcgtgtgggctgcaatttggaggctgctgtgcaagtgctgcgctacctttttgagccttccgagagctttaacatcacgcacaacaatttcctccccctgttggagggagctttgtttcttgctgttgagagccttctagtggagtgtcaaagatggttcggcaccatagcctctcaaacttctgccatgtcagttccattagatttcataattgaagtctggtactttgctgaagagcatggtgttacttttgttcaagacatttgccaaaaatttctagctcagaattttgtaggcacatgctatctcaggaaggtcatttaataaaataccttatgatttgctatgttcagcgatcaaatgtccacatctgacagtggataggtttgttgtatcttctctcagtgttattctataatatgattcccttctctgaagctaaaataatttgctgccttttgtccagtgaaaaacaattgtgtgaagcaattttgtattgggtttcagaaaatatgaaagcctgtgaacaatcaaaccccaactcagtagatggccacctcttcattcttagcaagcaggtgaagatatgccttttaccattaggatttgcggcagggacaatgaggcattggtttgactttggaaacaagatcatatgcactattcttgatcttctcaaagacagtttgaaaactttattggatgctgttgatgatggtaacttggatcgatattgcattcgaataacagaatattcaaagaacatagtgctttcaggatgtccccaagtaactacagcattcttgtacatatctgttctccctaatgatctgagtgtttcattgaagagaaggatagtgagttcatacacccaggttgatcatcaaaccttcgttctttatgaggaattagagaaggctactaaaaccttatcatttaagaatgtacacatggtggatatttcaaaatgtccaaacgttcattttggcgcagcaattgactggttgaagttgggttttccagaattaagggtattcagggtttcacattgtttatcatttcaatttgatgatttactatatctgttaatgagatgtccatggattgatgaaattgatatgactattgatacaagcactgtaacacccagacattcagtaatctcgtctagttctgaagtcctaagcaaggcaaaaccaaatcagaaaagatatggcatacattgttcagcatatgacaggcaaccaaattcggttttcttaaatatatcaagattgacattggaaggcagaaatgatattgatgcgcgtgtgcagatatggacttgttggagatatctgtcctgaaaaattctctgtgctatataaacattagaaactgcttcctgttgacggatgatggtatttctaaccttctgatgaagtgtacaaagatccattcgatggttctttcttatacttcttttggaaatcgatcaattcaaatgctatgcgctgccaatccttctggccacaacagtggacatgctcatgttatggcatcttatatgcaagaattacatctggatggctgcaaaggtattgactctgttgctttgtcgcagctagtgagcattataagtatcacaaagtttttgagcttaagggaaacatcacttacagatggtgcactctgcaagtttgttggctctagtctggagtatcttgacgtttcagagactgtgatttctatggtatcattagcaccagttattcaaagaaactgtaaattgaactgtctgaaaacagctggatgctgtagtcttctgttgcaatgtgctaatgtagaacatatcaatggtaacaagtatggagattttctacaggagttaggaactacctactgtctggaggatgttgaaatgggctggggattttgccctattcgaatcgaagaccttgttccttcttttagtaaagtaaggaagatgaaaattggtctcggcacatcattagcggagaatgttctgtgtgctcttcctatgatttgcccattcctcgagtctttgattctaaggtttcaggtgatatctgacagagttgttagacgtctattggaatcagcaacaaatcttcaggtgctttgcctgcactattgtcttggaagtttaacttcatttagtttccaaacaaaggcacctgcattaagagtattgcggcttcattgggtaacttcatggcttacaaatgatgacttgacaatccttacagagaattgcaatttggctgaactttcactttctggttgcaaacttcttgactccagctctcaagacattatctcatctgggtggccaaacttggcacttttacaccttgaggaatgtggtaaagtaactgttgaaggggtttcttcttttttcaactgtaaggctttggaagacgtcctactacggcacacggtgagtatgaaaaatatcgtagcaggttcttggtatatagttctggtgaatcttaaaacacaacgtagaaccatactaaatgacgtgacatggctacagctgaaacaaaatttcaccatgctgttgcaaaattgcagtccatctgtgcatgtcatttccaggacttctaccggtgtaacttttctccgttgaaaaagttgaattgttgattcacttgattggttatatagtttctgagagttgggaaccgcagggtaggggcatcggaaggagcatcatagacgatgctatcagagaggtgtctttccttctcctcaagttgtttcctctggcaccatcggctaggccgtaacttggtggactttcttgcagttaccactactgcggaagctggctttggatctttgcgatgcctgtgaagacggttacgatagcccaaacgatgcggaagggaagatgattagaagtgtaaggatgagtcgatgcaagaagatggcggggtcgtgtttggaggtccccagacaagggtcttcaacttcaaggccggtgcacaaggacactgtagtgctggaatggagcagcagaatgttcacaaccaccatagtgaaagaaagagtgtgatgagcctcttctgtagttttgtccctgatgaagaacacaagagcaggccacaatatatatgacttgtatgaatggtctccccgcttctgattttgaatgctttgtatgtggacatatcctcgtgtgtgaatgtatttgtatggtatcaaacgaagatcatcttttgcagtcgtactgtacccatgcactcttatgttgatccacgaacaaagtttggaatttttaggtgaccgtgttcatgtttgaaaattattgttgtactagtccttggtaaaataaaggaggcaaggcaggagccaaaaaaaaagacaaaaaacttaat

SEQ ID NO: 35295 - DNA, 2939 bp, Zea Mays
agagtaaccaaaccaagcaccacgcgcggccatggccttccccgccgacgcgctggttctagagatcaccgacacatcatcctccgccaccgccgccgccgcccgtgctccatcctcaccttctcccccgccgctgtccatctccgacctcgcgctaatcgagagctcctcctacttccgcgcgctcctcggcggcagcttcagtgaatccggcagagagcatgtgcgtgtgggctgcaatttggaggctgctgtgcaagtgctgcgctacctttttgagccttccgagagctttaacatcacgcacaacaatttcctccccctgttggagggagctttgtttcttgctgttgagagccttctagtggagtgtcaaagatggttcggcaccatagcctctcaaacttctgccatgtcagttccattagatttcataattgaagtctggtactttgctgaagagcatggtgttacttttgttcaagacatttgccaaaaatttctagctcagaattttgtaggcacatgctatctcaggaaggtcatttaataaaataccttatgatttgctatgttcagcgatcaaatgtccacatctgacagtggatagtgaaaaacaattgtgtgaagcaattttgtattgggtttcagaaaatatgaaagcctgtgaacaatcaaaccccaactcagtagatggccacctcttcattcttagcaaggtgaagatatgccttttaccattaggatttgcggcagggacaatgaggcattggtttgactttggaaacaagatcatatgcactattcttgatcttctcaaagacagtttgaaaactttattggatgctgttgatgatggtaacttggatcgatattgcattcgaataacagaatattcaaagaacatagtgctttcaggatgtccccaagtaactacagcattcttgtacatatctgttctccctaatgatctgagtgtttcattgaagagaaggatagtgagttcatacacccaggttgatcatcaaaccttcgttctttatgaggaattagagaaggctactaaaaccttatcatttaagaatgtacacatggtggatatttcaaaatgtccaaacgttcattttggcgcagcaattgactggttgaagttgggttttccagaattaagggtattcagggtttcacattgtttatcatttcaatttgatgatttactatatctgttaatgagatgtccatggattgatgaaattgatatgactattgatacaagcactgtaacacccagacattcagtaatctcgtctagttctgaagtcctaagcaaggcaaaaccaaatcagaaaagatatggcatacattgttcagcatatgacaggcaaccaaattcggttttcttaaatatatcaagattgacattggaaggcagaaatgatattgatgatatggacttgttggagatatctgtcctgaaaaattctctgtgctatataaacattagaaactgcttcctgttgacggatgatgttttatgtctgtcttccactacttagtcatgctggctaacattacatatatgtcaatgtgtaggtattgactctgttgctttgtcgcagctagtgagcattataagtatcacaaagtttttgagcttaagggaaacatcacttacagatggtgcactctgcaagtttgttggctctagtctggagtatcttgacgtttcagagactgtgatttctatggtatcattagcaccagttattcaaagaaactgtaaattgaactgtctgaaaacagctggatgctgtagtcttctgttgcaatgtgctaatgtagaacatatcaatggtaacaagtatggagattttctacaggagttaggaactacctactgtctggaggatgttgaaatgggctggggattttgccctattcgaatcgaagaccttgttccttcttttagtaaagtaaggaagatgaaaattggtctcggcacatcattagcggagaatgttctgtgtgctcttcctatgatttgcccattcctcgagtctttgattctaaggtttcaggtgatatctgacagagttgttagacgtctattggaatcagcaacaaatcttcagagaattgcaatttggctgaactttcactttctggttgcaaacttcttgactccagctctcaagacattatctcatctgggtggccaaacttggcacttttacaccttgaggaatgtggtaaagtaactgttgaaggggtttcttcttttttcaactgtaaggctttggaagacgtcctactacggcacacgggtaggggcatcggaaggagcatcatagacgatgctatcagagagttaccactactgcggaagctggctttggatctttgcgatgcctgtgaagacggttacgatagcccaaacgatgcggaagggaagatgattagaagtgtaaggatgagtcgatgcaagaagatggcggggtcgtgtttggaggtccccagacaagggtcttcaacttcaaggccggtgcacaaggacactgtagtgctggaatggagcagcagaatgttcacaaccaccatagtgaaagaaagagtgtgatgagcctcttctgtagttttgtccctgatgaagaacacaagagcaggccacaatatatatgacttgtatgaatggtctccccgcttctgattttgaatgctttgtatgtggacatatcctcgtgtgtgaatgtatttgtatggtatcaaacgaagatcatcttttgcagtcgtactgtacccatgcactcttatgttgatccacgaacaaagtttggaatttttaggtgaccgtgttcatgtttgaaaattattgttgtactagtccttggtaaaataaaggaggcaaggcaggagccaaaaaaaaagacaaaaaacttaat

SEQ ID NO: 35296 - DNA, 3189 bp, Zea Mays
gacagagtaaccaaaccaagcaccacgcgcggccatggccttccccgccgacgcgctggttctagagatcaccgacacatcatcctccgccaccgccgccgccgcccgtgctccatcctcaccttctcccccgccgctgtccatctccgacctcgcgctaatcgagagctcctcctacttccgcgcgctcctcggcggcagcttcagtgaatccggcagagagcatgtgcgtgtgggctgcaatttggaggctgctgtgcaagtgctgcgctacctttttgagccttccgagagctttaacatcacgcacaacaatttcctccccctgttggagggagctttgtttcttgctgttgagagccttctagtggagtgtcaaagatggttcggcaccatagcctctcaaacttctgccatgtcagttccattagatttcataattgaagtctggtactttgctgaagagcatggtgttacttttgttcaagacatttgccaaaaatttctagctcagaattttgtaggcacatgctatctcaggaaggtcatttaataaaataccttatgatttgctatgttcagcgatcaaatgtccacatctgacagtggatagtgaaaaacaattgtgtgaagcaattttgtattgggtttcagaaaatatgaaagcctgtgaacaatcaaaccccaactcagtagatggccacctcttcattcttagcaaggtgaagatatgccttttaccattaggatttgcggcagggacaatgaggcattggtttgactttggaaacaagatcatatgcactattcttgatcttctcaaagacagtttgaaaactttattggatgctgttgatgatggtaacttggatcgatattgcattcgaataacagaatattcaaagaacatagtgctttcaggatgtccccaagtaactacagcattcttgtacatatctgttctccctaatgatctgagtgtttcattgaagagaaggatagtgagttcatacacccaggttgatcatcaaaccttcgttctttatgaggaattagagaaggctactaaaaccttatcatttaagaatgtacacatggtggatatttcaaaatgtccaaacgttcattttggcgcagcaattgactggttgaagttgggttttccagaattaagggtattcagggtttcacattgtttatcatttcaatttgatgatttactatatctgttaatgagatgtccatggattgatgaaattgatatgactattgatacaagcactgtaacacccagacattcagtaatctcgtctagttctgaagtcctaagcaaggcaaaaccaaatcagaaaagatatggcatacattgttcagcatatgacaggcaaccaaattcggttttcttaaatatatcaagattgacattggaaggcagaaatgatattgatgatatggacttgttggagatatctgtcctgaaaaattctctgtgctatataaacattagaaactgcttcctgttgacggatgatggtatttctaaccttctgatgaagtgtacaaagatccattcgatggttctttcttatacttcttttggaaatcgatcaattcaaatgctatgcgctgccaatccttctggccacaacagtggacatgctcatgttatggcatcttatatgcaagaattacatctggatggctgcaaaggtattgactctgttgctttgtcgcagctagtgagcattataagtatcacaaagtttttgagcttaagggaaacatcacttacagatggtgcactctgcaagtttgttggctctagtctggagtatcttgacgtttcagagactgtgatttctatggtatcattagcaccagttattcaaagaaactgtaaattgaactgtctgaaaacagctggatgctgtagtcttctgttgcaatgtgctaatgtagaacatatcaatggtaacaagtatggagattttctacaggagttaggaactacctactgtctggaggatgttgaaatgggctggggattttgccctattcgaatcgaagaccttgttccttcttttagtaaagtaaggaagatgaaaattggtctcggcacatcattagcggagaatgttctgtgtgctcttcctatgatttgcccattcctcgagtctttgattctaaggtttcaggtgatatctgacagagttgttagacgtctattggaatcagcaacaaatcttcaggtgctttgcctgcactattgtcttggaagtttaacttcatttagtttccaaacaaaggcacctgcattaagagtattgcggcttcattgggtaacttcatggcttacaaatgatgacttgacaatccttacagagaattgcaatttggctgaactttcactttctggttgcaaacttcttgactccagctctcaagacattatctcatctgggtggccaaacttggcacttttacaccttgaggaatgtggtaaagtaactgttgaaggggtttcttcttttttcaactgtaaggctttggaagacgtcctactacggcacacgggtaggggcatcggaaggagcatcatagacgatgctatcagagagttaccactactgcggaagctggctttggatctttgcgatgcctgtgaagacggttacgatagcccaaacgatgcggaagggaagatgattagaagtgtaaggatgagtcgatgcaagaagatggcggggtcgtgtttggaggtccccagacaagggtcttcaacttcaaggccggtgcacaaggacactgtagtgctggaatggagcagcagaatgttcacaaccaccatagtgaaagaaagagtgtgatgagcctcttctgtagttttgtccctgatgaagaacacaagagcaggccacaatatatatgacttgtatgaatggtctccccgcttctgattttgaatgctttgtatgtggacatatcctcgtgtgtgaatgtatttgtatggtatcaaacgaagatcatcttttgcagtcgtactgtacccatgcactcttatgttgatccacgaacaaagtttggaatttttaggtgaccgtgttcatgtttgaaaattattgttgtactagtccttggtaaaataaaggaggcaaggcaggagccaaaaaaaaagacaaaaaacttaat

SEQ ID NO: 35297 - DNA, 3512 bp, Zea Mays
ccttgacagagtaaccaaaccaagcaccacgcgcggccatggccttccccgccgacgcgctggttctagagatcaccgacacatcatcctccgccaccgccgccgccgcccgtgctccatcctcaccttctcccccgccgctgtccatctccgacctcgcgctaatcgagagctcctcctacttccgcgcgctcctcggcggcagcttcagtgaatccggcagagagcatgtgcgtgtgggctgcaatttggaggctgctgtgcaagtgctgcgctacctttttgagccttccgagagctttaacatcacgcacaacaatttcctccccctgttggagggagctttgtttcttgctgttgagagccttctagtggagtgtcaaagatggttcggcaccatagcctctcaaacttctgccatgtcagttccattagatttcataattgaagtctggtactttgctgaagagcatggtgttacttttgttcaagacatttgccaaaaatttctagctcagaattttgcacatgctatctcaggaaggtcatttaataaaataccttatgatttgctatgttcagcgatcaaatgtccacatctgacagtggatagtgaaaaacaattgtgtgaagcaattttgtattgggtttcagaaaatatgaaagcctgtgaacaatcaaaccccaactcagtagatggccacctcttcattcttagcaaggtgaagatatgccttttaccattaggatttgcggcagggacaatgaggcattggtttgactttggaaacaagatcatatgcactattcttgatcttctcaaagacagtttgaaaactttattggatgctgttgatgatggtaacttggatcgatattgcattcgaataacagaatattcaaagaacatagtgctttcaggatgtccccaagtaactacagcattcttgtacatatctgttctccctaatgatctgagtgtttcattgaagagaaggatagtgagttcatacacccaggttgatcatcaaaccttcgttctttatgaggaattagagaaggctactaaaaccttatcatttaagaatgtacacatggtggatatttcaaaatgtccaaacgttcattttggcgcagcaattgactggttgaagttgggttttccagaattaagggtattcagggtttcacattgtttatcatttcaatttgatgatttactatatctgttaatgagatgtccatggattgatgaaattgatatgactattgatacaagcactgtaacacccagacattcagtaatctcgtctagttctgaagtcctaagcaaggcaaaaccaaatcagaaaagatatggcatacattgttcagcatatgacaggcaaccaaattcggttttcttaaatatatcaagattgacattggaaggcagaaatgatattgatgatatggacttgttggagatatctgtcctgaaaaattctctgtgctatataaacattagaaactgcttcctgttgacggatgatggtatttctaaccttctgatgaagtgtacaaagatccattcgatggttctttcttatacttcttttggaaatcgatcaattcaaatgctatgcgctgccaatccttctggccacaacagtggacatgctcatgttatggcatcttatatgcaagaattacatctggatggctgcaaagctagtgagcattataagtatcacaaagtttttgagcttaagggaaacatcacttacagatggtgcactctgcaagtttgttggctctagtctggagtatcttgacgtttcagagactgtggtgcgatactgattatgtaatttagttttgtgcttctaataatcaagcactacaattgaccaattgatgaaacattcatactggaacattcactgagctaggagactattgatgagtaatacatagtgtgctgggggctattatttctattatctggttgatatgttatactcctatactgtaggcagggtatagacgtatattgtgttcatgaacttttctgctactttattttagtatgacagctatcacttttttatcttcgctacctccagagggcaaaccccaaaagtttatgattatgtttttatttttgcataccatattagagtgcttaattctttttttctgtccattgacttgcagatttctatggtatcattagcaccagttattcaaagaaactgtaaattgaactgtctgaaaacagctggatgctgtagtcttctgttgcaatgtgctaatgtagaacatatcaatggtaacaagtatggagattttctacaggagttaggaactacctactgtctggaggatgttgaaatgggctggggattttgccctattcgaatcgaagaccttgttccttcttttagtaaagtaaggaagatgaaaattggtctcggcacatcattagcggagaatgttctgtgtgctcttcctatgatttgcccattcctcgagtctttgattctaaggtttcaggtgatatctgacagagttgttagacgtctattggaatcagcaacaaatcttcagagaattgcaatttggctgaactttcactttctggttgcaaacttcttgactccagctctcaagacattatctcatctgggtggccaaacttggcacttttacaccttgaggaatgtggtaaagtaactgttgaaggggtttcttcttttttcaactgtaaggctttggaagacgtcctactacggcacacgtccatctgtgcatgtcatttccaggacttctaccggtgtaacttttctccgttgaaaaagttgaattgttgattcacttgattggttatatagtttctgagagttgggaaccgcagggtaggggcatcggaaggagcatcatagacgatgctatcagagagttaccactactgcggaagctggctttggatctttgcgatgcctgtgaagacggttacgatagcccaaacgatgcggaagggaagatgattagaagtgtaaggatgagtcgatgcaagaagatggcggggtcgtgtttggaggtccccagacaagggtcttcaacttcaaggccggtgcacaaggacactgtagtgctggaatggagcagcagaatgttcacaaccaccatagtgaaagaaagagtgtgatgagcctcttctgtagttttgtccctgatgaagaacacaagagcaggccacaatatatatgacttgtatgaatggtctccccgcttctgattttgaatgctttgtatgtggacatatcctcgtgtgtgaatgtatttgtatggtatcaaacgaagatcatcttttgcagtcgtactgtacccatgcactcttatgttgatccacgaacaaagtttggaatttttaggtgaccgtgttcatgtttgaaaattattgttgtactagtccttggtaaaataaaggaggcaaggcaggagccaaaaaaaaagacaaaaaacttaat

SEQ ID NO: 35298 - DNA, 3686 bp, Zea Mays
gtccttgacagagtaaccaaaccaagcaccacgcgcggccatggccttccccgccgacgcgctggttctagagatcaccgacacatcatcctccgccaccgccgccgccgcccgtgctccatcctcaccttctcccccgccgctgtccatctccgacctcgcgctaatcgagagctcctcctacttccgcgcgctcctcggcggcagcttcagtgaatccggcagagagcatgtgcgtgtgggctgcaatttggaggctgctgtgcaagtgctgcgctacctttttgagccttccgagagctttaacatcacgcacaacaatttcctccccctgttggagggagctttgtttcttgctgttgagagccttctagtggagtgtcaaagatggttcggcaccatagcctctcaaacttctgccatgtcagttccattagatttcataattgaagtctggtactttgctgaagagcatggtgttacttttgttcaagacatttgccaaaaatttctagctcagaattttgtaggcacatgctatctcaggaaggtcatttaataaaataccttatgatttgctatgttcagcgatcaaatgtccacatctgacagtggatagtgaaaaacaattgtgtgaagcaattttgtattgggtttcagaaaatatgaaagcctgtgaacaatcaaaccccaactcagtagatggccacctcttcattcttagcaagcaggtgaagatatgccttttaccattaggatttgcggcagggacaatgaggcattggtttgactttggaaacaagatcatatgcactattcttgatcttctcaaagacagtttgaaaactttattggatgctgttgatgatggtaacttggatcgatattgcattcgaataacagaatattcaaagaacatagtgctttcaggatgtccccaagtaactacagcattcttgtacatatctgttctccctaatgatctgagtgtttcattgaagagaaggatagtgagttcatacacccaggttgatcatcaaaccttcgttctttatgaggaattagagaaggctactaaaaccttatcatttaagaatgtacacatggtggatatttcaaaatgtccaaacgttcattttggcgcagcaattgactggttgaagttgggttttccagaattaagggtattcagggtttcacattgtttatcatttcaatttgatgatttactatatctgttaatgagatgtccatggattgatgaaattgatatgactattgatacaagcactgtaacacccagacattcagtaatctcgtctagttctgaagtcctaagcaaggcaaaaccaaatcagaaaagatatggcatacattgttcagcatatgacaggcaaccaaattcggttttcttaaatatatcaagattgacattggaaggcagaaatgatattgatggtaattgaaaagttttatacttattatgtcttgctttgcagctgtgtgtattgttattaccttaccaagctagtgacttcattgttagcgcgtgtgcagatatggacttgttggagatatctgtcctgaaaaattctctgtgctatataaacattagaaactgcttcctgttgacggatgatggtatttctaaccttctgatgaagtgtacaaagatccattcgatggttctttcttatacttcttttggaaatcgatcaattcaaatgctatgcgctgccaatccttctggccacaacagtggacatgctcatgttatggcatcttatatgcaagaattacatctggatggctgcaaaggtattgactctgttgctttgtcgcagctagtgagcattataagtatcacaaagtttttgagcttaagggaaacatcacttacagatggtgcactctgcaagtttgttggctctagtctggagtatcttgacgtttcagagactgtggtgcgatactgattatgtaatttagttttgtgcttctaataatcaagcactacaattgaccaattgatgaaacattcatactggaacattcactgagctaggagactattgatgagtaatacatagtgtgctgggggctattatttctattatctggttgatatgttatactcctatactgtaggcagggtatagacgtatattgtgttcatgaacttttctgctactttattttagtatgacagctatcacttttttatcttcgctacctccagagggcaaaccccaaaagtttatgattatgtttttatttttgcataccatattagagtgcttaattctttttttctgtccattgacttgcagatttctatggtatcattagcaccagttattcaaagaaactgtaaattgaactgtctgaaaacagctggatgctgtagtcttctgttgcaatgtgctaatgtagaacatatcaatggtaacaagtatggagattttctacaggagttaggaactacctactgtctggaggatgttgaaatgggctggggattttgccctattcgaatcgaagaccttgttccttcttttagtaaagtaaggaagatgaaaattggtctcggcacatcattagcggagaatgttctgtgtgctcttcctatgatttgcccattcctcgagtctttgattctaaggtttcaggtgatatctgacagagttgttagacgtctattggaatcagcaacaaatcttcaggtgctttgcctgcactattgtcttggaagtttaacttcatttagtttccaaacaaaggcacctgcattaagagtattgcggcttcattgggtaacttcatggcttacaaatgatgacttgacaatccttacagagaattgcaatttggctgaactttcactttctggttgcaaacttcttgactccagctctcaagacattatctcatctgggtggccaaacttggcacttttacaccttgaggaatgtggtaaagtaactgttgaaggggtttcttcttttttcaactgtaaggctttggaagacgtcctactacggcacacgtttctgagagttgggaaccgcagggtaggggcatcggaaggagcatcatagacgatgctatcagagagttaccactactgcggaagctggctttggatctttgcgatgcctgtgaagacggttacgatagcccaaacgatgcggaagggaagatgattagaagtgtaaggatgagtcgatgcaagaagatggcggggtcgtgtttggaggtccccagacaagggtcttcaacttcaaggccggtgcacaaggacactgtagtgctggaatggagcagcagaatgttcacaaccaccatagtgaaagaaagagtgtgatgagcctcttctgtagttttgtccctgatgaagaacacaagagcaggccacaatatatatgacttgtatgaatggtctccccgcttctgattttgaatgctttgtatgtggacatatcctcgtgtgtgaatgtatttgtatggtatcaaacgaagatcatcttttgcagtcgtactgtacccatgcactcttatgttgatccacgaacaaagtttggaatttttaggtgaccgtgttcatgtttgaaaattattgttgtactagtccttggtaaaataaaggaggcaaggcaggagccaaaaaaaaagacaaaaaacttaat

SEQ ID NO: 35299 - DNA, 3416 bp, Zea Mays
gtccatctctcgtccttgacagagtaaccaaaccaagcaccacgcgcggccatggccttccccgccgacgcgctggttctagagatcaccgacacatcatcctccgccaccgccgccgccgcccgtgctccatcctcaccttctcccccgccgctgtccatctccgacctcgcgctaatcgagagctcctcctacttccgcgcgctcctcggcggcagcttcagtgaatccggcagagagcatgtgcgtgtgggctgcaatttggaggctgctgtgcaagtgctgcgctacctttttgagccttccgagagctttaacatcacgcacaacaatttcctccccctgttggagggagctttgtttcttgctgttgagagccttctagtggagtgtcaaagatggttcggcaccatagcctctcaaacttctgccatgtcagttccattagatttcataattgaagtctggtactttgctgaagagcatggtgttacttttgttcaagacatttgccaaaaatttctagctcagaattttgtagaaaatatgaaagcctgtgaacaatcaaaccccaactcagtagatggccacctcttcattcttagcaaggtgaagatatgccttttaccattaggatttgcggcagggacaatgaggcattggtttgactttggaaacaagatcatatgcactattcttgatcttctcaaagacagtttgaaaactttattggatgctgttgatgatggtaacttggatcgatattgcattcgaataacagaatattcaaagaacatagtgctttcaggatgtccccaagtaactacagcattcttgtacatatctgttctccctaatgatctgagtgtttcattgaagagaaggatagtgagttcatacacccaggttgatcatcaaaccttcgttctttatgaggaattagagaaggctactaaaaccttatcatttaagaatgtacacatggtggatatttcaaaatgtccaaacgttcattttggcgcagcaattgactggttgaagttgggttttccagaattaagggtattcagggtttcacattgtttatcatttcaatttgatgatttactatatctgttaatgagatgtccatggattgatgaaattgatatgactattgatacaagcactgtaacacccagacattcagtaatctcgtctagttctgaagtcctaagcaaggcaaaaccaaatcagaaaagatatggcatacattgttcagcatatgacaggcaaccaaattcggttttcttaaatatatcaagattgacattggaaggcagaaatgatattgatgatatggacttgttggagatatctgtcctgaaaaattctctgtgctatataaacattagaaactgcttcctgttgacggatgatggtatttctaaccttctgatgaagtgtacaaagatccattcgatggttctttcttatacttcttttggaaatcgatcaattcaaatgctatgcgctgccaatccttctggccacaacagtggacatgctcatgttatggcatcttatatgcaagaattacatctggatggctgcaaagctagtgagcattataagtatcacaaagtttttgagcttaagggaaacatcacttacagatggtgcactctgcaagtttgttggctctagtctggagtatcttgacgtttcagagactgtggtgcgatactgattatgtaatttagttttgtgcttctaataatcaagcactacaattgaccaattgatgaaacattcatactggaacattcactgagctaggagactattgatgagtaatacatagtgtgctgggggctattatttctattatctggttgatatgttatactcctatactgtaggcagggtatagacgtatattgtgttcatgaacttttctgctactttattttagtatgacagctatcacttttttatcttcgctacctccagagggcaaaccccaaaagtttatgattatgtttttatttttgcataccatattagagtgcttaattctttttttctgtccattgacttgcagatttctatggtatcattagcaccagttattcaaagaaactgtaaattgaactgtctgaaaacagctggatgctgtagtcttctgttgcaatgtgctaatgtagaacatatcaatggtaacaagtatggagattttctacaggagttaggaactacctactgtctggaggatgttgaaatgggctggggattttgccctattcgaatcgaagaccttgttccttcttttagtaaagtaaggaagatgaaaattggtctcggcacatcattagcggagaatgttctgtgtgctcttcctatgatttgcccattcctcgagtctttgattctaaggtttcaggtgatatctgacagagttgttagacgtctattggaatcagcaacaaatcttcaggtgctttgcctgcactattgtcttggaagtttaacttcatttagtttccaaacaaaggcacctgcattaagagtattgcggcttcattgggtaacttcatggcttacaaatgatgacttgacaatccttacagagaattgcaatttggctgaactttcactttctggttgcaaacttcttgactccagctctcaagacattatctcatctgggtggccaaacttggcacttttacaccttgaggaatgtggtaaagtaactgttgaaggggtttcttcttttttcaactgtaaggctttggaagacgtcctactacggcacacgggtaggggcatcggaaggagcatcatagacgatgctatcagagagttaccactactgcggaagctggctttggatctttgcgatgcctgtgaagacggttacgatagcccaaacgatgcggaagggaagatgattagaagtgtaaggatgagtcgatgcaagaagatggcggggtcgtgtttggaggtccccagacaagggtcttcaacttcaaggccggtgcacaaggacactgtagtgctggaatggagcagcagaatgttcacaaccaccatagtgaaagaaagagtgtgatgagcctcttctgtagttttgtccctgatgaagaacacaagagcaggccacaatatatatgacttgtatgaatggtctccccgcttctgattttgaatgctttgtatgtggacatatcctcgtgtgtgaatgtatttgtatggtatcaaacgaagatcatcttttgcagtcgtactgtacccatgcactcttatgttgatccacgaacaaagtttggaatttttaggtgaccgtgttcatgtttgaaaattattgttgtactagtccttggtaaaataaaggaggcaaggcaggagccaaaaaaaaagacaaaaaacttaat

SEQ ID NO: 35300 - DNA, 3069 bp, Zea Mays
gtccatctctcgtccttgacagagtaaccaaaccaagcaccacgcgcggccatggccttccccgccgacgcgctggttctagagatcaccgacacatcatcctccgccaccgccgccgccgcccgtgctccatcctcaccttctcccccgccgctgtccatctccgacctcgcgctaatcgagagctcctcctacttccgcgcgctcctcggcggcagcttcagtgaatccggcagagagcatgtgcgtgtgggctgcaatttggaggctgctgtgcaagtgctgcgctacctttttgagccttccgagagctttaacatcacgcacaacaatttcctccccctgttggagggagctttgtttcttgctgttgagagccttctagtggagtgtcaaagatggttcggcaccatagcctctcaaacttctgccatgtcagttccattagatttcataattgaagtctggtactttgctgaagagcatggtgttacttttgttcaagacatttgccaaaaatttctagctcagaattttgcacatgctatctcaggaaggtcatttaataaaataccttatgatttgctatgttcagcgatcaaatgtccacatctgacagtggatagtgaaaaacaattgtgtgaagcaattttgtattgggtttcagaaaatatgaaagcctgtgaacaatcaaaccccaactcagtagatggccacctcttcattcttagcaaggtgaagatatgccttttaccattaggatttgcggcagggacaatgaggcattggtttgactttggaaacaagatcatatgcactattcttgatcttctcaaagacagtttgaaaactttattggatgctgttgatgatggtaacttggatcgatattgcattcgaataacagaatattcaaagaacatagtgctttcaggatgtccccaagtaactacagcattcttgtacatatctgttctccctaatgatctgagtgtttcattgaagagaaggatagtgagttcatacacccaggttgatcatcaaaccttcgttctttatgaggaattagagaaggctactaaaaccttatcatttaagaatgtacacatggtggatatttcaaaatgtccaaacgttcattttggcgcagcaattgactggttgaagttgggttttccagaattaagggtattcagggtttcacattgtttatcatttcaatttgatgatttactatatctgttaatgagatgtccatggattgatgaaattgatatgactattgatacaagcactgtaacacccagacattcagtaatctcgtctagttctgaagtcctaagcaaggcaaaaccaaatcagaaaagatatggcatacattgttcagcatatgacaggcaaccaaattcggttttcttaaatatatcaagattgacattggaaggcagaaatgatattgatgatatggacttgttggagatatctgtcctgaaaaattctctgtgctatataaacattagaaactgcttcctgttgacggatgatggtatttctaaccttctgatgaagtgtacaaagatccattcgatggttctttcttatacttcttttggaaatcgatcaattcaaatgctatgcgctgccaatccttctggccacaacagtggacatgctcatgttatggcatcttatatgcaagaattacatctggatggctgcaaaggtattgactctgttgctttgtcgcagctagtgagcattataagtatcacaaagtttttgagcttaagggaaacatcacttacagatggtgcactctgcaagtttgttggctctagtctggagtatcttgacgtttcagagactgtgatttctatggtatcattagcaccagttattcaaagaaactgtaaattgaactgtctgaaaacagctggatgctgtagtcttctgttgcaatgtgctaatgtagaacatatcaatggtaacaagtatggagattttctacaggagttaggaactacctactgtctggaggatgttgaaatgggctggggattttgccctattcgaatcgaagaccttgttccttcttttagtaaagtaaggaagatgaaaattggtctcggcacatcattagcggagaatgttctgtgtgctcttcctatgatttgcccattcctcgagtctttgattctaaggtttcaggtgatatctgacagagttgttagacgtctattggaatcagcaacaaatcttcagagaattgcaatttggctgaactttcactttctggttgcaaacttcttgactccagctctcaagacattatctcatctgggtggccaaacttggcacttttacaccttgaggaatgtggtaaagtaactgttgaaggggtttcttcttttttcaactgtaaggctttggaagacgtcctactacggcacacgggtaggggcatcggaaggagcatcatagacgatgctatcagagagttaccactactgcggaagctggctttggatctttgcgatgcctgtgaagacggttacgatagcccaaacgatgcggaagggaagatgattagaagtgtaaggatgagtcgatgcaagaagatggcggggtcgtgtttggaggtccccagacaagggtcttcaacttcaaggccggtgcacaaggacactgtagtgctggaatggagcagcagaatgttcacaaccaccatagtgaaagaaagagtgtgatgagcctcttctgtagttttgtccctgatgaagaacacaagagcaggccacaatatatatgacttgtatgaatggtctccccgcttctgattttgaatgctttgtatgtggacatatcctcgtgtgtgaatgtatttgtatggtatcaaacgaagatcatcttttgcagtcgtactgtacccatgcactcttatgttgatccacgaacaaagtttggaatttttaggtgaccgtgttcatgtttgaaaattattgttgtactagtccttggtaaaataaaggaggcaaggcaggagccaaaaaaaaagacaaaaaacttaat

SEQ ID NO: 35301 - DNA, 1092 bp, Zea Mays
gccataagaatggttgctatgttcgataatgaggaggtgggttcagattcaatgcaaggggctggtgcaccaaccatgttccaggctatgagacgaatcatcgattccttgatgcatcagtcgatgggggagggagctttggaacgtgcaatacattcttcattccttgtttcggcggacatggctcatgctctgcacccgaactatgccgaaaagcatgaagagtgccacagaccagaactacagaagggacttgtcatcaagcacaatgctaaccaacgttatgccacaagtgctgttacagctttcctcttcaaagaaatagcaaggattcataatcttcccgttcaggaatttgttgtgaggaatgatatgggatgtggctccactattggacccatacttgcttctggtgttggcatacggactgtagactgtggtatccctcagctttcgatgcacagtgtacgagaaatgtgtggtaaagaagatgtggacacaacatacagacacttcaaagcttttttcgagatgttttctgatatcgataggaagttaaatgtagatttttaagtccaaatccttatctttttttcagtttgcatgcgtgaggcgcaaagttacataagaatcagctatcagtgaatcatgtttggaggtattaaaacacaagaacactggaacggcttgatgaacaaaatctgaacaacaatatgcttatttgtcatggtaaaaatgttcaaagttaagaagacaaaaaaggtattgtaagaaccttttcgccggtgtttctaatgtgttggaggaactttcaagaatattagatggtaaaatatctgtggcctgcgatgaggcttgattgaacaattaagtatggtggaatgtgaacttgttgtattaagttcataaagcatacctcatgtgaatatttagtatctgtttttgagtctttttgtattgatttatgcttttgtaacagaaaagtgaatgtgctattataaaagagtatctagaaacacgtaatagtgagatgaaggttgtaactaaataagtacagttcttcaggaagaaattgttgctataaagagaaat

SEQ ID NO: 35302 - DNA, 2195 bp, Zea Mays
gccataagaatggttgctatgttcgataatgaggaggtgggttcagattcaatgcaaggggctggtgcaccaaccatgttccaggctatgagacgaatcatcgattccttgatgcatcagtcgatgggggagggagctttggaacgtgcaatacattcttcattccttgtttcggcggacatggctcatgctctgcacccgaactatgccgaaaagcatgaagagtgccacagaccagaactacagaagggacttgtcatcaagcacaatgctaaccaacgttatgccacaagtgctgttacagctttcctcttcaaagaaatagcaaggattcataatcttcccgttcaggaatttgttgtgaggaatgatatgggatgtggctccactattggacccatacttgcttctggtgttggcatacggactgtagactgtggtatccctcagctttcgatgcacagtgtacgagaaatgtgtggtaaagaagatgtggacacaacatacagacacttcaaagcttttttcgagatgttttctgatatcgataggaagttaaatgtagatttttaagtccaaatccttatctttttttcaggtttgaataattagtggaaactaaaactatgattgtcaagcatagtatcaatctatcaaactcatattctgaatttttttagttgataaagaggacgacgaattaggaaatctcactcttggtcacttttgtggtgatttaatatggctgatgacggggatcatcatggagaagcataagaagagtacaaaatgaaatctttttaattgggggtggggggagtagaggtcttagtgatttgactaaatttagatttctttcggatatatccagagaacaaagctagattttattgctctcttgagaaaaaagagggttctactcaataacatctgtgggggatgagagttcatttggcactggatcgacctcatggtcgctccggtggtattttactttgaataaatttggaagttttcagcattgcaacgagtgagtcttgtatgtaaacttccatcttgggaataaagatcatggcttccaatggggtctcatagcagtttatgggcttgcacaagtagaacataaataaacctttcttacagagttggtccagatgtgtttcgaggaatcgcagccgataattgtcgctggtgattccaatattattaggaacccaaaagagaagaaaatgatatgtggccctttttattcaactagtggatggtgcgcgtcctgcgcgttataaaatttgatccaatagtacttttacgtagaggagggatatatccagacttaaattattatattttacaatcagtaatatgtatggttaggcaaggttcaaaacagtagatagtatcattacaaaatatgtgcaaaatgacatttgttgagcaagtctatagctatattatgttcataaaatttcgacatatatatacatgcagaagtggttgttggctttttttaccccaatccaatggtacagactaaagttggtttttttatatatttttaccacaatttctcaacattttttttgtaatcaacatatatatattgttctcatatgtggttgttgatttgctgataaattcatttctcaaatgaaaccagctaatcttttgtaaaagaaaaacttactgccactgacattacagtttgcatgcgtgaggcgcaaagttacataagaatcagctatcagtgaatcatgtttggaggtattaaaacacaagaacactggaacggcttgatgaacaaaatctgaacaacaatatgcttatttgtcatggtaaaaatgttcaaagttaagaagacaaaaaaggtattgtaagaaccttttcgccggtgtttctaatgtgttggaggaactttcaagaatattagatggtaaaatatctgtggcctgcgatgaggcttgattgaacaattaagtatggtggaatgtgaacttgttgtattaagttcataaagcatacctcatgtgaatatttagtatctgtttttgagtctttttgtattgatttatgcttttgtaacagaaaagtgaatgtgctattataaaagagtatctagaaacacgtaatagtgagatgaaggttgtaactaaataagtacagttcttcaggaagaaattgttgctataaagagaaat

SEQ ID NO: 35303 - DNA, 2027 bp, Zea Mays
gcttttacattttagtgaagtcatagcaatgttttacctaaagggatcgatgctattcccttttcgcactacattggcatagtctgaagtattgtgttaaagttttcagttaggcaatgcattcaggccaactgaaaatttgtctggaaatgcactttgcccccgtttggtcttatatatgctgattatattttcatttcaagttcctgataccatctgaaaagcatgttttggactcagggtctttgccctatcaagtttctgatatcatcttttattcttttcccgtccttgaaaaatccaaatgaatcggggaccgtttcaaacaacgactcaaaaaaaaaagatccaaatggaccaatgtactacaatggtatctaccaccagttctaccagtacaacccaaacggctcgctctggggcaacatagtctgggcgcactcggtctccacagatctcgtgaactggatccggctcgcgccggcgatagagcggacgactccgagcgacatcaatggctgctggacaggttcagccaccatcctaaagagcggccggcctgccatcatatacaccggcgccgacaccgagaagcgtcaggtccagaacgtggcgttccccaagaacctgtccgatccgtacctgcgggagtgggtgaagccacacgacaacccggtgatccagccggtcggacgagggctgaacccaggccagttcagagacccgacgaccggctggatcggcccggacgggctgtggaggatagccgtcggggccgaggtcgacggccacagcgcggcgcttctgtacgagagcgaggacttcgtgcgctgggacagagtggaccacccgctctactcctccaacgcctccgccatgtgggagtgcccggacttcttcgcggcgatgccgggcgagaactccgggctggacatgtcggctgcggtcccggatggcgccaagcacgtcctcaagatgagccttgacggctctgacaagtacatggtcggcgtctatgatctgaaaggtgacgcctttgtgccggataccgtgatcgaggaccggaggctgtggtcaaggattgactacggcaactactacgcttccaagtcgttcttcgactcgaagaaagggaggagggtcatatggggctggacgaatgagacggacagttcgtcagacgacgtcgccaaaggatgggctggaatccatgcaattcccaggactatatggttggataaagacagcaagcagctgctgcaatggccggtcgaagagatcgagtcgctccgaggaaaacaagtcagacaccaaggcctggagctcaggaagggggatctgtttgagattaaggaaattgacactctgcagatgtggagatagatttcgagctcacatccataggcagtgccgacccttttgacccttcctggctcttggacatcgagaagcagtgccgggaagcgggcgcgtcggctcatggcccgttcgggctcgtggttcttgcttctgagagcatggaagagcacacctccgtgcacttcagagtgtactacagatcacaggagaagcacatggttcttatgtgcgccgatctgaggaaatcgtccttgagaccggagctgtacacgccagcctacggaggcttctttgagctggacctggagaaggaaaagacggtggtatctctgagaactttgatcgatcgctctgcggtggagagcttcggtggaggcggcagggtgtgcatcatggccagggtctatccggcggcgctcgtcgacgacggcggcactcgcatgtacgcgttcaacaatggcactagcaccgtcagagtgccccggctagaagcgtggagcatgaggagggcacaggttaacaagggatgaggaggaacacaaggccatttgatagctagaggagaggaacagagcatgggcacatgaattaaacacacactgctggtttaatttgctggaattaatcaatcaatcaatcaacaaacacacgaagattaaatcaaaaca

SEQ ID NO: 35304 - DNA, 2020 bp, Zea Mays
gcttttacattttagtgaagtcatagcaatgttttacctaaagggatcgatgctattcccttttcgcactacattggcatagtctgaagtattgtgttaaagttttcagttaggcaatgcattcaggccaactgaaaatttgtctggaaatgcactttgcccccgtttggtcttatatatgctgattatattttcatttcaagttcctgataccatctgaaaagcatgttttggactcagggtctttgccctatcaagtttctgatatcatcttttattcttttcccgtccttgaaaaatccaaatgaatcggggaccgtttcaaacaacgactcaaaaaaaaaagatccaaatggaccaatgtactacaatggtatctaccaccagttctaccagtacaacccaaacggctcgctctggggcaacatagtctgggcgcactcggtctccacagatctcgtgaactggatccggctcgcgccggcgatagagcggacgactccgagcgacatcaatggctgctggacaggttcagccaccatcctaaagagcggccggcctgccatcatatacaccggcgccgacaccgagaagcgtcaggtccagaacgtggcgttccccaagaacctgtccgatccgtacctgcgggagtgggtgaagccacacgacaacccggtgatccagccggtcggacgagggctgaacccaggccagttcagagacccgacgaccggctggatcggcccggacgggctgtggaggatagccgtcggggccgaggtcgacggccacagcgcggcgcttctgtacgagagcgaggacttcgtgcgctgggacagagtggaccacccgctctactcctccaacgcctccgccatgtgggagtgcccggacttcttcgcggcgatgccgggcgagaactccgggctggacatgtcggctgcggtcccggatggcgccaagcacgtcctcaagatgagccttgacggctctgacaagtacatggtcggcgtctatgatctgaaaggtgacgcctttgtgccggataccgtgatcgaggaccggaggctgtggtcaaggattgactacggcaactactacgcttccaagtcgttcttcgactcgaagaaagggaggagggtcatatggggctggacgaatgagacggacagttcgtcagacgacgtcgccaaaggatgggctggaatccatgactatatggttggataaagacagcaagcagctgctgcaatggccggtcgaagagatcgagtcgctccgaggaaaacaagtcagacaccaaggcctggagctcaggaagggggatctgtttgagattaaggaaattgacactctgcaggcagatgtggagatagatttcgagctcacatccataggcagtgccgacccttttgacccttcctggctcttggacatcgagaagcagtgccgggaagcgggcgcgtcggctcatggcccgttcgggctcgtggttcttgcttctgagagcatggaagagcacacctccgtgcacttcagagtgtactacagatcacaggagaagcacatggttcttatgtgcgccgatctgaggaaatcgtccttgagaccggagctgtacacgccagcctacggaggcttctttgagctggacctggagaaggaaaagacggtggtatctctgagaactttgatcgatcgctctgcggtggagagcttcggtggaggcggcagggtgtgcatcatggccagggtctatccggcggcgctcgtcgacgacggcggcactcgcatgtacgcgttcaacaatggcactagcaccgtcagagtgccccggctagaagcgtggagcatgaggagggcacaggttaacaagggatgaggaggaacacaaggccatttgatagctagaggagaggaacagagcatgggcacatgaattaaacacacactgctggtttaatttgctggaattaatcaatcaatcaatcaacaaacacacgaagattaaatcaaaaca

SEQ ID NO: 35305 - DNA, 2010 bp, Zea Mays
gcttttacattttagtgaagtcatagcaatgttttacctaaagggatcgatgctattcccttttcgcactacattggcatagtctgaagtattgtgttaaagttttcagttaggcaatgcattcaggccaactgaaaatttgtctggaaatgcactttgcccccgtttggtcttatatatgctgattatattttcatttcaagttcctgataccatctgaaaagcatgttttggactcagggtctttgccctatcaagtttctgatatcatcttttattcttttcccgtccttgaaaaatccaaatgaatcggggaccgtttcaaacaacgactcaaaaaaaaaagatccaaatggaccaatgtactacaatggtatctaccaccagttctaccagtacaacccaaacggctcgctctggggcaacatagtctgggcgcactcggtctccacagatctcgtgaactggatccggctcgcgccggcgatagagcggacgactccgagcgacatcaatggctgctggacaggttcagccaccatcctaaagagcggccggcctgccatcatatacaccggcgccgacaccgagaagcgtcaggtccagaacgtggcgttccccaagaacctgtccgatccgtacctgcgggagtgggtgaagccacacgacaacccggtgatccagccggtcggacgagggctgaacccaggccagttcagagacccgacgaccggctggatcggcccggacgggctgtggaggatagccgtcggggccgaggtcgacggccacagcgcggcgcttctgtacgagagcgaggacttcgtgcgctgggacagagtggaccacccgctctactcctccaacgcctccgccatgtgggagtgcccggacttcttcgcggcgatgccgggcgagaactccgggctggacatgtcggctgcggtcccggatggcgccaagcacgtcctcaagatgagccttgacggctctgacaagtacatggtcggcgtctatgatctgaaaggtgacgcctttgtgccggataccgtgatcgaggaccggaggctgtggtcaaggattgactacggcaactactacgcttccaagtcgttcttcgactcgaagaaagggaggagggtcatatggggctggacgaatgagacggacagttcgtcagacgacgtcgccaaaggatgggctggaatccatgcaattcccaggactatatggttggataaagacagcaagcagctgctgcaatggccggtcgaagagatcgagtcgctccgaggaaaacaagtcagacaccaaggcctggagctcaggaagggggatctgtttgagattaaggaaattgacactctgcaggcagatgtggagatagatttcgagctcacatccataggcagtgccgacccttttgacccttcctggctcttggacatcgagaagcagtgccgggaagcgggcgcgtcggctcatggcccgttcgggctcgtggttcttgcttctgagagcatggaagagcacacctccgtgcacttcagagtgtactacagatcacaggagaagcacatggttcttatgtgcgccgatctgaggaaatcgtccttgagaccggagctgtacacgccagcctacggaggcttctttgagctggacctggagaaggaaaagacggtggtatctctgagaactttgagcttcggtggaggcggcagggtgtgcatcatggccagggtctatccggcggcgctcgtcgacgacggcggcactcgcatgtacgcgttcaacaatggcactagcaccgtcagagtgccccggctagaagcgtggagcatgaggagggcacaggttaacaagggatgaggaggaacacaaggccatttgatagctagaggagaggaacagagcatgggcacatgaattaaacacacactgctggtttaatttgctggaattaatcaatcaatcaatcaacaaacacacgaagattaaatcaaaaca

SEQ ID NO: 35306 - DNA, 2111 bp, Zea Mays
gcataacggcgaatagtccatccatcatcagcttgagacggagacgacaagaacgacgctacctcaccatcttaatcttattagcagcaaatagcagatgcagatcaataaacccttaccaagcccaatgcagggagcagattctctctctctctctttctcacacacacacaaccccaatgatccatacacacattttcatttttgagctgatatgttgccacaaagcgaggttctggatgcaaagtgagcagccacaggccacagcagttcttttctcctacgacggatccggtcctgggagcagcaggaggactaggaggagtggcgtcgcgcaggccacgcagagagtcttcctgtatccacaggctcccaaggtctcctccatcgtgagcagcaagtacaggaccgcgtaccacttccagcctcccaagaactggatcaacgatccaaatggaccaatgtactacaatggtatctaccaccagttctaccagtacaacccaaacggctcgctctggggcaacatagtctgggcgcactcggtctccacagatctcgtgaactggatccggctcgcgccggcgatagagcggacgactccgagcgacatcaatggctgctggacaggttcagccaccatcctaaagagcggccggcctgccatcatatacaccggcgccgacaccgagaagcgtcaggtccagaacgtggcgttccccaagaacctgtccgatccgtacctgcgggagtgggtgaagccacacgacaacccggtgatccagccggtcggacgagggctgaacccaggccagttcagagacccgacgaccggctggatcggcccggacgggctgtggaggatagccgtcggggccgaggtcgacggccacagcgcggcgcttctgtacgagagcgaggacttcgtgcgctgggacagagtggaccacccgctctactcctccaacgcctccgccatgtgggagtgcccggacttcttcgcggcgatgccgggcgagaactccgggctggacatgtcggctgcggtcccggatggcgccaagcacgtcctcaagatgagccttgacggctctgacaagtacatggtcggcgtctatgatctgaaaggtgacgcctttgtgccggataccgtgatcgaggaccggaggctgtggtcaaggattgactacggcaactactacgcttccaagtcgttcttcgactcgaagaaagggaggagggtcatatggggctggacgaatgagacggacagttcgtcagacgacgtcgccaaaggatgggctggaatccatgcaattcccaggactatatggttggataaagacagcaagcagctgctgcaatggccggtcgaagagatcgagtcgctccgaggaaaacaagtcagacaccaaggcctggagctcaggaagggggatctgtttgagattaaggaaattgacactctgcaggcagatgtggagatagatttcgagctcacatccataggcagtgccgacccttttgacccttcctggctcttggacatcgagaagcagtgccgggaagcgggcgcgtcggctcatggcccgttcgggctcgtggttcttgcttctgagagcatggaagagcacacctccgtgcacttcagagtgtactacagatcacaggagaagcacatggttcttatgtgcgccgatctgaggaaatcgtccttgagaccggagctgtacacgccagcctacggaggcttctttgagctggacctggagaaggaaaagacggtggtatctctgagaactttgagcttcggtggaggcggcagggtgtgcatcatggccagggtctatccggcggcgctcgtcgacgacggcggcactcgcatgtacgcgttcaacaatggcactagcaccgtcagagtgccccggctagaagcgtggagcatgaggagggcacaggttaacaagggatgaggaggaacacaaggccatttgatagctagaggagaggaacagagcatgggcacatgaattaaacacacactgctggtttaatttgctggaattaatcaatcaatcaatcaacaaacacacgaagattaaatcaaaaca

SEQ ID NO: 35307 - DNA, 904 bp, Zea Mays
gtgctggatgctgctgctcacgtactgctgatgtttctctctacagtgcttgctgcactcgcgttcatgttctccacgagtattctactgcagatactggcatgcgctttgtacagcaactggtggcccatgttagcagctctcatgtacgtccttgtaccaatgccatgcctgttttttggtggtggatccacacacttcttgaccagcagagaaggtggagggtggattaatgctgcaaaattcttgactggtgcatcggccatgggaagccttgctattccagcaattctgaggcatgctggcttaatcgagaccggggccatgttcatcgagttcacgtccttcttcatccttgtatgcacagtgctgtgcttccatagggcgactctggatgaagactggtaaatgcgcatttcaccgacaccctgaaccctagcggttcttggctgcttctgtccatgctaagaaatattcctgttggaagctaacatggatctgtacaaagaagcgtatttcgagcgtagccgtagctgatgtcttatgtagacacttgtgaagattatgtggtcatgtggcaatgcagatgttattaccttcactttgactttgtcgtcacatgttctatggtgaaggaaggaatcatccgtgtaaaccatggccagggcacgccctacttggctcctaattctatcgcaggctttggggttaacctattatgaatggaataataggatcttgatgaccgaaagaaaagggagagctaattagtcacatggctcggccgatgtatttttttttcatgtttgcattcatgaatctgtctaggatattacatattgtggtctgaatctttataaatcacttgttttgcggtctgaatctttataaatttctacctgtg

SEQ ID NO: 35308 - DNA, 133 bp, Zea Mays
gggacgaatattatctcaaaaaaaaaaagtcttgagtcccccctctccttccccttcccaacgctctcgctgcagaggaaaggcgaagatggcgatgaccgtcgaagtccgatggatggactcggttgctctc

SEQ ID NO: 35309 - DNA, 1215 bp, Zea Mays
ggaacatctatatatctaagctatggaaaattttactgctgatcgcgtggttctagcagcatcaggtgttgatcacgaacacttgctaggctatgcagatttgttgttgaaagattggcacaaggggaccccaatggaaaagccaaagtctacatatgttggtggagattccagacacagagcagattcagatatgacacatgttgcattagcttttgaagtgccagggggctggcttcaagagagagacgctacaattatgactgtcatacagactttaatgggtggtggtggttcattctcatctggcggtcctggaaaaggaatgcattcacggctttatcgacgtgtcctaaataaatatcacttggttgattctttttctgcatttaacaatgtatatgacagcagtggcctctttggtatctacttgaccacaccatcagattttgtggcaaaggctgtcgacatcgcagtaagtgaattaattgctgtcgcaactcctggagaagaggttgaactgcaacgagcaaaaaattcaacgatttcatctgtattaatgaatcttgaatctagggtagttgttgccgaagatattggaaggcagctgttatcttatggttgcaggaagcctattgactacttccttcaatgtatggaagaaattactctagatgatgttgcaacatttgccaggaagatgctagctacgcaacccacaatggctagctggggaaatgttgacaaagttcccccatatgaatttatttgcaagcggctacaatagtacccctacacaatgacctctggactctggtggtcttgaaggatcctttcgtggaaaactaaacaatcacttgtatgaagtgccctagcttagaaactgcttttctttcagacatgcagtttagtgagtttaggatttcaacagctatgttcaattgtaactgttcaagcaacacatagtaaatgagaggctgatgaatggcaaatatcaacagtttctccatggcccattagcattttattgtcatgttcagtgtttttatgtacattttctgcgattatggatagcaggagtattctgttgcccttaatttcatgtataattggcttctggagcattgaatcattgatgcattaataccatgtttggttttgtttggggaacggagtgatccgttcctcattttgatttgtttttggtaatggaac

SEQ ID NO: 35310 - DNA, 1227 bp, Zea Mays
tggaacatctatatatctaagctatggaaaattttactgctgatcgcgtggttctagcagcatcaggtgttgatcacgaacacttgctaggctatgcagatttgttgttgaaagattggcacaaggggaccccaatggaaaagccaaagtctacatatgttggtggagattccagacacagagcagattcagatatgacacatgttgcattagcttttgaagtgccagggggctggcttcaagagagagacgctacaattatgactgtcatacagactttaatgggtggtggtggttcattctcatctggcggtcctggaaaaggaatgcattcacggctttatcgacgtgtcctaaataaatatcacttggttgattctttttctgcatttaacaatgtatatgacagcagtggcctctttggtatctacttgaccacatccagccatcagattttgtggcaaaggctgtcgacatcgcagtaagtgaattaattgctgtcgcaactcctggagaagtgacagaggttgaactgcaacgagcaaaaaattcaacgatttcatctgtattaatgaatcttgaatctagggtagttgttgccgaagatattggaaggcagctgttatcttatggttgcaggaagcctattgactacttccttcaatgtatggaagaaattactctagatgatgttgcaacatttgccaggaagatgctagctacgcaacccacaatggctagctggggaaatgttgacaaagttcccccatatgaatttatttgcaagcggctacaatagtacccctacacaatgacctctggactctggtggtcttgaaggatcctttcgtggaaaactaaacaatcacttgtatgaagtgccctagcttagaaactgcttttctttcagacatgcagtttagtgagtttaggatttcaacagctatgttcaattgtaactgttcaagcaacacatagtaaatgagaggctgatgaatggcaaatatcaacagtttctccatggcccattagcattttattgtcatgttcagtgtttttatgtacattttctgcgattatggatagcaggagtattctgttgcccttaatttcatgtataattggcttctggagcattgaatcattgatgcattaataccatgtttggttttgtttggggaacggagtgatccgttcctcattttgatttgtttttggtaatggaac

SEQ ID NO: 35311 - DNA, 1207 bp, Zea Mays
catggaacatctatatatctaagctatggaaaattttactgctgatcgcgtggttctagcagcatcaggtgttgatcacgaacacttgctaggctatgcagatttgttgttgaaagattggcacaaggggaccccaatggaaaagccaaagtctacatatgttggtggagattccagacacagagcagattcagatatgacacatgttgcattagcttttgaagtgccagggggctggcttcaagagagagacgctacaattatgactgtcatacagactttaatgggtggtggtggttcattctcatctggcggtcctggaaaaggaatgcattcacggctttatcgacgtgtcctaaataaatatcacttggttgattctttttctgcatttaacaatgtatatgacagcagtggcctctttgccatcagattttgtggcaaaggctgtcgacatcgcagtaagtgaattaattgctgtcgcaactcctggagaagtgacagaggttgaactgcaacgagcaaaaaattcaacgatttcatctgtattaatgaatcttgaatctagggtagttgttgccgaagatattggaaggcagctgttatcttatggttgcaggaagcctattgactacttccttcaatgtatggaagaaattactctagatgatgttgcaacatttgccaggaagatgctagctacgcaacccacaatggctagctggggaaatgttgacaaagttcccccatatgaatttatttgcaagcggctacaatagtacccctacacaatgacctctggactctggtggtcttgaaggatcctttcgtggaaaactaaacaatcacttgtatgaagtgccctagcttagaaactgcttttctttcagacatgcagtttagtgagtttaggatttcaacagctatgttcaattgtaactgttcaagcaacacatagtaaatgagaggctgatgaatggcaaatatcaacagtttctccatggcccattagcattttattgtcatgttcagtgtttttatgtacattttctgcgattatggatagcaggagtattctgttgcccttaatttcatgtataattggcttctggagcattgaatcattgatgcattaataccatgtttggttttgtttggggaacggagtgatccgttcctcattttgatttgtttttggtaatggaac

SEQ ID NO: 35312 - DNA, 1767 bp, Zea Mays
ctcccacttcgtctctccccgtcccttcacgtcttcacgagtccccacgactttggcggcgaaactccaccgccgtcgcctccgatggcgatgctctgcagagccacgcgcgtcctccgcaagggtccttctgcgtgcatcggtttcttcgtcgactccggctccatctacgagtccggggagaccaccggcgtatcgcacctgctggagaggatggccttcaaggacaccaagcaccggagccacctcaacatagtgagcgagctcgagcttgccgggggcaacgtcggcgcttcagcctccagggagcagatggtctacagctatgacacgctcaagggatacatgccagaggctctcgagatcctcatcgactgcatgcgcaacccgctcttcctccaggaagaagtcgaacggcagctggttcttgctcgagaagaagtaaatgagctacaaaagaaccctgagaagtttcttcatgaacagcttaaccttgttggatattcgggtgctcttgcaaatccgctaatagctcctgaggatgcccttgctagaatcaatgacaaaattattcaaaagttctatcatgaaaattttactgctgatcgcgtggttctagcagcatcaggtgttgatcacgaacacttgctaggctatgcagatttgttgttgaaagattggcacaaggggaccccaatggaaaagccaaagtctacatatgttggtggagattccagacacagagcagattcagatatgacacatgttgcattagcttttgaagtgccagggggctggcttcaagagagagacgctacaattatgactgtcatacagactttaatgggtggtggtggttcattctcatctggcggtcctggaaaaggaatgcattcacggctttatcgacgtgtcctaaataaatatcacttggttgattctttttctgcatttaacaatgtatatgacagcagtggcctctttgccatcagattttgtggcaaaggctgtcgacatcgcagtaagtgaattaattgctgtcgcaactcctggagaagtgacagaggttgaactgcaacgagcaaaaaattcaacgatttcatctgtattaatgaatcttgaatctagggtagttgttgccgaagatattggaaggcagctgttatcttatggttgcaggaagcctattgactacttccttcaatgtatggaagaaattactctagatgatgttgcaacatttgccaggaagatgctagctacgcaacccacaatggctagctggggaaatgttgacaaagttcccccatatgaatttatttgcaagcggctacaatagtacccctacacaatgacctctggactctggtggtcttgaaggatcctttcgtggaaaactaaacaatcacttgtatgaagtgccctagcttagaaactgcttttctttcagacatgcagtttagtgagtttaggatttcaacagctatgttcaattgtaactgttcaagcaacacatagtaaatgagaggctgatgaatggcaaatatcaacagtttctccatggcccattagcattttattgtcatgttcagtgtttttatgtacattttctgcgattatggatagcaggagtattctgttgcccttaatttcatgtataattggcttctggagcattgaatcattgatgcattaataccatgtttggttttgtttggggaacggagtgatccgttcctcattttgatttgtttttggtaatggaac

SEQ ID NO: 35313 - DNA, 1903 bp, Zea Mays
ctcccacttcgtctctccccgtcccttcacgtcttcacgagtccccacgactttggcggcgaaactccaccgccgtcgcctccgatggcgatgctctgcagagccacgcgcgtcctccgcaaggtgtgcggactgggacccgcggcggcggcgcgacggctctccgccgctgaagccttcgccgcgtgtgagggctcactcctgcgccctctacccgggctggacctcccgccgtgcctccctgacaacctgagccgcagccccacccggatcaccacgctccctaacggcctcagagtcgccaccgaggacgtcccgggtccttctgcgtgcatcggtttcttcgtcgactccggctccatctacgagtccggggagaccaccggcgtatcgcacctgctggagaggatggccttcaaggacaccaagcaccggagccacctcaacatagtgagcgagctcgagcttgccgggggcaacgtcggcgcttcagcctccagggagcagatggtctacagctatgacacgctcaagggatacatgccagaggctctcgagatcctcatcgactgcatgcgcaacccgctcttcctccaggaagaagtcgaacggcagctggttcttgctcgagaagaagtaaatgagctacaaaagaaccctgagaagtttcttcatgaacagcttaaccttgttggatattcgggtgctcttgcaaatccgctaatagctcctgaggatgcccttgctagaatcaatgacaaaattattcaaaagttctatcatgctatgcagatttgttgttgaaagattggcacaaggggaccccaatggaaaagccaaagtctacatatgttggtggagattccagacacagagcagattcagatatgacacatgttgcattagcttttgaagtgccagggggctggcttcaagagagagacgctacaattatgactgtcatacagactttaatgggtggtggtggttcattctcatctggcggtcctggaaaaggaatgcattcacggctttatcgacgtgtcctaaataaatatcacttggttgattctttttctgcatttaacaatgtatatgacagcagtggcctctttgtccagccatcagattttgtggcaaaggctgtcgacatcgcagtaagtgaattaattgctgtcgcaactcctggagaagtgacagaggttgaactgcaacgagcaaaaaattcaacgatttcatctgtattaatgaatcttgaatctagggtagttgttgccgaagatattggaaggcagctgttatcttatggttgcaggaagcctattgactacttccttcaatgtatggaagaaattactctagatgatgttgcaacatttgccaggaagatgctagctacgcaacccacaatggctagctggggaaatgttgacaaagttcccccatatgaatttatttgcaagcggctacaatagtacccctacacaatgacctctggactctggtggtcttgaaggatcctttcgtggaaaactaaacaatcacttgtatgaagtgccctagcttagaaactgcttttctttcagacatgcagtttagtgagtttaggatttcaacagctatgttcaattgtaactgttcaagcaacacatagtaaatgagaggctgatgaatggcaaatatcaacagtttctccatggcccattagcattttattgtcatgttcagtgtttttatgtacattttctgcgattatggatagcaggagtattctgttgcccttaatttcatgtataattggcttctggagcattgaatcattgatgcattaataccatgtttggttttgtttggggaacggagtgatccgttcctcattttgatttgtttttggtaatggaac

SEQ ID NO: 35314 - DNA, 5065 bp, Zea Mays
ccttctcctcctccccgtcgccgtctccgagtctccctctatttctctccgcccttgttcttctcctctctccctctatcttattacctcaagtagaagtagtatatattttttgtccgccttttcaatttttccttttatctccctgcgtctcttcgtcgtcctcctgctgtggcggccgccggcgatccccgatcggcgatactcagattctagttgtccattgtgctgcactgcagcagtagacaatcgtgtttttcggtgttttgtctgtctctccttgatcattcagatgcctgtacagctcaactgctatagctagctgtatatatctggttgaagaggactaatctagcaacaatgtcatcgcttcagttattgcaactaacagaacgggggcgcaaccttttgtcttcaagaaggagaacacttgcaattgtttctggtgcagtacttgctggtggagctttagcatatgcgcagtcaggtcgatggaaaaaacaccaggaagcaaattcttgcagtgatgcaaactcacatagcagtaataacggaagaactagtcagaacggcattgatggtaaattggttaaaacaaggaaaaagaaaagtggactgaagtccttgcattttttggctgctattttacttaagaagattggcccgaatggaacgaattaccttattggcttgatactaacagcagtcttgcgtacagctgttggccacagattggcaaaagtacaaggatatttattcagatctgcattccttcggcgtattccgacctttacacgtctcattattgaaaatcttcttctatgctttctccaatccacgttatatcagacatcaaagtacttaacagggtctttaggcctgcgcttcaagaaaatcttgacagatcttgtccatgctgattattttgagaacatggtgtactacaagatctcacatgttgatcatcggatcacaaacccagagcaaaggattgcaagtgacataccaaagttctgctcagaattaagtgaccttgtacaggatgatctggctgcaattgtagaagggttaatatacatctggcgcctctgctcttacgcgagtccaaaatatgtgttatggattctggcatatgttataggtgctggtggtacaattagaaaattttctcctgcttttggcaagctgaagtctacagaacaacagctagagggggaatatcgtcaactccattcacgattgagaacccatgctgagagtgtggcgttttatggtggtgagaacagagaagcatcacatattaagcagcggttccgggcacttgttaaacacttgaatgttgttcttcatgaaaactggtggtttggcatgattcaagattttcttctgaagtatcttggcgccactgtgggagttatcctaattattgaacctttctttgcggggaatcttaaacccgaatcatccaccttaggacgggcagagatgttgagcaatctccgataccacaccagcgtgataatatcactatttcaatctcttggaaccatttctattagttcaaggcgcttaaatattctcagtggctatgctaatcgtattcatgaattactggatgtctcgcgtgagctatctggtggccgtgatagattgattactcaaaattcttctgatggaaattatattagcgaggcaaattatatagagttttcagatgttaaggtggtgacaccttctgggaatgtcttggttgataatttgaaccttcatttggagtcgggctctaatctgttgatcactggtcccaatggtagtggaaaaagctcccttttccgtgttcttggtggtctgtggccaatggtatctggtcatattgtcaaacctggtgttggttccaatctcaacaaggaaatattttatgtgccccagagaccatatacagctgttggaacgcttcgcgaccagttaatctatccactcacagcagaccaagagactgaaccacttagctatggtggcatggtggatcttctaaagaatgttgatctggaatacttgctagaacgctatcctcttgataaggaagttaactggggtgacgaattgtctcttggtgagcagcaaagattaggaatggctagactgttctatcataagccaaagtttgctatcctggatgaatgcactagtgctgttacaactgatatggaagagcgcttctgcaaaagggttcgagcaatgggcacatcttgcataacaatatctcaccgtccagcattagttgcgtttcatgaaattgttttatccttagatggtgaaggagggtgggatattcaggacaacagaaatggttccttctctcccgaagttgagtttgatgtgctgaaggcatcagaaagtgatcgcaagtctgatgcacttaccgttcaaagggcttttatcaccagcacaaagggaaatgcgtcaatgaagcccaagaaacattcttattcaacagaggtcatagcatcttcccccagtatggagatagaacatacagtacaatcatctattgtcacacaattgcaatgctctccaagacctttgcctgtcagagttgctgcaatgtctcaaatactggttccaaagctatttgataagcaaggagggcagctgcttgcagtggtacttcttgtattctcccgcacttggatttcagaccgtatagcttcattgaatggaacaagtgtcaagtatgtcttggagcaggacaaagctgccttcattcgtttggctggcactagtgtgctgcaaagtgcagcaaattccatcgtgtcaccctcactgaggaaccttacttcaagaatcgcccttggatggcggattcgcatgaccaatcatttgcttcaatattatttgaaaagaaatgctttttacaaggtatgagtatggatgcagatcaaagaatgacacatgatgtagagaagttgaccaatgaccttgctggcttgcttactggtatggtgaagccattagttgatattatttggtttacatggagaatgaagcttttgtctgggcgaagaggggttgctatactgtatgcttacatgttcctaggtcttggttttctaagagctgtgtcccctgactttggggatcttgcaaaccaagaacaagaacttgaaggcacgttcaggttcatgcactcaagattgcggacacatgctgagtcaatagctttctttggtggtggatcaagggagaaagctatgattgacgctaaattcatgacattgctcaaccactcgaaggttctattgagaaagaagtggctttatggtatttttgatgattttgtgacgaaacagcttcctcataacgtgacatgggggctgagtatgttatatgctttggagcacaagggagaccgagctttgacttcaactcaaggagagttggcacatgctctgaggttcttggcatctgtggtgtcacaaagcttcatagcgtttggtgatattcttgagttacacaagaagttccttgaactctctggtggtattaacaggatatttgagcttgaggagcttctacaggcatcacaaagcaatcctgtcatgccttctgatgccacaaatgccggttccgaagaaataatttccttccgtggcgtgaacattgtgacaccatcgcaaaagctattggctagccaactgtcttgtgatgtatctcaagggaaaagccttcttgtgactggtccaaatggtagcggaaagagttccatctttagggtgcttcgaggcttgtggcccattgcttctggtagtcttagcaagccatctgaaggaatttttaatgttcctcaacgtccatatacttgtcttggaaccttgagggatcagatcatataccctctctctcacgaggaggcaaagttgaagatgctctcaggcgaaacaagtgacaagtctacagcttccgagctgttggatgatcacctgaggacgattctagagaatgttcgcttgctgtatcttctggagagagaaggttgggatgctaccactaactgggaagatactctatccttgggagagcagcagaggctggggatggctcgtctgttctttcactgtcccaagtatggcatcctcgacgagtgcaccaatgccacaagcgtggacgttgaggagcatctgtacaggctagcaaccaacatgggcataacagtcatcacatcctcacaaaggcctgctctgattcccttccattcgttggaactgaaactcattgacggcgaaggaaagtgggagctatgttccatccaccaataaccgattgccatcaaccagtttatttatgttcaccggagtagggtatttacaagttgcaacgcacagaggaaaaaaaactcgtccactcgggtgtagagtgtgtgacggagtcttttttttttttggtttcccttttcttttctttttctctcccctttgatggaaatcttgcgatacggaaagggagggaggaaggaaatatacggcaggaaaggaaagtattaggagaggttatagatgcaggcttcgtcatttgggatagcatagtacatgttcctggcatgatatgccagcctgattgatttttatacgagatacagaataagttaaaataaaaatggatatggcacaaagtgtgcccttgtaaattaaatgggaaactaatctataggaaattcatcctctctgtgtcgcccttgcatcgaacgtatcccaatccatatgtaatggcctaatgggaagataccgtatgcaatcactcatatttgcgagaaaaggaatcggcaattaaaatactacacattctgtgaggttgtggtgtttggaattctagtttatgctattttagtggtaattatctacaatgttctagaagcaagtcacttttatgatgcgcccgctaacaaggcaagggtattttatagttagaatctaattgacggataccgtacgacaccctaactaaatttaatactcataaaaaataaatttaatatcaaagtactcataaaaataaatttaatatcaaa

SEQ ID NO: 35315 - DNA, 5096 bp, Zea Mays
  misc_feature (1)..(2): n is a, c, g, or t
nncccgtctccgtctccttctcctcctccccgtcgccgtctccgagtctccctctatttctctccgcccttgttcttctcctctctccctctatcttattacctcaagtagaagtagtatatattttttgtccgccttttcaatttttccttttatctccctgcgtctcttcgtcgtcctcctgctgtggcggccgccggcgatccccgatcggcgatactcagattctagttgtccattgtgctgcactgcagcagtagacaatcgtgtttttcggtgttttgtctgtctctccttgatcattcagatgcctgtacagctcaactgctatagctagctgtatatatctggttgaagaggactaatctagcaacaatgtcatcgcttcagttattgcaactaacagaacgggggcgcaaccttttgtcttcaagaaggagaacacttgcaattgtttctggtgcagtacttgctggtggagctttagcatatgcgcagtcaggtcgatggaaaaaacaccaggaagcaaattcttgcagtgatgcaaactcacatagcagtaataacggaagaactagtcagaacggcattgatggtaaattggttaaaacaaggaaaaagaaaagtggactgaagtccttgcattttttggctgctattttacttaagaagattggcccgaatggaacgaattaccttattggcttgatactaacagcagtcttgcgtacagctgttggccacagattggcaaaagtacaaggatatttattcagatctgcattccttcggcgtattccgacctttacacgtctcattattgaaaatcttcttctatgctttctccaatccacgttatatcagacatcaaagtacttaacagggtctttaggcctgcgcttcaagaaaatcttgacagatcttgtccatgctgattattttgagaacatggtgtactacaagatctcacatgttgatcatcggatcacaaacccagagcaaaggattgcaagtgacataccaaagttctgctcagaattaagtgaccttgtacaggatgatctggctgcaattgtagaagggttaatatacatctggcgcctctgctcttacgcgagtccaaaatatgtgttatggattctggcatatgttataggtgctggtggtacaattagaaaattttctcctgcttttggcaagctgaagtctacagaacaacagctagagggggaatatcgtcaactccattcacgattgagaacccatgctgagagtgtggcgttttatggtggtgagaacagagaagcatcacatattaagcagcggttccgggcacttgttaaacacttgaatgttgttcttcatgaaaactggtggtttggcatgattcaagattttcttctgaagtatcttggcgccactgtgggagttatcctaattattgaacctttctttgcggggaatcttaaacccgaatcatccaccttaggacgggcagagatgttgagcaatctccgataccacaccagcgtgataatatcactatttcaatctcttggaaccatttctattagttcaaggcgcttaaatattctcagtggctatgctaatcgtattcatgaattactggatgtctcgcgtgagctatctggtggccgtgatagattgattactcaaaattcttctgatggaaattatattagcgaggcaaattatatagagttttcagatgttaaggtggtgacaccttctgggaatgtcttggttgataatttgaaccttcatttggagtcgggctctaatctgttgatcactggtcccaatggtagtggaaaaagctcccttttccgtgttcttggtggtctgtggccaatggtatctggtcatattgtcaaacctggtgttggttccaatctcaacaaggaaatattttatgtgccccagagaccatatacagctgttggaacgcttcgcgaccagttaatctatccactcacagcagaccaagagactgaaccacttagctatggtggcatggtggatcttctaaagaatgttgatctggaatacttgctagaacgctatcctcttgataaggaagttaactggggtgacgaattgtctcttggtgagcagcaaagattaggaatggctagactgttctatcataagccaaagtttgctatcctggatgaatgcactagtgctgttacaactgatatggaagagcgcttctgcaaaagggttcgagcaatgggcacatcttgcataacaatatctcaccgtccagcattagttgcgtttcatgaaattgttttatccttagatggtgaaggagggtgggatattcaggacaacagaaatggttccttctctcccgaagttgagtttgatgtgctgaaggcatcagaaagtgatcgcaagtctgatgcacttaccgttcaaagggcttttatcaccagcacaaagggaaatgcgtcaatgaagcccaagaaacattcttattcaacagaggtcatagcatcttcccccagtatggagatagaacatacagtacaatcatctattgtcacacaattgcaatgctctccaagacctttgcctgtcagagttgctgcaatgtctcaaatactggttccaaagctatttgataagcaaggagggcagctgcttgcagtggtacttcttgtattctcccgcacttggatttcagaccgtatagcttcattgaatggaacaagtgtcaagtatgtcttggagcaggacaaagctgccttcattcgtttggctggcactagtgtgctgcaaagtgcagcaaattccatcgtgtcaccctcactgaggaaccttacttcaagaatcgcccttggatggcggattcgcatgaccaatcatttgcttcaatattatttgaaaagaaatgctttttacaaggtattcaacatttcaggtatgagtatggatgcagatcaaagaatgacacatgatgtagagaagttgaccaatgaccttgctggcttgcttactggtatggtgaagccattagttgatattatttggtttacatggagaatgaagcttttgtctgggcgaagaggggttgctatactgtatgcttacatgttcctaggtcttggttttctaagagctgtgtcccctgactttggggatcttgcaaaccaagaacaagaacttgaaggcacgttcaggttcatgcactcaagattgcggacacatgctgagtcaatagctttctttggtggtggatcaagggagaaagctatgattgacgctaaattcatgacattgctcaaccactcgaaggttctattgagaaagaagtggctttatggtatttttgatgattttgtgacgaaacagcttcctcataacgtgacatgggggctgagtatgttatatgctttggagcacaagggagaccgagctttgacttcaactcaaggagagttggcacatgctctgaggttcttggcatctgtggtgtcacaaagcttcatagcgtttggtgatattcttgagttacacaagaagttccttgaactctctggtggtattaacaggatatttgagcttgaggagcttctacaggcatcacaaagcaatcctgtcatgccttctgatgccacaaatgccggttccgaagaaataatttccttccgtggcgtgaacattgtgacaccatcgcaaaagctattggctagccaactgtcttgtgatgtatctcaagggaaaagccttcttgtgactggtccaaatggtagcggaaagagttccatctttagggtgcttcgaggcttgtggcccattgcttctggtagtcttagcaagccatctgaaggaatttttaatgttcctcaacgtccatatacttgtcttggaaccttgagggatcagatcatataccctctctctcacgaggaggcaaagttgaagatgctctcaggcgaaacaagtgacaagtctacagcttccgagctgttggatgatcacctgaggacgattctagagaatgttcgcttgctgtatcttctggagagagaaggttgggatgctaccactaactgggaagatactctatccttgggagagcagcagaggctggggatggctcgtctgttctttcactgtcccaagtatggcatcctcgacgagtgcaccaatgccacaagcgtggacgttgaggagcatctgtacaggctagcaaccaacatgggcataacagtcatcacatcctcacaaaggcctgctctgattcccttccattcgttggaactgaaactcattgacggcgaaggaaagtgggagctatgttccatccaccaataaccgattgccatcaaccagtttatttatgttcaccggagtagggtatttacaagttgcaacgcacagaggaaaaaaaactcgtccactcgggtgtagagtgtgtgacggagtcttttttttttttggtttcccttttcttttctttttctctcccctttgatggaaatcttgcgatacggaaagggagggaggaaggaaatatacggcaggaaaggaaagtattaggagaggttatagatgcaggcttcgtcatttgggatagcatagtacatgttcctggcatgatatgccagcctgattgatttttatacgagatacagaataagttaaaataaaaatggatatggcacaaagtgtgcccttgtaaattaaatgggaaactaatctataggaaattcatcctctctgtgtcgcccttgcatcgaacgtatcccaatccatatgtaatggcctaatgggaagataccgtatgcaatcactcatatttgcgagaaaaggaatcggcaattaaaatactacacattctgtgaggttgtggtgtttggaattctagtttatgctattttagtggtaattatctacaatgttctagaagcaagtcacttttatgatgcgcccgctaacaaggcaagggtattttatagttagaatctaattgacggataccgtacgacaccctaactaaatttaatactcataaaaaataaatttaatatcaaagtactcataaaaataaatttaatatcaaa

SEQ ID NO: 35316 - DNA, 3333 bp, Zea Mays
cccgtctccgtctccttctcctcctccccgtcgccgtctccgagtctccctctatttctctccgcccttgttcttctcctctctccctctatcttattacctcaagtagaagtagtatatattttttgtccgccttttcaatttttccttttatctccctgcgtctcttcgtcgtcctcctgctgtggcggccgccggcgatccccgatcggcgatactcagattctagttgtccattgtgctgcactgcagcagtagacaatcgtgtttttcggtgttttgtctgtctctccttgatcattcagatgcctgtacagctcaactgctatagctagctgtatatatctggttgaagaggactaatctagcaacaatgtcatcgcttcagttattgcaactaacagaacgggggcgcaaccttttgtcttcaagaaggagaacacttgcaattgtttctggtgcagtacttgctggtggagctttagcatatgcgcagtcaggtcgatggaaaaaacaccaggaagcaaattcttgcagtgatgcaaactcacatagcagtaataacggaagaactagtcagaacggcattgatggtaaattggttaaaacaaggaaaaagaaaagtggactgaagtccttgcattttttggctgctattttacttaagaagattggcccgaatggaacgaattaccttattggcttgatactaacagcagtcttgcgtacagctgttggccacagattggcaaaagtacaaggatatttattcagatctgcattccttcggcgtattccgacctttacacgtctcattattgaaaatcttcttctatgctttctccaatccacgttatatcagacatcaaagtacttaacagggtctttaggcctgcgcttcaagaaaatcttgacagatcttgtccatgctgattattttgagaacatggtgtactacaagatctcacatgttgatcatcggatcacaaacccagagcaaaggattgcaagtgacataccaaagttctgctcagaattaagtgaccttgtacaggatgatctggctgcaattgtagaagggttaatatacatctggcgcctctgctcttacgcgagtccaaaatatgtgttatggattctggcatatgttataggtgctggtggtacaattagaaaattttctcctgcttttggcaagctgaagtctacagaacaacagctagagggggaatatcgtcaactccattcacgattgagaacccatgctgagagtgtggcgttttatggtggtgagaacagagaagcatcacatattaagcagcggttccgggcacttgttaaacacttgaatgttgttcttcatgaaaactggtggtttggcatgattcaagattttcttctgaagtatcttggcgccactgtgggagttatcctaattattgaacctttctttgcggggaatcttaaacccgaatcatccaccttaggacgggcagagatgttgagcaatctccgataccacaccagcgtgataatatcactatttcaatctcttggaaccatttctattagttcaaggcgcttaaatattctcagtggctatgctaatcgtattcatgaattactggatgtctcgcgtgagctatctggtggccgtgatagattgattactcaaaattcttctgatggaaattatattagcgaggcaaattatatagagttttcagatgttaaggtggtgacaccttctgggaatgtcttggttgataatttgaaccttcatttggagtcgggctctaatctgttgatcactggtcccaatggtagtggaaaaagctcccttttccgtgttcttggtggtctgtggccaatggtatctggtcatattgtcaaacctggtgttggttccaatctcaacaaggaaatattttatgtgccccagagaccatatacagctgttggaacgcttcgcgaccagttaatctatccactcacagcagaccaagagactgaaccacttagctatggtggcatggtggatcttctaaagaatgttgatctggaatacttgctagaacgctatcctcttgataaggaagttaactggggtgacgaattgtctcttggtgagcagcaaagattaggaatggctagactgttctatcataagccaaagtttgctatcctggatgaatgcactagtgctgttacaactgatatggaagagcgcttctgcaaaagggttcgagcaatgggcacatcttgcataacaatatctcaccgtccagcattagttgcgtttcatgaaattgttttatccttagatggtgaaggagggtgggatattcaggacaacagaaatggttccttctctcccgaagttgagtttgatgtgctgaaggcatcagaaagtgatcgcaagtctgatgcacttaccgttcaaagggcttttatcaccagcacaaagggaaatgcgtcaatgaagcccaagaaacattcttattcaacagaggtcatagcatcttcccccagtatggagatagaacatacagtacaatcatctattgtcacacaattgcaatgctctccaagacctttgcctgtcagagttgctgcaatgtctcaaatactggttccaaagctatttgataagcaaggagggcagctgcttgcagtggtacttcttgtattctcccgcacttggatttcagaccgtatagcttcattgaatggaacaagtgtcaagtatgtcttggagcaggacaaagctgccttcattcgtttggctggcactagtgtgctgcaaagtgcagcaaattccatcgtgtcaccctcactgaggaaccttacttcaagaatcgcccttggatggcggattcgcatgaccaatcatttgcttcaatattatttgaaaagaaatgctttttacaaggtattcaacatttcaggtatgagtatggatgcagatcaaagaatgacacatgatgtagagaagttgaccaatgaccttgctggcttgcttactggtatggtgaagccattagttgatattatttggtttacatggagaatgaagcttttgtctgggcgaagaggggttgctatactgtatgcttacatgttcctaggtcttggttttctaagagctgtgtcccctgactttggggatcttgcaaaccaagaacaagaacttgaaggcacgttcaggttcatgcactcaagattgcggacacatgctgagtcaatagctttctttggtggtggatcaagggagaaagctgcatgcacctgaaaacaaaagacccacatcacaagcttatgttgagagaaaat

SEQ ID NO: 35317 - DNA, 3317 bp, Zea Mays
cccgtctccgtctccttctcctcctccccgtcgccgtctccgagtctccctctatttctctccgcccttgttcttctcctctctccctctatcttattacctcaagtagaagtagtatatattttttgtccgccttttcaatttttccttttatctccctgcgtctcttcgtcgtcctcctgctgtggcggccgccggcgatccccgatcggcgatactcagattctagttgtccattgtgctgcactgcagcagtagacaatcgtgtttttcggtgttttgtctgtctctccttgatcattcagatgcctgtacagctcaactgctatagctagctgtatatatctggttgaagaggactaatctagcaacaatgtcatcgcttcagttattgcaactaacagaacgggggcgcaaccttttgtcttcaagaaggagaacacttgcaattgtttctggtgcagtacttgctggtggagctttagcatatgcgcagtcaggtcgatggaaaaaacaccaggaagcaaattcttgcagtgatgcaaactcacatagcagtaataacggaagaactagtcagaacggcattgatggtaaattggttaaaacaaggaaaaagaaaagtggactgaagtccttgcattttttggctgctattttacttaagaagattggcccgaatggaacgaattaccttattggcttgatactaacagcagtcttgcgtacagctgttggccacagattggcaaaagtacaaggatatttattcagatctgcattccttcggcgtattccgacctttacacgtctcattattgaaaatcttcttctatgctttctccaatccacgttatatcagacatcaaagtacttaacagggtctttaggcctgcgcttcaagaaaatcttgacagatcttgtccatgctgattattttgagaacatggtgtactacaagatctcacatgttgatcatcggatcacaaacccagagcaaaggattgcaagtgacataccaaagttctgctcagaattaagtgaccttgtacaggatgatctggctgcaattgtagaagggttaatatacatctggcgcctctgctcttacgcgagtccaaaatatgtgttatggattctggcatatgttataggtgctggtggtacaattagaaaattttctcctgcttttggcaagctgaagtctacagaacaacagctagagggggaatatcgtcaactccattcacgattgagaacccatgctgagagtgtggcgttttatggtggtgagaacagagaagcatcacatattaagcagcggttccgggcacttgttaaacacttgaatgttgttcttcatgaaaactggtggtttggcatgattcaagattttcttctgaagtatcttggcgccactgtgggagttatcctaattattgaacctttctttgcggggaatcttaaacccgaatcatccaccttaggacgggcagagatgttgagcaatctccgataccacaccagcgtgataatatcactatttcaatctcttggaaccatttctattagttcaaggcgcttaaatattctcagtggctatgctaatcgtattcatgaattactggatgtctcgcgtgagctatctggtggccgtgatagattgattactcaaaattcttctgatggaaattatattagcgaggcaaattatatagagttttcagatgttaaggtggtgacaccttctgggaatgtcttggttgataatttgaaccttcatttggagtcgggctctaatctgttgatcactggtcccaatggtagtggaaaaagctcccttttccgtgttcttggtggtctgtggccaatggtatctggtcatattgtcaaacctggtgttggttccaatctcaacaaggaaatattttatgtgccccagagaccatatacagctgttggaacgcttcgcgaccagttaatctatccactcacagcagaccaagagactgaaccacttagctatggtggcatggtggatcttctaaagaatgttgatctggaatacttgctagaacgctatcctcttgataaggaagttaactggggtgacgaattgtctcttggtgagcagcaaagattaggaatggctagactgttctatcataagccaaagtttgctatcctggatgaatgcactagtgctgttacaactgatatggaagagcgcttctgcaaaagggttcgagcaatgggcacatcttgcataacaatatctcaccgtccagcattagttgcgtttcatgaaattgttttatccttagatggtgaaggagggtgggatattcaggacaacagaaatggttccttctctcccgaagttgagtttgatgtgctgaaggcatcagaaagtgatcgcaagtctgatgcacttaccgttcaaagggcttttatcaccagcacaaagggaaatgcgtcaatgaagcccaagaaacattcttattcaacagaggtcatagcatcttcccccagtatggagatagaacatacagtacaatcatctattgtcacacaattgcaatgctctccaagacctttgcctgtcagagttgctgcaatgtctcaaatactggttccaaagctatttgataagcaaggagggcagctgcttgcagtggtacttcttgtattctcccgcacttggatttcagaccgtatagcttcattgaatggaacaagtgtcaagtatgtcttggagcaggacaaagctgccttcattcgtttggctggcactagtgtgctgcaaagtgcagcaaattccatcgtgtcaccctcactgaggaaccttacttcaagaatcgcccttggatggcggattcgcatgaccaatcatttgcttcaatattatttgaaaagaaatgctttttacaaggtatgagtatggatgcagatcaaagaatgacacatgatgtagagaagttgaccaatgaccttgctggcttgcttactggtatggtgaagccattagttgatattatttggtttacatggagaatgaagcttttgtctgggcgaagaggggttgctatactgtatgcttacatgttcctaggtcttggttttctaagagctgtgtcccctgactttggggatcttgcaaaccaagaacaagaacttgaaggcacgttcaggttcatgcactcaagattgcggacacatgctgagtcaatagctttctttggtggtggatcaagggagaaagctgcatgcacctgaaaacaaaagacccacatcacaagcttatgttgagagaaaat

SEQ ID NO: 35318 - DNA, 3700 bp, Zea Mays
cccgtctccgtctccttctcctcctccccgtcgccgtctccgagtctccctctatttctctccgcccttgttcttctcctctctccctctatcttattacctcaagtagaagtagtatatattttttgtccgccttttcaatttttccttttatctccctgcgtctcttcgtcgtcctcctgctgtggcggccgccggcgatccccgatcggcgatactcagattctagttgtccattgtgctgcactgcagcagtagacaatcgtgtttttcggtgttttgtctgtctctccttgatcattcagatgcctgtacagctcaactgctatagctagctgtatatatctggttgaagaggactaatctagcaacaatgtcatcgcttcagttattgcaactaacagaacgggggcgcaaccttttgtcttcaagaaggagaacacttgcaattgtttctggtgcagtacttgctggtggagctttagcatatgcgcagtcaggtcgatggaaaaaacaccaggaagcaaattcttgcagtgatgcaaactcacatagcagtaataacggaagaactagtcagaacggcattgatggtaaattggttaaaacaaggaaaaagaaaagtggactgaagtccttgcattttttggctgctattttacttaagaagattggcccgaatggaacgaattaccttattggcttgatactaacagcagtcttgcgtacagctgttggccacagattggcaaaagtacaaggatatttattcagatctgcattccttcggcgtattccgacctttacacgtctcattattgaaaatcttcttctatgctttctccaatccacgttatatcagacatcaaagtacttaacagggtctttaggcctgcgcttcaagaaaatcttgacagatcttgtccatgctgattattttgagaacatggtgtactacaagatctcacatgttgatcatcggatcacaaacccagagcaaaggattgcaagtgacataccaaagttctgctcagaattaagtgaccttgtacaggatgatctggctgcaattgtagaagggttaatatacatctggcgcctctgctcttacgcgagtccaaaatatgtgttatggattctggcatatgttataggtgctggtggtacaattagaaaattttctcctgcttttggcaagctgaagtctacagaacaacagctagagggggaatatcgtcaactccattcacgattgagaacccatgctgagagtgtggcgttttatggtggtgagaacagagaagcatcacatattaagcagcggttccgggcacttgttaaacacttgaatgttgttcttcatgaaaactggtggtttggcatgattcaagattttcttctgaagtatcttggcgccactgtgggagttatcctaattattgaacctttctttgcggggaatcttaaacccgaatcatccaccttaggacgggcagagatgttgagcaatctccgataccacaccagcgtgataatatcactatttcaatctcttggaaccatttctattagttcaaggcgcttaaatattctcagtggctatgctaatcgtattcatgaattactggatgtctcgcgtgagctatctggtggccgtgatagattgattactcaaaattcttctgatggaaattatattagcgaggcaaattatatagagttttcagatgttaaggtggtgacaccttctgggaatgtcttggttgataatttgaaccttcatttggagtcgggctctaatctgttgatcactggtcccaatggtagtggaaaaagctcccttttccgtgttcttggtggtctgtggccaatggtatctggtcatattgtcaaacctggtgttggttccaatctcaacaaggaaatattttatgtgccccagagaccatatacagctgttggaacgcttcgcgaccagttaatctatccactcacagcagaccaagagactgaaccacttagctatggtggcatggtggatcttctaaagaatgttgatctggaatacttgctagaacgctatcctcttgataaggaagttaactggggtgacgaattgtctcttggtgagcagcaaagattaggaatggctagactgttctatcataagccaaagtttgctatcctggatgaatgcactagtgctgttacaactgatatggaagagcgcttctgcaaaagggttcgagcaatgggcacatcttgcataacaatatctcaccgtccagcattagttgcgtttcatgaaattgttttatccttagatggtgaaggagggtgggatattcaggacaacagaaatggttccttctctcccgaagttgagtttgatgtgctgaaggcatcagaaagtgatcgcaagtctgatgcacttaccgttcaaagggcttttatcaccagcacaaagggaaatgcgtcaatgaagcccaagaaacattcttattcaacagaggtcatagcatcttcccccagtatggagatagaacatacagtacaatcatctattgtcacacaattgcaatgctctccaagacctttgcctgtcagagttgctgcaatgtctcaaatactggttccaaagctatttgataagcaaggagggcagctgcttgcagtggtacttcttgtattctcccgcacttggatttcagaccgtatagcttcattgaatggaacaagtgtcaagtatgtcttggagcaggacaaagctgccttcattcgtttggctggcactagtgtgctgcaaagtgcagcaaattccatcgtgtcaccctcactgaggaaccttacttcaagaatcgcccttggatggcggattcgcatgaccaatcatttgcttcaatattatttgaaaagaaatgctttttacaaggtattcaacatttcaggtatgagtatggatgcagatcaaagaatgacacatgatgtagagaagttgaccaatgaccttgctggcttgcttactggtatggtgaagccattagttgatattatttggtttacatggagaatgaagcttttgtctgggcgaagaggggttgctatactgtatgcttacatgttcctaggtcttggttttctaagagctgtgtcccctgactttggggatcttgcaaaccaagaacaagaacttgaaggcacgttcaggttcatgcactcaagattgcggacacatgctgagtcaatagctttctttggtggtggatcaagggagaaagcttcttaaggttcattcaaaattccaaaaatcatcacaacaacaaagccttttagtcccaagcaagttggtgtagattagagttgaaacccaatagaaaccacaagtcaaggttcagatacatagatagttgtttccatgcactccttttatgactaaatctttgggtatattctatcctttcaagtctcattttactgccttttctcaagttaacttcagccttcctctgcctctcttcctattgcaatcgcaccttaggaactcactacacaatggtgtctctataggtctccattggacatgtcttaaaccatcacaaccggtattggacaagcttttcttcaattggtgttacccctagcctatcacacacatcatcattttggattcgatcactttttgaatggccataaatccaac

SEQ ID NO: 35319 - DNA, 1391 bp, Zea Mays
acatatttttacattataaataacactatttatagagtagagtttaaaataagagatacaaagataagaggtgaaagctgctcgaaatagtgctgcccagctgcaactcacatttcgggcccatttaacccgagtccttatcctttaaaatggagaaaaaatatctcccctccttcctgatcatcctctcagtccttgcttgtcctcccatcccggagatcgacggctgcttgccgcactcgctccagcggccagccggccacaggcaactatggccgcctctgccgccgccgcggggcctgctacctttctcccgcgcctcccctcgccacggtctccgtctcctatgctccctcctctcggacggagagcccatcccgtcgccgctccgctctgtctctccgccaagcgccgcgcctgcgccgccatgggctccagctcctcctccaactcaggaaatcaaacgtcactgatgctgccgttcagctttacattcgatgaagattcttctagttccagaaggctatatagatggaaaagggtattgctcaaagtaagtggggaagctcttgccgggaatcacacagaaaacatcgacccaaagattacaatggctattgcaagagaagttgcttctgtcaccaaactaggtgtagaggtgccctcctgtcttttatttcattattgattacatcttgtattacttggttcaaggtttagaattgatgaagtaaagagtgctagtacatctttttaatagtaggcattatctcaatggctcaattctgttgcattcctatcaagtgcttttggatgtgtatttgtgtgtgtgtgatttaccttttgttttctctaaagcaatcgcatgatgtgcattaaaaaatgtgagagcccttgcaggttgctattgttgttggcggtggcaatatcttccgtggggcctcttgggctggatgtagtgggcttgaccgctcatctgcggattacatcggcatgctggccactgtgatgaatgctatatttcttcaagcgacgatggagagcatcggaataccgacccgtgtccagactgccttccgtatgtcagaagttgcagaaccatacatacgccgaagagctgtcagacatttagagaaaggaagagatgcaagagttgggggggctccctcttctcttattcagtttttatatatacatatgaggtttagggttgggggctggtgctggaattagattagattagctatcaaaatcctgataatagttgtaaccgtgaaataagacacttggacgaaattaaaattttcctgcaaagtgctattgttctgtgtacctaaagatcaattttgctggctcccggacagtgaacaacgatgtgcacgtgcttgata

SEQ ID NO: 35320 - DNA, 766 bp, Zea Mays
aataaattaacgcggcccgagtacgtatttgggccaaatccagcccagcccactaggcccactaaacaaccctaaccctagggttgcttctataaataggggtgctcacttggaaattttccactctcacccctcaaaaaattccagctgccactctcttctcctttctcccccaggcaccttcttcctccttgcgcagggcggcagcagccaccagcgagccctgctccatgggcgtcacccctcaccttcttcctccccacggctgcagctcttccactcctccctcacgccagcagcagccccctgttcatggctgccagcccttgctccccttttgccccactgcgcagcagctctgcgctccacctcccatggacgcccagaaattccagcagcaaggactccatagcagcagcagcttgaccctctgctcccagccatggcgcccaaaaaaaaatcccctagccgagccacctctcccagccagcgcccctgttcccttgctccttctccctcgcacagcagcagctcgccccaccttccctcgctgcgcagctcctcggcgaaacgccgctgttcctgcaagccccggcttcctcgctgctaccgctgcgcgcatgccaagtgctcggcataatgtcaagggagatgtgttgttgcagcacgttgtgacgctccccgggtgttcactgtttttggcgcagacccgctcgcgacatcgtcgaccctcgccaccgtcaaaatcacgctccgcgtttggccg

SEQ ID NO: 35321 - DNA, 1749 bp, Zea Mays
gtcttcttccctgatcaggcagcaggactagatccattccccctccctctgccaatctggccagctagccagcccagtccccacgcccatcccatcccatctaaaaactgcatcgaatcctcgccgccgcaccgctaggactcagccgacggcatgccgccgcccaactccgctccccgcctcgcgcttcccgcaatggcccgatcccagacccagacccagtcccagggagacctcgacttcccgtccctcatctccgacctcacctccctgctcctccactcccccgccagcgccggcgccggtggctccggacccgtcttctcctcctcctccctttccatccccactcccaaacccaagccgaaccccagtcccacatcagcagcgccgccgaccccgctggcgcgcgcggccatcggggcctgcgcgggcgcggccgcgggggccttcacttacgcggcgctgctccccatcgacgccgtgaagacgcggctccaggtgcaggcggccgccgcgccgtctgtgacctcgtggcaggtgttcctggacatcctccggaccgacggccccctcggcctctaccgtggcctctccgccgtcatcctcggctccgcctcctcctccgccgtctacttcggcacctgcgagctcgccaagtcgctgctccggccgcacctcccgccgttcctcgtgcccccactcgcgggggccagcggcaacgtctcgtcctccgccatcatggtgcccaaggagctgatcacgcagcgcctccagtccggcgccgccacgggccggtcctggcaggtgctcctgggcatcctccgcgccgacggcttcctcggcctctacgcgggctacgccgccacgctgctccgcaacctccccgccggcgtgctcagctactcctccttcgagtacctcaaggcgttcgcgctgaggcgccgcggcggagagagcctgacgcccggggagagcgtcctctgcggcgccctcgcgggggccatctccgccgcggtcaccaccccgctcgacgtcgtcaagacgcgcctcatgaccagggtcggcggcgccgagggtagccgcaccgtgctcgggaccatgagggaggtcgtcgcggaggaggggctcgtcggcctgtcccgtggcatcgggcccagggtgctgcacagcgcgtgctttgcggcgctaggctactgtgcctttgagaccgcgaagcttgccatcctgcagtgctaccttgaacgctgccagagcaaggagcctggagcagcagcgcagccagagacggagcctggagctgccgctgctacttgagagtttgctgcctgcctgctttcctttttgcgcctttttccccagggagggaagtgctgcatattccagacctaccccatacaatcgtgcagccgggaatcaatcgccttttttctttttacttctaaagtttccggtgccagatctccattttgctgtgcactgaagttctggacccaatgtgttaattctggttcaacccatatcaacttagcctcctggacttggaggatcaccaatgagatgaggcataatttccgcacaaatattcaggaagggttttccattcgatgttataatcgtgcccaagaaggaaaaatggcatttgccatcatctggataaacattagattcaggtggccctgtggtggtattcgcatgtatgaaacactgcaaacagtaaacttgcgttgcatggctcgctcattgaac

SEQ ID NO: 35322 - DNA, 1533 bp, Zea Mays
ccgcagccagccacccgcatggtcgtctcgtcttcttccctgatcaggcagcaggactagatccattccccctccctctgccaatctggccagctagccagcccagtccccacgcccatcccatcccatctaaaaactgcatcgaatcctcgccgccgcaccgctaggactcagccgacggcatgccgccgcccaactccgctcccaaacccaagccgaaccccagtcccacatcagcagcgccgccgaccccgctggcgcgcgcggccatcggggcctgcgcgggcgcggccgcgggggccttcacttacgcggcgctgctccccatcgacgccgtgaagacgcggctccaggtgcaggcggccgccgcgccgtctgtgacctcgtggcaggtgttcctggacatcctccggaccgacggccccctcggcctctaccgtggcctctccgccgtcatcctcggctccgcctcctcctccgccgtctacttcggcacctgcgagctcgccaagtcgctgctccggccgcacctcccgccgttcctcgtgcccccactcgcgggggccagcggcaacgtctcgtcctccgccatcatggtgcccaaggagctgatcacgcagcgcctccagtccggcgccgccacgggccggtcctggcaggtgctcctgggcatcctccgcgccgacggcttcctcggcctctacgcgggctacgccgccacgctgctccgcaacctccccgccggcgtgctcagctactcctccttcgagtacctcaaggcgttcgcgctgaggcgccgcggcggagagagcctgacgcccggggagagcgtcctctgcggcgccctcgcgggggccatctccgccgcggtcaccaccccgctcgacgtcgtcaagacgcgcctcatgaccagggtcggcggcgccgagggtagccgcaccgtgctcgggaccatgagggaggtcgtcgcggaggaggggctcgtcggcctgtcccgtggcatcgggcccagggtgctgcacagcgcgtgctttgcggcgctaggctactgtgcctttgagaccgcgaagcttgccatcctgcagtgctaccttgaacgctgccagagcaaggagcctggagcagcagcgcagccagagacggagcctggagctgccgctgctacttgagagtttgctgcctgcctgctttcctttttgcgcctttttccccagggagggaaggtaactgttgctgcttggtactactctagtctaggtgtatgctacgttggcagatgatgcaccattatagagtaaatttcagaaacagcatggcagttacacaagtctcaacaacattaaactattaagttactagacatcaaatctggtggaaattggatacattcttcataattggttcgatttgtgcgtatttctgctgttccactggtggtgaaactacaactgttccttatctgtctagcaccgttgttattctgggctatccagccccttctgttactgttgttaatgtgatccctcttaattt

SEQ ID NO: 35323 - DNA, 411 bp, Zea Mays
ttctcgatagatctctaatctatactacttattaagactgcaagggtagcctgcctctggctgttctgccacccaccgtggctgtccctctcacgcggcaaaaatatgaggcatgtagggatcgaaccgtgactaattctctacaggcgctagcacttaaccactccaactaagtctgctttatgttacgtcaccacataaggttatactgatattccgtaaatcgtgaatgcatacatcaataggtattgttgcttgataacttcatgtgtgtgagatctaccatttctctagctcatttatgtatttttcaatagcaaacctctctgtttattgatttcagaacgacatttcgacggtattcaaatgattaacatttgtaaaaggtcctacatcacacatcaagttggg

SEQ ID NO: 35324 - DNA, 1103 bp, Zea Mays
cgagcagtgacagggaggccggcacggcagcgcggcggcgcacgcgtgtgcgtggctgcgtgccagctcgaacgcccggcgctgcacctccacgcacacgaaaccttgccgtgcgcgcgggctggcttgccgcgcgcgcgtccttggctttaagtaccggaggagcaagctcgcctctgccagactcagacggcgagcagaacacacctgcagctgcagaaatagggtcatgtcctgctagcttgagagctctggtacggtgtagcaaggtacgggagagagagagagagtagcaaactagctagggcacagggcagggcaggggccggctgcattatattgggatcggatctgggggcgaccgagctagcatcagctgagagaagagagagggggcaatatataatggtgttgttgtcgctggaggcgttgaggaagaggaacgtggccggtccgctgctgctgttcaacctcgccctctacgtctccatgttggggttcgcgagctgggcgctcaacgccttcgtcgaccacataggcgaccaccaatactacgacccacctgcaggcgacgcgtgcacgtgcatggacacgcacacgcctgcaggagcggcgccgcgcagcgccggcgacgaggcgatgctccacttccaccaccaccaacccaggcagggcggcgggccctcgtgcagtgtcatgtgaactagcatacccatgcatgcatgtttggtggtgtcgctctcttgtcttgccattttccgtgctcgtgtttcgtctcgtggaaaataagcaatttaaacttagtttaatttcctgtatgtcatgtgttcgttttagtgtgtatgcctcctatatattatggtcgtatgtgtgtgtcgacatgcttgtgtctctcagtatgtgcgtgtgtctgtttgtatgtgtcagcatcagtgtatgtaagggtcggtttggtaagttctatcttattctgattcttcgtgagaattagttctatgacataagtgattctatgactaaaagtgattgtttttattctttaatataaactctgaaaaacatgtgcccgtgtattgtaacaatacataaatattcgataaaat

SEQ ID NO: 35325 - DNA, 597 bp, Zea Mays
cgagcagtgacagggaggccggcacggcagcgcggcggcgcacgcgtgtgcgtggctgcgtgccagctcgaacgcccggcgctgcacctccacgcacacgaaaccttgccgtgcgcgcgggctggcttgccgcgcgcgcgtccttggctttaagtaccggaggagcaagctcgcctctgccagactcagacggcgagcagaacacacctgcagctgcagaaatagggtcatgtcctgctagcttgagagctctggtacggtgtagcaaggtacgggagagagagagagagtagcaaactagctagggcacagggcagggcaggggccggctgcattatattgggatcggatctgggggcgaccgagctagcatcagctgagagaagagagagggggcaatatataatggtgttgttgtcgctggaggcgttgaggaagaggaacgtggccggtccgctgctgctgttcaacctcgccctctacgtctccatgttggggttcgcgagctgggcgctcaacgccttcgtcgaccacataggcgaccaccaatactacgacccacctgcaggagcggcgccgcgcagcgccggcgacgag

SEQ ID NO: 35326 - DNA, 871 bp, Zea Mays
catttttgtattgtacacttgacagactgcttgagggctagtcgtccacggtccaccaacattccaacaccaagcccagcagggcagtaggctagcacgtcatcacacattcacaccatcccatcaggcatccaggcaccaccgcacgtagcgatagcacaagcaaaaaaaacaaaccctacaggctacaacctacgcggacgcggtttgctgggcggctgtgcctgcgtcggcgggcgccgcacctgcacacaacacgcctgttcttgaccggagctgacactggccaccgcagctgacaccggcgcacctccccctgaccggattcaggcctgacaccactgaggcgccgactactaggagcccagccgccaggacggtgacgaactgatagccatggattctcagacgccgacaaactcggatggtgaccaaggaaggaacgctgacaaggaagtgcaagtgccacatctaactgctccatcatcggtggctggtgtgagtgcgaccaacaccaactccaactccaactcgatcaacagccaaccgccagacgccaactccgactgcaggtgttgttgctgccaagaacaagaagatagacaacccttcaaaagcaagagacaaagcgtctactccagaatcatctaccaccagtggcgtcgttcaatcaaaatccctagggtttgattgtaaagcttgcaaaccctcttttgttttcttactctgatttttttatccatttttgtaatttagacaggaaattagtttgtatattaatgtgttctgtattggacagatttgaaaggaaataggcttacaccttttcctaattgattttggtggttgaactgcccaacacaaataattg

SEQ ID NO: 35327 - DNA, 1314 bp, Zea Mays
accctggtggcagtgtcaccgagacgaaacaaggaaggaaccagtggaagtgggatctggatctctcctctctcgtctgcaccgcgagtccgcgactccgcaccaagcaaatcccctgcccccaaaatattgctagggattcgaggggaggaaaatccaggcgcccaggcctggcaatccgttcgtcggagaggccatgagctcggcgcaggatccgttctacatcgtccgggaggagatccaggagtcgattgataaattgcaaagtaacttccaccgctgggagcaaactgcttcaaacacaggagaatatgttcatctgacaaaggagcttctgaccagctgtgaaagcatcgagtggcaggtagatgagctggaaaagacaatctcagttgcatcaagggatccatcatactatggacttgatgaagttgaactttccagacgaagaaactggactggttctgctcataagcaggttggtacagttaagagagctattgaaaagggcaagagcaatgtagcaacttcaaaataccaggatacaagcaggaccaaccactattctgcccaagataatgatgactttatctcttcagaatcagataggcagcttctactcatgaggcagcaggatgaagaacttgacgagctcagtgaaagtgttcaaaggattggtggcgtaggactaaccatacacgaagagctgtctggacaggaaaggatcctaaacgacttaagcttggagatggagactacttccaacagacttgatttcgtgcagaaaagagtggccatggtgatgaagaaggccggcatcaagggtcagatcatgctgatcgtgttcctggttgttctgttcatcattctttttgttttggtgttcttgacatagccaagtgcaccagggtcctcgattttctccctcccatttgttgtgcctccctccctagtacgaacataagtatacgtgctggagctatcctttataaatcccgattttaatgcattttgttctgcgtgagatcaccgtcattggaacggtgttatggtactgttcatcatccaaaatggaggcagccgattcgattcctctttctccacgtaaagcaaaatgaggatgggagcggtattgttggagtgatgaacagtgcttggtttatagcgtgtaaaatggggacggggagtgactgttggaggagaggagatgagatggatgcgtgctaaaaggcaaccgatactaaatgaatgttcaccaaccaaatgaatgttggaacttttgtttcttaatttataatgccaagtgttcgtctc

SEQ ID NO: 35328 - DNA, 1384 bp, Zea Mays
accctggtggcagtgtcaccgagacgaaacaaggaaggaaccagtggaagtgggatctggatctctcctctctcgtctgcaccgcgagtccgcgactccgcaccaagcaaatcccctgcccccaaaatattgctagggattcgaggggaggaaaatccaggcgcccaggcctggcaatccgttcgtcggagaggccatgagctcggcgcaggatccgttctacatcgtccgggaggagatccaggagtcgattgataaattgcaaagtaacttccaccgctgggagcaaactgcttcaaacacaggagaatatgttcatctgacaaaggagcttctgaccagctgtgaaagcatcgagtggcaggtagatgagctggaaaagacaatctcagttgcatcaagggatccatcatactatggacttgatgaagttgaactttccagacgaagaaactggactggttctgctcataagcaggttggtacagttaagagagctattgaaaagggcaagagcaatgtagcaacttcaaaataccaggatacaagcaggaccaaccactattctgcccaagataatgatgactttatctcttcagaatcagataggcagcttctactcatgaggcagcaggatgaagaacttgacgagctcagtgaaagtgttcaaaggattggtggcgtaggactaaccatacacgaagagctgtctggacaggatcctaaacgacttaagcttggagatggagactacttccaacagacttgatttcgtgcagaaaagagtggccatggtgatgaagaaggccggcatcaagggtcagatcatgctgatcgtgttcctggttgttctgttcatcattctttttgttttggtgttcttgacatagccaagtgcaccagggtcctcgattttctccctcccatttgttgtgcctccctccctagtacgaacataagtatacgtgctggagctatcctttataaatcccgattttaatgcattttgttctgcgtgagatcaccgtcattggaacggtgttatggtatgtatgccctagtcgctcttgttcgaagaactctgaagatcaattctacgactaagacgacttcattttgaggtactgttcatcatccaaaatggaggcagccgattcgattcctctttctccacgtaaagcaaaatgaggatgggagcggtattgttggagtgatgaacagtgcttggtttatagcgtgtaaaatggggacggggagtgactgttggaggagaggagatgagatggatgcgtgctaaaaggcaaccgatactaaatgaatgttcaccaaccaaatgaatgttggaacttttgtttcttaatttataatgccaagtgttcgtctc

SEQ ID NO: 35329 - DNA, 1385 bp, Zea Mays
accctggtggcagtgtcaccgagacgaaacaaggaaggaaccagtggaagtgggatctggatctctcctctctcgtctgcaccgcgagtccgcgactccgcaccaagcaaatcccctgcccccaaaatattgctagggattcgaggggaggaaaatccaggcgcccaggcctggcaatccgttcgtcggagaggccatgagctcggcgcaggatccgttctacatcgtccgggaggagatccaggagtcgattgataaattgcaaagtaacttccaccgctgggagcaaactgcttcaaacacaggagaatatgttcatctgacaaaggagcttctgaccagctgtgaaagcatcgagtggcagatgagctggaaaagacaatctcagttgcatcaagggatccatcatactatggacttgatgaagttgaactttccagacgaagaaactggactggttctgctcataagcaggttggtacagttaagagagctattgaaaagggcaagagcaatgtagcaacttcaaaataccaggatacaagcaggaccaaccactattctgcccaagataatgatgactttatctcttcagaatcagataggcagcttctactcatgaggcagcaggatgaagaacttgacgagctcagtgaaagtgttcaaaggattggtggcgtaggactaaccatacacgaagagctgtctggacaggaaaggatcctaaacgacttaagcttggagatggagactacttccaacagacttgatttcgtgcagaaaagagtggccatggtgatgaagaaggccggcatcaagggtcagatcatgctgatcgtgttcctggttgttctgttcatcattctttttgttttggtgttcttgacatagccaagtgcaccagggtcctcgattttctccctcccatttgttgtgcctccctccctagtacgaacataagtatacgtgctggagctatcctttataaatcccgattttaatgcattttgttctgcgtgagatcaccgtcattggaacggtgttatggtatgtatgccctagtcgctcttgttcgaagaactctgaagatcaattctacgactaagacgacttcattttgaggtactgttcatcatccaaaatggaggcagccgattcgattcctctttctccacgtaaagcaaaatgaggatgggagcggtattgttggagtgatgaacagtgcttggtttatagcgtgtaaaatggggacggggagtgactgttggaggagaggagatgagatggatgcgtgctaaaaggcaaccgatactaaatgaatgttcaccaaccaaatgaatgttggaacttttgtttcttaatttataatgccaagtgttcgtctc

SEQ ID NO: 35330 - DNA, 2400 bp, Zea Mays
ctcacgtgtcccaaatctggaactcatccatccatccggtcgcccggccggcctcatctcctcaccagatcacctactacttgctactcttgctactagctaggtgaggagtaggatcgtggatcgtacgagtagctcaagaaggaaacaaaacggcaggcttgcagttccaatccatcccgctggcatcgtctgttcttcgtccttccatgctctagactagctagcgttgcagtgcagagcatgacacaggcaggcatggagtagtgacatatagatggagctggcctggagctgctgctgcttcttgctcgccgcctgcgcgcgctctctccgtcgtctgctccagctccccgcgctcctctgctgcgaggccatggcgtgggcggtccttgacgacgtggaggacgagcacgaggacgccctcgccaggatccatgtcctcgacgcccagctcaaggcgctgaggcaggagaacgtgcggctgaacgagcacaagggcaagtccaggtgggacgacaagcccgcggcgcaggcgcaggcggcgtcccaccagtccgacgacaagctgaagccggcggccaagagggatcggggagaggaagacgcggcggtggcgacgacagcccagtcagccaatcatgccgccggcggcccggcgtcggagccaccgccggtggacagctacgatgccctgcaggcgacggccgtggcgcggtgccgcagcctgttcagcctcggcatatcgctggcggtgggcgcggtggcgtggtcggccgacgcgccgtgcctgccgctgctggcggggctgttcgccgtcgtggccgtgtccatgcgcagcgtgtcgcggctgcgccggcgggccggggacgacggcgccgtcgcgctgctcggcctcaactggttcctcctcggcctgctcacctcgcccatgctgccggccgccctcggccccgcgctcacgtggctcgccgcaaccgcgcccctgtgacgtcccggccccggcccgctatttccgtttccgttcgatacacgtgtctgttgtaacttcttcacacgtactgtgctactgctgcctgcagtgtactactactgcatctctctttttcaagattccactggacattagcagcggttgaaccgcacccggccgccggttcaactgaactggcccctttttctcagccccgtgggacggattataaaccttgctctccctcactctcattctatgaacctccagctttctctctctccttccctcctctccagttccacagaaggctccgtgcctagatcccgtggagaatgtgttggggatcaaggagtggttgattggatccatcccctcacgtgcttccctcatcaagtttcaaatccccatctgcgcgaggaactcctctctcaaggggaaatcgctcgtaactgtgcaaacacttgttgctcgacccccctcaatcaatcgagccgtggtgtttgttgtctctctctctttaagatggttgcacggaggaatccatccattattgaagaaggtagtggatctgaagaaatccaggtggagcgtcctcgccgctcccagaccggtcatggtagaggccaagctcggggagatgttggtgggagtagttctcaacaacctgaaatcgtccatgccgctcgagaagaacctgtccctcagccacctctccatccatcttcatcacgggctgctgcagctgccgcctctcgccccatgagccgtggtaagagaagcaagaagagaggtgttcgtgcgctcatcaggggtttaaatggaatctatgctatctgtcgtgagagttatgttcaaatcgccgagctaaaaaggaaaaatgtcgagtacaatgagaactttaggagatttatgttagagtcggacaactttaggcgttatgttggtcgtgtacctctgcgtcctgctccaccatacaatcctccgccgcctatgcccgacactctggatcagtgggttcagcagacatatggtgttcctttcgacgaagatatctctgatgatgaggaagaaatctctgatgatgaagatgagtccttctggtgaacatggtcattatggtggcttcttcttcttcttggttcttgttgctaaaagggagagaagttcgtgacgtttgatctagtcttttgttgctggcagttgtgagagtgagaacctaaactatgtgggatgtaataactttatgattatgttgtctcaaaacacctggcctgtaatagataattaggtgaacttgttcttattatgctactactcgtttcattatgccgtgaatcctctttatgctaagctttatgtatattgttactgtatcatttgggatatactattcttccgcggtattttacatgacactttgttgc

SEQ ID NO: 35331 - DNA, 2411 bp, Zea Mays
atgttttccagtgaaattgagctagttatattgagaagtcagtaagagaaggctgttgtgcagctatatgttagaatgagctgagactccactcaaaagtaaagatgctatgatcatacgggcacacatgtccactgaagcagaattagctgatagaaatagcacactgaagcagctatccattctcttgaaaccaaccttagcagtgttattcaagagaaggaaggtcttgaggagcttatgaaaggacatgacgaagcgtcaaatcaagttagtaacaagtctcgtgatatagcagtcaataacagtgatagagtattgaaggatcaagatgagattttacagcttagggtcttgcaggcagatcttgaagagcaagttgataatttgaaatctgcaaaagatgagactgaaattttaaacatgattcttaggtcaaaattggaggagcaacacactgtgatgtcattattgctccagaatcagaggcatgagttgataaattcaatagaagagaacaaggatctcactcaaaaacttgctgaacaaagtctgaaggcagaagagttcaaaaacttgtctatccatttgagagagctaaaagaaaaggctgaagctggaagaaaggagaaggaagggtcgctacataccatgcaagattctcttagaattgcatttattaaggagcagtatgaatcgaaggtccaagagctgaaaggtcaagtttttgtcagtaaaaaatatgccgaagagatgctgctgaaactgcaaagtgctttggatgatgttgaaactgggaagaaaaatgagattgctcttgccaagagaattgaggagttgtcgatgaaagtttctgaaatggaggtggagatgctggatttatcagctgataaaagagaactgtcaaatgcatatgacagcatgatgacagaactagaatgcacaaaattaaacttagattgctgcaatgaagaaaaacagaagattgaagtctctctggaagagtgcagtgaggaacgcaacagaataagggtggaacttgacctgattaagaagttattggagaatatggcattaactgacaataacacatcacatgatagttctgaatcatgcacccctggaaccacgtcgattaggcatgttcttggagatggtaaggcggagcctgcatcaaaggctacaccaaatacaacaaaaatagattcagggttacaggaacatgaaattcagagtagaagttcctcttcaaatttgtctcaaggagcagaggatgttgtgaagtttgacaataatgaagagagcaagaacttggagaattgcgatgaggaaatggaatcgccaacaaagaacaatttgaatagcaacaatagcatcaaagatatttctcaagagcacaagaaattagcaaatggattcaaccttttccagaaggagctggaaagactgaaagatgagaatctgtctcctcttcttcccctagacgtcaatctaactgacccatcactcagtggtttggaaaggacattgtcacaactcgatatggcaaatgagcatttgcaaagtatttttccatcatttaaagagcttcctggttctggcaatgctttggaaagattactcgccttggaactcgagcttgcagaggctctccaagcaaagaagaaaacaaacatccttttccagagggacatcaatgaagtgatacaagatacgatcgagctgaagaggaggcagatggcggtagaaaacgagctaaaggagatgcagggcaggtattcagagctcagcgtgcagttcgccgaggtggagggcgagcgacagaagctcgaaatgaatctgaagaaccgaacaccatggagatcatagggaaccaccaatcaaagcgaagaaaactaacgagagaagaaaaaaaaagtgtcagccagctgcaggctttgtatacaatcttgtgcgacggcagtgggatacattttgtagtgtatatatatcagctgtatcgattgtagagttgtagtgagcgagtgatatgcataaaatgtaacacagcaccttgtacaagaaacaagccttgttatctgattgttccttgccaacaaaccaaccatcagtctttgaagcagtgggtgtatccacgttgctgattgtattttgcagttatttgtatagatcgttgatcaactaaccgctccccttattctgtttttactagagaccaggttgtagtagatggctttatcaaaattcttttagtgtgtgagttataaaagcttaaatatgatcttaacataagaagctgtattaaaacatgtgtctagacaattgtttttcctagtaagatagatttcttaacaggtttaatcataatttattttataagaatgtgttgatttagaaattatatattatat

SEQ ID NO: 35332 - DNA, 2346 bp, Zea Mays
atgttttccagtgaaattgagctagttatattgagaagtcagtaagagaaggctgttgtgcagctatatgttagaatgagctgagactccactcaaaagtaaagatgctatgatcatacgggcacacatgtccactgaagcagaattagctgatagaaatagcacactgaagcagctatccattctcttgaaaccaaccttagcagtgttattcaagagaaggaaggtcttgaggagcttatgaaaggacatgacgaagcgtcaaatcaagttagtaacaagtctcgtgatatagcagtcaataacagtgatagagtattgaaggatcaagatgagattttacagcttagggtcttgcaggcagatcttgaagagcaagttgataatttgaaatctgcaaaagatgagactgaaattttaaacatgattcttaggtcaaaattggaggagcaacacactgtgatgtcattattgctccagaatcagaggcatgagttgataaattcaatagaagagaacaaggatctcactcaaaaacttgctgaacaaagtctgaaggcagaagagttcaaaaacttgtctatccatttgagagagctaaaagaaaaggctgaagctggaagaaaggagaaggaagggtcgctacataccatgcaagattctcttagaattgcatttattaaggagcagtatgaatcgaaggtccaagagctgaaaggtcaagtttttgtcagtaaaaaatatgccgaagagatgctgctgaaactgcaaagtgctttggatgatgttgaaactgggaagaaaaatgagattgctcttgccaagagaattgaggagttgtcgatgaaagtttctgaaatggaggtggagatgctggatttatcagctgataaaagagaactgtcaaatgcatatgacagcatgatgacagaactagaatgcacaaaattaaacttagattgctgcaatgaagaaaaacagaagattgaagtctctctggaagagtgcagtgaggaacgcaacagaataagggtggaacttgacctgattaagaagttattggagaatatggcattaactgacaataacacatcacatgatagttctgaatcatgcacccctggaaccacgtcgattaggcatgttcttggagatggtaaggcggagcctgcatcaaaggctacaccaaatacaacaaaaatagattcagggttacaggaacatgaaattcagagtagaagttcctcttcaaatttgtctcaaggagcagaggatgttgtgaagtttgacaataatgaagagagcaagaacttggagaattgcgatgaggaaatggaatcgccaacaaagaacaatttgaatagcaacaatagcatcaaagatatttctcaagagcacaagaaattagcaaatggattcaaccttttccagaaggagctggaaagactgaaagatgagaatctgtctcctcttcttcccctagacgtcaatctaactgacccatcactcagtggtttggaaaggacattgtcacaactcgatatgattactcgccttggaactcgagcttgcagaggctctccaagcaaagaagaaaacaaacatccttttccagagcttcagggacatcaatgaagtgatacaagatacgatcgagctgaagaggaggcagatggcggtagaaaacgagctaaaggagatgcagggcaggtattcagagctcagcgtgcagttcgccgaggtggagggcgagcgacagaagctcgaaatgaatctgaagaaccgaacaccatggagatcatagggaaccaccaatcaaagcgaagaaaactaacgagagaagaaaaaaaaagtgtcagccagctgcaggctttgtatacaatcttgtgcgacggcagtgggatacattttgtagtgtatatatatcagctgtatcgattgtagagttgtagtgagcgagtgatatgcataaaatgtaacacagcaccttgtacaagaaacaagccttgttatctgattgttccttgccaacaaaccaaccatcagtctttgaagcagtgggtgtatccacgttgctgattgtattttgcagttatttgtatagatcgttgatcaactaaccgctccccttattctgtttttactagagaccaggttgtagtagatggctttatcaaaattcttttagtgtgtgagttataaaagcttaaatatgatcttaacataagaagctgtattaaaacatgtgtctagacaattgtttttcctagtaagatagatttcttaacaggtttaatcataatttattttataagaatgtgttgatttagaaattatatattatat

SEQ ID NO: 35333 - DNA, 2391 bp, Zea Mays
atgttttccagtgaaattgagctagttatattgagaagtcagtaagagaaggctgttgtgcagctatatgttagaatgagctgagactccactcaaaagtaaagatgctatgatcatacgggcacacatgtccactgaagcagaattagctgatagaaatagcacactgaagcagctatccattctcttgaaaccaaccttagcagtgttattcaagagaaggaaggtcttgaggagcttatgaaaggacatgacgaagcgtcaaatcaagttagtaacaagtctcgtgatatagcagtcaataacagtgatagagtattgaaggatcaagatgagattttacagcttagggtcttgcaggcagatcttgaagagcaagttgataatttgaaatctgcaaaagatgagactgaaattttaaacatgattcttaggtcaaaattggaggagcaacacactgtgatgtcattattgctccagaatcagaggcatgagttgataaattcaatagaagagaacaaggatctcactcaaaaacttgctgaacaaagtctgaaggcagaagagttcaaaaacttgtctatccatttgagagagctaaaagaaaaggctgaagctggaagaaaggagaaggaagggtcgctacataccatgcaagattctcttagaattgcatttattaaggagcagtatgaatcgaaggtccaagagctgaaaggtcaagtttttgtcagtaaaaaatatgccgaagagatgctgctgaaactgcaaagtgctttggatgatgttgaaactgggaagaaaaatgagattgctcttgccaagagaattgaggagttgtcgatgaaagtttctgaaatggaggtggagatgctggatttatcagctgataaaagagaactgtcaaatgcatatgacagcatgatgacagaactagaatgcacaaaattaaacttagattgctgcaatgaagaaaaacagaagattgaagtctctctggaagagtgcagtgaggaacgcaacagaataagggtggaacttgacctgattaagaagttattggagaatatggcattaactgacaataacacatcacatgatagttctgaatcatgcacccctggaaccacgtcgattaggcatgttcttggagatggtaaggcggagcctgcatcaaaggctacaccaaatacaacaaaaatagattcagggttacaggaacatgaaattcagagtagaagttcctcttcaaatttgtctcaaggagcagaggatgttgtgaagtttgacaataatgaagagagcaagaacttggagaattgcgatgaggaaatggaatcgccaacaaagaacaatttgaatagcaacaatagcatcaaagatatttctcaagagcacaagaaattagcaaatggattcaaccttttccagaaggagctggaaagactgaaagatgagaatctgtctcctcttcttcccctagacgtcaatctaactgacccatcactcagtggtttggaaaggacattgtcacaactcgatatgattactcgccttggaactcgagcttgcagaggctctccaagcaaagaagaaaacaaacatccttttccagagttcattcttgaagcagcacaatgatgaagcagcgatcttccaaagcttcagggacatcaatgaagtgatacaagatacgatcgagctgaagaggaggcagatggcggtagaaaacgagctaaaggagatgcagggcaggtattcagagctcagcgtgcagttcgccgaggtggagggcgagcgacagaagctcgaaatgaatctgaagaaccgaacaccatggagatcatagggaaccaccaatcaaagcgaagaaaactaacgagagaagaaaaaaaaagtgtcagccagctgcaggctttgtatacaatcttgtgcgacggcagtgggatacattttgtagtgtatatatatcagctgtatcgattgtagagttgtagtgagcgagtgatatgcataaaatgtaacacagcaccttgtacaagaaacaagccttgttatctgattgttccttgccaacaaaccaaccatcagtctttgaagcagtgggtgtatccacgttgctgattgtattttgcagttatttgtatagatcgttgatcaactaaccgctccccttattctgtttttactagagaccaggttgtagtagatggctttatcaaaattcttttagtgtgtgagttataaaagcttaaatatgatcttaacataagaagctgtattaaaacatgtgtctagacaattgtttttcctagtaagatagatttcttaacaggtttaatcataatttattttataagaatgtgttgatttagaaattatatattatat

SEQ ID NO: 35334 - DNA, 2446 bp, Zea Mays
atgttttccagtgaaattgagctagttatattgagaagtcagtaagagaaggctgttgtgcagctatatgttagaatgagctgagactccactcaaaagtaaagatgctatgatcatacgggcacacatgtccactgaagcagaattagctgatagaaatagcacactgaagcagctatccattctcttgaaaccaaccttagcagtgttattcaagagaaggaaggtcttgaggagcttatgaaaggacatgacgaagcgtcaaatcaagttagtaacaagtctcgtgatatagcagtcaataacagtgatagagtattgaaggatcaagatgagattttacagcttagggtcttgcaggcagatcttgaagagcaagttgataatttgaaatctgcaaaagatgagactgaaattttaaacatgattcttaggtcaaaattggaggagcaacacactgtgatgtcattattgctccagaatcagaggcatgagttgataaattcaatagaagagaacaaggatctcactcaaaaacttgctgaacaaagtctgaaggcagaagagttcaaaaacttgtctatccatttgagagagctaaaagaaaaggctgaagctggaagaaaggagaaggaagggtcgctacataccatgcaagattctcttagaattgcatttattaaggagcagtatgaatcgaaggtccaagagctgaaaggtcaagtttttgtcagtaaaaaatatgccgaagagatgctgctgaaactgcaaagtgctttggatgatgttgaaactgggaagaaaaatgagattgctcttgccaagagaattgaggagttgtcgatgaaagtttctgaaatggaggtggagatgctggatttatcagctgataaaagagaactgtcaaatgcatatgacagcatgatgacagaactagaatgcacaaaattaaacttagattgctgcaatgaagaaaaacagaagattgaagtctctctggaagagtgcagtgaggaacgcaacagaataagggtggaacttgacctgattaagaagttattggagaatatggcattaactgacaataacacatcacatgatagttctgaatcatgcacccctggaaccacgtcgattaggcatgttcttggagatggtaaggcggagcctgcatcaaaggctacaccaaatacaacaaaaatagattcagggttacaggaacatgaaattcagagtagaagttcctcttcaaatttgtctcaaggagcagaggatgttgtgaagtttgacaataatgaagagagcaagaacttggagaattgcgatgaggaaatggaatcgccaacaaagaacaatttgaatagcaacaatagcatcaaagatatttctcaagagcacaagaaattagcaaatggattcaaccttttccagaaggagctggaaagactgaaagatgagaatctgtctcctcttcttcccctagacgtcaatctaactgacccatcactcagtggtttggaaaggacattgtcacaactcgatatggcaaatgagcatttgcaaagtatttttccatcatttaaagagcttcctggttctggcaatgctttggaaagattactcgccttggaactcgagcttgcagaggctctccaagcaaagaagaaaacaaacatccttttccagagcacaatgatgaagcagcgatcttccaaagcttcagggacatcaatgaagtgatacaagatacgatcgagctgaagaggaggcagatggcggtagaaaacgagctaaaggagatgcagggcaggtattcagagctcagcgtgcagttcgccgaggtggagggcgagcgacagaagctcgaaatgaatctgaagaaccgaacaccatggagatcatagggaaccaccaatcaaagcgaagaaaactaacgagagaagaaaaaaaaagtgtcagccagctgcaggctttgtatacaatcttgtgcgacggcagtgggatacattttgtagtgtatatatatcagctgtatcgattgtagagttgtagtgagcgagtgatatgcataaaatgtaacacagcaccttgtacaagaaacaagccttgttatctgattgttccttgccaacaaaccaaccatcagtctttgaagcagtgggtgtatccacgttgctgattgtattttgcagttatttgtatagatcgttgatcaactaaccgctccccttattctgtttttactagagaccaggttgtagtagatggctttatcaaaattcttttagtgtgtgagttataaaagcttaaatatgatcttaacataagaagctgtattaaaacatgtgtctagacaattgtttttcctagtaagatagatttcttaacaggtttaatcataatttattttataagaatgtgttgatttagaaattatatattatat

SEQ ID NO: 35335 - DNA, 3547 bp, Zea Mays
tatggtgtgtgtttgattgtttctggtttgctgtgtgaattttacccttttttgtgtgtaaagggaaatgaattacattcattgatgtgaagaagtttgtgttgcctttgctttcagtcaaaaaaagaatgctactcctaaccttgagagacgtttgaactgcaaaccttttctgggagctatcattatactatcgcaatgtcaagggtaccaaaatggaagatcgaaaagactaaagttaagattccatcaacaggatgggacaaattatttttgtccttcatctctgctgatacgggaaaggtgagtgcaaaaacaaataaggcaaatgtcaggaacggaagttgcaaatggccggatcccatctatgaagcaacacggcttcttcaggatcctcggactaagacatacgatgacaagctatataagcttgttgtggccatggggacgtcacggtctagtattcttggtgaggttgatgtcaatcttgctgaattcgcagaagcactgaagccgacttcaatagcacttcctcttcgtggttctgacttcgggacactgttacatatcacagcacaacttctcactacaaaaactggtttcagagaatttgagcagcaaagagaaactggcactagaagctctcagcagttattgaaccaaagaagtcatgatcctgttgaagttgctgcggcctcatcagacattggcactgataaggttaattcgaggattaagctaaaagaaaattctttggggttccccttggctgaagattctgcagggtcaacagacgactatgaaaattcttcacatacttcagatggtatttttactgaaaagaatgatccacacggtgctcatgaaatcaatagctttaggagctcaaatgacttacccctttgttctaccagtcaaagtcctacaccagaaaaaggtgcccattgggttaaacatcttttatcacaagggagcaatgattgggctcatagctcaagtcctgggtattgtgctgataaagatttagctgcggctcatgatgagaataaccggctcaggacaagattggaggtggctgagtcagcattttctcagcttaagacagaagcaacatctctggagcatgttactgacaagttaggcactgagacacagggccttgctcaacagcttgctgttgaacttatgtcacgtaatcaactcactactgaagtgtccttgctaagaacagaatgttctaatctgaaacaagagttggaagaaataaaatcttctaaacacttacagaacaagtttgacgtagaaggtaaaactatgactaagtatggtaaggatattcttgctacagagtccattcatcatctccaaactgaatggctgcaaggtttgctacttcttgaaagtaaactgcagcagaccagaaacaatgccctccatggactacaagcaagtgatcttgattttcttcttgctgatctgggggcacttcaacgtgtcattgagaacctcaagcaaggtgttcagccaggtcaaatgaaagaaaatcacaatgcagaacatttggttccaattgctggttatctatcaaactcaggacatgatgataccatcaagaaaagttccggtggtagtacaggcacaatggaggagaaaatgtgtgagctcctgcagaagctggaggactcaaaaactgagaaggagaatctcctggagaagatgagtcagatggagcgctactatgaatcttttatccataagcttgaggagagccagaagcagacaacaattgaattagaaaatctcaagaaagagcataactcttgcttttatacagtttctgtcctacaagctcagaagcaaaaaatgcacgaggaaatgaatgatcaattaatgagatttgtggaggaccgaacagctttagaagctcaaaataaggagtttgagaggagggctgttgctacagaaactgcactcaagagggttcgattcaattattctgcagctgtggaacgtctacagaaagaccttgagttactgtcgtttcaggttctctctatgtacgagtcaaatgaaactcttgccaagcaatcattactagaagattttgatagtttgcctgaggaacactctgccgtggaagatttatgtggcaataatgaacatgagcaatacaggcctggtgtcaaacaaatcagacctgaaggtctatatgcagagaaagaaactgatggccagaaaaatcttattcgggcactcaagattgaagacctccgtgcgaggtcagagtttcaagcacatactgattcacgggggaaccactcaaacttggaagggccaagaagggcctatagtgctatggagtctgagcatttagagatgtttatttctaatatcgagtggcagatattctctgatgtattacgtgagtctcactatgctacattggatatcattaaatgcatgcagggaaggttggacgtgttagaaatgcagcttcatgactctaatgatgctaggcaatctctagtgctcaagttgaactctgcactggcccaagccaaaagtgtcaaagagagcgaagcaggatatgttttgaagtgtgatgatctgactgtgaagaaccaaatattagaagcaaagcttcatgatattacagttgaaaatgctttgcttatggaaaagctcacggagtctgaaagacttgttcaggaacataaaacttgtgaaagcaagtacaaggtctgtactgaggaagttacgagattggacaaccttttaatcaaagaaactctactaaccaaccagcttaaggatgagctcacttcactaagagaaagttttgaggccatgaaagatgcgttaaataagcaatcatccataaacaatgatatacaaatgatttctacatcccttcaagatcaactgggtgacctatgctctaaaattatatcttttaacaaggaagcaaacatttcaggcttagaagaggcatctttgctgcatgaacttgagagtaagaattacgctgctgtgatgaaaagattggaatccttccatcagcaaacatgtgacaaggtacttcatcttcttgaggagaaggaagtaatggaaaaaatgtgtgatgctcttcagagaaggtcagagaaggctgagacaaaattgcatggtatggagcagcagtttatatgtgatatggatgccacaaaacagaagctaaacttgtctgaggaaattgtagagaagcttcagcaagaactccaggacatggctcacaaacttaggatttgctccgattctcaagaaaaatattctgttaccaatggtgatttaacatcaaaattgtcacaaatggaaattgagctacatcatgcaactagtgagaacaaggctcttgttgaaaaattgaaagagtttagtgttactgtagaggaactcgagaggacaaaatggtgtcttgtacaacatgaggaggatacccgtacctttggaccagtcattacagtctaaacatgaaattgttatgcattatggagagcgtaatctaatg

SEQ ID NO: 35336 - DNA, 3609 bp, Zea Mays
cgccgcggcggaggcgactgcgttcgcgccgccggcatgctccagcgcggcagagctgtctcgcttgctgtactgagttcaagaaaggaagaagggcgaagctgatcttccgaaagccaagaagtttgtgttgcctttgctttcagtcaaaaaaagaatgctactcctaaccttgagagacgtttgaactgcaaaccttttctgggagctatcattatactatcgcaatgtcaagggtaccaaaatggaagatcgaaaagactaaagttaaggttgtattccggctgcaattccatgccacaaatattccatcaacaggatgggacaaattatttttgtccttcatctctgctgatacgggaaaggtgagtgcaaaaacaaataaggcaaatgtcaggaacggaagttgcaaatggccggatcccatctatgaagcaacacggcttcttcaggatcctcggactaagacatacgatgacaagctatataagcttgttgtggccatggggacgtcacggtctagtattcttggtgaggttgatgtcaatcttgctgaattcgcagaagcactgaagccgacttcaatagcacttcctcttcgtggttctgacttcgggacactgttacatatcacagcacaacttctcactacaaaaactggtttcagagaatttgagcagcaaagagaaactggcactagaagctctcagcagttattgaaccaaagaagtcatgatcctgttgaagttgctgcggcctcatcagacattggcactgataaggttaattcgaggattaagctaaaagaaaattctttggggttccccttggctgaagattctgcagggtcaacagacgactatgaaaattcttcacatacttcagatggtatttttactgaaaagaatgatccacacggtgctcatgaaatcaatagctttaggagctcaaatgacttacccctttgttctaccagtcaaagtcctacaccagaaaaaggtgcccattgggttaaacatcttttatcacaagggagcaatgattgggctcatagctcaagtcctgggtattgtgctgataaagatttagctgcggctcatgatgagaataaccggctcaggacaagattggaggtggctgagtcagcattttctcagcttaagacagaagcaacatctctggagcatgttactgacaagttaggcactgagacacagggccttgctcaacagcttgctgttgaacttatgtcacgtaatcaactcactactgaagtgtccttgctaagaacagaatgttctaatctgaaacaagagttggaagaaataaaatcttctaaacacttacagaacaagtttgacgtagaaggtaaaactatgactaagtatggtaaggatattcttgctacagagtccattcatcatctccaaactgaatggctgcaaggtttgctacttcttgaaagtaaactgcagcagaccagaaacaatgccctccatggactacaagcaagtgatcttgattttcttcttgctgatctgggggcacttcaacgtgtcattgagaacctcaagcaaggtgttcagccaggtcaaatgaaagaaaatcacaatgcagaacatttggttccaattgctggttatctatcaaactcaggacatgatgataccatcaagaaaagttccggtggtagtacaggcacaatggaggagaaaatgtgtgagctcctgcagaagctggaggactcaaaaactgagaaggagaatctcctggagaagatgagtcagatggagcgctactatgaatcttttatccataagcttgaggagagccagaagcagacaacaattgaattagaaaatctcaagaaagagcataactcttgcttttatacagtttctgtcctacaagctcagaagcaaaaaatgcacgaggaaatgaatgatcaattaatgagatttgtggaggaccgaacagctttagaagctcaaaataaggagtttgagaggagggctgttgctacagaaactgcactcaagagggttcgattcaattattctgcagctgtggaacgtctacagaaagaccttgagttactgtcgtttcaggttctctctatgtacgagtcaaatgaaactcttgccaagcaatcattactagaagattttgatagtttgcctgaggaacactctgccgtggaagatttatgtggcaataatgaacatgagcaatacaggcctggtgtcaaacaaatcagacctgaaggtctatatgcagagaaagaaactgatggccagaaaaatcttattcgggcactcaagattgaagacctccgtgcgaggtcagagtttcaagcacatactgattcacgggggaaccactcaaacttggaagggccaagaagggcctatagtgctatggagtctgagcatttagagatgtttatttctaatatcgagtggcagatattctctgatgtattacgtgagtctcactatgctacattggatatcattaaatgcatgcagggaaggttggacgtgttagaaatgcagcttcatgactctaatgatgctaggcaatctctagtgctcaagttgaactctgcactggcccaagccaaaagtgtcaaagagagcgaagcaggatatgttttgaagtgtgatgatctgactgtgaagaaccaaatattagaagcaaagcttcatgatattacagttgaaaatgctttgcttatggaaaagctcacggagtctgaaagacttgttcaggaacataaaacttgtgaaagcaagtacaaggtctgtactgaggaagttacgagattggacaaccttttaatcaaagaaactctactaaccaaccagcttaaggatgagctcacttcactaagagaaagttttgaggccatgaaagatgcgttaaataagcaatcatccataaacaatgatatacaaatgatttctacatcccttcaagatcaactgggtgacctatgctctaaaattatatcttttaacaaggaagcaaacatttcaggcttagaagaggcatctttgctgcatgaacttgagagtaagaattacgctgctgtgatgaaaagattggaatccttccatcagcaaacatgtgacaaggtacttcatcttcttgaggagaaggaagtaatggaaaaaatgtgtgatgctcttcagagaaggtcagagaaggctgagacaaaattgcatggtatggagcagcagtttatatgtgatatggatgccacaaaacagaagctaaacttgtctgaggaaattgtagagaagcttcagcaagaactccaggacatggctcacaaacttaggatttgctccgattctcaagaaaaatattctgttaccaatggtgatttaacatcaaaattgtcacaaatggaaattgagctacatcatgcaactagtgagaacaaggctcttgttgaaaaattgaaagagtttagtgttactgtagaggaactcgagaggacaaaatggtgtcttgtacaacatgaggaggatacccgtacctttggaccagtcattacagtctaaacatgaaattgttatgcattatggagagcgtaatctaatg

SEQ ID NO: 35337 - DNA, 3868 bp, Zea Mays
ctgctcctcccttcaacgctgcacccagcttgcccatcaatgaagcgataatcaatcatcaatgattgtgctactcgcttgctccggtgctcccctcccctccccctccctaacctgcctgccccgtctcccgttctcaggtcattggctcattgcttgctgctaacactaacaccaaccccccaagcagttcaaagtacttgccttgccttgtcttgtctgctccagtaatctctctctcgcctccccaaccactcctttaaacccgagctatcagcgctaggcgccgcggcggaggcgactgcgttcgcgccgccggcatgctccagcgcggcagagctgtctcgcttgctgtactgagttcaagaaaggaagaagggcgaagctgatcttccgaaagccaagtcaaaaaaagaatgctactcctaaccttgagagacgtttgaactgcaaaccttttctgggagctatcattatactatcgcaatgtcaagggtaccaaaatggaagatcgaaaagactaaagttaaggttgtattccggctgcaattccatgccacaaatattccatcaacaggatgggacaaattatttttgtccttcatctctgctgatacgggaaaggtgagtgcaaaaacaaataaggcaaatgtcaggaacggaagttgcaaatggccggatcccatctatgaagcaacacggcttcttcaggatcctcggactaagacatacgatgacaagctatataagcttgttgtggccatggggacgtcacggtctagtattcttggtgaggttgatgtcaatcttgctgaattcgcagaagcactgaagccgacttcaatagcacttcctcttcgtggttctgacttcgggacactgttacatatcacagcacaacttctcactacaaaaactggtttcagagaatttgagcagcaaagagaaactggcactagaagctctcagcagttattgaaccaaagaagtcatgatcctgttgaagttgctgcggcctcatcagacattggcactgataaggttaattcgaggattaagctaaaagaaaattctttggggttccccttggctgaagattctgcagggtcaacagacgactatgaaaattcttcacatacttcagatggtatttttactgaaaagaatgatccacacggtgctcatgaaatcaatagctttaggagctcaaatgacttacccctttgttctaccagtcaaagtcctacaccagaaaaaggtgcccattgggttaaacatcttttatcacaagggagcaatgattgggctcatagctcaagtcctgggtattgtgctgataaagatttagctgcggctcatgatgagaataaccggctcaggacaagattggaggtggctgagtcagcattttctcagcttaagacagaagcaacatctctggagcatgttactgacaagttaggcactgagacacagggccttgctcaacagcttgctgttgaacttatgtcacgtaatcaactcactactgaagtgtccttgctaagaacagaatgttctaatctgaaacaagagttggaagaaataaaatcttctaaacacttacagaacaagtttgacgtagaaggtaaaactatgactaagtatggtaaggatattcttgctacagagtccattcatcatctccaaactgaatggctgcaaggtttgctacttcttgaaagtaaactgcagcagaccagaaacaatgccctccatggactacaagcaagtgatcttgattttcttcttgctgatctgggggcacttcaacgtgtcattgagaacctcaagcaaggtgttcagccaggtcaaatgaaagaaaatcacaatgcagaacatttggttccaattgctggttatctatcaaactcaggacatgatgataccatcaagaaaagttccggtggtagtacaggcacaatggaggagaaaatgtgtgagctcctgcagaagctggaggactcaaaaactgagaaggagaatctcctggagaagatgagtcagatggagcgctactatgaatcttttatccataagcttgaggagagccagaagcagacaacaattgaattagaaaatctcaagaaagagcataactcttgcttttatacagtttctgtcctacaagctcagaagcaaaaaatgcacgaggaaatgaatgatcaattaatgagatttgtggaggaccgaacagctttagaagctcaaaataaggagtttgagaggagggctgttgctacagaaactgcactcaagagggttcgattcaattattctgcagctgtggaacgtctacagaaagaccttgagttactgtcgtttcaggttctctctatgtacgagtcaaatgaaactcttgccaagcaatcattactagaagattttgatagtttgcctgaggaacactctgccgtggaagatttatgtggcaataatgaacatgagcaatacaggcctggtgtcaaacaaatcagacctgaaggtctatatgcagagaaagaaactgatggccagaaaaatcttattcgggcactcaagattgaagacctccgtgcgaggtcagagtttcaagcacatactgattcacgggggaaccactcaaacttggaagggccaagaagggcctatagtgctatggagtctgagcatttagagatgtttatttctaatatcgagtggcagatattctctgatgtattacgtgagtctcactatgctacattggatatcattaaatgcatgcagggaaggttggacgtgttagaaatgcagcttcatgactctaatgatgctaggcaatctctagtgctcaagttgaactctgcactggcccaagccaaaagtgtcaaagagagcgaagcaggatatgttttgaagtgtgatgatctgactgtgaagaaccaaatattagaagcaaagcttcatgatattacagttgaaaatgctttgcttatggaaaagctcacggagtctgaaagacttgttcaggaacataaaacttgtgaaagcaagtacaaggtctgtactgaggaagttacgagattggacaaccttttaatcaaagaaactctactaaccaaccagcttaaggatgagctcacttcactaagagaaagttttgaggccatgaaagatgcgttaaataagcaatcatccataaacaatgatatacaaatgatttctacatcccttcaagatcaactgggtgacctatgctctaaaattatatcttttaacaaggaagcaaacatttcaggcttagaagaggcatctttgctgcatgaacttgagagtaagaattacgctgctgtgatgaaaagattggaatccttccatcagcaaacatgtgacaaggtacttcatcttcttgaggagaaggaagtaatggaaaaaatgtgtgatgctcttcagagaaggtcagagaaggctgagacaaaattgcatggtatggagcagcagtttatatgtgatatggatgccacaaaacagaagctaaacttgtctgaggaaattgtagagaagcttcagcaagaactccaggacatggctcacaaacttaggatttgctccgattctcaagaaaaatattctgttaccaatggtgatttaacatcaaaattgtcacaaatggaaattgagctacatcatgcaactagtgagaacaaggctcttgttgaaaaattgaaagagtttagtgttactgtagaggaactcgagaggacaaaatggtgtcttgtacaacatgaggaggatacccgtacctttggaccagtcattacagtctaaacatgaaattgttatgcattatggagagcgtaatctaatg

SEQ ID NO: 35338 - DNA, 3597 bp, Zea Mays
atccgtttctgctcctcccttcaacgctgcacccagcttgcccatcaatgaagcgataatcaatcatcaatgattgtgctactcgcttgctccggtgctcccctcccctccccctccctaacctgcctgccccgtcaaaaaaagaatgctactcctaaccttgagagacgtttgaactgcaaaccttttctgggagctatcattatactatcgcaatgtcaagggtaccaaaatggaagatcgaaaagactaaagttaaggttgtattccggctgcaattccatgccacaaatattccatcaacaggatgggacaaattatttttgtccttcatctctgctgatacgggaaaggtgagtgcaaaaacaaataaggcaaatgtcaggaacggaagttgcaaatggccggatcccatctatgaagcaacacggcttcttcaggatcctcggactaagacatacgatgacaagctatataagcttgttgtggccatggggacgtcacggtctagtattcttggtgaggttgatgtcaatcttgctgaattcgcagaagcactgaagccgacttcaatagcacttcctcttcgtggttctgacttcgggacactgttacatatcacagcacaacttctcactacaaaaactggtttcagagaatttgagcagcaaagagaaactggcactagaagctctcagcagttattgaaccaaagaagtcatgatcctgttgaagttgctgcggcctcatcagacattggcactgataaggttaattcgaggattaagctaaaagaaaattctttggggttccccttggctgaagattctgcagggtcaacagacgactatgaaaattcttcacatacttcagatggtatttttactgaaaagaatgatccacacggtgctcatgaaatcaatagctttaggagctcaaatgacttacccctttgttctaccagtcaaagtcctacaccagaaaaaggtgcccattgggttaaacatcttttatcacaagggagcaatgattgggctcatagctcaagtcctgggtattgtgctgataaagatttagctgcggctcatgatgagaataaccggctcaggacaagattggaggtggctgagtcagcattttctcagcttaagacagaagcaacatctctggagcatgttactgacaagttaggcactgagacacagggccttgctcaacagcttgctgttgaacttatgtcacgtaatcaactcactactgaagtgtccttgctaagaacagaatgttctaatctgaaacaagagttggaagaaataaaatcttctaaacacttacagaacaagtttgacgtagaaggtaaaactatgactaagtatggtaaggatattcttgctacagagtccattcatcatctccaaactgaatggctgcaaggtttgctacttcttgaaagtaaactgcagcagaccagaaacaatgccctccatggactacaagcaagtgatcttgattttcttcttgctgatctgggggcacttcaacgtgtcattgagaacctcaagcaaggtgttcagccaggtcaaatgaaagaaaatcacaatgcagaacatttggttccaattgctggttatctatcaaactcaggacatgatgataccatcaagaaaagttccggtggtagtacaggcacaatggaggagaaaatgtgtgagctcctgcagaagctggaggactcaaaaactgagaaggagaatctcctggagaagatgagtcagatggagcgctactatgaatcttttatccataagcttgaggagagccagaagcagacaacaattgaattagaaaatctcaagaaagagcataactcttgcttttatacagtttctgtcctacaagctcagaagcaaaaaatgcacgaggaaatgaatgatcaattaatgagatttgtggaggaccgaacagctttagaagctcaaaataaggagtttgagaggagggctgttgctacagaaactgcactcaagagggttcgattcaattattctgcagctgtggaacgtctacagaaagaccttgagttactgtcgtttcaggttctctctatgtacgagtcaaatgaaactcttgccaagcaatcattactagaagattttgatagtttgcctgaggaacactctgccgtggaagatttatgtggcaataatgaacatgagcaatacaggcctggtgtcaaacaaatcagacctgaaggtctatatgcagagaaagaaactgatggccagaaaaatcttattcgggcactcaagattgaagacctccgtgcgaggtcagagtttcaagcacatactgattcacgggggaaccactcaaacttggaagggccaagaagggcctatagtgctatggagtctgagcatttagagatgtttatttctaatatcgagtggcagatattctctgatgtattacgtgagtctcactatgctacattggatatcattaaatgcatgcagggaaggttggacgtgttagaaatgcagcttcatgactctaatgatgctaggcaatctctagtgctcaagttgaactctgcactggcccaagccaaaagtgtcaaagagagcgaagcaggatatgttttgaagtgtgatgatctgactgtgaagaaccaaatattagaagcaaagcttcatgatattacagttgaaaatgctttgcttatggaaaagctcacggagtctgaaagacttgttcaggaacataaaacttgtgaaagcaagtacaaggtctgtactgaggaagttacgagattggacaaccttttaatcaaagaaactctactaaccaaccagcttaaggatgagctcacttcactaagagaaagttttgaggccatgaaagatgcgttaaataagcaatcatccataaacaatgatatacaaatgatttctacatcccttcaagatcaactgggtgacctatgctctaaaattatatcttttaacaaggaagcaaacatttcaggcttagaagaggcatctttgctgcatgaacttgagagtaagaattacgctgctgtgatgaaaagattggaatccttccatcagcaaacatgtgacaaggtacttcatcttcttgaggagaaggaagtaatggaaaaaatgtgtgatgctcttcagagaaggtcagagaaggctgagacaaaattgcatggtatggagcagcagtttatatgtgatatggatgccacaaaacagaagctaaacttgtctgaggaaattgtagagaagcttcagcaagaactccaggacatggctcacaaacttaggatttgctccgattctcaagaaaaatattctgttaccaatggtgatttaacatcaaaattgtcacaaatggaaattgagctacatcatgcaactagtgagaacaaggctcttgttgaaaaattgaaagagtttagtgttactgtagaggaactcgagaggacaaaatggtgtcttgtacaacatgaggaggatacccgtacctttggaccagtcattacagtctaaacatgaaattgttatgcattatggagagcgtaatctaatg

SEQ ID NO: 35339 - DNA, 3514 bp, Zea Mays
ctgagctccatcccgtagccgtggtgaggacctccgccgtcgtcagcttagtcaaaaaaagaatgctactcctaaccttgagagacgtttgaactgcaaaccttttctgggagctatcattatactatcgcaatgtcaagggtaccaaaatggaagatcgaaaagactaaagttaaggttgtattccggctgcaattccatgccacaaatattccatcaacaggatgggacaaattatttttgtccttcatctctgctgatacgggaaaggtgagtgcaaaaacaaataaggcaaatgtcaggaacggaagttgcaaatggccggatcccatctatgaagcaacacggcttcttcaggatcctcggactaagacatacgatgacaagctatataagcttgttgtggccatggggacgtcacggtctagtattcttggtgaggttgatgtcaatcttgctgaattcgcagaagcactgaagccgacttcaatagcacttcctcttcgtggttctgacttcgggacactgttacatatcacagcacaacttctcactacaaaaactggtttcagagaatttgagcagcaaagagaaactggcactagaagctctcagcagttattgaaccaaagaagtcatgatcctgttgaagttgctgcggcctcatcagacattggcactgataaggttaattcgaggattaagctaaaagaaaattctttggggttccccttggctgaagattctgcagggtcaacagacgactatgaaaattcttcacatacttcagatggtatttttactgaaaagaatgatccacacggtgctcatgaaatcaatagctttaggagctcaaatgacttacccctttgttctaccagtcaaagtcctacaccagaaaaaggtgcccattgggttaaacatcttttatcacaagggagcaatgattgggctcatagctcaagtcctgggtattgtgctgataaagatttagctgcggctcatgatgagaataaccggctcaggacaagattggaggtggctgagtcagcattttctcagcttaagacagaagcaacatctctggagcatgttactgacaagttaggcactgagacacagggccttgctcaacagcttgctgttgaacttatgtcacgtaatcaactcactactgaagtgtccttgctaagaacagaatgttctaatctgaaacaagagttggaagaaataaaatcttctaaacacttacagaacaagtttgacgtagaaggtaaaactatgactaagtatggtaaggatattcttgctacagagtccattcatcatctccaaactgaatggctgcaaggtttgctacttcttgaaagtaaactgcagcagaccagaaacaatgccctccatggactacaagcaagtgatcttgattttcttcttgctgatctgggggcacttcaacgtgtcattgagaacctcaagcaaggtgttcagccaggtcaaatgaaagaaaatcacaatgcagaacatttggttccaattgctggttatctatcaaactcaggacatgatgataccatcaagaaaagttccggtggtagtacaggcacaatggaggagaaaatgtgtgagctcctgcagaagctggaggactcaaaaactgagaaggagaatctcctggagaagatgagtcagatggagcgctactatgaatcttttatccataagcttgaggagagccagaagcagacaacaattgaattagaaaatctcaagaaagagcataactcttgcttttatacagtttctgtcctacaagctcagaagcaaaaaatgcacgaggaaatgaatgatcaattaatgagatttgtggaggaccgaacagctttagaagctcaaaataaggagtttgagaggagggctgttgctacagaaactgcactcaagagggttcgattcaattattctgcagctgtggaacgtctacagaaagaccttgagttactgtcgtttcaggttctctctatgtacgagtcaaatgaaactcttgccaagcaatcattactagaagattttgatagtttgcctgaggaacactctgccgtggaagatttatgtggcaataatgaacatgagcaatacaggcctggtgtcaaacaaatcagacctgaaggtctatatgcagagaaagaaactgatggccagaaaaatcttattcgggcactcaagattgaagacctccgtgcgaggtcagagtttcaagcacatactgattcacgggggaaccactcaaacttggaagggccaagaagggcctatagtgctatggagtctgagcatttagagatgtttatttctaatatcgagtggcagatattctctgatgtattacgtgagtctcactatgctacattggatatcattaaatgcatgcagggaaggttggacgtgttagaaatgcagcttcatgactctaatgatgctaggcaatctctagtgctcaagttgaactctgcactggcccaagccaaaagtgtcaaagagagcgaagcaggatatgttttgaagtgtgatgatctgactgtgaagaaccaaatattagaagcaaagcttcatgatattacagttgaaaatgctttgcttatggaaaagctcacggagtctgaaagacttgttcaggaacataaaacttgtgaaagcaagtacaaggtctgtactgaggaagttacgagattggacaaccttttaatcaaagaaactctactaaccaaccagcttaaggatgagctcacttcactaagagaaagttttgaggccatgaaagatgcgttaaataagcaatcatccataaacaatgatatacaaatgatttctacatcccttcaagatcaactgggtgacctatgctctaaaattatatcttttaacaaggaagcaaacatttcaggcttagaagaggcatctttgctgcatgaacttgagagtaagaattacgctgctgtgatgaaaagattggaatccttccatcagcaaacatgtgacaaggtacttcatcttcttgaggagaaggaagtaatggaaaaaatgtgtgatgctcttcagagaaggtcagagaaggctgagacaaaattgcatggtatggagcagcagtttatatgtgatatggatgccacaaaacagaagctaaacttgtctgaggaaattgtagagaagcttcagcaagaactccaggacatggctcacaaacttaggatttgctccgattctcaagaaaaatattctgttaccaatggtgatttaacatcaaaattgtcacaaatggaaattgagctacatcatgcaactagtgagaacaaggctcttgttgaaaaattgaaagagtttagtgttactgtagaggaactcgagaggacaaaatggtgtcttgtacaacatgaggaggatacccgtacctttggaccagtcattacagtctaaacatgaaattgttatgcattatggagagcgtaatctaatg

SEQ ID NO: 35340 - DNA, 1463 bp, Zea Mays
gatcttacagggtactgctactggtatcgtgatttcatgtaccatatatacctcgctgtaggcggcggcggcggcggccatggacttcgtgctccaggtcctgctgcgggtggtgatgagaagaagcatccgcaggctgcaagaggtcgttgacatcgccgtggacatcggcacggctgtcttcgtggccgtgcgggtctccggcctcgtcttccgccgccggctgcccacgccgactacgacatcgtcgtcgtcgacgacgtactactactccccggggacgtcctcctcgatcggcatgcatgtccaggaggattaattattgacaggcactagatgagctagctagctagctagggccagaagatgtatacttctcgcgggggcatcgaccaccccttctgttgcgggcatgccgacctctctggtcactcaggggatgtcgggagcgactattcctgacacggtcctctctgagccgtcgtcccctacagccagcccggggaggtcctagcggtggaaatggaagttggtgcttcttcgttgccgccccacgctcccttgccttcgggcattgtggtgacaagtgaccaatctgggcagcatcgacgatacgagattagattccctacggtctgcgccttttcgcgcggtcggtggctcgagcggaagtgctactggtcacctagtgggaggtggatcagctatgtgctagggccatctgttttgaggagagggagcacaagttcgatgttctcaactccgaggctgacatggcttcgtgatgaggctgcgcgcttgtgcaaagagcgcgacaacgtgtggggcgatgcaaagcgtcttcgagaagcgaggtcccagctttagaaggaccttcacgaggctaatcttttagttgaggaggttgggtcgatcctcagggaggtctttgctcgtctggagatggcaaatttagagcttttgagagagcgcaatgcggccagagcatggctccaaaagatgttcccccgagcccaagacgccaagaagacggtgggagaggcaaagaccatggcagaggacgaggcccagaagctcttgtttgcccgagacatcattgttatcgcgagagttcaagcggaggcttcactctcagagcagagcacagagctccaggctctcagggcggccgtgagcacgtatagccttgaggtagatggctctcattttgacgagaccaacacgatcgtgatcatgaagggctttgccgccggacagagcgacgaggagctatatcgtattgaagaacaaattcaccttcacgcccggttgattgcaagttgggtcgacgcgaagttcctcctgatgagcccttggagtatggagccgtccaccggcatctaaacgacgttacatcgttgtcttgtaataaactttgtttgaatgatggggctaaacatatgttcgtgccttttggtgtgata

SEQ ID NO: 35341 - DNA, 1049 bp, Zea Mays
cagcaaaggctggaaaatgaccatattatctgaagaaatatggtgatcagcgagatcgactcgtcaatcgctacctcgctgcaggccgtgaagctgctcgctctgtacctcactggagacaaggaaggtgctatctccagtctcaaggaatggttgagtgattcagcaactggaagcaatcttgttctgcgattgattgccggaattatatttatgcgtgagcaggactacaatgaggctctcaagcacacacactctggaggaactctggatttggaggcgataattgatcctgcagaaatttttgaacagttagaaaagaaaaattgatcccccaagcattagcagcaaaaaggtttctggaacagaaaattatagtattgatgttaaggatgctaaatagagaattctgaagacggcttcaccgaaagtgcggaaactagagactaaagagatcagacccaacaaagaaaaaaatcgacattgcaaggaggccaaagcctgcgccatgaccctctggagcaccctgctatggtgctgccagcgcaaccgcctcgtaggtgagtgcacgtgcgttgcatgtggtctggtggtaacgcatgtgctcctaaccatacagaaaaaaattgacactgcaaggaggccaaagcctgccctggtgaccccctcgagcaccctgctacggtgctacaagcgcaaccgcctcgcaagttgacgttccggcggggcaaagtactgaaccctgaagagagcagtggcagcaccccaaaatggctctggttcaggccttccatagccgtggcagacgcgaaatccaggagcagatgcgacaagatcataattaggaggagcggcgacgatgctgtagcgagagacgcgggtgccgaggtcgtcgtgctgcagtggtggtaggactggaaggagacgaaaaagtaggagtcagggctgttcaacaacgtgatcgagtcgctgaggcgaggaagagcaaggtgaaggcacccgtcggtgcctttgagaccgacagaccatcatctcgctacagaaacgag

SEQ ID NO: 35342 - DNA, 1313 bp, Zea Mays
ctcccacatgccattgcattgagcggcagccagtagccacaagctatggtgcagccctgcagttggggaatcctcctcgccgtccttgtcacggcggccgtcgtcgtcccgccggcgaccgcgacagtggcgagcatcgaccttggctcatctccttcccggccttacggaagcagaagagggaccaatggcgtcgtccctctccctcgtgcccccaagatcatcgccgtctccaccggcgcaggagctaggaagctaccgcagcctgccttgccttcgctgtcgaatccttcttccacgcaccgctggctgccaccacagcctccatcgcatcgtcgctccctcgctagccggccacctccacctcgcttgaggtcgtcgcgacagtgaagaaggggtacaagatgaagtcgacatgacagtgaagaaggggtacagatcccgtttaccatggcgggatctccagccatggtaagcgggattccttccatatttgtcgtgtgtgcgagatctgtggcagccatggccctaaaccgtgccccttgtccaccccctttgcaaaatcgacattggtgggcgagatccggggtagccatcgcccccaaccgtgtacccttgtccacccccattccaaaatcggtcagccactgctattaaaaggagctgaggcttccaaccaaccaccaagggcaggaatggcagtggcgccaaagcaaaggggatgcgccactgatctcgttcgtacctcctgctctaggtaccggcggcggtcgagtttatttggtagtaacatcctgttagttttcacccgttcttgtgatttgttgttagaagctgcttatggctgaggttaagcgcacccatggaggagggatgcgatgtgacgaggtatggaacggggagcaaccgaagcagagattggatcaaagagggctaggctatgaatttctatattgctctgtgctctaggttgtatcctttttaatgcaatctaggtatgtatccttatcttttgttaaccaaatgaccagcttgctttaacctataacgaaatatggtatctattcttgacagaaatctggtgggaattaaatatggtgttttcaccctcatattgtgattttcccattttatggttatttaactattttaaaacttcatatgctccttgcagtgattggataatttccccaaactggctaaaagaaagcgtcagagaagggcaatttgtaggtgcgccaacgaaggaatgccgagaagtccctgctcagcttacaatgaagattggctatagcaagcgtggaagaattaac

SEQ ID NO: 35343 - DNA, 3214 bp, Zea Mays
gggctcttgttggagatgctctgaggtcagttcctagtgttacttttgaattataccgaatttgtttcaccgcggcatattaacgaccatggccatcttgtttcttcactggaagattccacaagaaatggtcgatgtacatcaaggacacgggcgcaggaagccttttcactgtgaagttgcttgcccctactctaagatcgccgcttctgttcagtgtgatgactcaagtggtgatgaaaagctgaactttgctcctgataatgagcctatccagaaatggcaccggtctttgagctctgacagtgttgtgcagacactccgctgtttaaggaggaaacctgcagttgcattcacctactttaaagatacacatagccttggttttcaccatgacttctcaacctactcagagatcatacaaattttgtcccattcattccaggggaagatgctggtatccttgtttcgtgagattctcttgggaactggtagtggtggccctgaaatcttaccgctcattgatcacttgagaaaaacatgtgccacttctcacgtcgggatgattgaaatgggagtgaaattagatgtacatggattctcatcatttataattggcctttgtgattgtggaaagtttgatctagcttataacatggtaagaagatatgctgttctacaagagatatcccaagagagggttccaattgaagccatggcttataatatggtaatcgatggactatgcaaagaaatgaaactgaaggaggctgaaaaggtcttggagatcaagaccagacatggatctgcccctgatctatatagctatagctatctcattcatagtcattgcaaaatgggtaacctagagaaggcatggtatcatgttgaagacatggtatcccatggcattgagataaattgttacattgttgcttaccttctacagtgcctcaggaagttaggcatggtatctgaagtaattgtgcacttccagaaatttagagatttaggggtccatcttgatggcgtgctttataacattgctatggatgcttattgcaagcttgggaacatgaatgaggcagttaagctactgaatgaaatgatggctggaagtttggtaccagacaaaatccactatacatgcctgatcaatggttattgtctgaaaggagaaacagaaaatgcctggcaagtatttgaggagatgctgaaggcaaatataaaaccagatgtagttacatataacatattggccagtggatatagcaggaatggccttgttatgaaggtatttgacattctagagcacatgatggatcaagggctcgaacctaattcactcacctatggtatagctattgctggtttttgtagaggaggcaacttgagcgaagcagaggtgctgtttaatatagtagaagaaagagggatagataatatcaatgtgctgtacggttctatggtttgtggttatttgcactcaggctggactgaccatgcttacatgctttttcttagagttgctaaacaaggaaatatggtggatcgtttgtcatgttcaaaattgataaacggactctgtagggatgaaaaggttggagaggcttcaactgtatgtaaaatgatgcttgaaaagaatgttgtccctgatgtaatttcatatagcaaacttatatcagcttattgtcagacaagagatatgcacaatgctcgcttatggttccatgatatggttgaacgaggactttctgatgttattgtatacactgtactgatgaatggttattgcaaggttggtcggttgcaagaagcatgtgaattatttgtccaaatgataaatttaggaatcaagcctgatgtagttgcatacacagtgctattggatggccacctaaaggagaccctacaacaagggtggcagggcatcgctaaggaaaggaggaccttttttcttaggacaaagcataaggtgttgctgaactctatgaaagatatggaaatcgaacctgatgtaacctgttacacagtattgattgatggacggtgcaaagcagaatatctagaggaagcacgaggattgtttgatgagatgttagcaaaaggacttatccctgatgttcacacatacacagctcttataaatggatactgtagccagggagaaatagctaaggctgaagatcttttccaagaaatgatagctaagggaatgaagccagatgtactgagcttttcagtattacataagagaaccttgagacatgaaaaggctcattaatatttatgtgtactaatggttatgttgatgaatgtcagtttgactgaaggtgaaggggcgtcctgccaacaaaagggaaggcgaacacctggattgaaagactgctctctcagttcagcattgggtcgtcaaggagaacaaaatgatggtaccttcagcgtgaggatcgatgactgtcaatggagctgtgcaaacacaatcgtggcaaagctggctgtggcactggcgcctatgccatttatgagggttttgcttgaccgttttgtggctgcaactagtggtgtgttcccagacaaccaagagctacaagacagaggtaagctctcgggttccgtcctggggcaatggggagctgttgatgatcctgagtccatgctgcaccacatccattgggcagtaatgaggtgattccaatcgttaagagtcaagcataatgttgtgtgatagatctatttgcggtgtttgacatcgaggctggggaagttggaaaatggacacagatcgcagagctcggttaaacaagtggcctgtgcctgccatgttggtatcatccaaacagtctccatgtctgcattatactgatgactggaatgagggtgtgtccaaggaggagctggactctgagatcccacctggcgaggagtcgatatacggatacataatgggaatggcagatacatgtagtctgtagaatccatcaggatttccccttgataggtctcaggtttcactctaatattgtgcattgtccctcaagatgttaatacagcaatttcttgtttagtgctcataacattactccagtctccaggcgtagtgcttggtgtagagacataaaacagataatgcagcaccagtttgtggcttcaaattccgaaacaacagctttgtggaagacagaaaagaacactagtttttggcgaactgttg

SEQ ID NO: 35344 - DNA, 3505 bp, Zea Mays
gggctcttgttggagatgctctgaggtcagttcctagtgttacttttgaattataccgaatttgtttcaccgcggcatattaacgaccatggccatcttgtttcttcactggaagattccacaagaaatggtcgatgtacatcaaggacacgggcgcaggaagccttttcactgtgaagttgcttgcccctactctaagatcgccgcttctgttcagtgtgatgactcaagtggtgatgaaaagctgaactttgctcctgataatgagcctatccagaaatggcaccggtctttgagctctgacagtgttgtgcagacactccgctgtttaaggaggaaacctgcagttgcattcacctactttaaagatacacatagccttggttttcaccatgacttctcaacctactcagagatcatacaaattttgtcccattcattccaggggaagatgctggtatccttgtttcgtgagattctcttgggaactggtagtggtggccctgaaatcttaccgctcattgatcacttgagaaaaacatgtgccacttctcacgtactctcgtatgcagtcaattgcttaatcaaggcatacaccacctgccacgatgcacaagaaacagtagagatgttttgttgcctttgcaggcttggatttgttccaacactttgggctcgcaactttctgctcaaatttgtatctcagagcagtggtgattcacatatggttgtcgcagcttatgatcgaatgaagtgctttcagttgacactggatgctcaatcattgaacatagtcactagatcactttttcaagcaaacaaggcagacgaagcattccaaatgtaggtcgggatgattgaaatgggagtgaaattagatgtacatggattctcatcatttataattggcctttgtgattgtggaaagtttgatctagcttataacatggtaagaagatatgctgttctacaagagatatcccaagagagggttccaattgaagccatggcttataatatggtaatcgatggactatgcaaagaaatgaaactgaaggaggctgaaaaggtcttggagatcaagaccagacatggatctgcccctgatctatatagctatagctatctcattcatagtcattgcaaaatgggtaacctagagaaggcatggtatcatgttgaagacatggtatcccatggcattgagataaattgttacattgttgcttaccttctacagtgcctcaggaagttaggcatggtatctgaagtaattgtgcacttccagaaatttagagatttaggggtccatcttgatggcgtgctttataacattgctatggatgcttattgcaagcttgggaacatgaatgaggcagttaagctactgaatgaaatgatggctggaagtttggtaccagacaaaatccactatacatgcctgatcaatggttattgtctgaaaggagaaacagaaaatgcctggcaagtatttgaggagatgctgaaggcaaatataaaaccagatgtagttacatataacatattggccagtggatatagcaggaatggccttgttatgaaggtatttgacattctagagcacatgatggatcaagggctcgaacctaattcactcacctatggtatagctattgctggtttttgtagaggaggcaacttgagcgaagcagaggtgctgtttaatatagtagaagaaagagggatagataatatcaatgtgctgtacggttctatggtttgtggttatttgcactcaggctggactgaccatgcttacatgctttttcttagagttgctaaacaaggaaatatggtggatcgtttgtcatgttcaaaattgataaacggactctgtagggatgaaaaggttggagaggcttcaactgtatgtaaaatgatgcttgaaaagaatgttgtccctgatgtaatttcatatagcaaacttatatcagcttattgtcagacaagagatatgcacaatgctcgcttatggttccatgatatggttgaacgaggactttctgatgttattgtatacactgtactgatgaatggttattgcaaggttggtcggttgcaagaagcatgtgaattatttgtccaaatgataaatttaggaatcaagcctgatgtagttgcatacacagtgctattggatggccacctaaaggagaccctacaacaagggtggcagggcatcgctaaggaaaggaggaccttttttcttaggacaaagcataaggtgttgctgaactctatgaaagatatggaaatcgaacctgatgtaacctgttacacagtattgattgatggacggtgcaaagcagaatatctagaggaagcacgaggattgtttgatgagatgttagcaaaaggacttatccctgatgttcacacatacacagctcttataaatggatactgtagccagggagaaatagctaaggctgaagatcttttccaagaaatgatagctaagggaatgaagccagatgtactgagcttttcagtattacataagagaaccttgagacatgaaaaggctcattaatatttatgtgtactaatggttatgttgatgaatgtcagtttgactgaaggtgaaggggcgtcctgccaacaaaagggaaggcgaacacctggattgaaagactgctctctcagttcagcattgggtcgtcaaggagaacaaaatgatggtaccttcagcgtgaggatcgatgactgtcaatggagctgtgcaaacacaatcgtggcaaagctggctgtggcactggcgcctatgccatttatgagggttttgcttgaccgttttgtggctgcaactagtggtgtgttcccagacaaccaagagctacaagacagaggtaagctctcgggttccgtcctggggcaatggggagctgttgatgatcctgagtccatgctgcaccacatccattgggcagtaatgaggtgattccaatcgttaagagtcaagcataatgttgtgtgatagatctatttgcggtgtttgacatcgaggctggggaagttggaaaatggacacagatcgcagagctcggttaaacaagtggcctgtgcctgccatgttggtatcatccaaacagtctccatgtctgcattatactgatgactggaatgagggtgtgtccaaggaggagctggactctgagatcccacctggcgaggagtcgatatacggatacataatgggaatggcagatacatgtagtctgtagaatccatcaggatttccccttgataggtctcaggtttcactctaatattgtgcattgtccctcaagatgttaatacagcaatttcttgtttagtgctcataacattactccagtctccaggcgtagtgcttggtgtagagacataaaacagataatgcagcaccagtttgtggcttcaaattccgaaacaacagctttgtggaagacagaaaagaacactagtttttggcgaactgttg

SEQ ID NO: 35345 - DNA, 3177 bp, Zea Mays
gggctcttgttggagatgctctgaggtcagttcctagtgttacttttgaattataccgaatttgtttcaccgcggcatattaacgaccatggccatcttgtttcttcactggaagattccacaagaaatggtcgatgtacatcaaggacacgggcgcaggaagccttttcactgtgaagttgcttgcccctactctaagatcgccgcttctgttcagtgtgatgactcaagtggtgatgaaaagctgaactttgctcctgataatgagcctatccagaaatggcaccggtctttgagctctgacagtgttgtgcagacactccgctgtttaaggaggaaacctgcagttgcattcacctactttaaagatacacatagccttggttttcaccatgacttctcaacctactcagagatcatacaaattttgtcccattcattccaggggaagatgctggtatccttgtttcgtgagattctcttgggaactggtagtggtggccctgaaatcttaccgctcattgatcacttgagaaaaacatgtgccacttctcacgtcgggatgattgaaatgggagtgaaattagatgtacatggattctcatcatttataattggcctttgtgattgtggaaagtttgatctagcttataacatggtaagaagatatgctgttctacaagagatatcccaagagagggttccaattgaagccatggcttataatatggtaatcgatggactatgcaaagaaatgaaactgaaggaggctgaaaaggtcttggagatcaagaccagacatggatctgcccctgatctatatagctatagctatctcattcatagtcattgcaaaatgggtaacctagagaaggcatggtatcatgttgaagacatggtatcccatggcattgagataaattgttacattgttgcttaccttctacagtgcctcaggaagttaggcatggtatctgaagtaattgtgcacttccagaaatttagagatttaggggtccatcttgatggcgtgctttataacattgctatggatgcttattgcaagcttgggaacatgaatgaggcagttaagctactgaatgaaatgatggctggaagtttggtaccagacaaaatccactatacatgcctgatcaatggttattgtctgaaaggagaaacagaaaatgcctggcaagtatttgaggagatgctgaaggcaaatataaaaccagatgtagttacatataacatattggccagtggatatagcaggaatggccttgttatgaaggtatttgacattctagagcacatgatggatcaagggctcgaacctaattcactcacctatggtatagctattgctggtttttgtagaggaggcaacttgagcgaagcagaggtgctgtttaatatagtagaagaaagagggatagataatatcaatgtgctgtacggttctatggtttgtggttatttgcactcaggctggactgaccatgcttacatgctttttcttagagttgctaaacaaggaaatatggtggatcgtttgtcatgttcaaaattgataaacggactctgtagggatgaaaaggttggagaggcttcaactgtatgtaaaatgatgcttgaaaagaatgttgtccctgatgtaatttcatatagcaaacttatatcagcttattgtcagacaagagatatgcacaatgctcgcttatggttccatgatatggttgaacgaggactttctgatgttattgtatacactgtactgatgaatggttattgcaaggttggtcggttgcaagaagcatgtgaattatttgtccaaatgataaatttaggaatcaagcctgatgtagttgcatacacagtgctattggatggccacctaaaggagaccctacaacaagggtggcagggcatcgctaaggaaaggaggaccttttttcttaggacaaagcataaggtgttgctgaactctatgaaagatatggaaatcgaacctgatgtaacctgttacacagtattgattgatggacggtgcaaagcagaatatctagaggaagcacgaggattgtttgatgagatgttagcaaaaggacttatccctgatgttcacacatacacagctcttataaatggatactgtagccagggagaaatagctaaggctgaagatcttttccaagaaatgatagctaagggaatgaagccagatgtactgagcttttcagtattacataagagaaccttgagacatgaaaaggctcattaatatttatgtgtactaatggttatgttgatgaatgtcagtttgactgaaggtgaaggggcgtcctgccaacaaaagggaaggcgaacacctggattgaaagactgctctctcagttcagcattgggtcgtcaaggagaacaaaatgatggtaccttcagcgtgaggatcgatgactgtcaatggagctgtgcaaacacaatcgtggcaaagctggctgtggcactggcgcctatgccatttatgagggttttgcttgaccgttttgtggctgcaactagtggtgtgttcccagacaaccaagagctacaagacagaggtaagctctcgggttccgtcctggggcaatggggagctgttgatgatcctgagtccatgctgcaccacatccattgggcagtaatgaggtgattccaatcgttaagagtcaagcataatgttgtgtgatagatctatttgcggtgtttgacatcgaggctggggaagttggaaaatggacacagatcgcagagctcggttaaacaatctccatgtctgcattatactgatgactggaatgagggtgtgtccaaggaggagctggactctgagatcccacctggcgaggagtcgatatacggatacataatgggaatggcagatacatgtagtctgtagaatccatcaggatttccccttgataggtctcaggtttcactctaatattgtgcattgtccctcaagatgttaatacagcaatttcttgtttagtgctcataacattactccagtctccaggcgtagtgcttggtgtagagacataaaacagataatgcagcaccagtttgtggcttcaaattccgaaacaacagctttgtggaagacagaaaagaacactagtttttggcgaactgttg

SEQ ID NO: 35346 - DNA, 2990 bp, Zea Mays
gggctcttgttggagatgctctgaggtcagttcctagtgttacttttgaattataccgaatttgtttcaccgcggcatattaacgaccatggccatcttgtttcttcactggaagattccacaagaaatggtcgatgtacatcaaggacacgggcgcaggaagccttttcactgtgaagttgcttgcccctactctaagatcgccgcttctgttcagtgtgatgactcaagtggtgatgaaaagctgaactttgctcctgataatgagcctatccagaaatggcaccggtctttgagctctgacagtgttgtgcagacactccgctgtttaaggaggaaacctgcagttgcattcacctactttaaagatacacatagccttggttttcaccatgacttctcaacctactcagagatcatacaaattttgtcccattcattccaggggaagatgctggtatccttgtttcgtgagattctcttgggaactggtagtggtggccctgaaatcttaccgctcattgatcacttgagaaaaacatgtgccacttctcacgtcgggatgattgaaatgggagtgaaattagatgtacatggattctcatcatttataattggcctttgtgattgtggaaagtttgatctagcttataacatggtaagaagatatgctgttctacaagagatatcccaagagagggttccaattgaagccatggcttataatatggtaatcgatggactatgcaaagaaatgaaactgaaggaggctgaaaaggtcttggagatcaagaccagacatggatctgcccctgatctatatagctatagctatctcattcatagtcattgcaaaatgggtaacctagagaaggcatggtatcatgttgaagacatggtatcccatggcattgagataaattgttacattgttgcttaccttctacagtgcctcaggaagttaggcatggtatctgaagtaattgtgcacttccagaaatttagagatttaggggtccatcttgatggcgtgctttataacattgctatggatgcttattgcaagcttgggaacatgaatgaggcagttaagctactgaatgaaatgatggctggaagtttggtaccagacaaaatccactatacatgcctgatcaatggttattgtctgaaaggagaaacagaaaatgcctggcaagtatttgaggagatgctgaaggcaaatataaaaccagatgtagttacatataacatattggccagtggatatagcaggaatggccttgttatgaaggtatttgacattctagagcacatgatggatcaagggctcgaacctaattcactcacctatggtatagctattgctggtttttgtagaggaggcaacttgagcgaagcagaggtgctgtttaatatagtagaagaaagagggatagataatatcaatgtgctgtacggttctatggtttgtggttatttgcactcaggctggactgaccatgcttacatgctttttcttagagttgctaaacaaggaaatatggtggatcgtttgtcatgttcaaaattgataaacggactctgtagggatgaaaaggttggagaggcttcaactgtatgtaaaatgatgcttgaaaagaatgttgtccctgatgtaatttcatatagcaaacttatatcagcttattgtcagacaagagatatgcacaatgctcgcttatggttccatgatatggttgaacgaggactttctgatgttattgtatacactgtactgatgaatggttattgcaaggttggtcggttgcaagaagcatgtgaattatttgtccaaatgataaatttaggaatcaagcctgatgtagttgcatacacagtgctattggatggccacctaaaggagaccctacaacaagggtggcagggcatcgctaaggaaaggaggaccttttttcttaggacaaagcataaggtgttgctgaactctatgaaagatatggaaatcgaacctgatgtaacctgttacacagtattgattgatggacggtgcaaagcagaatatctagaggaagcacgaggattgtttgatgagatgttagcaaaaggacttatccctgatgttcacacatacacagctcttataaatggatactgtagccagggagaaatagctaaggctgaagatcttttccaagaaatgatagctaagggaatgaagccagatatttggtcaatgatgcgagtgatcggtgtgcctatgtcaggaaggcgaacacctggattgaaagactgctctctcagttcagcattgggtcgtcaaggagaacaaaatgatggtaccttcagcgtgaggatcgatgactgtcaatggagctgtgcaaacacaatcgtggcaaagctggctgtggcactggcgcctatgccatttatgagggttttgcttgaccgttttgtggctgcaactagtggtgtgttcccagacaaccaagagctacaagacagagatctatttgcggtgtttgacatcgaggctggggaagttggaaaatggacacagatcgcagagctcggttaaacaagtggcctgtgcctgccatgttggtatcatccaaacagtctccatgtctgcattatactgatgactggaatgagggtgtgtccaaggaggagctggactctgagatcccacctggcgaggagtcgatatacggatacataatgggaatggcagatacatgtagtctgtagaatccatcaggatttccccttgataggtctcaggtttcactctaatattgtgcattgtccctcaagatgttaatacagcaatttcttgtttagtgctcataacattactccagtctccaggcgtagtgcttggtgtagagacataaaacagataatgcagcaccagtttgtggcttcaaattccgaaacaacagctttgtggaagacagaaaagaacactagtttttggcgaactgttg

SEQ ID NO: 35347 - DNA, 3096 bp, Zea Mays
gggctcttgttggagatgctctgaggtcagttcctagtgttacttttgaattataccgaatttgtttcaccgcggcatattaacgaccatggccatcttgtttcttcactggaagattccacaagaaatggtcgatgtacatcaaggacacgggcgcaggaagccttttcactgtgaagttgcttgcccctactctaagatcgccgcttctgttcagtgtgatgactcaagtggtgatgaaaagctgaactttgctcctgataatgagcctatccagaaatggcaccggtctttgagctctgacagtgttgtgcagacactccgctgtttaaggaggaaacctgcagttgcattcacctactttaaagatacacatagccttggttttcaccatgacttctcaacctactcagagatcatacaaattttgtcccattcattccaggggaagatgctggtatccttgtttcgtgagattctcttgggaactggtagtggtggccctgaaatcttaccgctcattgatcacttgagaaaaacatgtgccacttctcacgtcgggatgattgaaatgggagtgaaattagatgtacatggattctcatcatttataattggcctttgtgattgtggaaagtttgatctagcttataacatggtaagaagatatgctgttctacaagagatatcccaagagagggttccaattgaagccatggcttataatatggtaatcgatggactatgcaaagaaatgaaactgaaggaggctgaaaaggtcttggagatcaagaccagacatggatctgcccctgatctatatagctatagctatctcattcatagtcattgcaaaatgggtaacctagagaaggcatggtatcatgttgaagacatggtatcccatggcattgagataaattgttacattgttgcttaccttctacagtgcctcaggaagttaggcatggtatctgaagtaattgtgcacttccagaaatttagagatttaggggtccatcttgatggcgtgctttataacattgctatggatgcttattgcaagcttgggaacatgaatgaggcagttaagctactgaatgaaatgatggctggaagtttggtaccagacaaaatccactatacatgcctgatcaatggttattgtctgaaaggagaaacagaaaatgcctggcaagtatttgaggagatgctgaaggcaaatataaaaccagatgtagttacatataacatattggccagtggatatagcaggaatggccttgttatgaaggtatttgacattctagagcacatgatggatcaagggctcgaacctaattcactcacctatggtatagctattgctggtttttgtagaggaggcaacttgagcgaagcagaggtgctgtttaatatagtagaagaaagagggatagataatatcaatgtgctgtacggttctatggtttgtggttatttgcactcaggctggactgaccatgcttacatgctttttcttagagttgctaaacaaggaaatatggtggatcgtttgtcatgttcaaaattgataaacggactctgtagggatgaaaaggttggagaggcttcaactgtatgtaaaatgatgcttgaaaagaatgttgtccctgatgtaatttcatatagcaaacttatatcagcttattgtcagacaagagatatgcacaatgctcgcttatggttccatgatatggttgaacgaggactttctgatgttattgtatacactgtactgatgaatggttattgcaaggttggtcggttgcaagaagcatgtgaattatttgtccaaatgataaatttaggaatcaagcctgatgtagttgcatacacagtgctattggatggccacctaaaggagaccctacaacaagggtggcagggcatcgctaaggaaaggaggaccttttttcttaggacaaagcataaggtgttgctgaactctatgaaagatatggaaatcgaacctgatgtaacctgttacacagtattgattgatggacggtgcaaagcagaatatctagaggaagcacgaggattgtttgatgagatgttagcaaaaggacttatccctgatgttcacacatacacagctcttataaatggatactgtagccagggagaaatagctaaggctgaagatcttttccaagaaatgatagctaagggaatgaagccagatgtactgagcttttcagtattacataagagaaccttgagacatgaaaaggctcattaatatttatgtgtactaatggttatgttgatgaatgtcagtttgactgaaggtgaaggggcgtcctgccaacaaaagggaaggcgaacacctggattgaaagactgctctctcagttcagcattgggtcgtcaaggagaacaaaatgatggtaccttcagcgtgaggatcgatgactgtcaatggagctgtgcaaacacaatcgtggcaaagctggctgtggcactggcgcctatgccatttatgagggttttgcttgaccgttttgtggctgcaactagtggtgtgttcccagacaaccaagagctacaagacagaggtaagctctcgggttccgtcctggggcaatggggagctgttgatgatcctgagtccatgctgcaccacatccattgggcagtaatgaggtggcctgtgcctgccatgttggtatcatccaaacagtctccatgtctgcattatactgatgactggaatgagggtgtgtccaaggaggagctggactctgagatcccacctggcgaggagtcgatatacggatacataatgggaatggcagatacatgtagtctgtagaatccatcaggatttccccttgataggtctcaggtttcactctaatattgtgcattgtccctcaagatgttaatacagcaatttcttgtttagtgctcataacattactccagtctccaggcgtagtgcttggtgtagagacataaaacagataatgcagcaccagtttgtggcttcaaattccgaaacaacagctttgtggaagacagaaaagaacactagtttttggcgaactgttg

SEQ ID NO: 35348 - DNA, 3484 bp, Zea Mays
aacagtccaggtcccacaccggaggcatatttcttatatcagtgatggctaatgggtcgtaggaggagcagaaatatttatgtctccaatgatcctgtggcggtggaccaaatgtactgctgaatgcttcaggcgcaggaagccttttcactgtgaagttgcttgcccctactctaagatcgccgcttctgttcagtgtgatgactcaagtggtgatgaaaagctgaactttgctcctgataatgagcctatccagaaatggcaccggtctttgagctctgacagtgttgtgcagacactccgctgtttaaggaggaaacctgcagttgcattcacctactttaaagatacacatagccttggttttcaccatgacttctcaacctactcagagatcatacaaattttgtcccattcattccaggggaagatgctggtatccttgtttcgtgagattctcttgggaactggtagtggtggccctgaaatcttaccgctcattgatcacttgagaaaaacatgtgccacttctcacgtactctcgtatgcagtcaattgcttaatcaaggcatacaccacctgccacgatgcacaagaaacagtagagatgttttgttgcctttgcaggcttggatttgttccaacactttgggctcgcaactttctgctcaaatttgtatctcagagcagtggtgattcacatatggttgtcgcagcttatgatcgaatgaagtgctttcagttgacactggatgctcaatcattgaacatagtcactagatcactttttcaagcaaacaaggcagacgaagcattccaaatgtaggtcgggatgattgaaatgggagtgaaattagatgtacatggattctcatcatttataattggcctttgtgattgtggaaagtttgatctagcttataacatggtaagaagatatgctgttctacaagagatatcccaagagagggttccaattgaagccatggcttataatatggtaatcgatggactatgcaaagaaatgaaactgaaggaggctgaaaaggtcttggagatcaagaccagacatggatctgcccctgatctatatagctatagctatctcattcatagtcattgcaaaatgggtaacctagagaaggcatggtatcatgttgaagacatggtatcccatggcattgagataaattgttacattgttgcttaccttctacagtgcctcaggaagttaggcatggtatctgaagtaattgtgcacttccagaaatttagagatttaggggtccatcttgatggcgtgctttataacattgctatggatgcttattgcaagcttgggaacatgaatgaggcagttaagctactgaatgaaatgatggctggaagtttggtaccagacaaaatccactatacatgcctgatcaatggttattgtctgaaaggagaaacagaaaatgcctggcaagtatttgaggagatgctgaaggcaaatataaaaccagatgtagttacatataacatattggccagtggatatagcaggaatggccttgttatgaaggtatttgacattctagagcacatgatggatcaagggctcgaacctaattcactcacctatggtatagctattgctggtttttgtagaggaggcaacttgagcgaagcagaggtgctgtttaatatagtagaagaaagagggatagataatatcaatgtgctgtacggttctatggtttgtggttatttgcactcaggctggactgaccatgcttacatgctttttcttagagttgctaaacaaggaaatatggtggatcgtttgtcatgttcaaaattgataaacggactctgtagggatgaaaaggttggagaggcttcaactgtatgtaaaatgatgcttgaaaagaatgttgtccctgatgtaatttcatatagcaaacttatatcagcttattgtcagacaagagatatgcacaatgctcgcttatggttccatgatatggttgaacgaggactttctgatgttattgtatacactgtactgatgaatggttattgcaaggttggtcggttgcaagaagcatgtgaattatttgtccaaatgataaatttaggaatcaagcctgatgtagttgcatacacagtgctattggatggccacctaaaggagaccctacaacaagggtggcagggcatcgctaaggaaaggaggaccttttttcttaggacaaagcataaggtgttgctgaactctatgaaagatatggaaatcgaacctgatgtaacctgttacacagtattgattgatggacggtgcaaagcagaatatctagaggaagcacgaggattgtttgatgagatgttagcaaaaggacttatccctgatgttcacacatacacagctcttataaatggatactgtagccagggagaaatagctaaggctgaagatcttttccaagaaatgatagctaagggaatgaagccagatgtactgagcttttcagtattacataagagaaccttgagacatgaaaaggctcattaatatttatgtgtactaatggttatgttgatgaatgtcagtttgactgaaggtgaaggggcgtcctgccaacaaaagggaaggcgaacacctggattgaaagactgctctctcagttcagcattgggtcgtcaaggagaacaaaatgatggtaccttcagcgtgaggatcgatgactgtcaatggagctgtgcaaacacaatcgtggcaaagctggctgtggcactggcgcctatgccatttatgagggttttgcttgaccgttttgtggctgcaactagtggtgtgttcccagacaaccaagagctacaagacagaggtaagctctcgggttccgtcctggggcaatggggagctgttgatgatcctgagtccatgctgcaccacatccattgggcagtaatgaggtgattccaatcgttaagagtcaagcataatgttgtgtgatagatctatttgcggtgtttgacatcgaggctggggaagttggaaaatggacacagatcgcagagctcggttaaacaagtggcctgtgcctgccatgttggtatcatccaaacagtctccatgtctgcattatactgatgactggaatgagggtgtgtccaaggaggagctggactctgagatcccacctggcgaggagtcgatatacggatacataatgggaatggcagatacatgtagtctgtagaatccatcaggatttccccttgataggtctcaggtttcactctaatattgtgcattgtccctcaagatgttaatacagcaatttcttgtttagtgctcataacattactccagtctccaggcgtagtgcttggtgtagagacataaaacagataatgcagcaccagtttgtggcttcaaattccgaaacaacagctttgtggaagacagaaaagaacactagtttttggcgaactgttg

SEQ ID NO: 35349 - DNA, 3614 bp, Zea Mays
caaaacagtccaggtcccacaccggaggcgtgcaagggtcgttgctcgcaaagccgccttcgttgctagtgcgacggctttggagatgattgttcaagctgagaaggcgaacaccgaggctgccaagaaagctcctagacctctgcgtcgtgatgcatatttcttatatcagtgatggctaatgggtcgtaggaggagcagaaatatttatgtctccaatgatcctgtggcggtggaccaaatgtactgctgaatgcttcaggcgcaggaagccttttcactgtgaagttgcttgcccctactctaagatcgccgcttctgttcagtgtgatgactcaagtggtgatgaaaagctgaactttgctcctgataatgagcctatccagaaatggcaccggtctttgagctctgacagtgttgtgcagacactccgctgtttaaggaggaaacctgcagttgcattcacctactttaaagatacacatagccttggttttcaccatgacttctcaacctactcagagatcatacaaattttgtcccattcattccaggggaagatgctggtatccttgtttcgtgagattctcttgggaactggtagtggtggccctgaaatcttaccgctcattgatcacttgagaaaaacatgtgccacttctcacgtactctcgtatgcagtcaattgcttaatcaaggcatacaccacctgccacgatgcacaagaaacagtagagatgttttgttgcctttgcaggcttggatttgttccaacactttgggctcgcaactttctgctcaaatttgtatctcagagcagtggtgattcacatatggttgtcgcagcttatgatcgaatgaagtgctttcagttgacactggatgctcaatcattgaacatagtcactagatcactttttcaagcaaacaaggcagacgaagcattccaaatgtaggtcgggatgattgaaatgggagtgaaattagatgtacatggattctcatcatttataattggcctttgtgattgtggaaagtttgatctagcttataacatggtaagaagatatgctgttctacaagagatatcccaagagagggttccaattgaagccatggcttataatatggtaatcgatggactatgcaaagaaatgaaactgaaggaggctgaaaaggtcttggagatcaagaccagacatggatctgcccctgatctatatagctatagctatctcattcatagtcattgcaaaatgggtaacctagagaaggcatggtatcatgttgaagacatggtatcccatggcattgagataaattgttacattgttgcttaccttctacagtgcctcaggaagttaggcatggtatctgaagtaattgtgcacttccagaaatttagagatttaggggtccatcttgatggcgtgctttataacattgctatggatgcttattgcaagcttgggaacatgaatgaggcagttaagctactgaatgaaatgatggctggaagtttggtaccagacaaaatccactatacatgcctgatcaatggttattgtctgaaaggagaaacagaaaatgcctggcaagtatttgaggagatgctgaaggcaaatataaaaccagatgtagttacatataacatattggccagtggatatagcaggaatggccttgttatgaaggtatttgacattctagagcacatgatggatcaagggctcgaacctaattcactcacctatggtatagctattgctggtttttgtagaggaggcaacttgagcgaagcagaggtgctgtttaatatagtagaagaaagagggatagataatatcaatgtgctgtacggttctatggtttgtggttatttgcactcaggctggactgaccatgcttacatgctttttcttagagttgctaaacaaggaaatatggtggatcgtttgtcatgttcaaaattgataaacggactctgtagggatgaaaaggttggagaggcttcaactgtatgtaaaatgatgcttgaaaagaatgttgtccctgatgtaatttcatatagcaaacttatatcagcttattgtcagacaagagatatgcacaatgctcgcttatggttccatgatatggttgaacgaggactttctgatgttattgtatacactgtactgatgaatggttattgcaaggttggtcggttgcaagaagcatgtgaattatttgtccaaatgataaatttaggaatcaagcctgatgtagttgcatacacagtgctattggatggccacctaaaggagaccctacaacaagggtggcagggcatcgctaaggaaaggaggaccttttttcttaggacaaagcataaggtgttgctgaactctatgaaagatatggaaatcgaacctgatgtaacctgttacacagtattgattgatggacggtgcaaagcagaatatctagaggaagcacgaggattgtttgatgagatgttagcaaaaggacttatccctgatgttcacacatacacagctcttataaatggatactgtagccagggagaaatagctaaggctgaagatcttttccaagaaatgatagctaagggaatgaagccagatgtactgagcttttcagtattacataagagaaccttgagacatgaaaaggctcattaatatttatgtgtactaatggttatgttgatgaatgtcagtttgactgaaggtgaaggggcgtcctgccaacaaaagggaaggcgaacacctggattgaaagactgctctctcagttcagcattgggtcgtcaaggagaacaaaatgatggtaccttcagcgtgaggatcgatgactgtcaatggagctgtgcaaacacaatcgtggcaaagctggctgtggcactggcgcctatgccatttatgagggttttgcttgaccgttttgtggctgcaactagtggtgtgttcccagacaaccaagagctacaagacagaggtaagctctcgggttccgtcctggggcaatggggagctgttgatgatcctgagtccatgctgcaccacatccattgggcagtaatgaggtgattccaatcgttaagagtcaagcataatgttgtgtgatagatctatttgcggtgtttgacatcgaggctggggaagttggaaaatggacacagatcgcagagctcggttaaacaagtggcctgtgcctgccatgttggtatcatccaaacagtctccatgtctgcattatactgatgactggaatgagggtgtgtccaaggaggagctggactctgagatcccacctggcgaggagtcgatatacggatacataatgggaatggcagatacatgtagtctgtagaatccatcaggatttccccttgataggtctcaggtttcactctaatattgtgcattgtccctcaagatgttaatacagcaatttcttgtttagtgctcataacattactccagtctccaggcgtagtgcttggtgtagagacataaaacagataatgcagcaccagtttgtggcttcaaattccgaaacaacagctttgtggaagacagaaaagaacactagtttttggcgaactgttg

SEQ ID NO: 35350 - DNA, 3199 bp, Zea Mays
ttccaaaacagtccaggtcccacaccggaggcatatttcttatatcagtgatggctaatgggtcgtaggaggagcagaaatatttatgtctccaatgatcctgtggcggtggaccaaatgtactgctgaatgcttcaggcgcaggaagccttttcactgtgaagttgcttgcccctactctaagatcgccgcttctgttcagtgtgatgactcaagtggtgatgaaaagctgaactttgctcctgataatgagcctatccagaaatggcaccggtctttgagctctgacagtgttgtgcagacactccgctgtttaaggaggaaacctgcagttgcattcacctactttaaagatacacatagccttggttttcaccatgacttctcaacctactcagagatcatacaaattttgtcccattcattccaggggaagatgctggtatccttgtttcgtgagattctcttgggaactggtagtggtggccctgaaatcttaccgctcattgatcacttgagaaaaacatgtgccacttctcacgtcgggatgattgaaatgggagtgaaattagatgtacatggattctcatcatttataattggcctttgtgattgtggaaagtttgatctagcttataacatggtaagaagatatgctgttctacaagagatatcccaagagagggttccaattgaagccatggcttataatatggtaatcgatggactatgcaaagaaatgaaactgaaggaggctgaaaaggtcttggagatcaagaccagacatggatctgcccctgatctatatagctatagctatctcattcatagtcattgcaaaatgggtaacctagagaaggcatggtatcatgttgaagacatggtatcccatggcattgagataaattgttacattgttgcttaccttctacagtgcctcaggaagttaggcatggtatctgaagtaattgtgcacttccagaaatttagagatttaggggtccatcttgatggcgtgctttataacattgctatggatgcttattgcaagcttgggaacatgaatgaggcagttaagctactgaatgaaatgatggctggaagtttggtaccagacaaaatccactatacatgcctgatcaatggttattgtctgaaaggagaaacagaaaatgcctggcaagtatttgaggagatgctgaaggcaaatataaaaccagatgtagttacatataacatattggccagtggatatagcaggaatggccttgttatgaaggtatttgacattctagagcacatgatggatcaagggctcgaacctaattcactcacctatggtatagctattgctggtttttgtagaggaggcaacttgagcgaagcagaggtgctgtttaatatagtagaagaaagagggatagataatatcaatgtgctgtacggttctatggtttgtggttatttgcactcaggctggactgaccatgcttacatgctttttcttagagttgctaaacaaggaaatatggtggatcgtttgtcatgttcaaaattgataaacggactctgtagggatgaaaaggttggagaggcttcaactgtatgtaaaatgatgcttgaaaagaatgttgtccctgatgtaatttcatatagcaaacttatatcagcttattgtcagacaagagatatgcacaatgctcgcttatggttccatgatatggttgaacgaggactttctgatgttattgtatacactgtactgatgaatggttattgcaaggttggtcggttgcaagaagcatgtgaattatttgtccaaatgataaatttaggaatcaagcctgatgtagttgcatacacagtgctattggatggccacctaaaggagaccctacaacaagggtggcagggcatcgctaaggaaaggaggaccttttttcttaggacaaagcataaggtgttgctgaactctatgaaagatatggaaatcgaacctgatgtaacctgttacacagtattgattgatggacggtgcaaagcagaatatctagaggaagcacgaggattgtttgatgagatgttagcaaaaggacttatccctgatgttcacacatacacagctcttataaatggatactgtagccagggagaaatagctaaggctgaagatcttttccaagaaatgatagctaagggaatgaagccagatgtactgagcttttcagtattacataagagaaccttgagacatgaaaaggctcattaatatttatgtgtactaatggttatgttgatgaatgtcagtttgactgaaggtgaaggggcgtcctgccaacaaaagggaaggcgaacacctggattgaaagactgctctctcagttcagcattgggtcgtcaaggagaacaaaatgatggtaccttcagcgtgaggatcgatgactgtcaatggagctgtgcaaacacaatcgtggcaaagctggctgtggcactggcgcctatgccatttatgagggttttgcttgaccgttttgtggctgcaactagtggtgtgttcccagacaaccaagagctacaagacagaggtaagctctcgggttccgtcctggggcaatggggagctgttgatgatcctgagtccatgctgcaccacatccattgggcagtaatgaggtgattccaatcgttaagagtcaagcataatgttgtgtgatagatctatttgcggtgtttgacatcgaggctggggaagttggaaaatggacacagatcgcagagctcggttaaacaagtggcctgtgcctgccatgttggtatcatccaaacagtctccatgtctgcattatactgatgactggaatgagggtgtgtccaaggaggagctggactctgagatcccacctggcgaggagtcgatatacggatacataatgggaatggcagatacatgtagtctgtagaatccatcaggatttccccttgataggtctcaggtttcactctaatattgtgcattgtccctcaagatgttaatacagcaatttcttgtttagtgctcataacattactccagtctccaggcgtagtgcttggtgtagagacataaaacagataatgcagcaccagtttgtggcttcaaattccgaaacaacagctttgtggaagacagaaaagaacactagtttttggcgaactgttg

SEQ ID NO: 35351 - DNA, 3584 bp, Zea Mays
cttcttccaaaacagtccaggtcccacaccggaggcgtgcaagggtcgttgctcgcaaagccgccttcgttgctagtgcgacggctttggagatgattgttcaagctgagaaggcgaacaccgaggctgccaagaaagctcctagacctctgcgtcgtgatgcatatttcttatatcagtgatggctaatgggtcgtaggaggagcagaaatatttatgtctccaatgatcctgtggcggtggaccaaatgtactgctgaatgcttcaggcgcaggaagccttttcactgtgaagttgcttgcccctactctaagatcgccgcttctgttcagtgtgatgactcaagtggtgatgaaaagctgaactttgctcctgataatgagcctatccagaaatggcaccggtctttgagctctgacagtgttgtgcagacactccgctgtttaaggaggaaacctgcagttgcattcacctactttaaagatacacatagccttggttttcaccatgacttctcaacctactcagagatcatacaaattttgtcccattcattccaggggaagatgctggtatccttgtttcgtgagattctcttgggaactggtagtggtggccctgaaatcttaccgctcattgatcacttgagaaaaacatgtgccacttctcacgtactctcgtatgcagtcaattgcttaatcaaggcatacaccacctgccacgatgcacaagaaacagtagagatgttttgttgcctttgcaggcttggatttgttccaacactttgggctcgcaactttctgctcaaatttgtatctcagagcagtggtgattcacatatggttgtcgcagcttatgatcgaatgaagtgctttcagttgacactggatgctcaatcattgaacatagtcactagatcactttttcaagcaaacaaggcagacgaagcattccaaatgtaggtcgggatgattgaaatgggagtgaaattagatgtacatggattctcatcatttataattggcctttgtgattgtggaaagtttgatctagcttataacatggtaagaagatatgctgttctacaagagatatcccaagagagggttccaattgaagccatggcttataatatggtaatcgatggactatgcaaagaaatgaaactgaaggaggctgaaaaggtcttggagatcaagaccagacatggatctgcccctgatctatatagctatagctatctcattcatagtcattgcaaaatgggtaacctagagaaggcatggtatcatgttgaagacatggtatcccatggcattgagataaattgttacattgttgcttaccttctacagtgcctcaggaagttaggcatggtatctgaagtaattgtgcacttccagaaatttagagatttaggggtccatcttgatggcgtgctttataacattgctatggatgcttattgcaagcttgggaacatgaatgaggcagttaagctactgaatgaaatgatggctggaagtttggtaccagacaaaatccactatacatgcctgatcaatggttattgtctgaaaggagaaacagaaaatgcctggcaagtatttgaggagatgctgaaggcaaatataaaaccagatgtagttacatataacatattggccagtggatatagcaggaatggccttgttatgaaggtatttgacattctagagcacatgatggatcaagggctcgaacctaattcactcacctatggtatagctattgctggtttttgtagaggaggcaacttgagcgaagcagaggtgctgtttaatatagtagaagaaagagggatagataatatcaatgtgctgtacggttctatggtttgtggttatttgcactcaggctggactgaccatgcttacatgctttttcttagagttgctaaacaaggaaatatggtggatcgtttgtcatgttcaaaattgataaacggactctgtagggatgaaaaggttggagaggcttcaactgtatgtaaaatgatgcttgaaaagaatgttgtccctgatgtaatttcatatagcaaacttatatcagcttattgtcagacaagagatatgcacaatgctcgcttatggttccatgatatggttgaacgaggactttctgatgttattgtatacactgtactgatgaatggttattgcaaggttggtcggttgcaagaagcatgtgaattatttgtccaaatgataaatttaggaatcaagcctgatgtagttgcatacacagtgctattggatggccacctaaaggagaccctacaacaagggtggcagggcatcgctaaggaaaggaggaccttttttcttaggacaaagcataaggtgttgctgaactctatgaaagatatggaaatcgaacctgatgtaacctgttacacagtattgattgatggacggtgcaaagcagaatatctagaggaagcacgaggattgtttgatgagatgttagcaaaaggacttatccctgatgttcacacatacacagctcttataaatggatactgtagccagggagaaatagctaaggctgaagatcttttccaagaaatgatagctaagggaatgaagccagatgtactgagcttttcagtattacataagagaaccttgagacatgaaaaggctcattaatatttatgtgtactaatggttatgttgatgaatgtcagtttgactgaaggtgaaggggcgtcctgccaacaaaagggaaggcgaacacctggattgaaagactgctctctcagttcagcattgggtcgtcaaggagaacaaaatgatggtaccttcagcgtgaggatcgatgactgtcaatggagctgtgcaaacacaatcgtggcaaagctggctgtggcactggcgcctatgccatttatgagggttttgcttgaccgttttgtggctgcaactagtggtgtgttcccagacaaccaagagctacaagacagaggtaagctctcgggttccgtcctggggcaatggggagctgttgatgatcctgagtccatgctgcaccacatccattgggcagtaatgaggtgattccaatcgttaagagtcaagcataatgttgtgtgatagatctatttgcggtgtttgacatcgaggctggggaagttggaaaatggacacagatcgcagagctcggttaaacaatctccatgtctgcattatactgatgactggaatgagggtgtgtccaaggaggagctggactctgagatcccacctggcgaggagtcgatatacggatacataatgggaatggcagatacatgtagtctgtagaatccatcaggatttccccttgataggtctcaggtttcactctaatattgtgcattgtccctcaagatgttaatacagcaatttcttgtttagtgctcataacattactccagtctccaggcgtagtgcttggtgtagagacataaaacagataatgcagcaccagtttgtggcttcaaattccgaaacaacagctttgtggaagacagaaaagaacactagtttttggcgaactgttg

SEQ ID NO: 35352 - DNA, 3391 bp, Zea Mays
cttcttccaaaacagtccaggtcccacaccggaggtacgctagggttccacctgagctcttccttcttccccttctgctcgtctccccatttgattcctcgccgcctgtggcttcttccccgttgtcatggagtcgggcaaaggtcctgtggtcgcggacgattaagcgatttgctcgctgcagccaggcgtgcaagggtcgttgctcgcaaagccgccttcgttgctagtgcgacggctttggagatgattgttcaagctgagaaggcgaacaccgaggctgccaagaaagctcctagacctctgcgtcgtgatgcatatttcttatatcagtgatggctaatgggtcgtaggaggagcagaaatatttatgtctccaatgatcctgtggcggtggaccaaatgtactgctgaatgcttcaggcgcaggaagccttttcactgtgaagttgcttgcccctactctaagatcgccgcttctgttcagtgtgatgactcaagtggtgatgaaaagctgaactttgctcctgataatgagcctatccagaaatggcaccggtctttgagctctgacagtgttgtgcagacactccgctgtttaaggaggaaacctgcagttgcattcacctactttaaagatacacatagccttggttttcaccatgacttctcaacctactcagagatcatacaaattttgtcccattcattccaggggaagatgctggtatccttgtttcgtgagattctcttgggaactggtagtggtggccctgaaatcttaccgctcattgatcacttgagaaaaacatgtgccacttctcacgtcgggatgattgaaatgggagtgaaattagatgtacatggattctcatcatttataattggcctttgtgattgtggaaagtttgatctagcttataacatggtaagaagatatgctgttctacaagagatatcccaagagagggttccaattgaagccatggcttataatatggtaatcgatggactatgcaaagaaatgaaactgaaggaggctgaaaaggtcttggagatcaagaccagacatggatctgcccctgatctatatagctatagctatctcattcatagtcattgcaaaatgggtaacctagagaaggcatggtatcatgttgaagacatggtatcccatggcattgagataaattgttacattgttgcttaccttctacagtgcctcaggaagttaggcatggtatctgaagtaattgtgcacttccagaaatttagagatttaggggtccatcttgatggcgtgctttataacattgctatggatgcttattgcaagcttgggaacatgaatgaggcagttaagctactgaatgaaatgatggctggaagtttggtaccagacaaaatccactatacatgcctgatcaatggttattgtctgaaaggagaaacagaaaatgcctggcaagtatttgaggagatgctgaaggcaaatataaaaccagatgtagttacatataacatattggccagtggatatagcaggaatggccttgttatgaaggtatttgacattctagagcacatgatggatcaagggctcgaacctaattcactcacctatggtatagctattgctggtttttgtagaggaggcaacttgagcgaagcagaggtgctgtttaatatagtagaagaaagagggatagataatatcaatgtgctgtacggttctatggtttgtggttatttgcactcaggctggactgaccatgcttacatgctttttcttagagttgctaaacaaggaaatatggtggatcgtttgtcatgttcaaaattgataaacggactctgtagggatgaaaaggttggagaggcttcaactgtatgtaaaatgatgcttgaaaagaatgttgtccctgatgtaatttcatatagcaaacttatatcagcttattgtcagacaagagatatgcacaatgctcgcttatggttccatgatatggttgaacgaggactttctgatgttattgtatacactgtactgatgaatggttattgcaaggttggtcggttgcaagaagcatgtgaattatttgtccaaatgataaatttaggaatcaagcctgatgtagttgcatacacagtgctattggatggccacctaaaggagaccctacaacaagggtggcagggcatcgctaaggaaaggaggaccttttttcttaggacaaagcataaggtgttgctgaactctatgaaagatatggaaatcgaacctgatgtaacctgttacacagtattgattgatggacggtgcaaagcagaatatctagaggaagcacgaggattgtttgatgagatgttagcaaaaggacttatccctgatgttcacacatacacagctcttataaatggatactgtagccagggagaaatagctaaggctgaagatcttttccaagaaatgatagctaagggaatgaagccagatatttggtcaatgatgcgagtgatcggtgtgcctatgtcaggaaggcgaacacctggattgaaagactgctctctcagttcagcattgggtcgtcaaggagaacaaaatgatggtaccttcagcgtgaggatcgatgactgtcaatggagctgtgcaaacacaatcgtggcaaagctggctgtggcactggcgcctatgccatttatgagggttttgcttgaccgttttgtggctgcaactagtggtgtgttcccagacaaccaagagctacaagacagaggtaagctctcgggttccgtcctggggcaatggggagctgttgatgatcctgagtccatgctgcaccacatccattgggcagtaatgaggtgattccaatcgttaagagtcaagcataatgttgtgtgatagatctatttgcggtgtttgacatcgaggctggggaagttggaaaatggacacagatcgcagagctcggttaaacaagtggcctgtgcctgccatgttggtatcatccaaacagtctccatgtctgcattatactgatgactggaatgagggtgtgtccaaggaggagctggactctgagatcccacctggcgaggagtcgatatacggatacataatgggaatggcagatacatgtagtctgtagaatccatcaggatttccccttgataggtctcaggtttcactctaatattgtgcattgtccctcaagatgttaatacagcaatttcttgtttagtgctcataacattactccagtctccaggcgtagtgcttggtgtagagacataaaacagataatgcagcaccagtttgtggcttcaaattccgaaacaacagctttgtggaagacagaaaagaacactagtttttggcgaactgttg

SEQ ID NO: 35353 - DNA, 3369 bp, Zea Mays
gttcttcttccaaaacagtccaggtcccacaccggaggtacgctagggttccacctgagctcttccttcttccccttctgctcgtctccccatttgattcctcgccgcctgtggcttcttccccgttgtcatggagtcgggcaaaggtcctgtggtcgcggacgattaagcgatttgctcgctgcagccaggcgtgcaagggtcgttgctcgcaaagccgccttcgttgctagtgcgacggctttggagatgattgttcaagctgagaaggcgaacaccgaggctgccaagaaagctcctagacctctgcgtcgtgatgcatatttcttatatcagtgatggctaatgggtcgtaggaggagcagaaatatttatgtctccaatgatcctgtggcggtggaccaaatgtactgctgaatgcttcaggcgcaggaagccttttcactgtgaagttgcttgcccctactctaagatcgccgcttctgttcagtgtgatgactcaagtggtgatgaaaagctgaactttgctcctgataatgagcctatccagaaatggcaccggtctttgagctctgacagtgttgtgcagacactccgctgtttaaggaggaaacctgcagttgcattcacctactttaaagatacacatagccttggttttcaccatgacttctcaacctactcagagatcatacaaattttgtcccattcattccaggggaagatgctggtatccttgtttcgtgagattctcttgggaactggtagtggtggccctgaaatcttaccgctcattgatcacttgagaaaaacatgtgccacttctcacgtcgggatgattgaaatgggagtgaaattagatgtacatggattctcatcatttataattggcctttgtgattgtggaaagtttgatctagcttataacatggtaagaagatatgctgttctacaagagatatcccaagagagggttccaattgaagccatggcttataatatggtaatcgatggactatgcaaagaaatgaaactgaaggaggctgaaaaggtcttggagatcaagaccagacatggatctgcccctgatctatatagctatagctatctcattcatagtcattgcaaaatgggtaacctagagaaggcatggtatcatgttgaagacatggtatcccatggcattgagataaattgttacattgttgcttaccttctacagtgcctcaggaagttaggcatggtatctgaagtaattgtgcacttccagaaatttagagatttaggggtccatcttgatggcgtgctttataacattgctatggatgcttattgcaagcttgggaacatgaatgaggcagttaagctactgaatgaaatgatggctggaagtttggtaccagacaaaatccactatacatgcctgatcaatggttattgtctgaaaggagaaacagaaaatgcctggcaagtatttgaggagatgctgaaggcaaatataaaaccagatgtagttacatataacatattggccagtggatatagcaggaatggccttgttatgaaggtatttgacattctagagcacatgatggatcaagggctcgaacctaattcactcacctatggtatagctattgctggtttttgtagaggaggcaacttgagcgaagcagaggtgctgtttaatatagtagaagaaagagggatagataatatcaatgtgctgtacggttctatggtttgtggttatttgcactcaggctggactgaccatgcttacatgctttttcttagagttgctaaacaaggaaatatggtggatcgtttgtcatgttcaaaattgataaacggactctgtagggatgaaaaggttggagaggcttcaactgtatgtaaaatgatgcttgaaaagaatgttgtccctgatgtaatttcatatagcaaacttatatcagcttattgtcagacaagagatatgcacaatgctcgcttatggttccatgatatggttgaacgaggactttctgatgttattgtatacactgtactgatgaatggttattgcaaggttggtcggttgcaagaagcatgtgaattatttgtccaaatgataaatttaggaatcaagcctgatgtagttgcatacacagtgctattggatggccacctaaaggagaccctacaacaagggtggcagggcatcgctaaggaaaggaggaccttttttcttaggacaaagcataaggtgttgctgaactctatgaaagatatggaaatcgaacctgatgtaacctgttacacagtattgattgatggacggtgcaaagcagaatatctagaggaagcacgaggattgtttgatgagatgttagcaaaaggacttatccctgatgttcacacatacacagctcttataaatggatactgtagccagggagaaatagctaaggctgaagatcttttccaagaaatgatagctaagggaatgaagccagatgtactgagcttttcagtattacataagagaaccttgagacatgaaaaggctcattaatatttatgtgtactaatggttatgttgatgaatgtcagtttgactgaaggtgaaggggcgtcctgccaacaaaagggaaggcgaacacctggattgaaagactgctctctcagttcagcattgggtcgtcaaggagaacaaaatgatggtaccttcagcgtgaggatcgatgactgtcaatggagctgtgcaaacacaatcgtggcaaagctggctgtggcactggcgcctatgccatttatgagggttttgcttgaccgttttgtggctgcaactagtggtgtgttcccagacaaccaagagctacaagacagaggtaagctctcgggttccgtcctggggcaatggggagctgttgatgatcctgagtccatgctgcaccacatccattgggcagtaatgaggtggcctgtgcctgccatgttggtatcatccaaacagtctccatgtctgcattatactgatgactggaatgagggtgtgtccaaggaggagctggactctgagatcccacctggcgaggagtcgatatacggatacataatgggaatggcagatacatgtagtctgtagaatccatcaggatttccccttgataggtctcaggtttcactctaatattgtgcattgtccctcaagatgttaatacagcaatttcttgtttagtgctcataacattactccagtctccaggcgtagtgcttggtgtagagacataaaacagataatgcagcaccagtttgtggcttcaaattccgaaacaacagctttgtggaagacagaaaagaacactagtttttggcgaactgttg

SEQ ID NO: 35354 - DNA, 3497 bp, Zea Mays
gttcttcttccaaaacagtccaggtcccacaccggagccaggcgtgcaagggtcgttgctcgcaaagccgccttcgttgctagtgcgacggctttggagatgattgttcaagctgagaaggcgaacaccgaggctgccaagaaagctcctagacctctgcgtcgtgatgcatatttcttatatcagtgatggctaatgggtcgtaggaggagcagaaatatttatgtctccaatgatcctgtggcggtggaccaaatgtactgctgaatgcttcaggcgcaggaagccttttcactgtgaagttgcttgcccctactctaagatcgccgcttctgttcagtgtgatgactcaagtggtgatgaaaagctgaactttgctcctgataatgagcctatccagaaatggcaccggtctttgagctctgacagtgttgtgcagacactccgctgtttaaggaggaaacctgcagttgcattcacctactttaaagatacacatagccttggttttcaccatgacttctcaacctactcagagatcatacaaattttgtcccattcattccaggggaagatgctggtatccttgtttcgtgagattctcttgggaactggtagtggtggccctgaaatcttaccgctcattgatcacttgagaaaaacatgtgccacttctcacgtactctcgtatgcagtcaattgcttaatcaaggcatacaccacctgccacgatgcacaagaaacagtagagatgttttgttgcctttgcaggcttggatttgttccaacactttgggctcgcaactttctgctcaaatttgtatctcagagcagtggtgattcacatatggttgtcgcagcttatgatcgaatgaagtgctttcagttgacactggatgctcaatcattgaacatagtcactagatcactttttcaagcaaacaaggcagacgaagcattccaaatgtaggtcgggatgattgaaatgggagtgaaattagatgtacatggattctcatcatttataattggcctttgtgattgtggaaagtttgatctagcttataacatggtaagaagatatgctgttctacaagagatatcccaagagagggttccaattgaagccatggcttataatatggtaatcgatggactatgcaaagaaatgaaactgaaggaggctgaaaaggtcttggagatcaagaccagacatggatctgcccctgatctatatagctatagctatctcattcatagtcattgcaaaatgggtaacctagagaaggcatggtatcatgttgaagacatggtatcccatggcattgagataaattgttacattgttgcttaccttctacagtgcctcaggaagttaggcatggtatctgaagtaattgtgcacttccagaaatttagagatttaggggtccatcttgatggcgtgctttataacattgctatggatgcttattgcaagcttgggaacatgaatgaggcagttaagctactgaatgaaatgatggctggaagtttggtaccagacaaaatccactatacatgcctgatcaatggttattgtctgaaaggagaaacagaaaatgcctggcaagtatttgaggagatgctgaaggcaaatataaaaccagatgtagttacatataacatattggccagtggatatagcaggaatggccttgttatgaaggtatttgacattctagagcacatgatggatcaagggctcgaacctaattcactcacctatggtatagctattgctggtttttgtagaggaggcaacttgagcgaagcagaggtgctgtttaatatagtagaagaaagagggatagataatatcaatgtgctgtacggttctatggtttgtggttatttgcactcaggctggactgaccatgcttacatgctttttcttagagttgctaaacaaggaaatatggtggatcgtttgtcatgttcaaaattgataaacggactctgtagggatgaaaaggttggagaggcttcaactgtatgtaaaatgatgcttgaaaagaatgttgtccctgatgtaatttcatatagcaaacttatatcagcttattgtcagacaagagatatgcacaatgctcgcttatggttccatgatatggttgaacgaggactttctgatgttattgtatacactgtactgatgaatggttattgcaaggttggtcggttgcaagaagcatgtgaattatttgtccaaatgataaatttaggaatcaagcctgatgtagttgcatacacagtgctattggatggccacctaaaggagaccctacaacaagggtggcagggcatcgctaaggaaaggaggaccttttttcttaggacaaagcataaggtgttgctgaactctatgaaagatatggaaatcgaacctgatgtaacctgttacacagtattgattgatggacggtgcaaagcagaatatctagaggaagcacgaggattgtttgatgagatgttagcaaaaggacttatccctgatgttcacacatacacagctcttataaatggatactgtagccagggagaaatagctaaggctgaagatcttttccaagaaatgatagctaagggaatgaagccagatgtactgagcttttcagtattacataagagaaccttgagacatgaaaaggctcattaatatttatgtgtactaatggttatgttgatgaatgtcagtttgactgaaggtgaaggggcgtcctgccaacaaaagggaaggcgaacacctggattgaaagactgctctctcagttcagcattgggtcgtcaaggagaacaaaatgatggtaccttcagcgtgaggatcgatgactgtcaatggagctgtgcaaacacaatcgtggcaaagctggctgtggcactggcgcctatgccatttatgagggttttgcttgaccgttttgtggctgcaactagtggtgtgttcccagacaaccaagagctacaagacagagatctatttgcggtgtttgacatcgaggctggggaagttggaaaatggacacagatcgcagagctcggttaaacaagtggcctgtgcctgccatgttggtatcatccaaacagtctccatgtctgcattatactgatgactggaatgagggtgtgtccaaggaggagctggactctgagatcccacctggcgaggagtcgatatacggatacataatgggaatggcagatacatgtagtctgtagaatccatcaggatttccccttgataggtctcaggtttcactctaatattgtgcattgtccctcaagatgttaatacagcaatttcttgtttagtgctcataacattactccagtctccaggcgtagtgcttggtgtagagacataaaacagataatgcagcaccagtttgtggcttcaaattccgaaacaacagctttgtggaagacagaaaagaacactagtttttggcgaactgttg

SEQ ID NO: 35355 - DNA, 3622 bp, Zea Mays
gttcttcttccaaaacagtccaggtcccacaccggaggtacgctagggttccacctgagctcttccttcttccccttctgctcgtctccccatttgattcctcgccgcctgtggcttcttccccgttgtcatggagtcgggcaaaggtcctgtggtcgcggacgattaagcgatttgctcgctgcagccaggcgtgcaagggtcgttgctcgcaaagccgccttcgttgctagtgcgacggctttggagatgattgttcaagctgagaaggcgaacaccgaggctgccaagaaagctcctagacctctgcgtcgtgatgaggagcagaaatatttatgtctccaatgatcctgtggcggtggaccaaatgtactgctgaatgcttcaggcgcaggaagccttttcactgtgaagttgcttgcccctactctaagatcgccgcttctgttcagtgtgatgactcaagtggtgatgaaaagctgaactttgctcctgataatgagcctatccagaaatggcaccggtctttgagctctgacagtgttgtgcagacactccgctgtttaaggaggaaacctgcagttgcattcacctactttaaagatacacatagccttggttttcaccatgacttctcaacctactcagagatcatacaaattttgtcccattcattccaggggaagatgctggtatccttgtttcgtgagattctcttgggaactggtagtggtggccctgaaatcttaccgctcattgatcacttgagaaaaacatgtgccacttctcacgtactctcgtatgcagtcaattgcttaatcaaggcatacaccacctgccacgatgcacaagaaacagtagagatgttttgttgcctttgcaggcttggatttgttccaacactttgggctcgcaactttctgctcaaatttgtatctcagagcagtggtgattcacatatggttgtcgcagcttatgatcgaatgaagtgctttcagttgacactggatgctcaatcattgaacatagtcactagatcactttttcaagcaaacaaggcagacgaagcattccaaatgtaggtcgggatgattgaaatgggagtgaaattagatgtacatggattctcatcatttataattggcctttgtgattgtggaaagtttgatctagcttataacatggtaagaagatatgctgttctacaagagatatcccaagagagggttccaattgaagccatggcttataatatggtaatcgatggactatgcaaagaaatgaaactgaaggaggctgaaaaggtcttggagatcaagaccagacatggatctgcccctgatctatatagctatagctatctcattcatagtcattgcaaaatgggtaacctagagaaggcatggtatcatgttgaagacatggtatcccatggcattgagataaattgttacattgttgcttaccttctacagtgcctcaggaagttaggcatggtatctgaagtaattgtgcacttccagaaatttagagatttaggggtccatcttgatggcgtgctttataacattgctatggatgcttattgcaagcttgggaacatgaatgaggcagttaagctactgaatgaaatgatggctggaagtttggtaccagacaaaatccactatacatgcctgatcaatggttattgtctgaaaggagaaacagaaaatgcctggcaagtatttgaggagatgctgaaggcaaatataaaaccagatgtagttacatataacatattggccagtggatatagcaggaatggccttgttatgaaggtatttgacattctagagcacatgatggatcaagggctcgaacctaattcactcacctatggtatagctattgctggtttttgtagaggaggcaacttgagcgaagcagaggtgctgtttaatatagtagaagaaagagggatagataatatcaatgtgctgtacggttctatggtttgtggttatttgcactcaggctggactgaccatgcttacatgctttttcttagagttgctaaacaaggaaatatggtggatcgtttgtcatgttcaaaattgataaacggactctgtagggatgaaaaggttggagaggcttcaactgtatgtaaaatgatgcttgaaaagaatgttgtccctgatgtaatttcatatagcaaacttatatcagcttattgtcagacaagagatatgcacaatgctcgcttatggttccatgatatggttgaacgaggactttctgatgttattgtatacactgtactgatgaatggttattgcaaggttggtcggttgcaagaagcatgtgaattatttgtccaaatgataaatttaggaatcaagcctgatgtagttgcatacacagtgctattggatggccacctaaaggagaccctacaacaagggtggcagggcatcgctaaggaaaggaggaccttttttcttaggacaaagcataaggtgttgctgaactctatgaaagatatggaaatcgaacctgatgtaacctgttacacagtattgattgatggacggtgcaaagcagaatatctagaggaagcacgaggattgtttgatgagatgttagcaaaaggacttatccctgatgttcacacatacacagctcttataaatggatactgtagccagggagaaatagctaaggctgaagatcttttccaagaaatgatagctaagggaatgaagccagatgtactgagcttttcagtattacataagagaaccttgagacatgaaaaggctcattaatatttatgtgtactaatggttatgttgatgaatgtcagtttgactgaaggtgaaggggcgtcctgccaacaaaagggaaggcgaacacctggattgaaagactgctctctcagttcagcattgggtcgtcaaggagaacaaaatgatggtaccttcagcgtgaggatcgatgactgtcaatggagctgtgcaaacacaatcgtggcaaagctggctgtggcactggcgcctatgccatttatgagggttttgcttgaccgttttgtggctgcaactagtggtgtgttcccagacaaccaagagctacaagacagaggtaagctctcgggttccgtcctggggcaatggggagctgttgatgatcctgagtccatgctgcaccacatccattgggcagtaatgaggtggcctgtgcctgccatgttggtatcatccaaacagtctccatgtctgcattatactgatgactggaatgagggtgtgtccaaggaggagctggactctgagatcccacctggcgaggagtcgatatacggatacataatgggaatggcagatacatgtagtctgtagaatccatcaggatttccccttgataggtctcaggtttcactctaatattgtgcattgtccctcaagatgttaatacagcaatttcttgtttagtgctcataacattactccagtctccaggcgtagtgcttggtgtagagacataaaacagataatgcagcaccagtttgtggcttcaaattccgaaacaacagctttgtggaagacagaaaagaacactagtttttggcgaactgttg

SEQ ID NO: 35356 - DNA, 3591 bp, Zea Mays
cgttcttcttccaaaacagtccaggtcccacaccggagccaggcgtgcaagggtcgttgctcgcaaagccgccttcgttgctagtgcgacggctttggagatgattgttcaagctgagaaggcgaacaccgaggctgccaagaaagctcctagacctctgcgtcgtgatgaggagcagaaatatttatgtctccaatgatcctgtggcggtggaccaaatgtactgctgaatgcttcaggcgcaggaagccttttcactgtgaagttgcttgcccctactctaagatcgccgcttctgttcagtgtgatgactcaagtggtgatgaaaagctgaactttgctcctgataatgagcctatccagaaatggcaccggtctttgagctctgacagtgttgtgcagacactccgctgtttaaggaggaaacctgcagttgcattcacctactttaaagatacacatagccttggttttcaccatgacttctcaacctactcagagatcatacaaattttgtcccattcattccaggggaagatgctggtatccttgtttcgtgagattctcttgggaactggtagtggtggccctgaaatcttaccgctcattgatcacttgagaaaaacatgtgccacttctcacgtactctcgtatgcagtcaattgcttaatcaaggcatacaccacctgccacgatgcacaagaaacagtagagatgttttgttgcctttgcaggcttggatttgttccaacactttgggctcgcaactttctgctcaaatttgtatctcagagcagtggtgattcacatatggttgtcgcagcttatgatcgaatgaagtgctttcagttgacactggatgctcaatcattgaacatagtcactagatcactttttcaagcaaacaaggcagacgaagcattccaaatgtaggtcgggatgattgaaatgggagtgaaattagatgtacatggattctcatcatttataattggcctttgtgattgtggaaagtttgatctagcttataacatggtaagaagatatgctgttctacaagagatatcccaagagagggttccaattgaagccatggcttataatatggtaatcgatggactatgcaaagaaatgaaactgaaggaggctgaaaaggtcttggagatcaagaccagacatggatctgcccctgatctatatagctatagctatctcattcatagtcattgcaaaatgggtaacctagagaaggcatggtatcatgttgaagacatggtatcccatggcattgagataaattgttacattgttgcttaccttctacagtgcctcaggaagttaggcatggtatctgaagtaattgtgcacttccagaaatttagagatttaggggtccatcttgatggcgtgctttataacattgctatggatgcttattgcaagcttgggaacatgaatgaggcagttaagctactgaatgaaatgatggctggaagtttggtaccagacaaaatccactatacatgcctgatcaatggttattgtctgaaaggagaaacagaaaatgcctggcaagtatttgaggagatgctgaaggcaaatataaaaccagatgtagttacatataacatattggccagtggatatagcaggaatggccttgttatgaaggtatttgacattctagagcacatgatggatcaagggctcgaacctaattcactcacctatggtatagctattgctggtttttgtagaggaggcaacttgagcgaagcagaggtgctgtttaatatagtagaagaaagagggatagataatatcaatgtgctgtacggttctatggtttgtggttatttgcactcaggctggactgaccatgcttacatgctttttcttagagttgctaaacaaggaaatatggtggatcgtttgtcatgttcaaaattgataaacggactctgtagggatgaaaaggttggagaggcttcaactgtatgtaaaatgatgcttgaaaagaatgttgtccctgatgtaatttcatatagcaaacttatatcagcttattgtcagacaagagatatgcacaatgctcgcttatggttccatgatatggttgaacgaggactttctgatgttattgtatacactgtactgatgaatggttattgcaaggttggtcggttgcaagaagcatgtgaattatttgtccaaatgataaatttaggaatcaagcctgatgtagttgcatacacagtgctattggatggccacctaaaggagaccctacaacaagggtggcagggcatcgctaaggaaaggaggaccttttttcttaggacaaagcataaggtgttgctgaactctatgaaagatatggaaatcgaacctgatgtaacctgttacacagtattgattgatggacggtgcaaagcagaatatctagaggaagcacgaggattgtttgatgagatgttagcaaaaggacttatccctgatgttcacacatacacagctcttataaatggatactgtagccagggagaaatagctaaggctgaagatcttttccaagaaatgatagctaagggaatgaagccagatgtactgagcttttcagtattacataagagaaccttgagacatgaaaaggctcattaatatttatgtgtactaatggttatgttgatgaatgtcagtttgactgaaggtgaaggggcgtcctgccaacaaaagggaaggcgaacacctggattgaaagactgctctctcagttcagcattgggtcgtcaaggagaacaaaatgatggtaccttcagcgtgaggatcgatgactgtcaatggagctgtgcaaacacaatcgtggcaaagctggctgtggcactggcgcctatgccatttatgagggttttgcttgaccgttttgtggctgcaactagtggtgtgttcccagacaaccaagagctacaagacagaggtaagctctcgggttccgtcctggggcaatggggagctgttgatgatcctgagtccatgctgcaccacatccattgggcagtaatgaggtgattccaatcgttaagagtcaagcataatgttgtgtgatagatctatttgcggtgtttgacatcgaggctggggaagttggaaaatggacacagatcgcagagctcggttaaacaagtggcctgtgcctgccatgttggtatcatccaaacagtctccatgtctgcattatactgatgactggaatgagggtgtgtccaaggaggagctggactctgagatcccacctggcgaggagtcgatatacggatacataatgggaatggcagatacatgtagtctgtagaatccatcaggatttccccttgataggtctcaggtttcactctaatattgtgcattgtccctcaagatgttaatacagcaatttcttgtttagtgctcataacattactccagtctccaggcgtagtgcttggtgtagagacataaaacagataatgcagcaccagtttgtggcttcaaattccgaaacaacagctttgtggaagacagaaaagaacactagtttttggcgaactgttg

SEQ ID NO: 35357 - DNA, 3319 bp, Zea Mays
cgttcttcttccaaaacagtccaggtcccacaccggaggtacgctagggttccacctgagctcttccttcttccccttctgctcgtctccccatttgattcctcgccgcctgtggcttcttccccgttgtcatggagtcgggcaaaggtcctgtggtcgcggacgattaagcgatttgctcgctgcagccaggcgtgcaagggtcgttgctcgcaaagccgccttcgttgctagtgcgacggctttggagatgattgttcaagctgagaaggcgaacaccgaggctgccaagaaagctcctagacctctgcgtcgtgatgaggagcagaaatatttatgtctccaatgatcctgtggcggtggaccaaatgtactgctgaatgcttcaggcgcaggaagccttttcactgtgaagttgcttgcccctactctaagatcgccgcttctgttcagtgtgatgactcaagtggtgatgaaaagctgaactttgctcctgataatgagcctatccagaaatggcaccggtctttgagctctgacagtgttgtgcagacactccgctgtttaaggaggaaacctgcagttgcattcacctactttaaagatacacatagccttggttttcaccatgacttctcaacctactcagagatcatacaaattttgtcccattcattccaggggaagatgctggtatccttgtttcgtgagattctcttgggaactggtagtggtggccctgaaatcttaccgctcattgatcacttgagaaaaacatgtgccacttctcacgtcgggatgattgaaatgggagtgaaattagatgtacatggattctcatcatttataattggcctttgtgattgtggaaagtttgatctagcttataacatggtaagaagatatgctgttctacaagagatatcccaagagagggttccaattgaagccatggcttataatatggtaatcgatggactatgcaaagaaatgaaactgaaggaggctgaaaaggtcttggagatcaagaccagacatggatctgcccctgatctatatagctatagctatctcattcatagtcattgcaaaatgggtaacctagagaaggcatggtatcatgttgaagacatggtatcccatggcattgagataaattgttacattgttgcttaccttctacagtgcctcaggaagttaggcatggtatctgaagtaattgtgcacttccagaaatttagagatttaggggtccatcttgatggcgtgctttataacattgctatggatgcttattgcaagcttgggaacatgaatgaggcagttaagctactgaatgaaatgatggctggaagtttggtaccagacaaaatccactatacatgcctgatcaatggttattgtctgaaaggagaaacagaaaatgcctggcaagtatttgaggagatgctgaaggcaaatataaaaccagatgtagttacatataacatattggccagtggatatagcaggaatggccttgttatgaaggtatttgacattctagagcacatgatggatcaagggctcgaacctaattcactcacctatggtatagctattgctggtttttgtagaggaggcaacttgagcgaagcagaggtgctgtttaatatagtagaagaaagagggatagataatatcaatgtgctgtacggttctatggtttgtggttatttgcactcaggctggactgaccatgcttacatgctttttcttagagttgctaaacaaggaaatatggtggatcgtttgtcatgttcaaaattgataaacggactctgtagggatgaaaaggttggagaggcttcaactgtatgtaaaatgatgcttgaaaagaatgttgtccctgatgtaatttcatatagcaaacttatatcagcttattgtcagacaagagatatgcacaatgctcgcttatggttccatgatatggttgaacgaggactttctgatgttattgtatacactgtactgatgaatggttattgcaaggttggtcggttgcaagaagcatgtgaattatttgtccaaatgataaatttaggaatcaagcctgatgtagttgcatacacagtgctattggatggccacctaaaggagaccctacaacaagggtggcagggcatcgctaaggaaaggaggaccttttttcttaggacaaagcataaggtgttgctgaactctatgaaagatatggaaatcgaacctgatgtaacctgttacacagtattgattgatggacggtgcaaagcagaatatctagaggaagcacgaggattgtttgatgagatgttagcaaaaggacttatccctgatgttcacacatacacagctcttataaatggatactgtagccagggagaaatagctaaggctgaagatcttttccaagaaatgatagctaagggaatgaagccagatgtactgagcttttcagtattacataagagaaccttgagacatgaaaaggctcattaatatttatgtgtactaatggttatgttgatgaatgtcagtttgactgaaggtgaaggggcgtcctgccaacaaaagggaaggcgaacacctggattgaaagactgctctctcagttcagcattgggtcgtcaaggagaacaaaatgatggtaccttcagcgtgaggatcgatgactgtcaatggagctgtgcaaacacaatcgtggcaaagctggctgtggcactggcgcctatgccatttatgagggttttgcttgaccgttttgtggctgcaactagtggtgtgttcccagacaaccaagagctacaagacagagatctatttgcggtgtttgacatcgaggctggggaagttggaaaatggacacagatcgcagagctcggttaaacaagtggcctgtgcctgccatgttggtatcatccaaacagtctccatgtctgcattatactgatgactggaatgagggtgtgtccaaggaggagctggactctgagatcccacctggcgaggagtcgatatacggatacataatgggaatggcagatacatgtagtctgtagaatccatcaggatttccccttgataggtctcaggtttcactctaatattgtgcattgtccctcaagatgttaatacagcaatttcttgtttagtgctcataacattactccagtctccaggcgtagtgcttggtgtagagacataaaacagataatgcagcaccagtttgtggcttcaaattccgaaacaacagctttgtggaagacagaaaagaacactagtttttggcgaactgttg

SEQ ID NO: 35358 - DNA, 3044 bp, Zea Mays
cccgcctctcccctggcgataccccgccgcctctcgcttgtccccgttcttgagcaatcatctgcctccctttgttcccgcacaatccctagttgggaggggggccatggggcggctgcggccagatggccagtaacgtgcaaagatgagcagtagattactatcggtctgctccatcgccggcgtccatggaggccttctacctccaccttctccgctcctgcgcggcgctaccgcacgtcgcggcagtgcacgcccaccttgcgcgcgcgcacccaaacgcctctctcttcctccgcaactgcctcctggcctcctactgccgcctcggggttggggccccactccacgccgcccgcctgctcgacgaaatgccccgccgcaacgccgtctcctacaacctcgtcatcgtcgcctattcccgcgcgggactcccggccctctccctggcgacgttcgcgcgcgcgcgggcgtgggccagggtggtcgaccggttcacgtacgccgcggcgctcgccgcgtgctctcgggcgctcgacgtgaggacggggaaggccgtgcacgccatggtcgtcctgggaggtctcggcaacgggttgttcctgtccaactcggtcgccagcatgtacgccaggtgcggcgagatgggcgaggccaggcgcgtgtttgatgcagccgaggagcgtgacgacgtctcgtggaacgcgctgctctccgggtacgtccgtgccggtgcacgtgaggagacgctggaggtgttctctctgatgtgccggcatggtctggggtggaactcgttcgcgcttgggagcatcatcaagtgctgtgcctcctcctcttcttatgctgctgctggtgatgtcggaggagggcgcatcgctgaggcggttcatgggtgcgtggtgaaggctggactggacgccgacctgttcctcgcgagcgcaatgatcgacatgtacgctaagagaggcgccttgaccaacgcggttgctcttttcaagtcagtgccagacccgaatgtgattgttttaaatgcgatgattgcaggattctgtcgtgaggaagcagccgacgtcgctagagaagctttgggcctgtattcagagctgcagagccgagggatgcagccttctgagttctcattctcaagtatcctgcgtgcatgtaacctggccggtgaatttggattcgggaaacagatacatggccaagtgctcaagcacagcttccaaggcgatgtctatatcgggagcgcactcattgacttgtactctggctctggttgcatggaggacggatacaggtgtttcagatccctgcctaagcaggacgtcgtcatctggacgtcagtgatttcagggtgcgttcagaacgagctttttgaggaggcactgaggctgttccaagaatcagtacgctgtggactgagacctgatgttttcgcgatgtcgagcgtgatgaacgcatgtgccagtttagctgttgcaaggaccggtgagcagatccagtgccttgctgtaaagtctggctttaaccgcttcaccgccatggggaattccttcatacacatgtgtgctaggtcaggggatgttgatgctgccacccggaggtttcaggagatggaatcgcgtgatgttgtctcttggtccgcggtgatatcaagccacgcgcaccatggctgtgcaagggatgctttatgcgttttcaatgaaatgctggatgcgaaggtggcaccgcctaacgagatcacttttctcagcatccttactgcatgtagtcatggaggattggttgatgagggactcaggtattatggaattatgaatgatgaatatggattgagcccaaccataaagcattgcacctgtgttgttgatcttcttggacgagccgggaggttagccgatgctgaggctttcataagggattcagcattccatgacgatgctgtggtctggcggtctttgctggcctcgtgtcgtatccacggagacatggagagaggccaacttgtggcggacaagataatggatctggagcccacttcctcagcatcctacgtaattctctacaacatgtatctggatgctggcgagctgtcctcggcttcaaagactcgagatctgatgaaagagcgaggcgtgaagaaagagcctggtcttagttggatcgagctgagctctggagttcactcttttgttgccggtgacaagtcccatccagagagcaaagcaatatacagaaaagtggcagagatggtttccaaggtggcgggcatctctagcagggagcaggatttggcgggttgccacagcgaaaaactagctgtggcatttggaatgatccatttgccgcaatcagctccgatccgagtgatgaagaacctgagagtttgccgtgactgccactcgaccatggagctgatatccaagagtgagaggagagagataatcttgcgagacgcgattcgcttccatcgcttcagagacggttcctgttcctgtggcggttactggtgatgatgaccaacccaaggctcaaaagcgcgacatagcccacctattgcttgacgcgagcacctgacatggcttccgttgggggcaagctaggtcactgccggtgcacatgacgctgcatgcatggcttaattaagttactcaacccccactgtagctggataccacaggctgatacacggtgttgtatatatagtctgtgtcgtcaagtgaaacgaccaggaacaaaccctacaacgtgtgatgccaagtgtctatggggacaatggtcttttcttttggacctaaatacaagcggtgtattctatgcgaccgaatcaagactgcggtatgaacatgttcaagatttcgagcttcaccaatacaagttcgtttaaaaagcaacaaagagaatattgtgctactagaagcatacgtcaaattttggtctttggactttatcgattggtggtttttcgggctacgcattggctccgcttctgggctcaactacaacttagacaggatgatcaagaactaataatcaag

SEQ ID NO: 35359 - DNA, 2855 bp, Zea Mays
caacgaggcaagggtctcccgccccgcctctcccctggcgataccccgccgcctctcgcttgtccccgttcttgagcaatcatctgcctccctttgttcccgcacaatccctagttgggaggggggccatggggcggctgcggccagatggccagtaacgtgcaaagatgagcagtagattactatcggtctgctccatcgccggcgtccatggaggccttctacctccaccttctccgctcctgcgcggcgctaccgcacgtcgcggcagtgcacgcccaccttgcgcgcgcgcacccaaacgcctctctcttcctccgcaactgcctcctggcctcctactgccgcctcggggttggggccccactccacgccgcccgcctgctcgacgaaatgccccgccgcaacgccgtctcctacaacctcgtcatcgtcgcctattcccgcgcgggactcccggccctctccctggcgacgttcgcgcgcgcgcgggcgtgggccagggtggtcgaccggttcacgtacgccgcggcgctcgccgcgtgctctcgggcgctcgacgtgaggacggggaaggccgtgcacgccatggtcgtcctgggaggtctcggcaacgggttgttcctgtccaactcggtcgccagcatgtacgccaggtgcggcgagatgggcgaggccaggcgcgtgtttgatgcagccgaggagcgtgacgacgtctcgtggaacgcgctgctctccgggtacgtccgtgccggtgcacgtgaggagacgctggaggtgttctctctgatgtgccggcatggtctggggtggaactcgttcgcgcttgggagcatcatcaagtgctgtgcctcctcctcttcttatgctgctgctggtgatgtcggaggagggcgcatcgctgaggcggttcatgggtgcgtggtgaaggctggactggacgccgacctgttcctcgcgagcgcaatgatcgacatgattctgtcgtgaggaagcagccgacgtcgctagagaagctttgggcctgtattcagagctgcagagccgagggatgcagccttctgagttctcattctcaagtatcctgcgtgcatgtaacctggccggtgaatttggattcgggaaacagatacatggccaagtgctcaagcacagcttccaaggcgatgtctatatcgggagcgcactcattgacttgtactctggctctggttgcatggaggacggatacaggtgtttcagatccctgcctaagcaggacgtcgtcatctggacgtcagtgatttcagggtgcgttcagaacgagctttttgaggaggcactgaggctgttccaagaatcagtacgctgtggactgagacctgatgttttcgcgatgtcgagcgtgatgaacgcatgtgccagtttagctgttgcaaggaccggtgagcagatccagtgccttgctgtaaagtctggctttaaccgcttcaccgccatggggaattccttcatacacatgtgtgctaggtcaggggatgttgatgctgccacccggaggtttcaggagatggaatcgcgtgatgttgtctcttggtccgcggtgatatcaagccacgcgcaccatggctgtgcaagggatgctttatgcgttttcaatgaaatgctggatgcgaaggtggcaccgcctaacgagatcacttttctcagcatccttactgcatgtagtcatggaggattggttgatgagggactcaggtattatggaattatgaatgatgaatatggattgagcccaaccataaagcattgcacctgtgttgttgatcttcttggacgagccgggaggttagccgatgctgaggctttcataagggattcagcattccatgacgatgctgtggtctggcggtctttgctggcctcgtgtcgtatccacggagacatggagagaggccaacttgtggcggacaagataatggatctggagcccacttcctcagcatcctacgtaattctctacaacatgtatctggatgctggcgagctgtcctcggcttcaaagactcgagatctgatgaaagagcgaggcgtgaagaaagagcctggtcttagttggatcgagctgagctctggagttcactcttttgttgccggtgacaagtcccatccagagagcaaagcaatatacagaaaagtggcagagatggtttccaaggtggcgggcatctctagcagggagcaggatttggcgggttgccacagcgaaaaactagctgtggcatttggaatgatccatttgccgcaatcagctccgatccgagtgatgaagaacctgagagtttgccgtgactgccactcgaccatggagctgatatccaagagtgagaggagagagataatcttgcgagacgcgattcgcttccatcgcttcagagacggttcctgttcctgtggcggttactggtgatgatgaccaacccaaggctcaaaagcgcgacatagcccacctattgcttgacgcgagcacctgacatggcttccgttgggggcaagctaggtcactgccggtgcacatgacgctgcatgcatggcttaattaagttactcaacccccactgtagctggataccacaggctgatacacggtgttgtatatatagtctgtgtcgtcaagtgaaacgaccaggaacaaaccctacaacgtgtgatgccaagtgtctatggggacaatggtcttttcttttggacctaaatacaagcggtgtattctatgcgaccgaatcaagactgcggtggtttttcgggctacgcattggctccgcttctgggctcaactacaacttagacaggatgatcaagaactaataatcaag

SEQ ID NO: 35360 - DNA, 1709 bp, Zea Mays
aaccatacactctatctcttccttctcccaaccccgctcaaaaccctagctcaacgccacaggctcgccgactttcgcccggccgccgccggggacgatggcgaagcctcggcgcggccgctccgcgtctcgctcctcctcgggatcttcttcccgctcgctgtcccactccgtctcctccggctctgtctcgtcccgctcccggtcgcgctcccgctccttctcgtcgtcgtcctcccagtcccggagccgctcccctcctcaggctaagcgcagttcgcctggagcacggaaagggcgatcaccttcaccgccccctaaaaagggttcaccttcaaagaaagtccgttcgccatcaccaccacttaaaaaggcttcaccccctaggaaagtgtcgcctcctgctgaatcagctgttctctgcattgatcatttatcaaggaatgttaatgaggctcacttgaaagagatatttggaaactttggcgaagtggtgaatgtggagctatcaatggaccgaatggttaaccttcctcgtggctatggatatattgaattcaagaagagagctgatgctgagaaggctcttcttcacatggatggtggtcaaattgatggaaatattgttaagttgagattcactcttcaaccacgccaaagggctgcatcacctgtaaaagctccgccccctcctccaaaaagagatgctcttcagattgaaaaaggtgttagcagtgctgaaaaggatgcccagcagcgtcctaaggaatcatctccacgaaggaaaccagcttcacctctacggaaacgatctccaaatcgaagggctgaatcacccaggcgtccacctgacccatcacctaggcgccgtcctgattctccacctatacgtcgccgaccagatccttctcctgtcagacgtggtgacacacctcgcaggagaccaccatctccagttcgaaggcgttctccttctccaccacctaggaggcataggtcaccgatgcgtctttcacctaggagggggcgtggtagcccatcaccacgcaggcgctcccctgggcctcttaggcggcgctcaccacctccaaggcggttgaggagcccaccaagaaggccaccacctccacgtcgcttcagtcgctctcctcctcgccgaccccttcgctcccgctccagatcaatttctccaagaaggggacgagggcctccattgaggcgtggtaggtcagactcatcatattctcgatcacctactccaccaccaagaaaggggccaaggagggtatcaaggagccgcagccctagaaagcctcctagagcaggaagaagcgtctccagtgacagccgcagcagcagttcaccttcccctagacgcggcaggtagaaagaacccgtggcattgtgtatgcggcagtattggttcgaggagaagatgagagaacgctacagcaatgctccaaacggatctgctcaacatgcctggtcgaccgccctagtttgtgtggtctaccctagacagaattatctgctgtgttggcttgtgtactttgattgtaccccaagtattttgaagttctgaacttatttctgctaattggtgtctgaagtggatatgttgaatgtattttgttttgttggatagagttcctcagcattgccaccgtatgaaagatgaatctattgatcaaccaatttgtgcatgcgtc

SEQ ID NO: 35361 - DNA, 1691 bp, Zea Mays
aaccatacactctatctcttccttctcccaaccccgctcaaaaccctagctcaacgccacaggctcgccgactttcgcccggccgccgccggggacgatggcgaagcctcggcgcggccgctccgcgtctcgctcctcctcgggatcttcttcccgctcgctgtcccactccgtctcctccggctctgtctcgtcccgctcccggtcgcgctcccgctccttctcgtcgtcgtcctcccagtcccggagccgctcccctcctcaggctaagcgcagttcgcctggagcacggaaagggcgatcaccttcaccgccccctaaaaagggttcaccttcaaagaaagtccgttcgccatcaccaccacttaaaaaggcttcaccccctaggaaagtgtcgcctcctgctgaatcagctgttctctgcattgatcatttatcaaggaatgttaatgaggctcacttgaaagagatatttggaaactttggcgaagtggtgaatgtggagctatcaatggaccgaatggttaaccttcctcgtggctatggatatattgaattcaagaagagagctgatgctgagaaggctcttcttcacatggatggtggtcaaattgatggaaatattgttaagttgagattcactcttcaaccacgccaaagggctgcatcacctgtaaaagctccgccccctcctccaaaaagagatgctcttcagattgaaaaaggtgttagcagtgctgaaaaggatgcccagcagcgtcctaaggaatcatctccacgaaggaaaccagcttcacctctacggaaacgatctccaaatcgaagggctgaatcacccaggcgtccacctgacccatcacctaggcgccgtcctgattctccacctatacgtcgccgaccagatccttctcctgtcagacgtggtgacacacctcgcaggagaccaccatctccagttcgaaggcgttctccttctccaccacctaggaggcataggtcaccgatgcgtctttcacctaggagggggcgtggtagcccatcaccacgcaggcgctcccctgggcctcttaggcggcgctcaccacctccaaggcggttgaggagcccaccaagaaggccaccacctccacgtcgcttcagtcgctctcctcctcgccgaccccttcgctcccgctccagatcaatttctccaagaaggggacgagggcctccattgaggcgtggtaggtcagactcatcatattctcgatcacctactccaccaccaagaaaggggccaaggagggtatcaaggagccgcagccctagaaagcctcctagagcaggaagaagcgtctccagtgacagccgcagcagcagttcaccttcccctagacgcggcaggtagaaagaacccgtggcattgtgtatgcggcagatgagagaacgctacagcaatgctccaaacggatctgctcaacatgcctggtcgaccgccctagtttgtgtggtctaccctagacagaattatctgctgtgttggcttgtgtactttgattgtaccccaagtattttgaagttctgaacttatttctgctaattggtgtctgaagtggatatgttgaatgtattttgttttgttggatagagttcctcagcattgccaccgtatgaaagatgaatctattgatcaaccaatttgtgcatgcgtc

SEQ ID NO: 35362 - DNA, 1674 bp, Zea Mays
aaccatacactctatctcttccttctcccaaccccgctcaaaaccctagctcaacgccacaggctcgccgactttcgcccggccgccgccggggacgatggcgaagcctcggcgcggccgctccgcgtctcgctcctcctcgggatcttcttcccgctcgctgtcccactccgtctcctccggctctgtctcgtcccgctcccggtcgcgctcccgctccttctcgtcgtcgtcctcccagtcccggagccgctcccctcctcaggctaagcgcagttcgcctggagcacggaaagggcgatcaccttcaccgccccctaaaaagggttcaccttcaaagaaagtccgttcgccatcaccaccacttaaaaaggcttcaccccctaggaaagtgtcgcctcctgctgaatcagctgttctctgcattgatcatttatcaaggaatgttaatgaggctcacttgaaagagatatttggaaactttggcgaagtggtgaatgtggagctatcaatggaccgaatggttaaccttcctcgtggctatggatatattgaattcaagaagagagctgatgctgagaaggctcttcttcacatggatggtggtcaaattgatggaaatattgttaagttgagattcactcttcaaccacgccaaagggctgcatcacctgtaaaagctccgccccctcctccaaaaagagatgctcttcagattgaaaaaggtgttagcagtgctgaaaaggatgcccagcagcgtcctaaggaatcatctccacgaaggaaaccagcttcacctctacggaaacgatctccaaatcgaagggctgaatcacccaggcgtccacctgacccatcacctaggcgccgtcctgattctccacctatacgtcgccgaccagatccttctcctgtcagacgtggtgacacacctcgcaggagaccaccatctccagttcgaaggcgttctccttctccaccacctaggaggcataggtcaccgatgcgtctttcacctaggagggggcgtggtagcccatcaccacgcaggcgctcccctgggcctcttaggcggcgctcaccacctccaaggcggttgaggagcccaccaagaaggccaccacctccacgtcgcttcagtcgctctcctcctcgccgaccccttcgctcccgctccagatcaatttctccaagaaggggacgagggcctccattgaggcgtggtaggtcagactcatcatattctcgatcacctactccaccaccaagaaaggggccaaggagggtatcaaggagccgcagccctagaaagcctcctagagcaggaagaagcgtctccagtgacagccgcagcagcagttcaccttcccctagacgcggcaggtagaaagaacccgtggcattgtgtatgcggcagcaatgctccaaacggatctgctcaacatgcctggtcgaccgccctagtttgtgtggtctaccctagacagaattatctgctgtgttggcttgtgtactttgattgtaccccaagtattttgaagttctgaacttatttctgctaattggtgtctgaagtggatatgttgaatgtattttgttttgttggatagagttcctcagcattgccaccgtatgaaagatgaatctattgatcaaccaatttgtgcatgcgtc

SEQ ID NO: 35363 - DNA, 1136 bp, Zea Mays
aaccatacactctatctcttccttctcccaaccccgctcaaaaccctagctcaacgccacaggctcgccgactttcgcccggccgccgccggggacgatggcgaagcctcggcgcggccgctccgcgtctcgctcctcctcgggatcttcttcccgctcgctgtcccactccgtctcctccggctctgtctcgtcccgctcccggtcgcgctcccgctccttctcgtcgtcgtcctcccagtcccggagccgctcccctcctcaggctaagcgcagttcgcctggagcacggaaagggcgatcaccttcaccgccccctaaaaagggttcaccttcaaagaaagtccgttcgccatcaccaccacttaaaaaggcttcaccccctaggaaagtgtcgcctcctgctgaatcagctgttctctgcattgatcatttatcaaggaatgttaatgaggctcacttgaaagagatatttggaaactttggcgaagtggtgaatgtggagctatcaatggaccgaatggttaaccttcctcgtggctatggatatattgaattcaagaagagagctgatgctgagaaggctcttcttcacatggatggtggtcaaattgatggaaatattgttaagttgagattcactcttcaaccacgccaaagggctgcatcacctgtaaaagctccgccccctcctccaaaaagagatgctcttcagattgaaaaaggtgttagcagtgctgaaaaggatgcccagcagcgtcctaaggaatcatctccacgaaggaaaccagcttcacctctacggaaacgatctccaaatcgaagggctgaatcacccaggcgtccacctgacccatcacctaggcgccgtcctgattctccacctatacgtcgccgaccagatccttctcctgtcagacgtggtgacacacctcgcaggagaccaccatctccagttcgaaggcgttctccttctccaccacctaggaggcataggtcaccgatgcgtctttcacctaggagggggcgtggtagcccatcaccacgcaggcgctcccctgggcctcttaggcggcgctgtggactacacgtccatatccctgctaaatgtatcaagtattctcttgacatgggag

SEQ ID NO: 35364 - DNA, 1464 bp, Zea Mays
gtgggcagcagccactcgctctccccacctcgtctctcttccactcatcccctccctcgccccttcgcctcgcctctcttcttcggatcgagcagcagtactgcactgcatgccgccgatacaaatcccatcctctccctcctctactgcacctgcaccacagtagctagctagctatctttgctacggcggctctgtaatctggtccactagcgctccattcgaccccacccacagccatggctgccgtgaccgcggcggcggagccggtcaagaagctggagaaggtgtccaagaagcaggaggaggggctcgtcaccaacaagtacaagcccaaggagccgtacgtcgggaggtgcctgctcaacaccaggatcaccggcgaccaagcgcccggggagacgtggcacatggtcttcagcacagaaggcgaggtcccctacagagagggccagtccatcggcgtcatcgcggatggcgaggacaagaacggcaagccgcacaagctcaggctctactccatcgccagcagcgccctcggagatttcggcgactccaagacggtgtcgctgtgcgtgaagaggctggtctacaccaacgatcagggggaggtcgtcaaaggagtctgctcgaacttcctctgtgacttgaagccaggcgctgaggtgaagatcacagggccagtgggcaaggagatgctcatgcccaaagaccccaacgcaacaatcatcatgctcgcaacgggtaccggcatcgctccgttccgctccttcttgtggaagatgttcttcgaggagcacgaggactacaagtacaccgggctggcgtggctgttcctgggcgtcccgaccagcgacaccctgctgtacaaggaggagctggagaagatgaaggagatggcgccggacaacttccggctggacttcgcggtgagccgggagcagacgaacgcggccggggagaagatgtacatccagacgcgcatggcggagtacaaggaggagctgtgggagctgctcaagaaggacaacacctacgtctacatgtgcgggctcaagggcatggagaagggcatcgacgacatcatgctcgacctcgcagccaaggacgggatcaactggttggactacaagaagcagctcaagaagagcgagcaatggaacgtcgaagtctactgatgatgatccttcattgtattgttcagctcaagcaatctggtggtgatgagtttgcattgcattgtacgtagtattgcggagatcaatcgaatcgtttggctcgtcgtcattctatcgatgtacatacattatatatgatgaaagacatatataatcgtttctttcaggaatttgttgtctctctgcacgtgaatttgttgcgagaaagaaaggacacacattagccttttctttattagggcaattatgaattatacccttctctgattctgattttacttttttc

SEQ ID NO: 35365 - DNA, 1198 bp, Zea Mays
atccagaccgcttcaggcttcatatctcaaccggtcatggcgattgttgcggacgtcatgcttgtctatcttcctgctccaactattggtttacagccgccactggcaagaaacgctggagctattgccaactttttctataactgccctgataatactttccaaattgctatggctggaaggtcattctcacttctgcagaggattggagcttttgtgaggaatggtataaagcttttggcagtgggaactactgcttctttgattggcactagtgtcacgaatgcagcgctcaaagcaaagagggctgttgataaggaccttgaggacgaagtcatggaaattccagtcgtctcaactagtgttgcctatggtgtatacatgtccatttctagtaacctcaggtatcagcttctggctggtgtgatcgagcagaggatgctggagccgttgctgcataaccagaagctactgctgagtgcaatgtgcttcatcgttcgtacgggcaacacattccttggctctttgctgtgggttgactatgccagatggataggcgtccagaagtctcacgaagaggcctaaagttctagcagcttgcctgcatgttccgctgtcactgcctcactaggcacgttcacaataccatcgatggcttgcctgcctctatagaatgctgatctactcttcactggaggcccccttatatataggacaaaaatcccaattttgtttggaaaaccacaagtagggatatatctgtcgaattctcgtatgcaacggcaacgccgttctacccctcaacttttttttttcctttttctactttgcaacatgcaacaagggctgtcattgatcgaaattcaaatatatgttacattgggaattccatgcgactgcctaaactctaggaagtttcacttgtcctgtttcatatgtatgtatgcattgtagccttgttgtatttcctcaatgtcttggttgctttcatcggttagagttcttgacgactgttgcagagattctgtcggagtatattcagggtcgcctattaccagacatgctgcccggacaacatgttgattcgttcattggcagcgcaacatgcaattagaaattaacagctactctagaacaagcaaataacagctgtcgctaaaattcaatattccatccctgttaacattgaatttattgt

SEQ ID NO: 35366 - DNA, 1405 bp, Zea Mays
ggataagagcgtgtcccaccggccggccacccgcagcatctttaaaattcggcccggcgcgcgtcgggtgacgaaaacggaaccctggctggtggagcgcggcgcggggcatgcgtgcaagtgcaaccaatcgcctcgtcgtgtgcgctcgcctttgcttccctcgttaacaccgtggctgagttccagaagagaggggacaatttcttcaaagagattgaagttgtcatatctgatgtggtcatggcgattgttgcggacgtcatgcttgtctatcttcctgctccaactattggtttacagccgccactggcaagaaacgctggagctattgccaactttttctataactgccctgataatactttccaaattgctatggctggaaggtcattctcacttctgcagaggattggagcttttgtgaggaatggtataaagcttttggcagtgggaactactgcttctttgattggcactagtgtcacgaatgcagcgctcaaagcaaagagggctgttgataaggaccttgaggacgaagtcatggaaattccagtcgtctcaactagtgttgcctatggtgtatacatgtccatttctagtaacctcaggtatcagcttctggctggtgtgatcgagcagaggatgctggagccgttgctgcataaccagaagctactgctgagtgcaatgtgcttcatcgttcgtacgggcaacacattccttggctctttgctgtgggttgactatgccagatggataggcgtccagaagtctcacgaagaggcctaaagttctagcagcttgcctgcatgttccgctgtcactgcctcactaggcacgttcacaataccatcgatggcttgcctgcctctatagaatgctgatctactcttcactggaggcccccttatatataggacaaaaatcccaattttgtttggaaaaccacaagtagggatatatctgtcgaattctcgtatgcaacggcaacgccgttctacccctcaacttttttttttcctttttctactttgcaacatgcaacaagggctgtcattgatcgaaattcaaatatatgttacattgggaattccatgcgactgcctaaactctaggaagtttcacttgtcctgtttcatatgtatgtatgcattgtagccttgttgtatttcctcaatgtcttggttgctttcatcggttagagttcttgacgactgttgcagagattctgtcggagtatattcagggtcgcctattaccagacatgctgcccggacaacatgttgattcgttcattggcagcgcaacatgcaattagaaattaacagctactctagaacaagcaaataacagctgtcgctaaaattcaatattccatccctgttaacattgaatttattgt

SEQ ID NO: 35367 - DNA, 1386 bp, Zea Mays
cggagtgtggccacgggccacacggcttctgaccgagaggccgaggcgagggataagagcgtgtcccaccggccggccacccgcagcatctttaaaattcggcccggcgcgcgtcgggtgacgaaaacggaaccctggctggtggagcgcggcgcggggcatgcgtgcaagtgcaaccaatcgcctcgtcgtgtgcgctcgcctttgcttccctcgttaacgtcatggcgattgttgcggacgtcatgcttgtctatcttcctgctccaactattggtttacagccgccactggcaagaaacgctggagctattgccaactttttctataactgccctgataatactttccaaattgctatggctggaaggtcattctcacttctgcagaggattggagcttttgtgaggaatggtataaagcttttggcagtgggaactactgcttctttgattggcactagtgtcacgaatgcagcgctcaaagcaaagagggctgttgataaggaccttgaggacgaagtcatggaaattccagtcgtctcaactagtgttgcctatggtgtatacatgtccatttctagtaacctcaggtatcagcttctggctggtgtgatcgagcagaggatgctggagccgttgctgcataaccagaagctactgctgagtgcaatgtgcttcatcgttcgtacgggcaacacattccttggctctttgctgtgggttgactatgccagatggataggcgtccagaagtctcacgaagaggcctaaagttctagcagcttgcctgcatgttccgctgtcactgcctcactaggcacgttcacaataccatcgatggcttgcctgcctctatagaatgctgatctactcttcactggaggcccccttatatataggacaaaaatcccaattttgtttggaaaaccacaagtagggatatatctgtcgaattctcgtatgcaacggcaacgccgttctacccctcaacttttttttttcctttttctactttgcaacatgcaacaagggctgtcattgatcgaaattcaaatatatgttacattgggaattccatgcgactgcctaaactctaggaagtttcacttgtcctgtttcatatgtatgtatgcattgtagccttgttgtatttcctcaatgtcttggttgctttcatcggttagagttcttgacgactgttgcagagattctgtcggagtatattcagggtcgcctattaccagacatgctgcccggacaacatgttgattcgttcattggcagcgcaacatgcaattagaaattaacagctactctagaacaagcaaataacagctgtcgctaaaattcaatattccatccctgttaacattgaatttattgt

SEQ ID NO: 35368 - DNA, 998 bp, Zea Mays
gtagtcttgttggcagttcttattcaggctgcatcattgttcaaaggacctgttcctccggttgttgcatttgccctgggatcactgggcttcatgacgcctttcccaagcgagcaataccgtgagttgttggacaatgtgctgaatgggccatttagcatcacgctgagaaaccgcatacagtgtcatgtaatacgtgacgaggcaaaggatgaaatcgtgtctgaggagccattcttagtgttgaacgaagttacaatcgaccgaggaatatcatcctaccttaccaacctggaagtctactgtgacagctcttttgttacttgcgtacaaggggatggactaatcatatcaactacatctggaagtacagcatattcattagcagctggagggtccatggttcatcctcaggtcccagggatccttttcaccccaatctgcccgcactctctgtcattcagacctttgattctgcctgaatacgtgaccctccgcgttcaagtgccgttcaacagcaggggcaatgcctgggcatccttcgacggcaaagaccgacagcagctgtcgcccggtgacgccctgatctgcagcatttctccctggcccgtgcccacagcctgcctggtggactcgacgaccgatttcctccgcagcatccatgagggtctccactggaacttgaggaaatcccagtcatttgacggcccgcgtgattgatgcaacagctgttcagttatatttcagcccggtgccagaattcaagctgggaattctcaacaggaataactgtagctactccagggtgctctcacctttaccgttccatacttgcctatatacaaaggttgcgtgcgttagatgtgaggtatagatagatgtatagaatatggatggatgataacgactggacatgttgaataatacaacgccaacgtatgcacgtatacatgtgatgtgcccccgtgatctgaaagaaataatccgcgagccataca

SEQ ID NO: 35369 - DNA, 1115 bp, Zea Mays
aagcacctgtacagtgagggcaccctggatatcagcagtccaagacctgctgcccaaagcttgagaaacaatgaggagataaagatgctgcgcacaaaggttgatttaattataactcttggtggtgatggaactgttctgtgggctgcatcattgttcaaaggacctgttcctccggttgttgcatttgccctgggatcactgggcttcatgacgcctttcccaagcgagcaataccgtgagttgttggacaatgtgctgaatgggccatttagcatcacgctgagaaaccgcatacagtgtcatgtaatacgtgacgaggcaaaggatgaaatcgtgtctgaggagccattcttagtgttgaacgaagttacaatcgaccgaggaatatcatcctaccttaccaacctggaagtctactgtgacagctcttttgttacttgcgtacaaggggatggactaatcatatcaactacatctggaagtacagcatattcattagcagctggagggtccatggttcatcctcaggtcccagggatccttttcaccccaatctgcccgcactctctgtcattcagacctttgattctgcctgaatacgtgaccctccgcgttcaagtgccgttcaacagcaggggcaatgcctgggcatccttcgacggcaaagaccgacagcagctgtcgcccggtgacgccctgatctgcagcatttctccctggcccgtgcccacagcctgcctggtggactcgacgaccgatttcctccgcagcatccatgagggtctccactggaacttgaggaaatcccagtcatttgacggcccgcgtgattgatgcaacagctgttcagttatatttcagcccggtgccagaattcaagctgggaattctcaacaggaataactgtagctactccagggtgctctcacctttaccgttccatacttgcctatatacaaaggttgcgtgcgttagatgtgaggtatagatagatgtatagaatatggatggatgataacgactggacatgttgaataatacaacgccaacgtatgcacgtatacatgtgatgtgcccccgtgatctgaaagaaataatccgcgagccataca

SEQ ID NO: 35370 - DNA, 1855 bp, Zea Mays
gctcgacctcctttccccattttgtttctgacgagagtgtaaatgtagatgtcgcggcctcacatcaaagtgaaaatggatctatctctactgttagttcactagaatcagagagggcagcatatgaatttcttgctcaaactcctgtcaggtcaactgatgcacatcttgttgagttttcggaggctatgagaactgttgcaaaagccttacgacgagtggctgaagggaaggctgctgctcaagcagaggcagcggagtggaaacgtaagtatgaattagagacagcgcacaagcatcggagtaaaatcaaaggctacagcagttgtatcaataatgacttagacaaactggtcagccaactaaccctggagacacctacatctgatcaattaggatgttgcggaaagcatggtatatgtgcacatgagattctccaggacgaagttcctgggcctatcccaagatctaatcacaaggtggtggggagaaaggcatcatttaaactttcatggggatgtaatggggataaaaatggacaacataagcatgattttgtgtcctttgaaaaaggtgatataacaaccgcagaacgaagcaataagcagatcttactgaaatgggaatcgccaccacaaacagtgcttttcataaccaaaccgaattccaactctgttcgtgttctttgtgctgaaatgatcagatggcttagggagcataaaaatataaacatctttgttgagccacgtgttagcaaggaacttctaacagaggattcttactacaacttcgtccaaacatgggataatgatgaggagataaagatgctgcgcacaaaggttgatttaattataactcttggtggtgatggaactgttctgtgggctgcatcattgttcaaaggacctgttcctccggttgttgcatttgccctgggatcactgggcttcatgacgcctttcccaagcgagcaataccgtgagttgttggacaatgtgctgaatgggccatttagcatcacgctgagaaaccgcatacagtgtcatgtaatacgtgacgaggcaaaggatgaaatcgtgtctgaggagccattcttagtgttgaacgaagttacaatcgaccgaggaatatcatcctaccttaccaacctggaagtctactgtgacagctcttttgttacttgcgtacaaggggatggactaatcatatcaactacatctggaagtacagcatattcattagcagctggagggtccatggttcatcctcaggtcccagggatccttttcaccccaatctgcccgcactctctgtcattcagacctttgattctgcctgaatacgtgaccctccgcgttcaagtgccgttcaacagcaggggcaatgcctgggcatccttcgacggcaaagaccgacagcagctgtcgcccggtgacgccctgatctgcagcatttctccctggcccgtgcccacagcctgcctggtggactcgacgaccgatttcctccgcagcatccatgagggtctccactggaacttgaggaaatcccagtcatttgacggcccgcgtgattgatgcaacagctgttcagttatatttcagcccggtgccagaattcaagctgggaattctcaacaggaataactgtagctactccagggtgctctcacctttaccgttccatacttgcctatatacaaaggttgcgtgcgttagatgtgaggtatagatagatgtatagaatatggatggatgataacgactggacatgttgaataatacaacgccaacgtatgcacgtatacatgtgatgtgcccccgtgatctgaaagaaataatccgcgagccataca

SEQ ID NO: 35371 - DNA, 1467 bp, Zea Mays
ggcccccatcactagcagacgcccactctgtaacggtccagctggagggtggcgcgcaggacgtaacccgagagcgggcggggcacaacgatgtgatatttttaaccaagccagaaattcgccccccgaggggatcagacctgagacctgaagtggatctggtactagcgcttcatttaaaagtagtggaattttatggccgctgctaatgataatatcgttctttttccaagctgccgatacaatattgaaggaaataatatttatagatgcttctaagaaattgaagtgtggctcggttgatctttttgttgtcaattcatatggctctgcttatcaagccctttttatgtgtatcttgctgcctttcctgtcaaagttatggggagttccattccatgtgttaccaacctacataaaagatggtgcagcctgctttttaaatatgggatcaatatctggttgtgaaggggcaccacttctaccactactatttgtgttggttaacatgggattcaatatatcattactaaacctactaaagatctcctcagcagtcatatcttccttggcttctacattctcagttccgctgtccatctacgctttcactctgccactgccgtatatcggtgcggcgtcatctctgccacctggctttgttgcgggtgcagcggtactcaccaccggcttactactatacagcctaccacaggcacaacattatgggaattctttccacaacaagaatgatgactagtcagcattcatttcttcattggtttataatcacccttcactccaagatggtgcgccatctgggttcgaaaggttggagcagaagttctcctgagggccaccagactgttgtatgttgtatgaaacatatcatatatatatacccaccaataaaggtcggagaagagcatggacagtggttagacgggaagaaaaccagggagaagagcaggagcatcatcaccacagggacgaagagaagaaacagcggtggtggcggaaggggtggcagcaccaacggcaggcacaggaggatcactgtcgccgccagcaacatcatcagtactctcttgctcatcgccgccgccctgcgctcgctgtgatggaacttgcttgtgccaacccccaatggctgcccggctccagtctttttctaggctttcatgtgaggaagttgtactatgtgtgagagaaagaaaatgttagttgcccccgatgaaggaactggcaaggtatatgtacatggccagcttgaatcagcaggccagatggggtgttttggcatgtgtgactgctggactgggcatgttcgatccttttctgctttccagttccagtacagagactgcactgactggtcgggggtccgtttctttctgggacgtccgaggaatcccttgtctccctgggatgcggcgggggagggccatggttggcctgagtttgtcg

SEQ ID NO: 35372 - DNA, 1909 bp, Zea Mays
ctttcaatcacaccatcaatttcagtttcagtgaagccttattcaatttcacccaggaaatctgctatgttgatgaagtcttctggttgtacagagaaaacagtgaactctgggtttcccaacctgtctttaaaggcttgccacaggagggattctttgtctctgtgatatgtagttgtctatttctcgatcctgtatcttcgatatcgagcgggcattgtcaccgatgagatgctgtctctaccacagaaaccttttctagctgtaggactcttagaggcctttggagcagcagcagggatggcagctggagtgtcatttgttttgtttttgttggagtagctgttctttctggagcttcaataccaatactgtcacagacctatcttgtctggcagcttcttctatctgctatattcttgaagaggcgttatagaattaatgagatagcaggatgttttctagtggcaattggtgtcataataactgtagcaagtggatctggtactagcgcttcatttaaaagtagtggaattttatggccgctgctaatgataatatcgttctttttccaagctgccgatacaatattgaaggaaataatatttatagatgcttctaagaaattgaagtgtggctcggttgatctttttgttgtcaattcatatggctctgcttatcaagccctttttatgtgtatcttgctgcctttcctgtcaaagttatggggagttccattccatgtgttaccaacctacataaaagatggtgcagcctgctttttaaatatgggatcaatatctggttgtgaaggggcaccacttctaccactactatttgtgttggttaacatgggattcaatatatcattactaaacctactaaagatctcctcagcagtcatatcttccttggcttctacattctcagttccgctgtccatctacgctttcactctgccactgccgtatatcggtgcggcgtcatctctgccacctggctttgttgcgggtgcagcggtactcaccaccggcttactactatacagcctaccacaggcacaacattatgggaattctttccacaacaagaatgatgactagtcagcattcatttcttcattggtttataatcacccttcactccaagatggtgcgccatctgggttcgaaaggttggagcagaagttctcctgagggccaccagactgttgtatgttgtatgaaacatatcatatatatatacccaccaataaaggtgaggaaatatcatatggatatactgggaataaagagcgagaggatgtataaccgaacaagtacctggccgtcatacattgttgtttactgagtgaaggtcggagaagagcatggacagtggttagacgggaagaaaaccagggagaagagcaggagcatcatcaccacagggacgaagagaagaaacagcggtggtggcggaaggggtggcagcaccaacggcaggcacaggaggatcactgtcgccgccagcaacatcatcagtactctcttgctcatcgccgccgccctgcgctcgctgtgatggaacttgcttgtgccaacccccaatggctgcccggctccagtctttttctaggctttcatgtgaggaagttgtactatgtgtgagagaaagaaaatgttagttgcccccgatgaaggaactggcaaggtatatgtacatggccagcttgaatcagcaggccagatggggtgttttggcatgtgtgactgctggactgggcatgttcgatccttttctgctttccagttccagtacagagactgcactgactggtcgggggtccgtttctttctgggacgtccgaggaatcccttgtctccctgggatgcggcgggggagggccatggttggcctgagtttgtcg

SEQ ID NO: 35373 - DNA, 1787 bp, Zea Mays
gtcaggctttcaatcacaccatcaatttcagtttcagtgaagccttattcaatttcacccaggaaatctgctatgttgatgaagtcttctggttgtacagagaaaacagtgaactctgggtttcccaacctgtctttaaaggcttgccacaggagggattctttgtctctgtgatatgtagttgtctatttctcgatcctgtatcttcgatatcgagcgggcattgtcaccgatgagatgctgtctctaccacagaaaccttttctagctgtaggactcttagaggcctttggagcagcagcagggatggcagctggagctgttctttctggagcttcaataccaatactgtcacagacctatcttgtctggcagcttcttctatctgctatattcttgaagaggcgttatagaattaatgagatagcaggatgttttctagtggcaattggtgtcataataactgtagcaagtggatctggtactagcgcttcatttaaaagtagtggaattttatggccgctgctaatgataatatcgttctttttccaagctgccgatacaatattgaaggaaataatatttatagatgcttctaagaaattgaagtgtggctcggttgatctttttgttgtcaattcatatggctctgcttatcaagccctttttatgtgtatcttgctgcctttcctgtcaaagttatggggagttccattccatgtgttaccaacctacataaaagatggtgcagcctgctttttaaatatgggatcaatatctggttgtgaaggggcaccacttctaccactactatttgtgttggttaacatgggattcaatatatcattactaaacctactaaagatctcctcagcagtcatatcttccttggcttctacattctcagttccgctgtccatctacgctttcactctgccactgccgtatatcggtgcggcgtcatctctgccacctggctttgttgcgggtgcagcggtactcaccaccggcttactactatacagcctaccacaggcacaacattatgggaattctttccacaacaagaatgatgactagtcagcattcatttcttcattggtttataatcacccttcactccaagatggtgcgccatctgggttcgaaaggttggagcagaagttctcctgagggccaccagactgttgtatgttgtatgaaacatatcatatatatatacccaccaataaaggtcggagaagagcatggacagtggttagacgggaagaaaaccagggagaagagcaggagcatcatcaccacagggacgaagagaagaaacagcggtggtggcggaaggggtggcagcaccaacggcaggcacaggaggatcactgtcgccgccagcaacatcatcagtactctcttgctcatcgccgccgccctgcgctcgctgtgatggaacttgcttgtgccaacccccaatggctgcccggctccagtctttttctaggctttcatgtgaggaagttgtactatgtgtgagagaaagaaaatgttagttgcccccgatgaaggaactggcaaggtatatgtacatggccagcttgaatcagcaggccagatggggtgttttggcatgtgtgactgctggactgggcatgttcgatccttttctgctttccagttccagtacagagactgcactgactggtcgggggtccgtttctttctgggacgtccgaggaatcccttgtctccctgggatgcggcgggggagggccatggttggcctgagtttgtcg

SEQ ID NO: 35374 - DNA, 2375 bp, Zea Mays
caacaagcagcagagggccagaggcgaagcagaacagcaccacccgccttcgcctccactcccgcccgggaatcttcttcgtccctccctcactcacgccatttcattccttccacagttccgccgccaccggccaccaccagcgcatatataaaagacccagcagcgactgcgccactccgccgcgcaggcaggcggtcccgtcccaccacccaccccgcgaccgcgaggccgcgaccccgctgatgatggcgccgtcccccgtcacgtgcagcccctccgcggcgcggcaccgcccgctgcagctccgctcccccgcgccgcgcgctgctgtcgtggcggcgctgccgctgcggaggagggaggcgctgccgcacgcgctgtggatcgcggcggacccgtgggcgtcggcgcgcgcgtggacgagtctgggcctgggcacgggcaggagggacgcggcgaggtgcgcggcggcggggcaggtcgcggggactagcagcgcgggcgtagggaggagcgccgggatggaggtggtcgtcgccgcggctgcggtcgtcgccatgggcacggggaaccgtgtcctctacaagctcgcgctcgtgccgctccggaagtacccgttcttcctggcgcagttcgccacgtttggatatgtagttgtctatttctcgatcctgtatcttcgatatcgagcgggcattgtcaccgatgagatgctgtctctaccacagaaaccttttctagctgtaggactcttagaggcctttggagcagcagcagggatggcagctggagctgttctttctggagcttcaataccaatactgtcacagacctatcttgtctggcagcttcttctatctgctatattcttgaagaggcgttatagaattaatgagatagcaggatgttttctagtggcaattggtgtcataataactgtagcaagtggatctggtactagcgcttcatttaaaagtagtggaattttatggccgctgctaatgataatatcgttctttttccaagctgccgatacaatattgaagtctattgttgcaggaaataatatttatagatgcttctaagaaattgaagtgtggctcggttgatctttttgttgtcaattcatatggctctgcttatcaagccctttttatgtgtatcttgctgcctttcctgtcaaagttatggggagttccattccatgtgttaccaacctacataaaagatggtgcagcctgctttttaaatatgggatcaatatctggttgtgaaggggcaccacttctaccactactatttgtgttggttaacatgggattcaatatatcattactaaacctactaaagatctcctcagcagtcatatcttccttggcttctacattctcagttccgctgtccatctacgctttcactctgccactgccgtatatcggtgcggcgtcatctctgccacctggctttgttgcgggtgcagcggtactcaccaccggcttactactatacagcctaccacaggcacaacattatgggaattctttccacaacaagaatgatgactagtcagcattcatttcttcattggtttataatcacccttcactccaagatggtgcgccatctgggttcgaaaggttggagcagaagttctcctgagggccaccagactgttgtatgttgtatgaaacatatcatatatatatacccaccaataaaggtgaggaaatatcatatggatatactgggaataaagagcgagaggatgtataaccgaacaagtacctggccgtcatacattgttgtttactgagtgaaggtcggagaagagcatggacagtggttagacgggaagaaaaccagggagaagagcaggagcatcatcaccacagggacgaagagaagaaacagcggtggtggcggaaggggtggcagcaccaacggcaggcacaggaggatcactgtcgccgccagcaacatcatcagtactctcttgctcatcgccgccgccctgcgctcgctgtgatggaacttgcttgtgccaacccccaatggctgcccggctccagtctttttctaggctttcatgtgaggaagttgtactatgtgtgagagaaagaaaatgttagttgcccccgatgaaggaactggcaaggtatatgtacatggccagcttgaatcagcaggccagatggggtgttttggcatgtgtgactgctggactgggcatgttcgatccttttctgctttccagttccagtacagagactgcactgactggtcgggggtccgtttctttctgggacgtccgaggaatcccttgtctccctgggatgcggcgggggagggccatggttggcctgagtttgtcg

SEQ ID NO: 35375 - DNA, 1675 bp, Zea Mays
caacaagcagcagagggccagaggcgaagcagaacagcaccacccgccttcgcctccactcccgcccgggaatcttcttcgtccctccctcactcacgccatttcattccttccacagttccgccgccaccggccaccaccagcgcatatataaaagacccagcagcgactgcgccactccgccgcgcaggcaggcggtcccgtcccaccacccaccccgcgaccgcgaggccgcgaccccgctgatgatggcgccgtcccccgtcacgtgcagcccctccgcggcgcggcaccgcccgctgcagctccgctcccccgcgccgcgcgctgctgtcgtggcggcgctgccgctgcggaggagggaggcgctgccgcacgcgctgtggatcgcggcggacccgtgggcgtcggcgcgcgcgtggacgagtctgggcctgggcacgggcaggagggacgcggcgaggtgcgcggcggcggggcaggtcgcggggactagcagcgcgggcgtagggaggagcgccgggatggaggtggtcgtcgccgcggctgcggtcgtcgccatgggcacggggaaccgtgtcctctacaagctcgcgctcgtgccgctccggaagtacccgttcttcctggcgcagttcgccacgtttggatatgtagttgtctatttctcgatcctgtatcttcgatatcgagcgggcattgtcaccgatgagatgctgtctctaccacagaaaccttttctagctgtaggactcttagaggcctttggagcagcagcagggatggcagctggagttccgctgtccatctacgctttcactctgccactgccgtatatcggtgcggcgtcatctctgccacctggctttgttgcgggtgcagcggtactcaccaccggcttactactatacagcctaccacaggcacaacattatgggaattctttccacaacaagaatgatgactagtcagcattcatttcttcattggtttataatcacccttcactccaagatggtgcgccatctgggttcgaaaggttggagcagaagttctcctgagggccaccagactgttgtatgttgtatgaaacatatcatatatatatacccaccaataaaggtcggagaagagcatggacagtggttagacgggaagaaaaccagggagaagagcaggagcatcatcaccacagggacgaagagaagaaacagcggtggtggcggaaggggtggcagcaccaacggcaggcacaggaggatcactgtcgccgccagcaacatcatcagtactctcttgctcatcgccgccgccctgcgctcgctgtgatggaacttgcttgtgccaacccccaatggctgcccggctccagtctttttctaggctttcatgtgaggaagttgtactatgtgtgagagaaagaaaatgttagttgcccccgatgaaggaactggcaaggtatatgtacatggccagcttgaatcagcaggccagatggggtgttttggcatgtgtgactgctggactgggcatgttcgatccttttctgctttccagttccagtacagagactgcactgactggtcgggggtccgtttctttctgggacgtccgaggaatcccttgtctccctgggatgcggcgggggagggccatggttggcctgagtttgtcg

SEQ ID NO: 35376 - DNA, 2010 bp, Zea Mays
cgttcttctgtcaactggcaccggcacctcgtttaattattccaatttcttgccgtgtttaatgattttccgagcagcagctggcatagttatattgttattgccactagctactactgcgcctcctttagaattattgattgattgattgctggtgcactagctgccgaaagcaaaagagagagataaaaggaaaggaaaagaaaaagaaaaagataatgataacaagcgtcctgggaaggagcaggctccactccattccactccatcatgctgctggcggagggctacccgcagcggaccatcttcgacaacctccacgacgccggcctctccttcggcgtctacttccaggacgtgccggcggtgctcttctaccggaacctccgcaagctcaagtaccttctggacttccacccgctgcgcccctccttcgccgaccacgcccgccgcgggacgctccccaactacgccgtcatcgagcagcactacctggactccaagctggacccggccaacgacgaccacccgtcgcacgacgtgtaccagggccagatgctcgtcaagtacgtctacgagacgctgcgcgccagcccgcagtggaaccagacgctgctcgtcatcacctacgacgagcacggcggcttcttcgaccacgtgcccacgcccgtcgccggcgtgcccagccccgacggcatcgtcggcccgccgccctacaacttcaccttcgaccgcctcggcgtccgcgtcccggccatcctcgtgtccccctggatcgacaggggcaccgtcgtccacgggccccacggccccacgcccacgtcgcagtacgagcactcgtccatcccggccaccgtcaagaagatcttcggcctgccgcaggacttcctcacgaggcgggacgcgtgggcggggaccttcgagggcgtggtgcaggggaggaccgagccacgcaccgactgccccgagcagctgcccacgccgacgaggatcaggcagacggaggcggacgaggaggccaagcttagcgagttccagcaggagatcatccagctcgcctccgtgctcaacggcgactaccacctcgccaccctgcaggaccggatcaagaacgacatgaacgtcagggaaggcatcgactacatgaaggccgccgtcaaacgctactttcaggctggcgcgttcgccagaaggatgggcgtcgacggcgaccagatcgtcaagatgagaccctccctcaccaccaggatccaacgcccatagacagactgtctaatcaaagcggaatcggttatgttcacaaacaggattggactatatatatatatatatatatatatatatatatatatatatatatatatatatatatatatatatatatatattctaaaaatacagatcacagtcagtgctatagatatagatgtccaataagcacgggacccgcgagctcgatacgaagccagttgtttgggtccgatccaatcccggcacgatccggttctatacgggctctgtgggggatagatatcccctgggtccactaaaagagtaaaagacctcacgagaggcccaagggcccaataaatcgtaaagtcattctttcgtgagtctggggagagacaaccagcaaagcagatcgacacgaggccagattggtggaaactcggacgacccacaacgtcgagcgagtgaccacaacagagatccgactttcccgcgctggagcccccatgcaacggagccatgcgaggataagtcggcagaactacaaggagataaactcaagcagttcactatattttagctacacgttgttatcatatccacatgtattgccccacggtcgagtatataaggcctagggggcaccccttcagaacgatcgactctattacttagccacccacaccaactctctgtattctcaatccagagagctttcttgtaactgcgttcaccaagcatactcaccaggacgtagggtgttacgcatctctaagcggc

SEQ ID NO: 35377 - DNA, 427 bp, Zea Mays
aagagaaaatactatacatatattgcttgcagtcttccacagttgtcacatatatattctttgtgtcaacagaacacacatgctactctcttcattcttttttatttgtcgcgttttagttcagaaatgaactgacagacgacaaatattcgaaaatagaggtagaacaccatcaatcacagttacagattaaactagaataccggccttatattagctagccagctgcatgcttatgggataacacgtatgatccgcaggagtgcagaatgcatgcggccagaactgtgtgctggtggacactaggctggctggctagctgctggctgctgcagctagctacgcgccccctgctttcttcctgacgatcttctccagctcgtcgcagaatgccgggcactcctcgttcatcgttctttgacttctc

SEQ ID NO: 35378 - DNA, 1895 bp, Zea Mays
aacgttaaggtccttcgtcctttgaagcattatttcccttaggatataaagatctccggacgaaggtcatgaaggactaaccttcatgattacagtatacattaatgaaagacgaagcatatgaaacataaaagataatatgaatgatcatataacattatccatttaactttattattttatcatagagaaatagggacaatattgaattacaaatgtaccttcggcttgaaaggagatgaaaatacgagtgtgacgcaaaagcaaatgccaagtcagcgtgaacagcacgggggtactgttcacctatttataggcatggggtacgacccatacaaaattacatacatgccctttacatttggtgataattctatagcactctaccgaggtctaaatggccttttcatctttaagtcggttcctttttctgcaaacatgccgaagctttcctgcttgacagcttcggcgctatgtcaacctttgtatcttttgagcttctcccttgaagaccttcggcgacgaagcatagacccaacagttaatgtcattggtcttcggcacaaatattcaagagaacatagtaatggtgtgtttcgtttgaggagcgtgcgaataaaaaaactagggcccagtcctaaccaataccttttctctctctctcattttaactttcttgcggaatagtagtaatacctattgatgaatttttatccatatccaattgagatgaataatctttactatattaaagcaccagtttcaacggtcatcctgcgtcaatgtttttcaaaaaaaaactttacatttctttaaaatcaacctgcacttctataatatcttctctactactataataataaattgaaatcatgtataagtgagtgtttgaaccttggttgttagctccacatttgcacccacctaatcaatggaaaacatatgttttattctttattaaaacaattttattctatatcatatgtataaaaaccatagcaatgcacggacatatgacttgttaggttatatgttacactatttccttttccatctgtattcatactttgtactttgcatcgcatcttgttgtggaccatctatatgacttcattagtacatatattttcgtttccttcagcttgtaaggaaagttttccccctttgcatgttaggttaaaaccttatcacttgtttgtacctctcattacataccctccttttcgatttcattaagatataagttttaggtataatatttcttagtcataaatgtggtacagacaagtgtttggcagccatcgtggttgctagcagtggcggacgcaggacccaaattcatgggggccaaaaaaccacattacaaaatcaagcaaggcggtaaaaactatagttgcataaaatttaagttccatatcatcaatataacatacaagttcaaagaagagaagcaaacatacaactaagtttttcctgaccgaatcaagtcgtgtgtacattattgaatatcgatttcctcgaagggtggggcatcgagaaagaggcgggggtcagatgatgtctccagctaagagctagggctcgctggttcgtcaagctcgctagttgacggggacgggtcgcatcgtcgcagcgagcggggtcgggtctgccctagagcgggatgatgtcatgacgattgaaagcatctaggcccctggttggttttagtgattaatgacaacgtaatattatatgtgactaacgtgtgttttgcagagacaaatggtaagttaggtcgcatgacaggtaaaagcactacaatgtgaaagcaatcccggagataagaactcgaagcgacggctaaaacaacggaacaaaaggtgaaggtctacggagtccgagtgtcaaggaga

SEQ ID NO: 35379 - DNA, 2715 bp, Zea Mays
atgccattgccatcggccgcccagagcgctctcgtcgtggcggccgtcgccatagccaccgccaccgtcctcctccccttcccacggacgccgccgcgggaccgcttcgccgacatggtgctggccaacggcaccatctacaccgcggaccccgcccgacccttcgccgacgccatgtccgtccgcggcggccgcgtgctccgcgtcgggacctacgagtccgagctcaagggccctcgcactcgtgagctgaatctcagtgggaacgtggtgctgccggggttcatcgactcccatgttcacttcatagacggtggattgcagctagcgagggtgccacttcgtggggtcagaagcaaagatgacttggttgccagggtcaaggaagctgtcagagataagcaacctgggcagtggatcttgggcggaggttggaatgatgattttgggggagatggtctcccggctgctgtttggctggatgatatctcacctgataatccagtctggctctctcgcatggatggtcatatgggagtagccaactcattagctatgaagattgctgggattgacaaaaacacaaacgatccaattggtggaactatcatacgaacaactgaaggaggtaacacaactaattaacatgggtcttagccctctgattgtaacttaatcagtgaagtgcacttgaaccaaactcaatcacttcagtgagcatttgaaagctatttacttttaaacatagatatgttctcgatgtaaaaataaatcaagaaacttgaaagcaaactgcatggtagctcatccgttgatctaataagtagctacaatgatcagaaggacctaatcataagctttgtatacagtttgtaacaatattcttgtactttatgccttatggtactgcaaaggttcattgaatcttgtggttaggaatgaccaactatctggcctctgttattacttgtagagcctactggtcttctagttaatactgctatgaaacccatatttgatgtcattcaaaatgtttctaaccatgaaagaagagaggctcttcttagagcaagtagacatgccctaatgaggggagtgactactgttgttgatgttggaagttacttccctggggcctcagctgagaaaacgtggcaagattttgcaggtattctgtaataccttcgcttgcattgcatggacaagaattagaaggattcacttgtcttgtttttatctatgaccttatttgtactcctggcatactgacacaagtattgataccactacagaaatctataaatgggctcactctatggaaaaatgattttgagagtatgcttattcttcccaatgcccacatggtctcgtgtttccgatcttattagtgaacatggtcgatcgctaagtcagtggatccatctaggtggtgttaaagctttccttgatgggtctctgggttcttcaagcgcgttgttccatgagccttatgagggtgatccggataattatggtctccaaatgacagatttagacagcctacttaatagaacactagaatctgacaaatctggactccaggttgccatacatgcaattggggataaagctaatgacatactactggatatggttgacaagattgttgatttaaatggagcgaaggaccgtagattccggactcactctgtttagtagaatctgaattgaatatctgcatttggaatcagatcgaacatgcccaacatctggctccaggtgcagcaaaccgctttggcaagcatggtaccattgcatccgtgcagccagatcatctactagatgatgccgaccatgcttggagcaagattggggtggaaaggtctgagcgaagctcctacacatttcgatcactgttagatggcggtgcgcagctagcttttggttctgactggcctatttcagacatcaaccccttgcaagctatccgatccgcagtgttccgcaagcctcctggatgggaggtcccctggatccctgcggagcgcttgaccctggatgaatcactgaaagcgcacacgatgtctgctgcctacgcctgcttcctggaccacgccgtgggcagcctttctgaagggaaatacgccgattttgtggtggtaccttctacatcgtgggacgaattctccagcgatttgccggggcatgtcctggcgacgtacgtgagcggcaggcaagcttatccatgacagatagcagttgtgtaagtgttggagaccaaaaagagcagcgcggacagtccggccctgaggccggaaggccggacgatccgcggtccggacagtccgcggtgatggcgcggacggtctgcgcgtgcgcagagtcagttaggatttctagtttctcgcgggatttgttacctaaaaccgcgggattaactcggaaatctgttggaagcggatccagacctcccctttatatcgatgaagggctacggccgattgaactccccaacaatcgaacaaatcaagtctatttctcgtttttaccttacgcattaggaatagttctagtctagttctagtttagcctctcaatctccaaattcttcgcctctcttcgactctacgtcgattagaggagtctaggtcggcctgccgtgcctagacaacacctaggatctcttctccccgacggggtccctcccgggagcgagatccaggcgccgccggcgac

SEQ ID NO: 35380 - DNA, 2242 bp, Zea Mays
atgccattgccatcggccgcccagagcgctctcgtcgtggcggccgtcgccatagccaccgccaccgtcctcctccccttcccacggacgccgccgcgggaccgcttcgccgacatggtgctggccaacggcaccatctacaccgcggaccccgcccgacccttcgccgacgccatgtccgtccgcggcggccgcgtgctccgcgtcgggacctacgagtccgtcaaggagctcaagggccctcgcactcgtgagctgaatctcagtgggaacgtggtgctgccggggttcatcgactcccatgttcacttcatagacggtggattgcagcatgcgctagcttcctaatgctactctctgatactctgcagctagcgagggtgccacttcgtggggtcagaagcaaagatgacttggttgccagggtcaaggaagctgtcagagataagcaacctgggcagtggatcttgggcggaggttggaatgatgattttgggggagatggtctcccggctgctgtttggctggatgatatctcacctgataatccagtctggctctctcgcatggatggtcatatgggagtagccaactcattagctatgaagattgctgggattgacaaaaacacaaacgatccaattggtggaactatcatacgaacaactgaaggagagcctactggtcttctagttaatactgctatgaaacccatatttgatgtcattcaaaatgtttctaaccatgaaagaagagaggctcttcttagagcaagtagacatgccctaatgaggggagtgactactgttgttgatgttggaagttacttccctggggcctcagctgagaaaacgtggcaagattttgcaggtattctgtaataccttcgcttgcattgcatggacaagaattagaaggattcacttgtcttgtttttatctatgaccttatttgtactcctggcatactgacacaagtattgataccactacagaaatctataaatgggctcactctatggaaaaatgattttgagagtatgcttattcttcccaatgcccacatggtctcgtgtttccgtggtgttaaagctttccttgatgggtctctgggttcttcaagcgcgttgttccatgagccttatgagggtgatccggataattatggtctccaaatgacagatttagacagcctacttaatagaacactagaatctgacaaatctggactccaggttgccatacatgcaattggggataaagctaatgacatactactggatatggttgacaagattgttgatttaaatggagcgaaggaccgtagattccggatcgaacatgcccaacatctggctccaggtgcagcaaaccgctttggcaagcatggtaccattgcatccgtgcagccagatcatctactagatgatgccgaccatgcttggagcaagattggggtggaaagatttcagacatcaaccccttgcaagctatccgatccgcagtgttccgcaagcctcctggatgggaggtcccctggatccctgcggagcgcttgaccctggatgaatcactgaaagcgcacacgatgtctgctgcctacgcctgcttcctggaccacgccgtgggcagcctttctgaagggaaatacgccgattttgtggtggtaccttctacatcgtgggacgaattctccagcgatttgccggggcatgtcctggcgacgtacgtgagcggcaggcaagcttatccatgacagatagcagttgtgtaagtgttggagaccaaaaagagcagcgcggacagtccggccctgaggccggaaggccggacgatccgcggtccggacagtccgcggtgatggcgcggacggtctgcgcgtgcgcagagtcagttaggatttctagtttctcgcgggatttgttacctaaaaccgcgggattaactcggaaatctgttggaagcggatccagacctcccctttatatcgatgaagggctacggccgattgaactccccaacaatcgaacaaatcaagtctatttctcgtttttaccttacgcattaggaatagttctagtctagttctagtttagcctctcaatctccaaattcttcgcctctcttcgactctacgtcgattagaggagtctaggtcggcctgccgtgcctagacaacacctaggatctcttctccccgacggggtccctcccgggagcgagatccaggcgccgccggcgac

SEQ ID NO: 35381 - DNA, 2912 bp, Zea Mays
atgccattgccatcggccgcccagagcgctctcgtcgtggcggccgtcgccatagccaccgccaccgtcctcctccccttcccacggacgccgccgcgggaccgcttcgccgacatggtgctggccaacggcaccatctacaccgcggaccccgcccgacccttcgccgacgccatgtccgtccgcggcggccgcgtgctccgcgtcgggacctacgagagctcaagggccctcgcactcgtgagctgaatctcagtgggaacgtggtgctgccggggttcatcgactcccatgttcacttcatagacggtggattgcagctagcgagggtgccacttcgtggggtcagaagcaaagatgacttggttgccagggtcaaggaagctgtcagaggtagtgtgctagtattttgttccaatgcattttcctgccacaaactactgctgtgatgcaaagacaggttcggttacctatgcccaaattcagttctgaatcatctcattctgtgtagtaacaatatccaaataaacaagagtagattctttgtcagagttatgctctgcttggtgttctccaattctacgtttgaatagacactatgcaatatgttctgcttgggtatggcaatctattcgaatgcccgtttctgtatatcatgctcccaacataagtttggttagtatctaactgcttctgttttatcaagttaacgggttagtgttgccaaaagctttctaccaatattactaagatctattttcctaacagataagcaacctgggcagtggatcttgggcggaggttggaatgatgattttgggggagatggtctcccggctgctgtttggctggatgatatctcacctgataatccagtctggctctctcgcatggatggtcatatgggagtagccaactcattagctatgaagattgctgggattgacaaaaacacaaacgatccaattggtggaactatcatacgaacaactgaaggaggtaacacaactaattaacatgggtcttagccctctgattgtaacttaatcagtgaagtgcacttgaaccaaactcaatcacttcagtgagcatttgaaagctatttacttttaaacatagatatgttctcgatgtaaaaataaatcaagaaacttgaaagcaaactgcatggtagctcatccgttgatctaataagtagctacaatgatcagaaggacctaatcataagctttgtatacagtttgtaacaatattcttgtactttatgccttatggtactgcaaaggttcattgaatcttgtggttaggaatgaccaactatctggcctctgttattacttgtagagcctactggtcttctagttaatactgctatgaaacccatatttgatgtcattcaaaatgtttctaaccatgaaagaagagaggctcttcttagagcaagtagacatgccctaatgaggggagtgactactgttgttgatgttggaagttacttccctggggcctcagctgagaaaacgtggcaagattttgcagaaatctataaatgggctcactctatggaaaaatgattttgagagtatgcttattcttcccaatgcccacatggtctcgtgtttccgatcttattagtgaacatggtcgatcgctaagtcagtggatccatctaggtggtgttaaagctttccttgatgggtctctgggttcttcaagcgcgttgttccatgagccttatgagggtgatccggataattatggtctccaaatgacagatttagacagcctacttaatagaacactagaatctgacaaatctggactccaggttgccatacatgcaattggggataaagctaatgacatactactggatatggttgacaagattgttgatttaaatggagcgaaggaccgtagattccggatcgaacatgcccaacatctggctccaggtgcagcaaaccgctttggcaagcatggtaccattgcatccgtgcagccagatcatctactagatgatgccgaccatgcttggagcaagattggggtggaaaggtctgagcgaagctcctacacatttcgatcactgttagatggcggtgcgcagctagcttttggttctgactggcctatttcagacatcaaccccttgcaagctatccgatccgcagtgttccgcaagcctcctggatgggaggtcccctggatccctgcggagcgcttgaccctggatgaatcactgaaagcgcacacgatgtctgctgcctacgcctgcttcctggaccacgccgtgggcagcctttctgaagggaaatacgccgattttgtggtggtaccttctacatcgtgggacgaattctccagcgatttgccggggcatgtcctggcgacgtacgtgagcggcaggcaagcttatccatgacagatagcagttgtgtaagtgttggagaccaaaaagagcagcgcggacagtccggccctgaggccggaaggccggacgatccgcggtccggacagtccgcggtgatggcgcggacggtctgcgcgtgcgcagagtcagttaggatttctagtttctcgcgggatttgttacctaaaaccgcgggattaactcggaaatctgttggaagcggatccagacctcccctttatatcgatgaagggctacggccgattgaactccccaacaatcgaacaaatcaagtctatttctcgtttttaccttacgcattaggaatagttctagtctagttctagtttagcctctcaatctccaaattcttcgcctctcttcgactctacgtcgattagaggagtctaggtcggcctgccgtgcctagacaacacctaggatctcttctccccgacggggtccctcccgggagcgagatccaggcgccgccggcgac

SEQ ID NO: 35382 - DNA, 1775 bp, Zea Mays
atgccattgccatcggccgcccagagcgctctcgtcgtggcggccgtcgccatagccaccgccaccgtcctcctccccttcccacggacgccgccgcgggaccgcttcgccgacatggtgctggccaacggcaccatctacaccgcggaccccgcccgacccttcgccgacgccatgtccgtccgcggcggccgcgtgctccgcgtcgggacctacgagtccgtcaaggtcgcgtcgacgtttcgctctgccccttcctccatctgataccctgccctgtatgctgtgtgttgcttgcaggagctcaagggccctcgcactcgtgagctgaatctcagtgggaacgtggtgctgccggggttcatcgactcccatgttcacttcatagacggtggattgcagaaatctataaatgggctcactctatggaaaaatgattttgagagtatgcttattcttcccaatgcccacatggtctcgtgtttccgatcttattagtgaacatggtcgatcgctaagtcagtggatccatctaggtggtgttaaagctttccttgatgggtctctgggttcttcaagcgcgttgttccatgagccttatgagggtgatccggataattatggtctccaaatgacagatttagacagcctacttaatagaacactagaatctgacaaatctggactccaggttgccatacatgcaattggggataaagctaatgacatactactggatatggttgacaagattgttgatttaaatggagcgaaggaccgtagattccggatcgaacatgcccaacatctggctccaggtgcagcaaaccgctttggcaagcatggtaccattgcatccgtgcagccagatcatctactagatgatgccgaccatgcttggagcaagattggggtggaaaggtctgagcgaagctcctacacatttcgatcactgttagatggcggtgcgcagctagcttttggttctgactggcctatttcagacatcaaccccttgcaagctatccgatccgcagtgttccgcaagcctcctggatgggaggtcccctggatccctgcggagcgcttgaccctggatgaatcactgaaagcgcacacgatgtctgctgcctacgcctgcttcctggaccacgccgtgggcagcctttctgaagggaaatacgccgattttgtggtggtaccttctacatcgtgggacgaattctccagcgatttgccggggcatgtcctggcgacgtacgtgagcggcaggcaagcttatccatgacagatagcagttgtgtaagtgttggagaccaaaaagagcagcgcggacagtccggccctgaggccggaaggccggacgatccgcggtccggacagtccgcggtgatggcgcggacggtctgcgcgtgcgcagagtcagttaggatttctagtttctcgcgggatttgttacctaaaaccgcgggattaactcggaaatctgttggaagcggatccagacctcccctttatatcgatgaagggctacggccgattgaactccccaacaatcgaacaaatcaagtctatttctcgtttttaccttacgcattaggaatagttctagtctagttctagtttagcctctcaatctccaaattcttcgcctctcttcgactctacgtcgattagaggagtctaggtcggcctgccgtgcctagacaacacctaggatctcttctccccgacggggtccctcccgggagcgagatccaggcgccgccggcgac

SEQ ID NO: 35383 - DNA, 2567 bp, Zea Mays
atgccattgccatcggccgcccagagcgctctcgtcgtggcggccgtcgccatagccaccgccaccgtcctcctccccttcccacggacgccgccgcgggaccgcttcgccgacatggtgctggccaacggcaccatctacaccgcggaccccgcccgacccttcgccgacgccatgtccgtccgcggcggccgcgtgctccgcgtcgggacctacgagagctcaagggccctcgcactcgtgagctgaatctcagtgggaacgtggtgctgccggggttcatcgactcccatgttcacttcatagacggtggattgcagctagcgagggtgccacttcgtggggtcagaagcaaagatgacttggttgccagggtcaaggaagctgtcagaggtagtgtgctagtattttgttccaatgcattttcctgccacaaactactgctgtgatgcaaagacaggttcggttacctatgcccaaattcagttctgaatcatctcattctgtgtagtaacaatatccaaataaacaagagtagattctttgtcagagttatgctctgcttggtgttctccaattctacgtttgaatagacactatgcaatatgttctgcttgggtatggcaatctattcgaatgcccgtttctgtatatcatgctcccaacataagtttggttagtatctaactgcttctgttttatcaagttaacgggttagtgttgccaaaagctttctaccaatattactaagatctattttcctaacagataagcaacctgggcagtggatcttgggcggaggttggaatgatgattttgggggagatggtctcccggctgctgtttggctggatgatatctcacctgataatccagtctggctctctcgcatggatggtcatatgggagtagccaactcattagctatgaagattgctgggattgacaaaaacacaaacgatccaattggtggaactatcatacgaacaactgaaggagagcctactggtcttctagttaatactgctatgaaacccatatttgatgtcattcaaaatgtttctaaccatgaaagaagagaggctcttcttagagcaagtagacatgccctaatgaggggagtgactactgttgttgatgttggaagttacttccctggggcctcagctgagaaaacgtggcaagattttgcagaaatctataaatgggctcactctatggaaaaatgattttgagagtatgcttattcttcccaatgcccacatggtctcgtgtttccgatcttattagtgaacatggtcgatcgctaagtcagtggatccatctaggtggtgttaaagctttccttgatgggtctctgggttcttcaagcgcgttgttccatgagccttatgagggtgatccggataattatggtctccaaatgacagatttagacagcctacttaatagaacactagaatctgacaaatctggactccaggttgccatacatgcaattggggataaagctaatgacatactactggatatggttgacaagattgttgatttaaatggagcgaaggaccgtagattccggatcgaacatgcccaacatctggctccaggtgcagcaaaccgctttggcaagcatggtaccattgcatccgtgcagccagatcatctactagatgatgccgaccatgcttggagcaagattggggtggaaaggtctgagcgaagctcctacacatttcgatcactgttagatggcggtgcgcagctagcttttggttctgactggcctatttcagacatcaaccccttgcaagctatccgatccgcagtgttccgcaagcctcctggatgggaggtcccctggatccctgcggagcgcttgaccctggatgaatcactgaaagcgcacacgatgtctgctgcctacgcctgcttcctggaccacgccgtgggcagcctttctgaagggaaatacgccgattttgtggtggtaccttctacatcgtgggacgaattctccagcgatttgccggggcatgtcctggcgacgtacgtgagcggcaggcaagcttatccatgacagatagcagttgtgtaagtgttggagaccaaaaagagcagcgcggacagtccggccctgaggccggaaggccggacgatccgcggtccggacagtccgcggtgatggcgcggacggtctgcgcgtgcgcagagtcagttaggatttctagtttctcgcgggatttgttacctaaaaccgcgggattaactcggaaatctgttggaagcggatccagacctcccctttatatcgatgaagggctacggccgattgaactccccaacaatcgaacaaatcaagtctatttctcgtttttaccttacgcattaggaatagttctagtctagttctagtttagcctctcaatctccaaattcttcgcctctcttcgactctacgtcgattagaggagtctaggtcggcctgccgtgcctagacaacacctaggatctcttctccccgacggggtccctcccgggagcgagatccaggcgccgccggcgac

SEQ ID NO: 35384 - DNA, 2148 bp, Zea Mays
aaccatgccattgccatcggccgcccagagcgctctcgtcgtggcggccgtcgccatagccaccgccaccgtcctcctccccttcccacggacgccgccgcgggaccgcttcgccgacatggtgctggccaacggcaccatctacaccgcggaccccgcccgacccttcgccgacgccatgtccgtccgcggcggccgcgtgctccgcgtcgggacctacgagtccgtcaaggagctcaagggccctcgcactcgtgagctgaatctcagtgggaacgtggtgctgccggggttcatcgactcccatgttcacttcatagacggtggattgcagctagcgagggtgccacttcgtggggtcagaagcaaagatgacttggttgccagggtcaaggaagctgtcagagataagcaacctgggcagtggatcttgggcggaggttggaatgatgattttgggggagatggtctcccggctgctgtttggctggatgatatctcacctgataatccagtctggctctctcgcatggatggtcatatgggagtagccaactcattagctatgaagattgctgggattgacaaaaacacaaacgatccaattggtggaactatcatacgaacaactgaaggagagaggctcttcttagagcaagtagacatgccctaatgaggggagtgactactgttgttgatgttggaagttacttccctggggcctcagctgagaaaacgtggcaagattttgcaggtattctgtaataccttcgcttgcattgcatggacaagaattagaaggattcacttgtcttgtttttatctatgaccttatttgtactcctggcatactgacacaagatcttattagtgaacatggtcgatcgctaagtcagtggatccatctaggtggtgttaaagctttccttgatgggtctctgggttcttcaagcgcgttgttccatgagccttatgagggtgatccggataattatggtctccaaatgacagatttagacagcctacttaatagaacactagaatctgacaaatctggactccaggttgccatacatgcaattggggataaagctaatgacatactactggatatggttgacaagattgttgatttaaatggagcgaaggaccgtagattccggatcgaacatgcccaacatctggctccaggtgcagcaaaccgctttggcaagcatggtaccattgcatccgtgcagccagatcatctactagatgatgccgaccatgcttggagcaagattggggtggaaaggtctgagcgaagctcctacacatttcgatcactgttagatggcggtgcgcagctagcttttggttctgactggcctatttcagacatcaaccccttgcaagctatccgatccgcagtgttccgcaagcctcctggatgggaggtcccctggatccctgcggagcgcttgaccctggatgaatcactgaaagcgcacacgatgtctgctgcctacgcctgcttcctggaccacgccgtgggcagcctttctgaagggaaatacgccgattttgtggtggtaccttctacatcgtgggacgaattctccagcgatttgccggggcatgtcctggcgacgtacgtgagcggcaggcaagcttatccatgacagatagcagttgtgtaagtgttggagaccaaaaagagcagcgcggacagtccggccctgaggccggaaggccggacgatccgcggtccggacagtccgcggtgatggcgcggacggtctgcgcgtgcgcagagtcagttaggatttctagtttctcgcgggatttgttacctaaaaccgcgggattaactcggaaatctgttggaagcggatccagacctcccctttatatcgatgaagggctacggccgattgaactccccaacaatcgaacaaatcaagtctatttctcgtttttaccttacgcattaggaatagttctagtctagttctagtttagcctctcaatctccaaattcttcgcctctcttcgactctacgtcgattagaggagtctaggtcggcctgccgtgcctagacaacacctaggatctcttctccccgacggggtccctcccgggagcgagatccaggcgccgccggcgac

SEQ ID NO: 35385 - DNA, 2881 bp, Zea Mays
aaccatgccattgccatcggccgcccagagcgctctcgtcgtggcggccgtcgccatagccaccgccaccgtcctcctccccttcccacggacgccgccgcgggaccgcttcgccgacatggtgctggccaacggcaccatctacaccgcggaccccgcccgacccttcgccgacgccatgtccgtccgcggcggccgcgtgctccgcgtcgggacctacgagtccgtcaaggagctcaagggccctcgcactcgtgagctgaatctcagtgggaacgtggtgctgccggggttcatcgactcccatgttcacttcatagacggtggattgcagctagcgagggtgccacttcgtggggtcagaagcaaagatgacttggttgccagggtcaaggaagctgtcagaggtagtgtgctagtattttgttccaatgcattttcctgccacaaactactgctgtgatgcaaagacaggttcggttacctatgcccaaattcagttctgaatcatctcattctgtgtagtaacaatatccaaataaacaagagtagattctttgtcagagttatgctctgcttggtgttctccaattctacgtttgaatagacactatgcaatatgttctgcttgggtatggcaatctattcgaatgcccgtttctgtatatcatgctcccaacataagtttgataagcaacctgggcagtggatcttgggcggaggttggaatgatgattttgggggagatggtctcccggctgctgtttggctggatgatatctcacctgataatccagtctggctctctcgcatggatggtcatatgggagtagccaactcattagctatgaagattgctgggattgacaaaaacacaaacgatccaattggtggaactatcatacgaacaactgaaggaggtaacacaactaattaacatgggtcttagccctctgattgtaacttaatcagtgaagtgcacttgaaccaaactcaatcacttcagtgagcatttgaaagctatttacttttaaacatagatatgttctcgatgtaaaaataaatcaagaaacttgaaagcaaactgcatggtagctcatccgttgatctaataagtagctacaatgatcagaaggacctaatcataagctttgtatacagtttgtaacaatattcttgtactttatgccttatggtactgcaaaggttcattgaatcttgtggttaggaatgaccaactatctggcctctgttattacttgtagagcctactggtcttctagttaatactgctatgaaacccatatttgatgtcattcaaaatgtttctaaccatgaaagaagagaggctcttcttagagcaagtagacatgccctaatgaggggagtgactactgttgttgatgttggaagttacttccctggggcctcagctgagaaaacgtggcaagattttgcaggtattctgtaataccttcgcttgcattgcatggacaagaattagaaggattcacttgtcttgtttttatctatgaccttatttgtactcctggcatactgacacaagtattgataccactacagaaatctataaatgggctcactctatggaaaaatgattttgagagtatgcttattcttcccaatgcccacatggtctcgtgtttccgatcttattagtgaacatggtcgatcgctaagtcagtggatccatctaggtggtgttaaagctttccttgatgggtctctgggttcttcaagcgcgttgttccatgagccttatgagggtgatccggataattatggtctccaaatgacagatttagacagcctacttaatagaacactagaatctgacaaatctggactccaggttgccatacatgcaattggggataaagctaatgacatactactggatatggttgacaagattgttgatttaaatggagcgaaggaccgtagattccggatcgaacatgcccaacatctggctccaggtgcagcaaaccgctttggcaagcatggtaccattgcatccgtgcagccagatcatctactagatgatgccgaccatgcttggagcaagattggggtggaaagatttcagacatcaaccccttgcaagctatccgatccgcagtgttccgcaagcctcctggatgggaggtcccctggatccctgcggagcgcttgaccctggatgaatcactgaaagcgcacacgatgtctgctgcctacgcctgcttcctggaccacgccgtgggcagcctttctgaagggaaatacgccgattttgtggtggtaccttctacatcgtgggacgaattctccagcgatttgccggggcatgtcctggcgacgtacgtgagcggcaggcaagcttatccatgacagatagcagttgtgtaagtgttggagaccaaaaagagcagcgcggacagtccggccctgaggccggaaggccggacgatccgcggtccggacagtccgcggtgatggcgcggacggtctgcgcgtgcgcagagtcagttaggatttctagtttctcgcgggatttgttacctaaaaccgcgggattaactcggaaatctgttggaagcggatccagacctcccctttatatcgatgaagggctacggccgattgaactccccaacaatcgaacaaatcaagtctatttctcgtttttaccttacgcattaggaatagttctagtctagttctagtttagcctctcaatctccaaattcttcgcctctcttcgactctacgtcgattagaggagtctaggtcggcctgccgtgcctagacaacacctaggatctcttctccccgacggggtccctcccgggagcgagatccaggcgccgccggcgac

SEQ ID NO: 35386 - DNA, 2969 bp, Zea Mays
aaccatgccattgccatcggccgcccagagcgctctcgtcgtggcggccgtcgccatagccaccgccaccgtcctcctccccttcccacggacgccgccgcgggaccgcttcgccgacatggtgctggccaacggcaccatctacaccgcggaccccgcccgacccttcgccgacgccatgtccgtccgcggcggccgcgtgctccgcgtcgggacctacgagtccgtcaaggagctcaagggccctcgcactcgtgagctgaatctcagtgggaacgtggtgctgccggggttcatcgactcccatgttcacttcatagacggtggattgcagctagcgagggtgccacttcgtggggtcagaagcaaagatgacttggttgccagggtcaaggaagctgtcagaggtagtgtgctagtattttgttccaatgcattttcctgccacaaactactgctgtgatgcaaagacaggttcggttacctatgcccaaattcagttctgaatcatctcattctgtgtagtaacaatatccaaataaacaagagtagattctttgtcagagttatgctctgcttggtgttctccaattctacgtttgaatagacactatgcaatatgttctgcttgggtatggcaatctattcgaatgcccgtttctgtatatcatgctcccaacataagtttggttagtatctaactgcttctgttttatcaagttaacgggttagtgttgccaaaagctttctaccaatattactaagatctattttcctaacagataagcaacctgggcagtggatcttgggcggaggttggaatgatgattttgggggagatggtctcccggctgctgtttggctggatgatatctcacctgataatccagtctggctctctcgcatggatggtcatatgggagtagccaactcattagctatgaagattgctgggattgacaaaaacacaaacgatccaattggtggaactatcatacgaacaactgaaggaggtaacacaactaattaacatgggtcttagccctctgattgtaacttaatcagtgaagtgcacttgaaccaaactcaatcacttcagtgagcatttgaaagctatttacttttaaacatagatatgttctcgatgtaaaaataaatcaagaaacttgaaagcaaactgcatggtagctcatccgttgatctaataagtagctacaatgatcagaaggacctaatcataagctttgtatacagtttgtaacaatattcttgtactttatgccttatggtactgcaaaggttcattgaatcttgtggttaggaatgaccaactatctggcctctgttattacttgtagagcctactggtcttctagttaatactgctatgaaacccatatttgatgtcattcaaaatgtttctaaccatgaaagaagagaggctcttcttagagcaagtagacatgccctaatgaggggagtgactactgttgttgatgttggaagttacttccctggggcctcagctgagaaaacgtggcaagattttgcaggtattctgtaataccttcgcttgcattgcatggacaagaattagaaggattcacttgtcttgtttttatctatgaccttatttgtactcctggcatactgacacaagtattgataccactacagaaatctataaatgggctcactctatggaaaaatgattttgagagtatgcttattcttcccaatgcccacatggtctcgtgtttccgtggtgttaaagctttccttgatgggtctctgggttcttcaagcgcgttgttccatgagccttatgagggtgatccggataattatggtctccaaatgacagatttagacagcctacttaatagaacactagaatctgacaaatctggactccaggttgccatacatgcaattggggataaagctaatgacatactactggatatggttgacaagattgttgatttaaatggagcgaaggaccgtagattccggatcgaacatgcccaacatctggctccaggtgcagcaaaccgctttggcaagcatggtaccattgcatccgtgcagccagatcatctactagatgatgccgaccatgcttggagcaagattggggtggaaaggtctgagcgaagctcctacacatttcgatcactgttagatggcgatttcagacatcaaccccttgcaagctatccgatccgcagtgttccgcaagcctcctggatgggaggtcccctggatccctgcggagcgcttgaccctggatgaatcactgaaagcgcacacgatgtctgctgcctacgcctgcttcctggaccacgccgtgggcagcctttctgaagggaaatacgccgattttgtggtggtaccttctacatcgtgggacgaattctccagcgatttgccggggcatgtcctggcgacgtacgtgagcggcaggcaagcttatccatgacagatagcagttgtgtaagtgttggagaccaaaaagagcagcgcggacagtccggccctgaggccggaaggccggacgatccgcggtccggacagtccgcggtgatggcgcggacggtctgcgcgtgcgcagagtcagttaggatttctagtttctcgcgggatttgttacctaaaaccgcgggattaactcggaaatctgttggaagcggatccagacctcccctttatatcgatgaagggctacggccgattgaactccccaacaatcgaacaaatcaagtctatttctcgtttttaccttacgcattaggaatagttctagtctagttctagtttagcctctcaatctccaaattcttcgcctctcttcgactctacgtcgattagaggagtctaggtcggcctgccgtgcctagacaacacctaggatctcttctccccgacggggtccctcccgggagcgagatccaggcgccgccggcgac

SEQ ID NO: 35387 - DNA, 2921 bp, Zea Mays
aaccatgccattgccatcggccgcccagagcgctctcgtcgtggcggccgtcgccatagccaccgccaccgtcctcctccccttcccacggacgccgccgcgggaccgcttcgccgacatggtgctggccaacggcaccatctacaccgcggaccccgcccgacccttcgccgacgccatgtccgtccgcggcggccgcgtgctccgcgtcgggacctacgagtccgtcaaggagctcaagggccctcgcactcgtgagctgaatctcagtgggaacgtggtgctgccggggttcatcgactcccatgttcacttcatagacggtggattgcagctagcgagggtgccacttcgtggggtcagaagcaaagatgacttggttgccagggtcaaggaagctgtcagaggtagtgtgctagtattttgttccaatgcattttcctgccacaaactactgctgtgatgcaaagacaggttcggttacctatgcccaaattcagttctgaatcatctcattctgtgtagtaacaatatccaaataaacaagagtagattctttgtcagagttatgctctgcttggtgttctccaattctacgtttgaatagacactatgcaatatgttctgcttgggtatggcaatctattcgaatgcccgtttctgtatatcatgctcccaacataagtttgataagcaacctgggcagtggatcttgggcggaggttggaatgatgattttgggggagatggtctcccggctgctgtttggctggatgatatctcacctgataatccagtctggctctctcgcatggatggtcatatgggagtagccaactcattagctatgaagattgctgggattgacaaaaacacaaacgatccaattggtggaactatcatacgaacaactgaaggaggtaacacaactaattaacatgggtcttagccctctgattgtaacttaatcagtgaagtgcacttgaaccaaactcaatcacttcagtgagcatttgaaagctatttacttttaaacatagatatgttctcgatgtaaaaataaatcaagaaacttgaaagcaaactgcatggtagctcatccgttgatctaataagtagctacaatgatcagaaggacctaatcataagctttgtatacagtttgtaacaatattcttgtactttatgccttatggtactgcaaaggttcattgaatcttgtggttaggaatgaccaactatctggcctctgttattacttgtagagcctactggtcttctagttaatactgctatgaaacccatatttgatgtcattcaaaatgtttctaaccatgaaagaagagaggctcttcttagagcaagtagacatgccctaatgaggggagtgactactgttgttgatgttggaagttacttccctggggcctcagctgagaaaacgtggcaagattttgcaggtattctgtaataccttcgcttgcattgcatggacaagaattagaaggattcacttgtcttgtttttatctatgaccttatttgtactcctggcatactgacacaagtattgataccactacagaaatctataaatgggctcactctatggaaaaatgattttgagagtatgcttattcttcccaatgcccacatggtctcgtgtttccgatcttattagtgaacatggtcgatcgctaagtcagtggatccatctaggtggtgttaaagctttccttgatgggtctctgggttcttcaagcgcgttgttccatgagccttatgagggtgatccggataattatggtctccaaatgacagatttagacagcctacttaatagaacactagaatctgacaaatctggactccaggttgccatacatgcaattggggataaagctaatgacatactactggatatggttgacaagattgttgatttaaatggagcgaaggaccgtagattccggatcgaacatgcccaacatctggctccaggtgcagcaaaccgctttggcaagcatggtaccattgcatccgtgcagatcatctactagatgatgccgaccatgcttggagcaagattggggtggaaaggtctgagcgaagctcctacacatttcgatcactgttagatggcgatttcagacatcaaccccttgcaagctatccgatccgcagtgttccgcaagcctcctggatgggaggtcccctggatccctgcggagcgcttgaccctggatgaatcactgaaagcgcacacgatgtctgctgcctacgcctgcttcctggaccacgccgtgggcagcctttctgaagggaaatacgccgattttgtggtggtaccttctacatcgtgggacgaattctccagcgatttgccggggcatgtcctggcgacgtacgtgagcggcaggcaagcttatccatgacagatagcagttgtgtaagtgttggagaccaaaaagagcagcgcggacagtccggccctgaggccggaaggccggacgatccgcggtccggacagtccgcggtgatggcgcggacggtctgcgcgtgcgcagagtcagttaggatttctagtttctcgcgggatttgttacctaaaaccgcgggattaactcggaaatctgttggaagcggatccagacctcccctttatatcgatgaagggctacggccgattgaactccccaacaatcgaacaaatcaagtctatttctcgtttttaccttacgcattaggaatagttctagtctagttctagtttagcctctcaatctccaaattcttcgcctctcttcgactctacgtcgattagaggagtctaggtcggcctgccgtgcctagacaacacctaggatctcttctccccgacggggtccctcccgggagcgagatccaggcgccgccggcgac

SEQ ID NO: 35388 - DNA, 3193 bp, Zea Mays
aaccatgccattgccatcggccgcccagagcgctctcgtcgtggcggccgtcgccatagccaccgccaccgtcctcctccccttcccacggacgccgccgcgggaccgcttcgccgacatggtgctggccaacggcaccatctacaccgcggaccccgcccgacccttcgccgacgccatgtccgtccgcggcggccgcgtgctccgcgtcgggacctacgagtccgtcaaggagctcaagggccctcgcactcgtgagctgaatctcagtgggaacgtggtgctgccggggttcatcgactcccatgttcacttcatagacggtggattgcagctagcgagggtgccacttcgtggggtcagaagcaaagatgacttggttgccagggtcaaggaagctgtcagaggtagtgtgctagtattttgttccaatgcattttcctgccacaaactactgctgtgatgcaaagacaggttcggttacctatgcccaaattcagttctgaatcatctcattctgtgtagtaacaatatccaaataaacaagagtagattctttgtcagagttatgctctgcttggtgttctccaattctacgtttgaatagacactatgcaatatgttctgcttgggtatggcaatctattcgaatgcccgtttctgtatatcatgctcccaacataagtttggttagtatctaactgcttctgttttatcaagttaacgggttagtgttgccaaaagctttctaccaatattactaagatctattttcctaacagataagcaacctgggcagtggatcttgggcggaggttggaatgatgattttgggggagatggtctcccggctgctgtttggctggatgatatctcacctgataatccagtctggctctctcgcatggatggtcatatgggagtagccaactcattagctatgaagattgctgggattgacaaaaacacaaacgatccaattggtggaactatcatacgaacaactgaaggaggtaacacaactaattaacatgggtcttagccctctgattgtaacttaatcagtgaagtgcacttgaaccaaactcaatcacttcagtgagcatttgaaagctatttacttttaaacatagatatgttctcgatgtaaaaataaatcaagaaacttgaaagcaaactgcatggtagctcatccgttgatctaataagtagctacaatgatcagaaggacctaatcataagctttgtatacagtttgtaacaatattcttgtactttatgccttatggtactgcaaaggttcattgaatcttgtggttaggaatgaccaactatctggcctctgttattacttgtagagcctactggtcttctagttaatactgctatgaaacccatatttgatgtcattcaaaatgtttctaaccatgaaagaagagaggctcttcttagagcaagtagacatgccctaatgaggggagtgactactgttgttgatgttggaagttacttccctggggcctcagctgagaaaacgtggcaagattttgcaggtattctgtaataccttcgcttgcattgcatggacaagaattagaaggattcacttgtcttgtttttatctatgaccttatttgtactcctggcatactgacacaagtattgataccactacagaaatctataaatgggctcactctatggaaaaatgattttgagagtatgcttattcttcccaatgcccacatggtctcgtgtttccgatcttattagtgaacatggtcgatcgctaagtcagtggatccatctaggtggtgttaaagctttccttgatgggtctctgggttcttcaagcgcgttgttccatgagccttatgagggtgatccggataattatggtctccaaatgacagatttagacagcctacttaatagaacactagaatctgacaaatctggactccaggttgccatacatgcaattggggataaagctaatgacatactactggatatggttgacaagattgttgatttaaatggagcgaaggaccgtagattccggactcactctgtttagtagaatctgaattgaatatctgcatttggaatcagatcgaacatgcccaacatctggctccaggtgcagcaaaccgctttggcaagcatggtaccattgcatccgtgcagccagatcatctactagatgatgccgaccatgcttggagcaagattggggtggaaaggtctgagcgaagctcctacacatttcgatcactgttagatggcggtgcgcagctagcttttggttctgactggcctgtacgataattctgcagatgcttccagtaaccaaactctgtttttagttgccgtaatattcagccacctggtatactgttactgttttttcagatttcagacatcaaccccttgcaagctatccgatccgcagtgttccgcaagcctcctggatgggaggtcccctggatccctgcggagcgcttgaccctggatgaatcactgaaagcgcacacgatgtctgctgcctacgcctgcttcctggaccacgccgtgggcagcctttctgaagggaaatacgccgattttgtggtggtaccttctacatcgtgggacgaattctccagcgatttgccggggcatgtcctggcgacgtacgtgagcggcaggcaagcttatccatgacagatagcagttgtgtaagtgttggagaccaaaaagagcagcgcggacagtccggccctgaggccggaaggccggacgatccgcggtccggacagtccgcggtgatggcgcggacggtctgcgcgtgcgcagagtcagttaggatttctagtttctcgcgggatttgttacctaaaaccgcgggattaactcggaaatctgttggaagcggatccagacctcccctttatatcgatgaagggctacggccgattgaactccccaacaatcgaacaaatcaagtctatttctcgtttttaccttacgcattaggaatagttctagtctagttctagtttagcctctcaatctccaaattcttcgcctctcttcgactctacgtcgattagaggagtctaggtcggcctgccgtgcctagacaacacctaggatctcttctccccgacggggtccctcccgggagcgagatccaggcgccgccggcgac

SEQ ID NO: 35389 - DNA, 2011 bp, Zea Mays
aaccatgccattgccatcggccgcccagagcgctctcgtcgtggcggccgtcgccatagccaccgccaccgtcctcctccccttcccacggacgccgccgcgggaccgcttcgccgacatggtgctggccaacggcaccatctacaccgcggaccccgcccgacccttcgccgacgccatgtccgtccgcggcggccgcgtgctccgcgtcgggacctacgagtccgtcaaggagctcaagggccctcgcactcgtgagctgaatctcagtgggaacgtggtgctgccggggttcatcgactcccatgttcacttcatagacggtggattgcagctagcgagggtgccacttcgtggggtcagaagcaaagatgacttggttgccagggtcaaggaagctgtcagagataagcaacctgggcagtggatcttgggcggaggttggaatgatgattttgggggagatggtctcccggctgctgtttggctggatgatatctcacctgataatccagtctggctctctcgcatggatggtcatatgggagtagccaactcattagctatgaagattgctgggattgacaaaaacacaaacgatccaattggtggaactatcatacgaacaactgaaggagaaatctataaatgggctcactctatggaaaaatgattttgagagtatgcttattcttcccaatgcccacatggtctcgtgtttccgatcttattagtgaacatggtcgatcgctaagtcagtggatccatctaggtggtgttaaagctttccttgatgggtctctgggttcttcaagcgcgttgttccatgagccttatgagggtgatccggataattatggtctccaaatgacagatttagacagcctacttaatagaacactagaatctgacaaatctggactccaggttgccatacatgcaattggggataaagctaatgacatactactggatatggttgacaagattgttgatttaaatggagcgaaggaccgtagattccggatcgaacatgcccaacatctggctccaggtgcagcaaaccgctttggcaagcatggtaccattgcatccgtgcagccagatcatctactagatgatgccgaccatgcttggagcaagattggggtggaaaggtctgagcgaagctcctacacatttcgatcactgttagatggcggtgcgcagctagcttttggttctgactggcctatttcagacatcaaccccttgcaagctatccgatccgcagtgttccgcaagcctcctggatgggaggtcccctggatccctgcggagcgcttgaccctggatgaatcactgaaagcgcacacgatgtctgctgcctacgcctgcttcctggaccacgccgtgggcagcctttctgaagggaaatacgccgattttgtggtggtaccttctacatcgtgggacgaattctccagcgatttgccggggcatgtcctggcgacgtacgtgagcggcaggcaagcttatccatgacagatagcagttgtgtaagtgttggagaccaaaaagagcagcgcggacagtccggccctgaggccggaaggccggacgatccgcggtccggacagtccgcggtgatggcgcggacggtctgcgcgtgcgcagagtcagttaggatttctagtttctcgcgggatttgttacctaaaaccgcgggattaactcggaaatctgttggaagcggatccagacctcccctttatatcgatgaagggctacggccgattgaactccccaacaatcgaacaaatcaagtctatttctcgtttttaccttacgcattaggaatagttctagtctagttctagtttagcctctcaatctccaaattcttcgcctctcttcgactctacgtcgattagaggagtctaggtcggcctgccgtgcctagacaacacctaggatctcttctccccgacggggtccctcccgggagcgagatccaggcgccgccggcgac

SEQ ID NO: 35390 - DNA, 2293 bp, Zea Mays
aaccatgccattgccatcggccgcccagagcgctctcgtcgtggcggccgtcgccatagccaccgccaccgtcctcctccccttcccacggacgccgccgcgggaccgcttcgccgacatggtgctggccaacggcaccatctacaccgcggaccccgcccgacccttcgccgacgccatgtccgtccgcggcggccgcgtgctccgcgtcgggacctacgagtccgtcaaggagctcaagggccctcgcactcgtgagctgaatctcagtgggaacgtggtgctgccggggttcatcgactcccatgttcacttcatagacggtggattgcagctagcgagggtgccacttcgtggggtcagaagcaaagatgacttggttgccagggtcaaggaagctgtcagaggtagtgtgctagtattttgttccaatgcattttcctgccacaaactactgctgtgatgcaaagacaggttcggttacctatgcccaaattcagttctgaatcatctcattctgtgtagtaacaatatccaaataaacaagagtagattctttgtcagagttatgctctgcttggtgttctccaattctacgtttgaatagacactatgcaatatgttctgcttgggtatggcaatctattcgaatgcccgtttctgtatatcatgctcccaacataagtttgataagcaacctgggcagtggatcttgggcggaggttggaatgatgattttgggggagatggtctcccggctgctgtttggctggatgatatctcacctgataatccagtctggctctctcgcatggatggtcatatgggagtagccaactcattagctatgaagattgctgggattgacaaaaacacaaacgatccaattggtggaactatcatacgaacaactgaaggagaaatctataaatgggctcactctatggaaaaatgattttgagagtatgcttattcttcccaatgcccacatggtctcgtgtttccgatcttattagtgaacatggtcgatcgctaagtcagtggatccatctaggtggtgttaaagctttccttgatgggtctctgggttcttcaagcgcgttgttccatgagccttatgagggtgatccggataattatggtctccaaatgacagatttagacagcctacttaatagaacactagaatctgacaaatctggactccaggttgccatacatgcaattggggataaagctaatgacatactactggatatggttgacaagattgttgatttaaatggagcgaaggaccgtagattccggatcgaacatgcccaacatctggctccaggtgcagcaaaccgctttggcaagcatggtaccattgcatccgtgcagccagatcatctactagatgatgccgaccatgcttggagcaagattggggtggaaaggtctgagcgaagctcctacacatttcgatcactgttagatggcggtgcgcagctagcttttggttctgactggcctatttcagacatcaaccccttgcaagctatccgatccgcagtgttccgcaagcctcctggatgggaggtcccctggatccctgcggagcgcttgaccctggatgaatcactgaaagcgcacacgatgtctgctgcctacgcctgcttcctggaccacgccgtgggcagcctttctgaagggaaatacgccgattttgtggtggtaccttctacatcgtgggacgaattctccagcgatttgccggggcatgtcctggcgacgtacgtgagcggcaggcaagcttatccatgacagatagcagttgtgtaagtgttggagaccaaaaagagcagcgcggacagtccggccctgaggccggaaggccggacgatccgcggtccggacagtccgcggtgatggcgcggacggtctgcgcgtgcgcagagtcagttaggatttctagtttctcgcgggatttgttacctaaaaccgcgggattaactcggaaatctgttggaagcggatccagacctcccctttatatcgatgaagggctacggccgattgaactccccaacaatcgaacaaatcaagtctatttctcgtttttaccttacgcattaggaatagttctagtctagttctagtttagcctctcaatctccaaattcttcgcctctcttcgactctacgtcgattagaggagtctaggtcggcctgccgtgcctagacaacacctaggatctcttctccccgacggggtccctcccgggagcgagatccaggcgccgccggcgac

SEQ ID NO: 35391 - DNA, 2843 bp, Zea Mays
caaccatgccattgccatcggccgcccagagcgctctcgtcgtggcggccgtcgccatagccaccgccaccgtcctcctccccttcccacggacgccgccgcgggaccgcttcgccgacatggtgctggccaacggcaccatctacaccgcggaccccgcccgacccttcgccgacgccatgtccgtccgcggcggccgcgtgctccgcgtcgggacctacgagtccgtcaaggagctcaagggccctcgcactcgtgagctgaatctcagtgggaacgtggtgctgccggggttcatcgactcccatgttcacttcatagacggtggattgcagcatgcgctagcttcctaatgctactctctgatactctgcagctagcgagggtgccacttcgtggggtcagaagcaaagatgacttggttgccagggtcaaggaagctgtcagaggtagtgtgctagtattttgttccaatgcattttcctgccacaaactactgctgtgatgcaaagacaggttcggttacctatgcccaaattcagttctgaatcatctcattctgtgtagtaacaatatccaaataaacaagagtagattctttgtcagagttatgctctgcttggtgttctccaattctacgtttgaatagacactatgcaatatgttctgcttgggtatggcaatctattcgaatgcccgtttctgtatatcatgctcccaacataagtttgataagcaacctgggcagtggatcttgggcggaggttggaatgatgattttgggggagatggtctcccggctgctgtttggctggatgatatctcacctgataatccagtctggctctctcgcatggatggtcatatgggagtagccaactcattagctatgaagattgctgggattgacaaaaacacaaacgatccaattggtggaactatcatacgaacaactgaaggaggtaacacaactaattaacatgggtcttagccctctgattgtaacttaatcagtgaagtgcacttgaaccaaactcaatcacttcagtgagcatttgaaagctatttacttttaaacatagatatgttctcgatgtaaaaataaatcaagaaacttgaaagcaaactgcatggtagctcatccgttgatctaataagtagctacaatgatcagaaggacctaatcataagctttgtatacagtttgtaacaatattcttgtactttatgccttatggtactgcaaaggttcattgaatcttgtggttaggaatgaccaactatctggcctctgttattacttgtagagcctactggtcttctagttaatactgctatgaaacccatatttgatgtcattcaaaatgtttctaaccatgaaagaagagaggctcttcttagagcaagtagacatgccctaatgaggggagtgactactgttgttgatgttggaagttacttccctggggcctcagctgagaaaacgtggcaagattttgcagaaatctataaatgggctcactctatggaaaaatgattttgagagtatgcttattcttcccaatgcccacatggtctcgtgtttccgatcttattagtgaacatggtcgatcgctaagtcagtggatccatctaggtggtgttaaagctttccttgatgggtctctgggttcttcaagcgcgttgttccatgagccttatgagggtgatccggataattatggtctccaaatgacagatttagacagcctacttaatagaacactagaatctgacaaatctggactccaggttgccatacatgcaattggggataaagctaatgacatactactggatatggttgacaagattgttgatttaaatggagcgaaggaccgtagattccggatcgaacatgcccaacatctggctccaggtgcagcaaaccgctttggcaagcatggtaccattgcatccgtgcagccagatcatctactagatgatgccgaccatgcttggagcaagattggggtggaaaggtctgagcgaagctcctacacatttcgatcactgttagatggcgatttcagacatcaaccccttgcaagctatccgatccgcagtgttccgcaagcctcctggatgggaggtcccctggatccctgcggagcgcttgaccctggatgaatcactgaaagcgcacacgatgtctgctgcctacgcctgcttcctggaccacgccgtgggcagcctttctgaagggaaatacgccgattttgtggtggtaccttctacatcgtgggacgaattctccagcgatttgccggggcatgtcctggcgacgtacgtgagcggcaggcaagcttatccatgacagatagcagttgtgtaagtgttggagaccaaaaagagcagcgcggacagtccggccctgaggccggaaggccggacgatccgcggtccggacagtccgcggtgatggcgcggacggtctgcgcgtgcgcagagtcagttaggatttctagtttctcgcgggatttgttacctaaaaccgcgggattaactcggaaatctgttggaagcggatccagacctcccctttatatcgatgaagggctacggccgattgaactccccaacaatcgaacaaatcaagtctatttctcgtttttaccttacgcattaggaatagttctagtctagttctagtttagcctctcaatctccaaattcttcgcctctcttcgactctacgtcgattagaggagtctaggtcggcctgccgtgcctagacaacacctaggatctcttctccccgacggggtccctcccgggagcgagatccaggcgccgccggcgac

SEQ ID NO: 35392 - DNA, 2440 bp, Zea Mays
caaccatgccattgccatcggccgcccagagcgctctcgtcgtggcggccgtcgccatagccaccgccaccgtcctcctccccttcccacggacgccgccgcgggaccgcttcgccgacatggtgctggccaacggcaccatctacaccgcggaccccgcccgacccttcgccgacgccatgtccgtccgcggcggccgcgtgctccgcgtcgggacctacgagtccgtcaaggagctcaagggccctcgcactcgtgagctgaatctcagtgggaacgtggtgctgccggggttcatcgactcccatgttcacttcatagacggtggattgcagcatgcgctagcttcctaatgctactctctgatactctgcagctagcgagggtgccacttcgtggggtcagaagcaaagatgacttggttgccagggtcaaggaagctgtcagaggtagtgtgctagtattttgttccaatgcattttcctgccacaaactactgctgtgatgcaaagacagagttatgctctgcttggtgttctccaattctacgtttgaatagacactatgcaatatgttctgcttgggtatggcaatctattcgaatgcccgtttctgtatatcatgctcccaacataagtttgataagcaacctgggcagtggatcttgggcggaggttggaatgatgattttgggggagatggtctcccggctgctgtttggctggatgatatctcacctgataatccagtctggctctctcgcatggatggtcatatgggagtagccaactcattagctatgaagattgctgggattgacaaaaacacaaacgatccaattggtggaactatcatacgaacaactgaaggagagcctactggtcttctagttaatactgctatgaaacccatatttgatgtcattcaaaatgtttctaaccatgaaagaagagaggctcttcttagagcaagtagacatgccctaatgaggggagtgactactgttgttgatgttggaagttacttccctggggcctcagctgagaaaacgtggcaagattttgcagaaatctataaatgggctcactctatggaaaaatgattttgagagtatgcttattcttcccaatgcccacatggtctcgtgtttccgatcttattagtgaacatggtcgatcgctaagtcagtggatccatctaggtggtgttaaagctttccttgatgggtctctgggttcttcaagcgcgttgttccatgagccttatgagggtgatccggataattatggtctccaaatgacagatttagacagcctacttaatagaacactagaatctgacaaatctggactccaggttgccatacatgcaattggggataaagctaatgacatactactggatatggttgacaagattgttgatttaaatggagcgaaggaccgtagattccggatcgaacatgcccaacatctggctccaggtgcagcaaaccgctttggcaagcatggtaccattgcatccgtgcagccagatcatctactagatgatgccgaccatgcttggagcaagattggggtggaaaggtctgagcgaagctcctacacatttcgatcactgttagatggcggtgcgcagctagcttttggttctgactggcctatttcagacatcaaccccttgcaagctatccgatccgcagtgttccgcaagcctcctggatgggaggtcccctggatccctgcggagcgcttgaccctggatgaatcactgaaagcgcacacgatgtctgctgcctacgcctgcttcctggaccacgccgtgggcagcctttctgaagggaaatacgccgattttgtggtggtaccttctacatcgtgggacgaattctccagcgatttgccggggcatgtcctggcgacgtacgtgagcggcaggcaagcttatccatgacagatagcagttgtgtaagtgttggagaccaaaaagagcagcgcggacagtccggccctgaggccggaaggccggacgatccgcggtccggacagtccgcggtgatggcgcggacggtctgcgcgtgcgcagagtcagttaggatttctagtttctcgcgggatttgttacctaaaaccgcgggattaactcggaaatctgttggaagcggatccagacctcccctttatatcgatgaagggctacggccgattgaactccccaacaatcgaacaaatcaagtctatttctcgtttttaccttacgcattaggaatagttctagtctagttctagtttagcctctcaatctccaaattcttcgcctctcttcgactctacgtcgattagaggagtctaggtcggcctgccgtgcctagacaacacctaggatctcttctccccgacggggtccctcccgggagcgagatccaggcgccgccggcgac

SEQ ID NO: 35393 - DNA, 2248 bp, Zea Mays
caaccatgccattgccatcggccgcccagagcgctctcgtcgtggcggccgtcgccatagccaccgccaccgtcctcctccccttcccacggacgccgccgcgggaccgcttcgccgacatggtgctggccaacggcaccatctacaccgcggaccccgcccgacccttcgccgacgccatgtccgtccgcggcggccgcgtgctccgcgtcgggacctacgagtccgtcaaggagctcaagggccctcgcactcgtgagctgaatctcagtgggaacgtggtgctgccggggttcatcgactcccatgttcacttcatagacggtggattgcagcatgcgctagcttcctaatgctactctctgatactctgcagctagcgagggtgccacttcgtggggtcagaagcaaagatgacttggttgccagggtcaaggaagctgtcagagataagcaacctgggcagtggatcttgggcggaggttggaatgatgattttgggggagatggtctcccggctgctgtttggctggatgatatctcacctgataatccagtctggctctctcgcatggatggtcatatgggagtagccaactcattagctatgaagattgctgggattgacaaaaacacaaacgatccaattggtggaactatcatacgaacaactgaaggagagcctactggtcttctagttaatactgctatgaaacccatatttgatgtcattcaaaatgtttctaaccatgaaagaagagaggctcttcttagagcaagtagacatgccctaatgaggggagtgactactgttgttgatgttggaagttacttccctggggcctcagctgagaaaacgtggcaagattttgcagaaatctataaatgggctcactctatggaaaaatgattttgagagtatgcttattcttcccaatgcccacatggtctcgtgtttccgatcttattagtgaacatggtcgatcgctaagtcagtggatccatctaggtggtgttaaagctttccttgatgggtctctgggttcttcaagcgcgttgttccatgagccttatgagggtgatccggataattatggtctccaaatgacagatttagacagcctacttaatagaacactagaatctgacaaatctggactccaggttgccatacatgcaattggggataaagctaatgacatactactggatatggttgacaagattgttgatttaaatggagcgaaggaccgtagattccggatcgaacatgcccaacatctggctccaggtgcagcaaaccgctttggcaagcatggtaccattgcatccgtgcagccagatcatctactagatgatgccgaccatgcttggagcaagattggggtggaaaggtctgagcgaagctcctacacatttcgatcactgttagatggcggtgcgcagctagcttttggttctgactggcctatttcagacatcaaccccttgcaagctatccgatccgcagtgttccgcaagcctcctggatgggaggtcccctggatccctgcggagcgcttgaccctggatgaatcactgaaagcgcacacgatgtctgctgcctacgcctgcttcctggaccacgccgtgggcagcctttctgaagggaaatacgccgattttgtggtggtaccttctacatcgtgggacgaattctccagcgatttgccggggcatgtcctggcgacgtacgtgagcggcaggcaagcttatccatgacagatagcagttgtgtaagtgttggagaccaaaaagagcagcgcggacagtccggccctgaggccggaaggccggacgatccgcggtccggacagtccgcggtgatggcgcggacggtctgcgcgtgcgcagagtcagttaggatttctagtttctcgcgggatttgttacctaaaaccgcgggattaactcggaaatctgttggaagcggatccagacctcccctttatatcgatgaagggctacggccgattgaactccccaacaatcgaacaaatcaagtctatttctcgtttttaccttacgcattaggaatagttctagtctagttctagtttagcctctcaatctccaaattcttcgcctctcttcgactctacgtcgattagaggagtctaggtcggcctgccgtgcctagacaacacctaggatctcttctccccgacggggtccctcccgggagcgagatccaggcgccgccggcgac

SEQ ID NO: 35394 - DNA, 3020 bp, Zea Mays
cccaaccatgccattgccatcggccgcccagagcgctctcgtcgtggcggccgtcgccatagccaccgccaccgtcctcctccccttcccacggacgccgccgcgggaccgcttcgccgacatggtgctggccaacggcaccatctacaccgcggaccccgcccgacccttcgccgacgccatgtccgtccgcggcggccgcgtgctccgcgtcgggacctacgagtccgtcaaggagctcaagggccctcgcactcgtgagctgaatctcagtgggaacgtggtgctgccggggttcatcgactcccatgttcacttcatagacggtggattgcagcatgcgctagcttcctaatgctactctctgatactctgcagctagcgagggtgccacttcgtggggtcagaagcaaagatgacttggttgccagggtcaaggaagctgtcagaggtagtgtgctagtattttgttccaatgcattttcctgccacaaactactgctgtgatgcaaagacaggttcggttacctatgcccaaattcagttctgaatcatctcattctgtgtagtaacaatatccaaataaacaagagtagattctttgtcagagttatgctctgcttggtgttctccaattctacgtttgaatagacactatgcaatatgttctgcttgggtatggcaatctattcgaatgcccgtttctgtatatcatgctcccaacataagtttggttagtatctaactgcttctgttttatcaagttaacgggttagtgttgccaaaagctttctaccaatattactaagatctattttcctaacagataagcaacctgggcagtggatcttgggcggaggttggaatgatgattttgggggagatggtctcccggctgctgtttggctggatgatatctcacctgataatccagtctggctctctcgcatggatggtcatatgggagtagccaactcattagctatgaagattgctgggattgacaaaaacacaaacgatccaattggtggaactatcatacgaacaactgaaggaggtaacacaactaattaacatgggtcttagccctctgattgtaacttaatcagtgaagtgcacttgaaccaaactcaatcacttcagtgagcatttgaaagctatttacttttaaacatagatatgttctcgatgtaaaaataaatcaagaaacttgaaagcaaactgcatggtagctcatccgttgatctaataagtagctacaatgatcagaaggacctaatcataagctttgtatacagtttgtaacaatattcttgtactttatgccttatggtactgcaaaggttcattgaatcttgtggttaggaatgaccaactatctggcctctgttattacttgtagagcctactggtcttctagttaatactgctatgaaacccatatttgatgtcattcaaaatgtttctaaccatgaaagaagagaggctcttcttagagcaagtagacatgccctaatgaggggagtgactactgttgttgatgttggaagttacttccctggggcctcagctgagaaaacgtggcaagattttgcagaaatctataaatgggctcactctatggaaaaatgattttgagagtatgcttattcttcccaatgcccacatggtctcgtgtttccgatcttattagtgaacatggtcgatcgctaagtcagtggatccatctaggtggtgttaaagctttccttgatgggtctctgggttcttcaagcgcgttgttccatgagccttatgagggtgatccggataattatggtctccaaatgacagatttagacagcctacttaatagaacactagaatctgacaaatctggactccaggttgccatacatgcaattggggataaagctaatgacatactactggatatggttgacaagattgttgatttaaatggagcgaaggaccgtagattccggactcactctgtttagtagaatctgaattgaatatctgcatttggaatcagatcgaacatgcccaacatctggctccaggtgcagcaaaccgctttggcaagcatggtaccattgcatccgtgcagccagatcatctactagatgatgccgaccatgcttggagcaagattggggtggaaaggtctgagcgaagctcctacacatttcgatcactgttagatggcggtgcgcagctagcttttggttctgactggcctatttcagacatcaaccccttgcaagctatccgatccgcagtgttccgcaagcctcctggatgggaggtcccctggatccctgcggagcgcttgaccctggatgaatcactgaaagcgcacacgatgtctgctgcctacgcctgcttcctggaccacgccgtgggcagcctttctgaagggaaatacgccgattttgtggtggtaccttctacatcgtgggacgaattctccagcgatttgccggggcatgtcctggcgacgtacgtgagcggcaggcaagcttatccatgacagatagcagttgtgtaagtgttggagaccaaaaagagcagcgcggacagtccggccctgaggccggaaggccggacgatccgcggtccggacagtccgcggtgatggcgcggacggtctgcgcgtgcgcagagtcagttaggatttctagtttctcgcgggatttgttacctaaaaccgcgggattaactcggaaatctgttggaagcggatccagacctcccctttatatcgatgaagggctacggccgattgaactccccaacaatcgaacaaatcaagtctatttctcgtttttaccttacgcattaggaatagttctagtctagttctagtttagcctctcaatctccaaattcttcgcctctcttcgactctacgtcgattagaggagtctaggtcggcctgccgtgcctagacaacacctaggatctcttctccccgacggggtccctcccgggagcgagatccaggcgccgccggcgac

SEQ ID NO: 35395 - DNA, 2510 bp, Zea Mays
cccaaccatgccattgccatcggccgcccagagcgctctcgtcgtggcggccgtcgccatagccaccgccaccgtcctcctccccttcccacggacgccgccgcgggaccgcttcgccgacatggtgctggccaacggcaccatctacaccgcggaccccgcccgacccttcgccgacgccatgtccgtccgcggcggccgcgtgctccgcgtcgggacctacgagtccgtcaaggtcgcgtcgacgtttcgctctgccccttcctccatctgataccctgccctgtatgctgtgtgttgcttgcaggagctcaagggccctcgcactcgtgagctgaatctcagtgggaacgtggtgctgccggggttcatcgactcccatgttcacttcatagacggtggattgcagcatgcgctagcttcctaatgctactctctgatactctgcagctagcgagggtgccacttcgtggggtcagaagcaaagatgacttggttgccagggtcaaggaagctgtcagaggtagtgtgctagtattttgttccaatgcattttcctgccacaaactactgctgtgatgcaaagacaggttcggttacctatgcccaaattcagttctgaatcatctcattctgtgtagtaacaatatccaaataaacaagagtagattctttgtcagagttatgctctgcttggtgttctccaattctacgtttgaatagacactatgcaatatgttctgcttgggtatggcaatctattcgaatgcccgtttctgtatatcatgctcccaacataagtttggttagtatctaactgcttctgttttatcaagttaacgggttagtgttgccaaaagctttctaccaatattactaagatctattttcctaacagataagcaacctgggcagtggatcttgggcggaggttggaatgatgattttgggggagatggtctcccggctgctgtttggctggatgatatctcacctgataatccagtgtgttttcaaacttgttctttgtaccgtgttttttgagaatccatgataacagggatagcaagtgacttgtttcgaatgcaggtctggctctctcgcatggatggtcatatgggagtagccaactcattagctatgaagattgctgggattgacaaaaacacaaacgatccaattggtggaactatcatacgaacaactgaaggagaaatctataaatgggctcactctatggaaaaatgattttgagagtatgcttattcttcccaatgcccacatggtctcgtgtttccgatcttattagtgaacatggtcgatcgctaagtcagtggatccatctaggtggtgttaaagctttccttgatgggtctctgggttcttcaagcgcgttgttccatgagccttatgagggtgatccggataattatggtctccaaatgacagatttagacagcctacttaatagaacactagaatctgacaaatctggactccaggttgccatacatgcaattggggataaagctaatgacatactactggatatggttgacaagattgttgatttaaatggagcgaaggaccgtagattccggatcgaacatgcccaacatctggctccaggtgcagcaaaccgctttggcaagcatggtaccattgcatccgtgcagccagatcatctactagatgatgccgaccatgcttggagcaagattggggtggaaagatttcagacatcaaccccttgcaagctatccgatccgcagtgttccgcaagcctcctggatgggaggtcccctggatccctgcggagcgcttgaccctggatgaatcactgaaagcgcacacgatgtctgctgcctacgcctgcttcctggaccacgccgtgggcagcctttctgaagggaaatacgccgattttgtggtggtaccttctacatcgtgggacgaattctccagcgatttgccggggcatgtcctggcgacgtacgtgagcggcaggcaagcttatccatgacagatagcagttgtgtaagtgttggagaccaaaaagagcagcgcggacagtccggccctgaggccggaaggccggacgatccgcggtccggacagtccgcggtgatggcgcggacggtctgcgcgtgcgcagagtcagttaggatttctagtttctcgcgggatttgttacctaaaaccgcgggattaactcggaaatctgttggaagcggatccagacctcccctttatatcgatgaagggctacggccgattgaactccccaacaatcgaacaaatcaagtctatttctcgtttttaccttacgcattaggaatagttctagtctagttctagtttagcctctcaatctccaaattcttcgcctctcttcgactctacgtcgattagaggagtctaggtcggcctgccgtgcctagacaacacctaggatctcttctccccgacggggtccctcccgggagcgagatccaggcgccgccggcgac

SEQ ID NO: 35396 - DNA, 2222 bp, Zea Mays
catttcccaaccatgccattgccatcggccgcccagagcgctctcgtcgtggcggccgtcgccatagccaccgccaccgtcctcctccccttcccacggacgccgccgcgggaccgcttcgccgacatggtgctggccaacggcaccatctacaccgcggaccccgcccgacccttcgccgacgccatgtccgtccgcggcggccgcgtgctccgcgtcgggacctacgagtccgtcaaggtcgcgtcgacgtttcgctctgccccttcctccatctgataccctgccctgtatgctgtgtgttgcttgcaggagctcaagggccctcgcactcgtgagctgaatctcagtgggaacgtggtgctgccggggttcatcgactcccatgttcacttcatagacggtggattgcagcatgcgctagcttcctaatgctactctctgatactctgcagctagcgagggtgccacttcgtggggtcagaagcaaagatgacttggttgccagggtcaaggaagctgtcagagtaacaatatccaaataaacaagagtagattctttgtcagagttatgctctgcttggtgttctccaattctacgtttgaatagacactatgcaatatgttctgcttgggtatggcaatctattcgaatgcccgtttctgtatatcatgctcccaacataagtttgataagcaacctgggcagtggatcttgggcggaggttggaatgatgattttgggggagatggtctcccggctgctgtttggctggatgatatctcacctgataatccagtctggctctctcgcatggatggtcatatgggagtagccaactcattagctatgaagattgctgggattgacaaaaacacaaacgatccaattggtggaactatcatacgaacaactgaaggagaaatctataaatgggctcactctatggaaaaatgattttgagagatcttattagtgaacatggtcgatcgctaagtcagtggatccatctaggtggtgttaaagctttccttgatgggtctctgggttcttcaagcgcgttgttccatgagccttatgagggtgatccggataattatggtctccaaatgacagatttagacagcctacttaatagaacactagaatctgacaaatctggactccaggttgccatacatgcaattggggataaagctaatgacatactactggatatggttgacaagattgttgatttaaatggagcgaaggaccgtagattccggatcgaacatgcccaacatctggctccaggtgcagcaaaccgctttggcaagcatggtaccattgcatccgtgcagccagatcatctactagatgatgccgaccatgcttggagcaagattggggtggaaaggtctgagcgaagctcctacacatttcgatcactgttagatggcgatttcagacatcaaccccttgcaagctatccgatccgcagtgttccgcaagcctcctggatgggaggtcccctggatccctgcggagcgcttgaccctggatgaatcactgaaagcgcacacgatgtctgctgcctacgcctgcttcctggaccacgccgtgggcagcctttctgaagggaaatacgccgattttgtggtggtaccttctacatcgtgggacgaattctccagcgatttgccggggcatgtcctggcgacgtacgtgagcggcaggcaagcttatccatgacagatagcagttgtgtaagtgttggagaccaaaaagagcagcgcggacagtccggccctgaggccggaaggccggacgatccgcggtccggacagtccgcggtgatggcgcggacggtctgcgcgtgcgcagagtcagttaggatttctagtttctcgcgggatttgttacctaaaaccgcgggattaactcggaaatctgttggaagcggatccagacctcccctttatatcgatgaagggctacggccgattgaactccccaacaatcgaacaaatcaagtctatttctcgtttttaccttacgcattaggaatagttctagtctagttctagtttagcctctcaatctccaaattcttcgcctctcttcgactctacgtcgattagaggagtctaggtcggcctgccgtgcctagacaacacctaggatctcttctccccgacggggtccctcccgggagcgagatccaggcgccgccggcgac

SEQ ID NO: 35397 - DNA, 2161 bp, Zea Mays
cccatttcccaaccatgccattgccatcggccgcccagagcgctctcgtcgtggcggccgtcgccatagccaccgccaccgtcctcctccccttcccacggacgccgccgcgggaccgcttcgccgacatggtgctggccaacggcaccatctacaccgcggaccccgcccgacccttcgccgacgccatgtccgtccgcggcggccgcgtgctccgcgtcgggacctacgagtccgtcaaggagctcaagggccctcgcactcgtgagctgaatctcagtgggaacgtggtgctgccggggttcatcgactcccatgttcacttcatagacggtggattgcagctagcgagggtgccacttcgtggggtcagaagcaaagatgacttggttgccagggtcaaggaagctgtcagagataagcaacctgggcagtggatcttgggcggaggttggaatgatgattttgggggagatggtctcccggctgctgtttggctggatgatatctcacctgataatccagtctggctctctcgcatggatggtcatatgggagtagccaactcattagctatgaagattgctgggattgacaaaaacacaaacgatccaattggtggaactatcatacgaacaactgaaggagagcctactggtcttctagttaatactgctatgaaacccatatttgatgtcattcaaaatgtttctaaccatgaaagaagagaggctcttcttagagcaagtagacatgccctaatgaggggagtgactactgttgttgatgttggaagttacttccctggggcctcagctgagaaaacgtggcaagattttgcaggtattctgtaataccttcgcttgcattgcatggacaagaattagaaggattcacttgtcttgtttttatctatgaccttatttgtactcctggcatactgacacaagatcttattagtgaacatggtcgatcgctaagtcagtggatccatctaggtggtgttaaagctttccttgatgggtctctgggttcttcaagcgcgttgttccatgagccttatgagggtgatccggataattatggtctccaaatgacagatttagacagcctacttaatagaacactagaatctgacaaatctggactccaggttgccatacatgcaattggggataaagctaatgacatactactggatatggttgacaagattgttgatttaaatggagcgaaggaccgtagattccggatcgaacatgcccaacatctggctccaggtgcagcaaaccgctttggcaagcatggtaccattgcatccgtgcagccagatcatctactagatgatgccgaccatgcttggagcaagattggggtggaaagatttcagacatcaaccccttgcaagctatccgatccgcagtgttccgcaagcctcctggatgggaggtcccctggatccctgcggagcgcttgaccctggatgaatcactgaaagcgcacacgatgtctgctgcctacgcctgcttcctggaccacgccgtgggcagcctttctgaagggaaatacgccgattttgtggtggtaccttctacatcgtgggacgaattctccagcgatttgccggggcatgtcctggcgacgtacgtgagcggcaggcaagcttatccatgacagatagcagttgtgtaagtgttggagaccaaaaagagcagcgcggacagtccggccctgaggccggaaggccggacgatccgcggtccggacagtccgcggtgatggcgcggacggtctgcgcgtgcgcagagtcagttaggatttctagtttctcgcgggatttgttacctaaaaccgcgggattaactcggaaatctgttggaagcggatccagacctcccctttatatcgatgaagggctacggccgattgaactccccaacaatcgaacaaatcaagtctatttctcgtttttaccttacgcattaggaatagttctagtctagttctagtttagcctctcaatctccaaattcttcgcctctcttcgactctacgtcgattagaggagtctaggtcggcctgccgtgcctagacaacacctaggatctcttctccccgacggggtccctcccgggagcgagatccaggcgccgccggcgac

SEQ ID NO: 35398 - DNA, 2233 bp, Zea Mays
cccatttcccaaccatgccattgccatcggccgcccagagcgctctcgtcgtggcggccgtcgccatagccaccgccaccgtcctcctccccttcccacggacgccgccgcgggaccgcttcgccgacatggtgctggccaacggcaccatctacaccgcggaccccgcccgacccttcgccgacgccatgtccgtccgcggcggccgcgtgctccgcgtcgggacctacgagtccgtcaaggagctcaagggccctcgcactcgtgagctgaatctcagtgggaacgtggtgctgccggggttcatcgactcccatgttcacttcatagacggtggattgcagctagcgagggtgccacttcgtggggtcagaagcaaagatgacttggttgccagggtcaaggaagctgtcagagataagcaacctgggcagtggatcttgggcggaggttggaatgatgattttgggggagatggtctcccggctgctgtttggctggatgatatctcacctgataatccagtctggctctctcgcatggatggtcatatgggagtagccaactcattagctatgaagattgctgggattgacaaaaacacaaacgatccaattggtggaactatcatacgaacaactgaaggagagcctactggtcttctagttaatactgctatgaaacccatatttgatgtcattcaaaatgtttctaaccatgaaagaagagaggctcttcttagagcaagtagacatgccctaatgaggggagtgactactgttgttgatgttggaagttacttccctggggcctcagctgagaaaacgtggcaagattttgcaggtattctgtaataccttcgcttgcattgcatggacaagaattagaaggattcacttgtcttgtttttatctatgaccttatttgtactcctggcatactgacacaagatcttattagtgaacatggtcgatcgctaagtcagtggatccatctaggtggtgttaaagctttccttgatgggtctctgggttcttcaagcgcgttgttccatgagccttatgagggtgatccggataattatggtctccaaatgacagatttagacagcctacttaatagaacactagaatctgacaaatctggactccaggttgccatacatgcaattggggataaagctaatgacatactactggatatggttgacaagattgttgatttaaatggagcgaaggaccgtagattccggatcgaacatgcccaacatctggctccaggtgcagcaaaccgctttggcaagcatggtaccattgcatccgtgcagatcatctactagatgatgccgaccatgcttggagcaagattggggtggaaaggtctgagcgaagctcctacacatttcgatcactgttagatggcggtgcgcagctagcttttggttctgactggcctatttcagacatcaaccccttgcaagctatccgatccgcagtgttccgcaagcctcctggatgggaggtcccctggatccctgcggagcgcttgaccctggatgaatcactgaaagcgcacacgatgtctgctgcctacgcctgcttcctggaccacgccgtgggcagcctttctgaagggaaatacgccgattttgtggtggtaccttctacatcgtgggacgaattctccagcgatttgccggggcatgtcctggcgacgtacgtgagcggcaggcaagcttatccatgacagatagcagttgtgtaagtgttggagaccaaaaagagcagcgcggacagtccggccctgaggccggaaggccggacgatccgcggtccggacagtccgcggtgatggcgcggacggtctgcgcgtgcgcagagtcagttaggatttctagtttctcgcgggatttgttacctaaaaccgcgggattaactcggaaatctgttggaagcggatccagacctcccctttatatcgatgaagggctacggccgattgaactccccaacaatcgaacaaatcaagtctatttctcgtttttaccttacgcattaggaatagttctagtctagttctagtttagcctctcaatctccaaattcttcgcctctcttcgactctacgtcgattagaggagtctaggtcggcctgccgtgcctagacaacacctaggatctcttctccccgacggggtccctcccgggagcgagatccaggcgccgccggcgac

SEQ ID NO: 35399 - DNA, 2758 bp, Zea Mays
cccatttcccaaccatgccattgccatcggccgcccagagcgctctcgtcgtggcggccgtcgccatagccaccgccaccgtcctcctccccttcccacggacgccgccgcgggaccgcttcgccgacatggtgctggccaacggcaccatctacaccgcggaccccgcccgacccttcgccgacgccatgtccgtccgcggcggccgcgtgctccgcgtcgggacctacgagtccgtcaaggtcgcgtcgacgtttcgctctgccccttcctccatctgataccctgccctgtatgctgtgtgttgcttgcaggagctcaagggccctcgcactcgtgagctgaatctcagtgggaacgtggtgctgccggggttcatcgactcccatgttcacttcatagacggtggattgcagctagcgagggtgccacttcgtggggtcagaagcaaagatgacttggttgccagggtcaaggaagctgtcagaggtagtgtgctagtattttgttccaatgcattttcctgccacaaactactgctgtgatgcaaagacaggttcggttacctatgcccaaattcagttctgaatcatctcattctgtgtagtaacaatatccaaataaacaagagtagattctttgtcagagttatgctctgcttggtgttctccaattctacgtttgaatagacactatgcaatatgttctgcttgggtatggcaatctattcgaatgcccgtttctgtatatcatgctcccaacataagtttggttagtatctaactgcttctgttttatcaagttaacgggttagtgttgccaaaagctttctaccaatattactaagatctattttcctaacagataagcaacctgggcagtggatcttgggcggaggttggaatgatgattttgggggagatggtctcccggctgctgtttggctggatgatatctcacctgataatccagtctggctctctcgcatggatggtcatatgggagtagccaactcattagctatgaagattgctgggattgacaaaaacacaaacgatccaattggtggaactatcatacgaacaactgaaggagagaggctcttcttagagcaagtagacatgccctaatgaggggagtgactactgttgttgatgttggaagttacttccctggggcctcagctgagaaaacgtggcaagattttgcaggtattctgtaataccttcgcttgcattgcatggacaagaattagaaggattcacttgtcttgtttttatctatgaccttatttgtactcctggcatactgacacaagtattgataccactacagaaatctataaatgggctcactctatggaaaaatgattttgagagtatgcttattcttcccaatgcccacatggtctcgtgtttccgatcttattagtgaacatggtcgatcgctaagtcagtggatccatctaggtggtgttaaagctttccttgatgggtctctgggttcttcaagcgcgttgttccatgagccttatgagggtgatccggataattatggtctccaaatgacagatttagacagcctacttaatagaacactagaatctgacaaatctggactccaggttgccatacatgcaattggggataaagctaatgacatactactggatatggttgacaagattgttgatttaaatggagcgaaggaccgtagattccggactcactctgtttagtagaatctgaattgaatatctgcatttggaatcagatcgaacatgcccaacatctggctccaggtgcagcaaaccgctttggcaagcatggtaccattgcatccgtgcagccagatcatctactagatgatgccgaccatgcttggagcaagattggggtggaaaggtctgagcgaagctcctacacatttcgatcactgttagatggcggtgcgcagctagcttttggttctgactggcctatttcagacatcaaccccttgcaagctatccgatccgcagtgttccgcaagcctcctggatgggaggtcccctggatccctgcggagcgcttgaccctggatgaatcactgaaagcgcacacgatgtctgctgcctacgcctgcttcctggaccacgccgtgggcagcctttctgaagggaaatacgccgattttgtggtggtaccttctacatcgtgggacgaattctccagcgatttgccggggcatgtcctggcgacgtacgtgagcggcaggcaagcttatccatgacagatagcagttgtgtaagtgttggagaccaaaaagagcagcgcggacagtccggccctgaggccggaaggccggacgatccgcggtccggacagtccgcggtgatggcgcggacggtctgcgcgtgcgcagagtcagttaggatttctagtttctcgcgggatttgttacctaaaaccgcgggattaactcggaaatctgttggaagcggatccagacctcccctttatatcgatgaagggctacggccgattgaactccccaacaatcgaacaaatcaagtctatttctcgtttttaccttacgcattaggaatagttctagtctagttctagtttagcctctcaatctccaaattcttcgcctctcttcgactctacgtcgattagaggagtctaggtcggcctgccgtgcctagacaacacctaggatctcttctccccgacggggtccctcccgggagcgagatccaggcgccgccggcgac

SEQ ID NO: 35400 - DNA, 2790 bp, Zea Mays
cccatttcccaaccatgccattgccatcggccgcccagagcgctctcgtcgtggcggccgtcgccatagccaccgccaccgtcctcctccccttcccacggacgccgccgcgggaccgcttcgccgacatggtgctggccaacggcaccatctacaccgcggaccccgcccgacccttcgccgacgccatgtccgtccgcggcggccgcgtgctccgcgtcgggacctacgagtccgtcaaggtcgcgtcgacgtttcgctctgccccttcctccatctgataccctgccctgtatgctgtgtgttgcttgcaggagctcaagggccctcgcactcgtgagctgaatctcagtgggaacgtggtgctgccggggttcatcgactcccatgttcacttcatagacggtggattgcagcatgcgctagcttcctaatgctactctctgatactctgcagctagcgagggtgccacttcgtggggtcagaagcaaagatgacttggttgccagggtcaaggaagctgtcagaggtagtgtgctagtattttgttccaatgcattttcctgccacaaactactgctgtgatgcaaagacaggttcggttacctatgcccaaattcagttctgaatcatctcattctgtgtagtaacaatatccaaataaacaagagtagattctttgtcagagttatgctctgcttggtgttctccaattctacgtttgaatagacactatgcaatatgttctgcttgggtatggcaatctattcgaatgcccgtttctgtatatcatgctcccaacataagtttggttagtatctaactgcttctgttttatcaagttaacgggttagtgttgccaaaagctttctaccaatattactaagatctattttcctaacagataagcaacctgggcagtggatcttgggcggaggttggaatgatgattttgggggagatggtctcccggctgctgtttggctggatgatatctcacctgataatccagtctggctctctcgcatggatggtcatatgggagtagccaactcattagctatgaagattgctgggattgacaaaaacacaaacgatccaattggtggaactatcatacgaacaactgaaggagagcctactggtcttctagttaatactgctatgaaacccatatttgatgtcattcaaaatgtttctaaccatgaaagaagagaggctcttcttagagcaagtagacatgccctaatgaggggagtgactactgttgttgatgttggaagttacttccctggggcctcagctgagaaaacgtggcaagattttgcagaattagaaggattcacttgtcttgtttttatctatgaccttatttgtactcctggcatactgacacaagtattgataccactacagaaatctataaatgggctcactctatggaaaaatgattttgagagtatgcttattcttcccaatgcccacatggtctcgtgtttccgatcttattagtgaacatggtcgatcgctaagtcagtggatccatctaggtggtgttaaagctttccttgatgggtctctgggttcttcaagcgcgttgttccatgagccttatgagggtgatccggataattatggtctccaaatgacagatttagacagcctacttaatagaacactagaatctgacaaatctggactccaggttgccatacatgcaattggggataaagctaatgacatactactggatatggttgacaagattgttgatttaaatggagcgaaggaccgtagattccggatcgaacatgcccaacatctggctccaggtgcagcaaaccgctttggcaagcatggtaccattgcatccgtgcagccagatcatctactagatgatgccgaccatgcttggagcaagattggggtggaaaggtctgagcgaagctcctacacatttcgatcactgttagatggcggtgcgcagctagcttttggttctgactggcctatttcagacatcaaccccttgcaagctatccgatccgcagtgttccgcaagcctcctggatgggaggtcccctggatccctgcggagcgcttgaccctggatgaatcactgaaagcgcacacgatgtctgctgcctacgcctgcttcctggaccacgccgtgggcagcctttctgaagggaaatacgccgattttgtggtggtaccttctacatcgtgggacgaattctccagcgatttgccggggcatgtcctggcgacgtacgtgagcggcaggcaagcttatccatgacagatagcagttgtgtaagtgttggagaccaaaaagagcagcgcggacagtccggccctgaggccggaaggccggacgatccgcggtccggacagtccgcggtgatggcgcggacggtctgcgcgtgcgcagagtcagttaggatttctagtttctcgcgggatttgttacctaaaaccgcgggattaactcggaaatctgttggaagcggatccagacctcccctttatatcgatgaagggctacggccgattgaactccccaacaatcgaacaaatcaagtctatttctcgtttttaccttacgcattaggaatagttctagtctagttctagtttagcctctcaatctccaaattcttcgcctctcttcgactctacgtcgattagaggagtctaggtcggcctgccgtgcctagacaacacctaggatctcttctccccgacggggtccctcccgggagcgagatccaggcgccgccggcgac

SEQ ID NO: 35401 - DNA, 2637 bp, Zea Mays
ttcccatttcccaaccatgccattgccatcggccgcccagagcgctctcgtcgtggcggccgtcgccatagccaccgccaccgtcctcctccccttcccacgtacgttacgcagccctctcctctcttctgttcccctcgcgcgcgacgccaaaggctgacccgtccgcctctcctcccattcgcagggacgccgccgcgggaccgcttcgccgacatggtgctggccaacggcaccatctacaccgcggaccccgcccgacccttcgccgacgccatgtccgtccgcggcggccgcgtgctccgcgtcgggacctacgagtccgtcaaggtcgcgtcgacgtttcgctctgccccttcctccatctgataccctgccctgtatgctgtgtgttgcttgcaggagctcaagggccctcgcactcgtgagctgaatctcagtgggaacgtggtgctgccggggttcatcgactcccatgttcacttcatagacggtggattgcagcatgcgctagcttcctaatgctactctctgatactctgcagctagcgagggtgccacttcgtggggtcagaagcaaagatgacttggttgccagggtcaaggaagctgtcagaggtagtgtgctagtattttgttccaatgcattttcctgccacaaactactgctgtgatgcaaagacaggttcggttacctatgcccaaattcagttctgaatcatctcattctgtgtagtaacaatatccaaataaacaagagtagattctttgtcagagttatgctctgcttggtgttctccaattctacgtttgaatagacactatgcaatatgttctgcttgggtatggcaatctattcgaatgcccgtttctgtatatcatgctcccaacataagtttggttagtatctaactgcttctgttttatcaagttaacgggttagtgttgccaaaagctttctaccaatattactaagatctattttcctaacagataagcaacctgggcagtggatcttgggcggaggttggaatgatgattttgggggagatggtctcccggctgctgtttggctggatgatatctcacctgataatccagtctggctctctcgcatggatggtcatatgggagtagccaactcattagctatgaagattgctgggattgacaaaaacacaaacgatccaattggtggaactatcatacgaacaactgaaggagagaggctcttcttagagcaagtagacatgccctaatgaggggagtgactactgttgttgatgttggaagttacttccctggggcctcagctgagaaaacgtggcaagattttgcagaaatctataaatgggctcactctatggaaaaatgattttgagagtatgcttattcttcccaatgcccacatggtctcgtgtttccgatcttattagtgaacatggtcgatcgctaagtcagtggatccatctaggtggtgttaaagctttccttgatgggtctctgggttcttcaagcgcgttgttccatgagccttatgagggtgatccggataattatggtctccaaatgacagatttagacagcctacttaatagaacactagaatctgacaaatctggactccaggttgccatacatgcaattggggataaagctaatgacatactactggatatggttgacaagattgttgatttaaatggagcgaaggaccgtagattccggatcgaacatgcccaacatctggctccaggtgcagcaaaccgctttggcaagcatggtaccattgcatccgtgcagccagatcatctactagatgatgccgaccatgcttggagcaagattggggtggaaagatttcagacatcaaccccttgcaagctatccgatccgcagtgttccgcaagcctcctggatgggaggtcccctggatccctgcggagcgcttgaccctggatgaatcactgaaagcgcacacgatgtctgctgcctacgcctgcttcctggaccacgccgtgggcagcctttctgaagggaaatacgccgattttgtggtggtaccttctacatcgtgggacgaattctccagcgatttgccggggcatgtcctggcgacgtacgtgagcggcaggcaagcttatccatgacagatagcagttgtgtaagtgttggagaccaaaaagagcagcgcggacagtccggccctgaggccggaaggccggacgatccgcggtccggacagtccgcggtgatggcgcggacggtctgcgcgtgcgcagagtcagttaggatttctagtttctcgcgggatttgttacctaaaaccgcgggattaactcggaaatctgttggaagcggatccagacctcccctttatatcgatgaagggctacggccgattgaactccccaacaatcgaacaaatcaagtctatttctcgtttttaccttacgcattaggaatagttctagtctagttctagtttagcctctcaatctccaaattcttcgcctctcttcgactctacgtcgattagaggagtctaggtcggcctgccgtgcctagacaacacctaggatctcttctccccgacggggtccctcccgggagcgagatccaggcgccgccggcgac

SEQ ID NO: 35402 - DNA, 2560 bp, Zea Mays
ataccagttcccatttcccaaccatgccattgccatcggccgcccagagcgctctcgtcgtggcggccgtcgccatagccaccgccaccgtcctcctccccttcccacggacgccgccgcgggaccgcttcgccgacatggtgctggccaacggcaccatctacaccgcggaccccgcccgacccttcgccgacgccatgtccgtccgcggcggccgcgtgctccgcgtcgggacctacgagagctcaagggccctcgcactcgtgagctgaatctcagtgggaacgtggtgctgccggggttcatcgactcccatgttcacttcatagacggtggattgcagctagcgagggtgccacttcgtggggtcagaagcaaagatgacttggttgccagggtcaaggaagctgtcagagataagcaacctgggcagtggatcttgggcggaggttggaatgatgattttgggggagatggtctcccggctgctgtttggctggatgatatctcacctgataatccagtctggctctctcgcatggatggtcatatgggagtagccaactcattagctatgaagattgctgggattgacaaaaacacaaacgatccaattggtggaactatcatacgaacaactgaaggaggtaacacaactaattaacatgggtcttagccctctgattgtaacttaatcagtgaagtgcacttgaaccaaactcaatcacttcagtgagcatttgaaagctatttacttttaaacatagatatgttctcgatgtaaaaataaatcaagaaacttgaaagcaaactgcatggtagctcatccgttgatctaataagtagctacaatgatcagaaggacctaatcataagctttgtatacagtttgtaacaatattcttgtactttatgccttatggtactgcaaaggttcattgaatcttgtggttaggaatgaccaactatctggcctctgttattacttgtagagcctactggtcttctagttaatactgctatgaaacccatatttgatgtcattcaaaatgtttctaaccatgaaagaagagaggctcttcttagagcaagtagacatgccctaatgaggggagtgactactgttgttgatgttggaagttacttccctggggcctcagctgagaaaacgtggcaagattttgcagaaatctataaatgggctcactctatggaaaaatgattttgagagtatgcttattcttcccaatgcccacatggtctcgtgtttccgatcttattagtgaacatggtcgatcgctaagtcagtggatccatctaggtggtgttaaagctttccttgatgggtctctgggttcttcaagcgcgttgttccatgagccttatgagggtgatccggataattatggtctccaaatgacagatttagacagcctacttaatagaacactagaatctgacaaatctggactccaggttgccatacatgcaattggggataaagctaatgacatactactggatatggttgacaagattgttgatttaaatggagcgaaggaccgtagattccggatcgaacatgcccaacatctggctccaggtgcagcaaaccgctttggcaagcatggtaccattgcatccgtgcagccagatcatctactagatgatgccgaccatgcttggagcaagattggggtggaaaggtctgagcgaagctcctacacatttcgatcactgttagatggcggtgcgcagctagcttttggttctgactggcctatttcagacatcaaccccttgcaagctatccgatccgcagtgttccgcaagcctcctggatgggaggtcccctggatccctgcggagcgcttgaccctggatgaatcactgaaagcgcacacgatgtctgctgcctacgcctgcttcctggaccacgccgtgggcagcctttctgaagggaaatacgccgattttgtggtggtaccttctacatcgtgggacgaattctccagcgatttgccggggcatgtcctggcgacgtacgtgagcggcaggcaagcttatccatgacagatagcagttgtgtaagtgttggagaccaaaaagagcagcgcggacagtccggccctgaggccggaaggccggacgatccgcggtccggacagtccgcggtgatggcgcggacggtctgcgcgtgcgcagagtcagttaggatttctagtttctcgcgggatttgttacctaaaaccgcgggattaactcggaaatctgttggaagcggatccagacctcccctttatatcgatgaagggctacggccgattgaactccccaacaatcgaacaaatcaagtctatttctcgtttttaccttacgcattaggaatagttctagtctagttctagtttagcctctcaatctccaaattcttcgcctctcttcgactctacgtcgattagaggagtctaggtcggcctgccgtgcctagacaacacctaggatctcttctccccgacggggtccctcccgggagcgagatccaggcgccgccggcgac

SEQ ID NO: 35403 - DNA, 2187 bp, Zea Mays
ataccagttcccatttcccaaccatgccattgccatcggccgcccagagcgctctcgtcgtggcggccgtcgccatagccaccgccaccgtcctcctccccttcccacggacgccgccgcgggaccgcttcgccgacatggtgctggccaacggcaccatctacaccgcggaccccgcccgacccttcgccgacgccatgtccgtccgcggcggccgcgtgctccgcgtcgggacctacgagtccgtcaaggagctcaagggccctcgcactcgtgagctgaatctcagtgggaacgtggtgctgccggggttcatcgactcccatgttcacttcatagacggtggattgcagcatgcgctagcttcctaatgctactctctgatactctgcagctagcgagggtgccacttcgtggggtcagaagcaaagatgacttggttgccagggtcaaggaagctgtcagagataagcaacctgggcagtggatcttgggcggaggttggaatgatgattttgggggagatggtctcccggctgctgtttggctggatgatatctcacctgataatccagtctggctctctcgcatggatggtcatatgggagtagccaactcattagctatgaagattgctgggattgacaaaaacacaaacgatccaattggtggaactatcatacgaacaactgaaggagagaggctcttcttagagcaagtagacatgccctaatgaggggagtgactactgttgttgatgttggaagttacttccctggggcctcagctgagaaaacgtggcaagattttgcagaaatctataaatgggctcactctatggaaaaatgattttgagagtatgcttattcttcccaatgcccacatggtctcgtgtttccgatcttattagtgaacatggtcgatcgctaagtcagtggatccatctaggtggtgttaaagctttccttgatgggtctctgggttcttcaagcgcgttgttccatgagccttatgagggtgatccggataattatggtctccaaatgacagatttagacagcctacttaatagaacactagaatctgacaaatctggactccaggttgccatacatgcaattggggataaagctaatgacatactactggatatggttgacaagattgttgatttaaatggagcgaaggaccgtagattccggatcgaacatgcccaacatctggctccaggtgcagcaaaccgctttggcaagcatggtaccattgcatccgtgcagccagatcatctactagatgatgccgaccatgcttggagcaagattggggtggaaaggtctgagcgaagctcctacacatttcgatcactgttagatggcggtgcgcagctagcttttggttctgactggcctatttcagacatcaaccccttgcaagctatccgatccgcagtgttccgcaagcctcctggatgggaggtcccctggatccctgcggagcgcttgaccctggatgaatcactgaaagcgcacacgatgtctgctgcctacgcctgcttcctggaccacgccgtgggcagcctttctgaagggaaatacgccgattttgtggtggtaccttctacatcgtgggacgaattctccagcgatttgccggggcatgtcctggcgacgtacgtgagcggcaggcaagcttatccatgacagatagcagttgtgtaagtgttggagaccaaaaagagcagcgcggacagtccggccctgaggccggaaggccggacgatccgcggtccggacagtccgcggtgatggcgcggacggtctgcgcgtgcgcagagtcagttaggatttctagtttctcgcgggatttgttacctaaaaccgcgggattaactcggaaatctgttggaagcggatccagacctcccctttatatcgatgaagggctacggccgattgaactccccaacaatcgaacaaatcaagtctatttctcgtttttaccttacgcattaggaatagttctagtctagttctagtttagcctctcaatctccaaattcttcgcctctcttcgactctacgtcgattagaggagtctaggtcggcctgccgtgcctagacaacacctaggatctcttctccccgacggggtccctcccgggagcgagatccaggcgccgccggcgac

SEQ ID NO: 35404 - DNA, 2690 bp, Zea Mays
gataccagttcccatttcccaaccatgccattgccatcggccgcccagagcgctctcgtcgtggcggccgtcgccatagccaccgccaccgtcctcctccccttcccacggacgccgccgcgggaccgcttcgccgacatggtgctggccaacggcaccatctacaccgcggaccccgcccgacccttcgccgacgccatgtccgtccgcggcggccgcgtgctccgcgtcgggacctacgagtccgtcaaggagctcaagggccctcgcactcgtgagctgaatctcagtgggaacgtggtgctgccggggttcatcgactcccatgttcacttcatagacggtggattgcagcatgcgctagcttcctaatgctactctctgatactctgcagctagcgagggtgccacttcgtggggtcagaagcaaagatgacttggttgccagggtcaaggaagctgtcagaggtagtgtgctagtattttgttccaatgcattttcctgccacaaactactgctgtgatgcaaagacaggttcggttacctatgcccaaattcagttctgaatcatctcattctgtgtagtaacaatatccaaataaacaagagtagattctttgtcagagttatgctctgcttggtgttctccaattctacgtttgaatagacactatgcaatatgttctgcttgggtatggcaatctattcgaatgcccgtttctgtatatcatgctcccaacataagtttggttagtatctaactgcttctgttttatcaagttaacgggttagtgttgccaaaagctttctaccaatattactaagatctattttcctaacagataagcaacctgggcagtggatcttgggcggaggttggaatgatgattttgggggagatggtctcccggctgctgtttggctggatgatatctcacctgataatccagtctggctctctcgcatggatggtcatatgggagtagccaactcattagctatgaagattgctgggattgacaaaaacacaaacgatccaattggtggaactatcatacgaacaactgaaggagagcctactggtcttctagttaatactgctatgaaacccatatttgatgtcattcaaaatgtttctaaccatgaaagaagagaggctcttcttagagcaagtagacatgccctaatgaggggagtgactactgttgttgatgttggaagttacttccctggggcctcagctgagaaaacgtggcaagattttgcaggtattctgtaataccttcgcttgcattgcatggacaagaattagaaggattcacttgtcttgtttttatctatgaccttatttgtactcctggcatactgacacaagtattgataccactacagaaatctataaatgggctcactctatggaaaaatgattttgagagtatgcttattcttcccaatgcccacatggtctcgtgtttccgatcttattagtgaacatggtcgatcgctaagtcagtggatccatctaggtggtgttaaagctttccttgatgggtctctgggttcttcaagcgcgttgttccatgagccttatgagggtgatccggataattatggtctccaaatgacagatttagacagcctacttaatagaacactagaatctgacaaatctggactccaggttgccatacatgcaattggggataaagctaatgacatactactggatatggttgacaagattgttgatttaaatggagcgaaggaccgtagattccggatcgaacatgcccaacatctggctccaggtgcagcaaaccgctttggcaagcatggtaccattgcatccgtgcagccagatcatctactagatgatgccgaccatgcttggagcaagattggggtggaaagatttcagacatcaaccccttgcaagctatccgatccgcagtgttccgcaagcctcctggatgggaggtcccctggatccctgcggagcgcttgaccctggatgaatcactgaaagcgcacacgatgtctgctgcctacgcctgcttcctggaccacgccgtgggcagcctttctgaagggaaatacgccgattttgtggtggtaccttctacatcgtgggacgaattctccagcgatttgccggggcatgtcctggcgacgtacgtgagcggcaggcaagcttatccatgacagatagcagttgtgtaagtgttggagaccaaaaagagcagcgcggacagtccggccctgaggccggaaggccggacgatccgcggtccggacagtccgcggtgatggcgcggacggtctgcgcgtgcgcagagtcagttaggatttctagtttctcgcgggatttgttacctaaaaccgcgggattaactcggaaatctgttggaagcggatccagacctcccctttatatcgatgaagggctacggccgattgaactccccaacaatcgaacaaatcaagtctatttctcgtttttaccttacgcattaggaatagttctagtctagttctagtttagcctctcaatctccaaattcttcgcctctcttcgactctacgtcgattagaggagtctaggtcggcctgccgtgcctagacaacacctaggatctcttctccccgacggggtccctcccgggagcgagatccaggcgccgccggcgac

SEQ ID NO: 35405 - DNA, 1834 bp, Zea Mays
ggagataccagttcccatttcccaaccatgccattgccatcggccgcccagagcgctctcgtcgtggcggccgtcgccatagccaccgccaccgtcctcctccccttcccacggacgccgccgcgggaccgcttcgccgacatggtgctggccaacggcaccatctacaccgcggaccccgcccgacccttcgccgacgccatgtccgtccgcggcggccgcgtgctccgcgtcgggacctacgagtccgtcaaggtcgcgtcgacgtttcgctctgccccttcctccatctgataccctgccctgtatgctgtgtgttgcttgcaggagctcaagggccctcgcactcgtgagctgaatctcagtgggaacgtggtgctgccggggttcatcgactcccatgttcacttcatagacggtggattgcagctagcgagggtgccacttcgtggggtcagaagcaaagatgacttggttgccagggtcaaggaagctgtcagagataagcaacctgggcagtggatcttgggcggaggttggaatgatgattttgggggagatggtctcccggctgctgtttggctggatgatatctcacctgataatccagtctggctctctcgcatggatggtcatatgggagtagccaactcattagctatgaagattgctgggattgacaaaaacacaaacgatccaattggtggaactatcatacgaacaactgaaggagagcctactggtcttctagttaatactgctatgaaacccatatttgatgtcattcaaaatgtttctaaccatgaaagaagagaggctcttcttagagcaagtagacatgccctaatgaggggagtgactactgttgttgatgttggaagttacttccctggggcctcagctgagaaaacgtggcaagattttgcagatcatctactagatgatgccgaccatgcttggagcaagattggggtggaaaggtctgagcgaagctcctacacatttcgatcactgttagatggcggtgcgcagctagcttttggttctgactggcctatttcagacatcaaccccttgcaagctatccgatccgcagtgttccgcaagcctcctggatgggaggtcccctggatccctgcggagcgcttgaccctggatgaatcactgaaagcgcacacgatgtctgctgcctacgcctgcttcctggaccacgccgtgggcagcctttctgaagggaaatacgccgattttgtggtggtaccttctacatcgtgggacgaattctccagcgatttgccggggcatgtcctggcgacgtacgtgagcggcaggcaagcttatccatgacagatagcagttgtgtaagtgttggagaccaaaaagagcagcgcggacagtccggccctgaggccggaaggccggacgatccgcggtccggacagtccgcggtgatggcgcggacggtctgcgcgtgcgcagagtcagttaggatttctagtttctcgcgggatttgttacctaaaaccgcgggattaactcggaaatctgttggaagcggatccagacctcccctttatatcgatgaagggctacggccgattgaactccccaacaatcgaacaaatcaagtctatttctcgtttttaccttacgcattaggaatagttctagtctagttctagtttagcctctcaatctccaaattcttcgcctctcttcgactctacgtcgattagaggagtctaggtcggcctgccgtgcctagacaacacctaggatctcttctccccgacggggtccctcccgggagcgagatccaggcgccgccggcgac

SEQ ID NO: 35406 - DNA, 2542 bp, Zea Mays
ggagataccagttcccatttcccaaccatgccattgccatcggccgcccagagcgctctcgtcgtggcggccgtcgccatagccaccgccaccgtcctcctccccttcccacggacgccgccgcgggaccgcttcgccgacatggtgctggccaacggcaccatctacaccgcggaccccgcccgacccttcgccgacgccatgtccgtccgcggcggccgcgtgctccgcgtcgggacctacgagtccgtcaaggagctcaagggccctcgcactcgtgagctgaatctcagtgggaacgtggtgctgccggggttcatcgactcccatgttcacttcatagacggtggattgcagctagcgagggtgccacttcgtggggtcagaagcaaagatgacttggttgccagggtcaaggaagctgtcagagataagcaacctgggcagtggatcttgggcggaggttggaatgatgattttgggggagatggtctcccggctgctgtttggctggatgatatctcacctgataatccagtctggctctctcgcatggatggtcatatgggagtagccaactcattagctatgaagattgctgggattgacaaaaacacaaacgatccaattggtggaactatcatacgaacaactgaaggaggtaacacaactaattaacatgggtcttagccctctgattgtaacttaatcagtgaagtgcacttgaaccaaactcaatcacttcagtgagcatttgaaagctatttacttttaaacatagatatgttctcgatgtaaaaataaatcaagaaacttgaaagcaaactgcatggtagctcatccgttgatctaataagtagctacaatgatcagaaggacctaatcataagctttgtatacagtttgtaacaatattcttgtactttatgccttatggtactgcaaaggttcattgaatcttgtggttaggaatgaccaactatctggcctctgttattacttgtagagcctactggtcttctagttaatactgctatgaaacccatatttgatgtcattcaaaatgtttctaaccatgaaagaagagaggctcttcttagagcaagtagacatgccctaatgaggggagtgactactgttgttgatgttggaagttacttccctggggcctcagctgagaaaacgtggcaagattttgcagaaatctataaatgggctcactctatggaaaaatgattttgagagtatgcttattcttcccaatgcccacatggtctcgtgtttccgatcttattagtgaacatggtcgatcgctaagtcagtggatccatctaggtggtgttaaagctttccttgatgggtctctgggttcttcaagcgcgttgttccatgagccttatgagggtgatccggataattatggtctccaaatgacagatttagacagcctacttaatagaacactagaatctgacaaatctggactccaggttgccatacatgcaattggggataaagctaatgacatactactggatatggttgacaagattgttgatttaaatggagcgaaggaccgtagattccggatcgaacatgcccaacatctggctccaggtgcagcaaaccgctttggcaagcatggtaccattgcatccgtgcagccagatcatctactagatgatgccgaccatgcttggagcaagattggggtggaaaggtctgagcgaagctcctacacatttcgatcactgttagatggcgatttcagacatcaaccccttgcaagctatccgatccgcagtgttccgcaagcctcctggatgggaggtcccctggatccctgcggagcgcttgaccctggatgaatcactgaaagcgcacacgatgtctgctgcctacgcctgcttcctggaccacgccgtgggcagcctttctgaagggaaatacgccgattttgtggtggtaccttctacatcgtgggacgaattctccagcgatttgccggggcatgtcctggcgacgtacgtgagcggcaggcaagcttatccatgacagatagcagttgtgtaagtgttggagaccaaaaagagcagcgcggacagtccggccctgaggccggaaggccggacgatccgcggtccggacagtccgcggtgatggcgcggacggtctgcgcgtgcgcagagtcagttaggatttctagtttctcgcgggatttgttacctaaaaccgcgggattaactcggaaatctgttggaagcggatccagacctcccctttatatcgatgaagggctacggccgattgaactccccaacaatcgaacaaatcaagtctatttctcgtttttaccttacgcattaggaatagttctagtctagttctagtttagcctctcaatctccaaattcttcgcctctcttcgactctacgtcgattagaggagtctaggtcggcctgccgtgcctagacaacacctaggatctcttctccccgacggggtccctcccgggagcgagatccaggcgccgccggcgac

SEQ ID NO: 35407 - DNA, 2873 bp, Zea Mays
aggagataccagttcccatttcccaaccatgccattgccatcggccgcccagagcgctctcgtcgtggcggccgtcgccatagccaccgccaccgtcctcctccccttcccacggacgccgccgcgggaccgcttcgccgacatggtgctggccaacggcaccatctacaccgcggaccccgcccgacccttcgccgacgccatgtccgtccgcggcggccgcgtgctccgcgtcgggacctacgagtccgtcaaggagctcaagggccctcgcactcgtgagctgaatctcagtgggaacgtggtgctgccggggttcatcgactcccatgttcacttcatagacggtggattgcagcatgcgctagcttcctaatgctactctctgatactctgcagctagcgagggtgccacttcgtggggtcagaagcaaagatgacttggttgccagggtcaaggaagctgtcagagtaacaatatccaaataaacaagagtagattctttgtcagagttatgctctgcttggtgttctccaattctacgtttgaatagacactatgcaatatgttctgcttgggtatggcaatctattcgaatgcccgtttctgtatatcatgctcccaacataagtttggttagtatctaactgcttctgttttatcaagttaacgggttagtgttgccaaaagctttctaccaatattactaagatctattttcctaacagataagcaacctgggcagtggatcttgggcggaggttggaatgatgattttgggggagatggtctcccggctgctgtttggctggatgatatctcacctgataatccagtctggctctctcgcatggatggtcatatgggagtagccaactcattagctatgaagattgctgggattgacaaaaacacaaacgatccaattggtggaactatcatacgaacaactgaaggaggtaacacaactaattaacatgggtcttagccctctgattgtaacttaatcagtgaagtgcacttgaaccaaactcaatcacttcagtgagcatttgaaagctatttacttttaaacatagatatgttctcgatgtaaaaataaatcaagaaacttgaaagcaaactgcatggtagctcatccgttgatctaataagtagctacaatgatcagaaggacctaatcataagctttgtatacagtttgtaacaatattcttgtactttatgccttatggtactgcaaaggttcattgaatcttgtggttaggaatgaccaactatctggcctctgttattacttgtagagcctactggtcttctagttaatactgctatgaaacccatatttgatgtcattcaaaatgtttctaaccatgaaagaagagaggctcttcttagagcaagtagacatgccctaatgaggggagtgactactgttgttgatgttggaagttacttccctggggcctcagctgagaaaacgtggcaagattttgcagaaatctataaatgggctcactctatggaaaaatgattttgagagtatgcttattcttcccaatgcccacatggtctcgtgtttccgatcttattagtgaacatggtcgatcgctaagtcagtggatccatctaggtggtgttaaagctttccttgatgggtctctgggttcttcaagcgcgttgttccatgagccttatgagggtgatccggataattatggtctccaaatgacagatttagacagcctacttaatagaacactagaatctgacaaatctggactccaggttgccatacatgcaattggggataaagctaatgacatactactggatatggttgacaagattgttgatttaaatggagcgaaggaccgtagattccggatcgaacatgcccaacatctggctccaggtgcagcaaaccgctttggcaagcatggtaccattgcatccgtgcagccagatcatctactagatgatgccgaccatgcttggagcaagattggggtggaaaggtctgagcgaagctcctacacatttcgatcactgttagatggcggtgcgcagctagcttttggttctgactggcctatttcagacatcaaccccttgcaagctatccgatccgcagtgttccgcaagcctcctggatgggaggtcccctggatccctgcggagcgcttgaccctggatgaatcactgaaagcgcacacgatgtctgctgcctacgcctgcttcctggaccacgccgtgggcagcctttctgaagggaaatacgccgattttgtggtggtaccttctacatcgtgggacgaattctccagcgatttgccggggcatgtcctggcgacgtacgtgagcggcaggcaagcttatccatgacagatagcagttgtgtaagtgttggagaccaaaaagagcagcgcggacagtccggccctgaggccggaaggccggacgatccgcggtccggacagtccgcggtgatggcgcggacggtctgcgcgtgcgcagagtcagttaggatttctagtttctcgcgggatttgttacctaaaaccgcgggattaactcggaaatctgttggaagcggatccagacctcccctttatatcgatgaagggctacggccgattgaactccccaacaatcgaacaaatcaagtctatttctcgtttttaccttacgcattaggaatagttctagtctagttctagtttagcctctcaatctccaaattcttcgcctctcttcgactctacgtcgattagaggagtctaggtcggcctgccgtgcctagacaacacctaggatctcttctccccgacggggtccctcccgggagcgagatccaggcgccgccggcgac

SEQ ID NO: 35408 - DNA, 2220 bp, Zea Mays
aggagataccagttcccatttcccaaccatgccattgccatcggccgcccagagcgctctcgtcgtggcggccgtcgccatagccaccgccaccgtcctcctccccttcccacggacgccgccgcgggaccgcttcgccgacatggtgctggccaacggcaccatctacaccgcggaccccgcccgacccttcgccgacgccatgtccgtccgcggcggccgcgtgctccgcgtcgggacctacgagagctcaagggccctcgcactcgtgagctgaatctcagtgggaacgtggtgctgccggggttcatcgactcccatgttcacttcatagacggtggattgcagctagcgagggtgccacttcgtggggtcagaagcaaagatgacttggttgccagggtcaaggaagctgtcagagataagcaacctgggcagtggatcttgggcggaggttggaatgatgattttgggggagatggtctcccggctgctgtttggctggatgatatctcacctgataatccagtctggctctctcgcatggatggtcatatgggagtagccaactcattagctatgaagattgctgggattgacaaaaacacaaacgatccaattggtggaactatcatacgaacaactgaaggagagcctactggtcttctagttaatactgctatgaaacccatatttgatgtcattcaaaatgtttctaaccatgaaagaagagaggctcttcttagagcaagtagacatgccctaatgaggggagtgactactgttgttgatgttggaagttacttccctggggcctcagctgagaaaacgtggcaagattttgcagaaatctataaatgggctcactctatggaaaaatgattttgagagtatgcttattcttcccaatgcccacatggtctcgtgtttccgatcttattagtgaacatggtcgatcgctaagtcagtggatccatctaggtggtgttaaagctttccttgatgggtctctgggttcttcaagcgcgttgttccatgagccttatgagggtgatccggataattatggtctccaaatgacagatttagacagcctacttaatagaacactagaatctgacaaatctggactccaggttgccatacatgcaattggggataaagctaatgacatactactggatatggttgacaagattgttgatttaaatggagcgaaggaccgtagattccggatcgaacatgcccaacatctggctccaggtgcagcaaaccgctttggcaagcatggtaccattgcatccgtgcagccagatcatctactagatgatgccgaccatgcttggagcaagattggggtggaaaggtctgagcgaagctcctacacatttcgatcactgttagatggcggtgcgcagctagcttttggttctgactggcctatttcagacatcaaccccttgcaagctatccgatccgcagtgttccgcaagcctcctggatgggaggtcccctggatccctgcggagcgcttgaccctggatgaatcactgaaagcgcacacgatgtctgctgcctacgcctgcttcctggaccacgccgtgggcagcctttctgaagggaaatacgccgattttgtggtggtaccttctacatcgtgggacgaattctccagcgatttgccggggcatgtcctggcgacgtacgtgagcggcaggcaagcttatccatgacagatagcagttgtgtaagtgttggagaccaaaaagagcagcgcggacagtccggccctgaggccggaaggccggacgatccgcggtccggacagtccgcggtgatggcgcggacggtctgcgcgtgcgcagagtcagttaggatttctagtttctcgcgggatttgttacctaaaaccgcgggattaactcggaaatctgttggaagcggatccagacctcccctttatatcgatgaagggctacggccgattgaactccccaacaatcgaacaaatcaagtctatttctcgtttttaccttacgcattaggaatagttctagtctagttctagtttagcctctcaatctccaaattcttcgcctctcttcgactctacgtcgattagaggagtctaggtcggcctgccgtgcctagacaacacctaggatctcttctccccgacggggtccctcccgggagcgagatccaggcgccgccggcgac

SEQ ID NO: 35409 - DNA, 2649 bp, Zea Mays
gagggggaggagataccagttcccatttcccaaccatgccattgccatcggccgcccagagcgctctcgtcgtggcggccgtcgccatagccaccgccaccgtcctcctccccttcccacggacgccgccgcgggaccgcttcgccgacatggtgctggccaacggcaccatctacaccgcggaccccgcccgacccttcgccgacgccatgtccgtccgcggcggccgcgtgctccgcgtcgggacctacgagtccgtcaaggagctcaagggccctcgcactcgtgagctgaatctcagtgggaacgtggtgctgccggggttcatcgactcccatgttcacttcatagacggtggattgcagctagcgagggtgccacttcgtggggtcagaagcaaagatgacttggttgccagggtcaaggaagctgtcagaggtagtgtgctagtattttgttccaatgcattttcctgccacaaactactgctgtgatgcaaagacagataagcaacctgggcagtggatcttgggcggaggttggaatgatgattttgggggagatggtctcccggctgctgtttggctggatgatatctcacctgataatccagtctggctctctcgcatggatggtcatatgggagtagccaactcattagctatgaagattgctgggattgacaaaaacacaaacgatccaattggtggaactatcatacgaacaactgaaggaggtaacacaactaattaacatgggtcttagccctctgattgtaacttaatcagtgaagtgcacttgaaccaaactcaatcacttcagtgagcatttgaaagctatttacttttaaacatagatatgttctcgatgtaaaaataaatcaagaaacttgaaagcaaactgcatggtagctcatccgttgatctaataagtagctacaatgatcagaaggacctaatcataagctttgtatacagtttgtaacaatattcttgtactttatgccttatggtactgcaaaggttcattgaatcttgtggttaggaatgaccaactatctggcctctgttattacttgtagagcctactggtcttctagttaatactgctatgaaacccatatttgatgtcattcaaaatgtttctaaccatgaaagaagagaggctcttcttagagcaagtagacatgccctaatgaggggagtgactactgttgttgatgttggaagttacttccctggggcctcagctgagaaaacgtggcaagattttgcagaaatctataaatgggctcactctatggaaaaatgattttgagagtatgcttattcttcccaatgcccacatggtctcgtgtttccgatcttattagtgaacatggtcgatcgctaagtcagtggatccatctaggtggtgttaaagctttccttgatgggtctctgggttcttcaagcgcgttgttccatgagccttatgagggtgatccggataattatggtctccaaatgacagatttagacagcctacttaatagaacactagaatctgacaaatctggactccaggttgccatacatgcaattggggataaagctaatgacatactactggatatggttgacaagattgttgatttaaatggagcgaaggaccgtagattccggatcgaacatgcccaacatctggctccaggtgcagcaaaccgctttggcaagcatggtaccattgcatccgtgcagccagatcatctactagatgatgccgaccatgcttggagcaagattggggtggaaaggtctgagcgaagctcctacacatttcgatcactgttagatggcggtgcgcagctagcttttggttctgactggcctatttcagacatcaaccccttgcaagctatccgatccgcagtgttccgcaagcctcctggatgggaggtcccctggatccctgcggagcgcttgaccctggatgaatcactgaaagcgcacacgatgtctgctgcctacgcctgcttcctggaccacgccgtgggcagcctttctgaagggaaatacgccgattttgtggtggtaccttctacatcgtgggacgaattctccagcgatttgccggggcatgtcctggcgacgtacgtgagcggcaggcaagcttatccatgacagatagcagttgtgtaagtgttggagaccaaaaagagcagcgcggacagtccggccctgaggccggaaggccggacgatccgcggtccggacagtccgcggtgatggcgcggacggtctgcgcgtgcgcagagtcagttaggatttctagtttctcgcgggatttgttacctaaaaccgcgggattaactcggaaatctgttggaagcggatccagacctcccctttatatcgatgaagggctacggccgattgaactccccaacaatcgaacaaatcaagtctatttctcgtttttaccttacgcattaggaatagttctagtctagttctagtttagcctctcaatctccaaattcttcgcctctcttcgactctacgtcgattagaggagtctaggtcggcctgccgtgcctagacaacacctaggatctcttctccccgacggggtccctcccgggagcgagatccaggcgccgccggcgac

SEQ ID NO: 35410 - DNA, 2607 bp, Zea Mays
gagggggaggagataccagttcccatttcccaaccatgccattgccatcggccgcccagagcgctctcgtcgtggcggccgtcgccatagccaccgccaccgtcctcctccccttcccacgtacgttacgcagccctctcctctcttctgttcccctcgcgcgcgacgccaaaggctgacccgtccgcctctcctcccattcgcagggacgccgccgcgggaccgcttcgccgacatggtgctggccaacggcaccatctacaccgcggaccccgcccgacccttcgccgacgccatgtccgtccgcggcggccgcgtgctccgcgtcgggacctacgagtccgtcaaggtcgcgtcgacgtttcgctctgccccttcctccatctgataccctgccctgtatgctgtgtgttgcttgcaggagctcaagggccctcgcactcgtgagctgaatctcagtgggaacgtggtgctgccggggttcatcgactcccatgttcacttcatagacggtggattgcagcatgcgctagcttcctaatgctactctctgatactctgcagctagcgagggtgccacttcgtggggtcagaagcaaagatgacttggttgccagggtcaaggaagctgtcagaggtagtgtgctagtattttgttccaatgcattttcctgccacaaactactgctgtgatgcaaagacaggttcggttacctatgcccaaattcagttctgaatcatctcattctgtgtagtaacaatatccaaataaacaagagtagattctttgtcagagttatgctctgcttggtgttctccaattctacgtttgaatagacactatgcaatatgttctgcttgggtatggcaatctattcgaatgcccgtttctgtatatcatgctcccaacataagtttgataagcaacctgggcagtggatcttgggcggaggttggaatgatgattttgggggagatggtctcccggctgctgtttggctggatgatatctcacctgataatccagtctggctctctcgcatggatggtcatatgggagtagccaactcattagctatgaagattgctgggattgacaaaaacacaaacgatccaattggtggaactatcatacgaacaactgaaggagagaggctcttcttagagcaagtagacatgccctaatgaggggagtgactactgttgttgatgttggaagttacttccctggggcctcagctgagaaaacgtggcaagattttgcagaaatctataaatgggctcactctatggaaaaatgattttgagagtatgcttattcttcccaatgcccacatggtctcgtgtttccgatcttattagtgaacatggtcgatcgctaagtcagtggatccatctaggtggtgttaaagctttccttgatgggtctctgggttcttcaagcgcgttgttccatgagccttatgagggtgatccggataattatggtctccaaatgacagatttagacagcctacttaatagaacactagaatctgacaaatctggactccaggttgccatacatgcaattggggataaagctaatgacatactactggatatggttgacaagattgttgatttaaatggagcgaaggaccgtagattccggatcgaacatgcccaacatctggctccaggtgcagcaaaccgctttggcaagcatggtaccattgcatccgtgcagccagatcatctactagatgatgccgaccatgcttggagcaagattggggtggaaaggtctgagcgaagctcctacacatttcgatcactgttagatggcgatttcagacatcaaccccttgcaagctatccgatccgcagtgttccgcaagcctcctggatgggaggtcccctggatccctgcggagcgcttgaccctggatgaatcactgaaagcgcacacgatgtctgctgcctacgcctgcttcctggaccacgccgtgggcagcctttctgaagggaaatacgccgattttgtggtggtaccttctacatcgtgggacgaattctccagcgatttgccggggcatgtcctggcgacgtacgtgagcggcaggcaagcttatccatgacagatagcagttgtgtaagtgttggagaccaaaaagagcagcgcggacagtccggccctgaggccggaaggccggacgatccgcggtccggacagtccgcggtgatggcgcggacggtctgcgcgtgcgcagagtcagttaggatttctagtttctcgcgggatttgttacctaaaaccgcgggattaactcggaaatctgttggaagcggatccagacctcccctttatatcgatgaagggctacggccgattgaactccccaacaatcgaacaaatcaagtctatttctcgtttttaccttacgcattaggaatagttctagtctagttctagtttagcctctcaatctccaaattcttcgcctctcttcgactctacgtcgattagaggagtctaggtcggcctgccgtgcctagacaacacctaggatctcttctccccgacggggtccctcccgggagcgagatccaggcgccgccggcgac

SEQ ID NO: 35411 - DNA, 2650 bp, Zea Mays
agttggtggtttcaattcagagagggagagggggaggagataccagttcccatttcccaaccatgccattgccatcggccgcccagagcgctctcgtcgtggcggccgtcgccatagccaccgccaccgtcctcctccccttcccacggacgccgccgcgggaccgcttcgccgacatggtgctggccaacggcaccatctacaccgcggaccccgcccgacccttcgccgacgccatgtccgtccgcggcggccgcgtgctccgcgtcgggacctacgagtccgtcaaggagctcaagggccctcgcactcgtgagctgaatctcagtgggaacgtggtgctgccggggttcatcgactcccatgttcacttcatagacggtggattgcagcatgcgctagcttcctaatgctactctctgatactctgcagctagcgagggtgccacttcgtggggtcagaagcaaagatgacttggttgccagggtcaaggaagctgtcagagataagcaacctgggcagtggatcttgggcggaggttggaatgatgattttgggggagatggtctcccggctgctgtttggctggatgatatctcacctgataatccagtctggctctctcgcatggatggtcatatgggagtagccaactcattagctatgaagattgctgggattgacaaaaacacaaacgatccaattggtggaactatcatacgaacaactgaaggaggtaacacaactaattaacatgggtcttagccctctgattgtaacttaatcagtgaagtgcacttgaaccaaactcaatcacttcagtgagcatttgaaagctatttacttttaaacatagatatgttctcgatgtaaaaataaatcaagaaacttgaaagcaaactgcatggtagctcatccgttgatctaataagtagctacaatgatcagaaggacctaatcataagctttgtatacagtttgtaacaatattcttgtactttatgccttatggtactgcaaaggttcattgaatcttgtggttaggaatgaccaactatctggcctctgttattacttgtagagcctactggtcttctagttaatactgctatgaaacccatatttgatgtcattcaaaatgtttctaaccatgaaagaagagaggctcttcttagagcaagtagacatgccctaatgaggggagtgactactgttgttgatgttggaagttacttccctggggcctcagctgagaaaacgtggcaagattttgcagaaatctataaatgggctcactctatggaaaaatgattttgagagtatgcttattcttcccaatgcccacatggtctcgtgtttccgatcttattagtgaacatggtcgatcgctaagtcagtggatccatctaggtggtgttaaagctttccttgatgggtctctgggttcttcaagcgcgttgttccatgagccttatgagggtgatccggataattatggtctccaaatgacagatttagacagcctacttaatagaacactagaatctgacaaatctggactccaggttgccatacatgcaattggggataaagctaatgacatactactggatatggttgacaagattgttgatttaaatggagcgaaggaccgtagattccggatcgaacatgcccaacatctggctccaggtgcagcaaaccgctttggcaagcatggtaccattgcatccgtgcagccagatcatctactagatgatgccgaccatgcttggagcaagattggggtggaaaggtctgagcgaagctcctacacatttcgatcactgttagatggcggtgcgcagctagcttttggttctgactggcctatttcagacatcaaccccttgcaagctatccgatccgcagtgttccgcaagcctcctggatgggaggtcccctggatccctgcggagcgcttgaccctggatgaatcactgaaagcgcacacgatgtctgctgcctacgcctgcttcctggaccacgccgtgggcagcctttctgaagggaaatacgccgattttgtggtggtaccttctacatcgtgggacgaattctccagcgatttgccggggcatgtcctggcgacgtacgtgagcggcaggcaagcttatccatgacagatagcagttgtgtaagtgttggagaccaaaaagagcagcgcggacagtccggccctgaggccggaaggccggacgatccgcggtccggacagtccgcggtgatggcgcggacggtctgcgcgtgcgcagagtcagttaggatttctagtttctcgcgggatttgttacctaaaaccgcgggattaactcggaaatctgttggaagcggatccagacctcccctttatatcgatgaagggctacggccgattgaactccccaacaatcgaacaaatcaagtctatttctcgtttttaccttacgcattaggaatagttctagtctagttctagtttagcctctcaatctccaaattcttcgcctctcttcgactctacgtcgattagaggagtctaggtcggcctgccgtgcctagacaacacctaggatctcttctccccgacggggtccctcccgggagcgagatccaggcgccgccggcgac

SEQ ID NO: 35412 - DNA, 2756 bp, Zea Mays
cggacttagaccagccacgccgtttagttggtggtttcaattcagagagggagagggggaggagataccagttcccatttcccaaccatgccattgccatcggccgcccagagcgctctcgtcgtggcggccgtcgccatagccaccgccaccgtcctcctccccttcccacggacgccgccgcgggaccgcttcgccgacatggtgctggccaacggcaccatctacaccgcggaccccgcccgacccttcgccgacgccatgtccgtccgcggcggccgcgtgctccgcgtcgggacctacgagtccgtcaaggagctcaagggccctcgcactcgtgagctgaatctcagtgggaacgtggtgctgccggggttcatcgactcccatgttcacttcatagacggtggattgcagctagcgagggtgccacttcgtggggtcagaagcaaagatgacttggttgccagggtcaaggaagctgtcagaggtagtgtgctagtattttgttccaatgcattttcctgccacaaactactgctgtgatgcaaagacaggttcggttacctatgcccaaattcagttctgaatcatctcattctgtgtagtaacaatatccaaataaacaagagtagattctttgtcagagttatgctctgcttggtgttctccaattctacgtttgaatagacactatgcaatatgttctgcttgggtatggcaatctattcgaatgcccgtttctgtatatcatgctcccaacataagtttggttagtatctaactgcttctgttttatcaagttaacgggttagtgttgccaaaagctttctaccaatattactaagatctattttcctaacagataagcaacctgggcagtggatcttgggcggaggttggaatgatgattttgggggagatggtctcccggctgctgtttggctggatgatatctcacctgataatccagtctggctctctcgcatggatggtcatatgggagtagccaactcattagctatgaagattgctgggattgacaaaaacacaaacgatccaattggtggaactatcatacgaacaactgaaggagagcctactggtcttctagttaatactgctatgaaacccatatttgatgtcattcaaaatgtttctaaccatgaaagaagagaggctcttcttagagcaagtagacatgccctaatgaggggagtgactactgttgttgatgttggaagttacttccctggggcctcagctgagaaaacgtggcaagattttgcaggtattctgtaataccttcgcttgcattgcatggacaagaattagaaggattcacttgtcttgtttttatctatgaccttatttgtactcctggcatactgacacaagtattgataccactacagaaatctataaatgggctcactctatggaaaaatgattttgagagtatgcttattcttcccaatgcccacatggtctcgtgtttccgatcttattagtgaacatggtcgatcgctaagtcagtggatccatctaggtggtgttaaagctttccttgatgggtctctgggttcttcaagcgcgttgttccatgagccttatgagggtgatccggataattatggtctccaaatgacagatttagacagcctacttaatagaacactagaatctgacaaatctggactccaggttgccatacatgcaattggggataaagctaatgacatactactggatatggttgacaagattgttgatttaaatggagcgaaggaccgtagattccggatcgaacatgcccaacatctggctccaggtgcagcaaaccgctttggcaagcatggtaccattgcatccgtgcagccagatcatctactagatgatgccgaccatgcttggagcaagattggggtggaaaggtctgagcgaagctcctacacatttcgatcactgttagatggcgatttcagacatcaaccccttgcaagctatccgatccgcagtgttccgcaagcctcctggatgggaggtcccctggatccctgcggagcgcttgaccctggatgaatcactgaaagcgcacacgatgtctgctgcctacgcctgcttcctggaccacgccgtgggcagcctttctgaagggaaatacgccgattttgtggtggtaccttctacatcgtgggacgaattctccagcgatttgccggggcatgtcctggcgacgtacgtgagcggcaggcaagcttatccatgacagatagcagttgtgtaagtgttggagaccaaaaagagcagcgcggacagtccggccctgaggccggaaggccggacgatccgcggtccggacagtccgcggtgatggcgcggacggtctgcgcgtgcgcagagtcagttaggatttctagtttctcgcgggatttgttacctaaaaccgcgggattaactcggaaatctgttggaagcggatccagacctcccctttatatcgatgaagggctacggccgattgaactccccaacaatcgaacaaatcaagtctatttctcgtttttaccttacgcattaggaatagttctagtctagttctagtttagcctctcaatctccaaattcttcgcctctcttcgactctacgtcgattagaggagtctaggtcggcctgccgtgcctagacaacacctaggatctcttctccccgacggggtccctcccgggagcgagatccaggcgccgccggcgac

SEQ ID NO: 35413 - DNA, 1610 bp, Zea Mays
agataccagttcccatttcccaaccatgccattgccatcggccgcccagagcgctctcgtcgtggcggccgtcgccatagccaccgccaccgtcctcctccccttcccacggacgccgccgcgggaccgcttcgccgacatggtgctggccaacggcaccatctacaccgcggaccccgcccgacccttcgccgacgccatgtccgtccgcggcggccgcgtgctccgcgtcgggacctacgagtccgtcaaggagctcaagggccctcgcactcgtgagctgaatctcagtgggaacgtggtgctgccggggttcatcgactcccatgttcacttcatagacggtggattgcagctagcgagggtgccacttcgtggggtcagaagcaaagatgacttggttgccagggtcaaggaagctgtcagagataagcaacctgggcagtggatcttgggcggaggttggaatgatgattttgggggagatggtctcccggctgctgtttggctggatgatatctcacctgataatccagtctggctctctcgcatggatggtcatatgggagtagccaactcattagctatgaagattgctgggattgacaaaaacacaaacgatccaattggtggaactatcatacgaacaactgaaggaggtaacacaactaattaacatgggtcttagccctctgattgtaacttaatcagtgaagtgcacttgaaccaaactcaatcacttcagtgagcatttgaaagctatttacttttaaacatagatatgttctcgatgtaaaaataaatcaagaaacttgaaagcaaactgcatggtagctcatccgttgatctaataagtagctacaatgatcagaaggacctaatcataagctttgtatacagtttgtaacaatattcttgtactttatgccttatggtactgcaaaggttcattgaatcttgtggttaggaatgaccaactatctggcctctgttattacttgtagagcctactggtcttctagttaatactgctatgaaacccatatttgatgtcattcaaaatgtttctaaccatgaaagaagagaggctcttcttagagcaagtagacatgccctaatgaggggagtgactactgttgttgatgttggaagttacttccctggggcctcagctgagaaaacgtggcaagattttgcagaattagaaggattcacttgtcttgtttttatctatgaccttatttgtactcctggcatactgacacaagatcttattagtgaacatggtcgatcgctaagtcagtggatccatctaggtggtgttaaagctttccttgatgggtctctgggttcttcaagcgcgttgttccatgagccttatgagggtgatccggataattatggtctccaaatgacagatttagacagcctacttaatagaacactagaatctgacaaatctggactccaggttgccatacatgcaattggggataaagctaatgacatactactggatatggttgacaagattgttgatttaaatggagcgaaggaccgtagattccggactcactctgtttagtagaatctgaattgaatatctgcat

SEQ ID NO: 35414 - DNA, 1633 bp, Zea Mays
gaacaagaaaataaagctcttcaggtccatgagctcaagaaacaaaaaagtgatgaggcagcaaagcgtttacaagaagatattcagcatataaaatctcagaaggatcagcttcaacaaaaggccaagcaagagtctgaaaaatttatgtcttggaaggctgcccctgaaaaggaagtaatacagctcaagaaggaagggagacgaaatgaatatgacatgcacaagctcttggctttaaatcagaggcaaaaaatggtcttacagaggaaaactgaagaagcagcagctgctacaaaaagattcatggagttgctggaagcaaagaactcatcacttgagacatatggcagtggaaatgcttcggggatgcaggccttaatgcgagctgttgatgatgaactggaagtcactataagagcacatgaattacgctcgtattaccagcgacaaatgcaagagagagcagcaatatccaaggaaatagcaaagctggaggaggaaccaaagcacaagatgagtgattgtcctcaagctatgtctcctagtgctagaagttttaggatatcagcattagagaacatgtcctcatcatcaagcgctatggtgtctatggcttctcaactatcagaagcagaggagcgggagcgggtattcaatggtaaaggtagatggtatcatgtcaggtccctcccagaggcagagaacataatgaaccaccttttccagttagcatcatcttcaaggtgtaaagaaaaagaacacaccattatggaattgaaggaaaaggtggttgtgcttaatagtgaaatcaggcagttagaaacacaagcgacggatctaaggagcacaaataagaggacatatcctgtgcaatcactcattttggtgcaagcgtgcaatcaaactatccagagcatccaatctagatccaacggtttcatatggaaggggttaaaacttttcaatggattgaacaattcaaagaaatctgctaggtcgaatggcactggatttgctccacgtcaggtatttttctttgagtgttttcaagtttatctagtgatattcgtgcgttttggttatagcaaggacaacttcaattgggtggacgatatggacatttcagacagtgagcagttggatgagttagaggccagagacaccgaagctgcccctcggaacagcgccgacattcccctaaagctaccgagggccatggcaactcctgcggagagcaaccctaccctcacggaccgcaatgctgccaagcccgacaaatccgtcagcaccggcatcaaggatagcaccggagctgccgccacgaggccaccgtctcagctgcgtctgttgcgataatctgattgtgacattcagtatccgtgtcgcggaagtcttttgctgtacaatgggggaggctgcctcctgccttggcgtcctttggagcgaggcaggtagacgtagaccctggaaggctcgctctcggcgtgttcttttgcaacgacaatgccttgtactcgccttagctctgctttggtggaacgcaaccttataatggtgaggtaacatggtgcattaagttatactagtcggttacccgtgcgttgcgacgactcataataatacacacgta

SEQ ID NO: 35415 - DNA, 1993 bp, Zea Mays
gccaagagtgatatttttgttctcaagcaacattatgaaaagaaattagatgacttggaacaagaaaataaagctcttcaggtccatgagctcaagaaacaaaaaagtgatgaggcagcaaagcgtttacaagaagatattcagcatataaaatctcagaaggatcagcttcaacaaaaggccaagcaagagtctgaaaaatttatgtcttggaaggctgcccctgaaaaggaagtaatacagctcaagaaggaagggagacgaaatgaatatgacatgcacaagctcttggctttaaatcagaggcaaaaaatggtcttacagaggaaaactgaagaagcagcagctgctacaaaaagattcatggagttgctggaagcaaagaactcatcacttgagacatatggcagtggaaatgcttcggggatgcaggccttaatgcgagctgttgatgatgaactggaagtcactataagagcacatgaattacgctcgtattaccagcgacaaatgcaagagagagcagcaatatccaaggaaatagcaaagctggaggaggaaccaaagcacaagatgagtgattgtcctcaagctatgtctcctagtgctagaagttttaggatatcagcattagagaacatgtcctcatcatcaagcgctatggtgtctatggcttctcaactatcagaagcagaggagcgggagcgggtattcaatggtaaaggtagatggtatcatgtcaggtccctcccagaggcagagaacataatgaaccaccttttccagttagcatcatcttcaaggtgtaaagaaaaagaacacaccattatggaattgaaggaaaaggtggttgtgcttaatagtgaaatcaggcagttagaaacacaagcgacggatctaaggagcacaaataagaggacatatcctgtgcaatcactcattttggtgcaagcgtgcaatcaaactatccagagcatccaatctagatccaacggtttcatatggaaggggttaaaacttttcaatggattgaacaattcaaagaaatctgctaggtcgaatggcactggatttgctccacgtcaggtatttttctttgagtgttttcaagtttatctagtgatattcgtgcgttttggttatagcaaggacaacttcaattgggtggacgatatggacatttcagacagtgagcagttggatgagttagagggtatgcgtgatggatctgattcagactcggtacagtcgaccaggaaaggcagaaacacaccagtcaagagcgtgtagccattcaaatcctaacctggatcgtcaaaatacacacagacgatgcaaagccagagaagccctcagacgaaaaagtgcagtttgcccgaaactattccatcggacggctgttcctgctcaaaagcctcatcatgcaagaccaagaagtgccagtgcagaggctcaggttaaaaagtggcgcaattcagcagttcaacccgtccttggatctttacttccctccgagccagagacaccgaagctgcccctcggaacagcgccgacattcccctaaagctaccgagggccatggcaactcctgcggagagcaaccctaccctcacggaccgcaatgctgccaagcccgacaaatccgtcagcaccggcatcaaggatagcaccggagctgccgccacgaggccaccgtctcagctgcgtctgttgcgataatctgattgtgacattcagtatccgtgtcgcggaagtcttttgctgtacaatgggggaggctgcctcctgccttggcgtcctttggagcgaggcaggtagacgtagaccctggaaggctcgctctcggcgtgttcttttgcaacgacaatgccttgtactcgccttagctctgctttggtggaacgcaaccttataatggtgaggtaacatggtgcattaagttatactagtcggttacccgtgcgttgcgacgactcataataatacacacgta

SEQ ID NO: 35416 - DNA, 1973 bp, Zea Mays
aaacaatttgccaagagtgatatttttgttctcaagcaacattatgaaaagaaattagatgacttggaacaagaaaataaagctcttcaggtccatgagctcaagaaacaaaaaagtgatgaggcagcaaagcgtttacaagaagatattcagcatataaaatctcagaaggatcagcttcaacaaaaggccaagcaagagtctgaaaaatttatgtcttggaaggctgcccctgaaaaggaagtaatacagctcaagaaggaagggagacgaaatgaatatgacatgcacaagctcttggctttaaatcagaggcaaaaaatggtcttacagaggaaaactgaagaagcagcagctgctacaaaaagattcatggagttgctggaagcaaagaactcatcacttgagacatatggcagtggaaatgcttcggggatgcaggccttaatgcgagctgttgatgatgaactggaagtcactataagagcacatgaattacgctcgtattaccagcgacaaatgcaagagagagcagcaatatccaaggaaatagcaaagctggaggaggaaccaaagcacaagatgagtgattgtcctcaagctatgtctcctagtgctagaagttttaggatatcagcattagagaacatgtcctcatcatcaagcgctatggtgtctatggcttctcaactatcagaagcagaggagcgggagcgggtattcaatggtaaaggtagatggtatcatgtcaggtccctcccagaggcagagaacataatgaaccaccttttccagttagcatcatcttcaaggtgtaaagaaaaagaacacaccattatggaattgaaggaaaaggtggttgtgcttaatagtgaaatcaggcagttagaaacacaagcgacggatctaaggagcacaaataagaggacatatcctgtgcaatcactcattttggtgcaagcgtgcaatcaaactatccagagcatccaatctagatccaacggtttcatatggaaggggttaaaacttttcaatggattgaacaattcaaagaaatctgctaggtcgaatggcactggatttgctccacgtcagtgttcgaccttcccagcgttttggttatagcaaggacaacttcaattgggtggacgatatggacatttcagacagtgagcagttggatgagttagagggtatgcgtgatggatctgattcagactcggtacagtcgaccaggaaaggcagaaacacaccagtcaagagcgtgtagccattcaaatcctaacctggatcgtcaaaatacacacagacgatgcaaagccagagaagccctcagacgaaaaagtgcagtttgcccgaaactattccatcggacggctgttcctgctcaaaagcctcatcatgcaagaccaagaagtgccagtgcagaggctcaggttaaaaagtggcgcaattcagcagttcaacccgtccttggatctttacttccctccgagccagagacaccgaagctgcccctcggaacagcgccgacattcccctaaagctaccgagggccatggcaactcctgcggagagcaaccctaccctcacggaccgcaatgctgccaagcccgacaaatccgtcagcaccggcatcaaggatagcaccggagctgccgccacgaggccaccgtctcagctgcgtctgttgcgataatctgattgtgacattcagtatccgtgtcgcggaagtcttttgctgtacaatgggggaggctgcctcctgccttggcgtcctttggagcgaggcaggtagacgtagaccctggaaggctcgctctcggcgtgttcttttgcaacgacaatgccttgtactcgccttagctctgctttggtggaacgcaaccttataatggtgaggtaacatggtgcattaagttatactagtcggttacccgtgcgttgcgacgactcataataatacacacgta

SEQ ID NO: 35417 - DNA, 2093 bp, Zea Mays
gagatgaaacaatttgccaagagtgatatttttgttctcaagcaacattatgaaaagaaattagatgacttggaacaagaaaataaagctcttcagaaagaaatagagaatcttcaccatgcattaaccaatgtatgttcttctatggatgagaatgctcaaaaactgaaagaaaactatcttcagaagctgaatgcacttgaatcccaggtccatgagctcaagaaacaaaaaagtgatgaggcagcaaagcgtttacaagaagatattcagcatataaaatctcagaaggatcagcttcaacaaaaggccaagcaagagtctgaaaaatttatgtcttggaaggctgcccctgaaaaggaagtaatacagctcaagaaggaagggagacgaaatgaatatgacatgcacaagctcttggctttaaatcagaggcaaaaaatggtcttacagaggaaaactgaagaagcagcagctgctacaaaaagattcatggagttgctggaagcaaagaactcatcacttgagacatatggcagtggaaatgcttcggggatgcaggccttaatgcgagctgttgatgatgaactggaagtcactataagagcacatgaattacgctcgtattaccagcgacaaatgcaagagagagcagcaatatccaaggaaatagcaaagctggaggaggaaccaaagcacaagatgagtgattgtcctcaagctatgtctcctagtgctagaagttttaggatatcagcattagagaacatgtcctcatcatcaagcgctatggtgtctatggcttctcaactatcagaagcagaggagcgggagcgggtattcaatggtaaaggtagatggtatcatgtcaggtccctcccagaggcagagaacataatgaaccaccttttccagttagcatcatcttcaaggtgtaaagaaaaagaacacaccattatggaattgaaggaaaaggtggttgtgcttaatagtgaaatcaggcagttagaaacacaagcgacggatctaaggagcacaaataagaggacatatcctgtgcaatcactcattttggtgcaagcgtgcaatcaaactatccagagcatccaatctagatccaacggtttcatatggaaggggttaaaacttttcaatggattgaacaattcaaagaaatctgctaggtcgaatggcactggatttgctccacgtcagtgttcgaccttcccagcgttttggttatagcaaggacaacttcaattgggtggacgatatggacatttcagacagtgagcagttggatgagttagagggtatgcgtgatggatctgattcagactcggtacagtcgaccaggaaaggcagaaacacaccagtcaagagcgtgtagccattcaaatcctaacctggatcgtcaaaatacacacagacgatgcaaagccagagaagccctcagacgaaaaagtgcagtttgcccgaaactattccatcggacggctgttcctgctcaaaagcctcatcatgcaagaccaagaagtgccagtgcagaggctcaggttaaaaagtggcgcaattcagcagttcaacccgtccttggatctttacttccctccgagccagagacaccgaagctgcccctcggaacagcgccgacattcccctaaagctaccgagggccatggcaactcctgcggagagcaaccctaccctcacggaccgcaatgctgccaagcccgacaaatccgtcagcaccggcatcaaggatagcaccggagctgccgccacgaggccaccgtctcagctgcgtctgttgcgataatctgattgtgacattcagtatccgtgtcgcggaagtcttttgctgtacaatgggggaggctgcctcctgccttggcgtcctttggagcgaggcaggtagacgtagaccctggaaggctcgctctcggcgtgttcttttgcaacgacaatgccttgtactcgccttagctctgctttggtggaacgcaaccttataatggtgaggtaacatggtgcattaagttatactagtcggttacccgtgcgttgcgacgactcataataatacacacgta

SEQ ID NO: 35418 - DNA, 2122 bp, Zea Mays
gagatgaaacaatttgccaagagtgatatttttgttctcaagcaacattatgaaaagaaattagatgacttggaacaagaaaataaagctcttcagaaagaaatagagaatcttcaccatgcattaaccaatgtatgttcttctatggatgagaatgctcaaaaactgaaagaaaactatcttcagaagctgaatgcacttgaatcccaggtccatgagctcaagaaacaaaaaagtgatgaggcagcaaagcgtttacaagaagatattcagcatataaaatctcagaaggatcagcttcaacaaaaggccaagcaagagtctgaaaaatttatgtcttggaaggctgcccctgaaaaggaagtaatacagctcaagaaggaagggagacgaaatgaatatgacatgcacaagctcttggctttaaatcagaggcaaaaaatggtcttacagaggaaaactgaagaagcagcagctgctacaaaaagattcatggagttgctggaagcaaagaactcatcacttgagacatatggcagtggaaatgcttcggggatgcaggccttaatgcgagctgttgatgatgaactggaagtcactataagagcacatgaattacgctcgtattaccagcgacaaatgcaagagagagcagcaatatccaaggaaatagcaaagctggaggaggaaccaaagcacaagatgagtgattgtcctcaagctatgtctcctagtgctagaagttttaggatatcagcattagagaacatgtcctcatcatcaagcgctatggtgtctatggcttctcaactatcagaagcagaggagcgggagcgggtattcaatggtaaaggtagatggtatcatgtcaggtccctcccagaggcagagaacataatgaaccaccttttccagttagcatcatcttcaaggtgtaaagaaaaagaacacaccattatggaattgaaggaaaaggtggttgtgcttaatagtgaaatcaggcagttagaaacacaagcgacggatctaaggagcacaaataagaggacatatcctgtgcaatcactcattttggtgcaagcgtgcaatcaaactatccagagcatccaatctagatccaacggtttcatatggaaggggttaaaacttttcaatggattgaacaattcaaagaaatctgctaggtcgaatggcactggatttgctccacgtcaggtatttttctttgagtgttttcaagtttatctagtgatattcgtgcgttttggttatagcaaggacaacttcaattgggtggacgatatggacatttcagacagtgagcagttggatgagttagagggtatgcgtgatggatctgattcagactcggtacagtcgaccaggaaaggcagaaacacaccagtcaagagcgtgtagccattcaaatcctaacctggatcgtcaaaatacacacagacgatgcaaagccagagaagccctcagacgaaaaagtgcagtttgcccgaaactattccatcggacggctgttcctgctcaaaagcctcatcatgcaagaccaagaagtgccagtgcagaggctcaggttaaaaagtggcgcaattcagcagttcaacccgtccttggatctttacttccctccgagccagagacaccgaagctgcccctcggaacagcgccgacattcccctaaagctaccgagggccatggcaactcctgcggagagcaaccctaccctcacggaccgcaatgctgccaagcccgacaaatccgtcagcaccggcatcaaggatagcaccggagctgccgccacgaggccaccgtctcagctgcgtctgttgcgataatctgattgtgacattcagtatccgtgtcgcggaagtcttttgctgtacaatgggggaggctgcctcctgccttggcgtcctttggagcgaggcaggtagacgtagaccctggaaggctcgctctcggcgtgttcttttgcaacgacaatgccttgtactcgccttagctctgctttggtggaacgcaaccttataatggtgaggtaacatggtgcattaagttatactagtcggttacccgtgcgttgcgacgactcataataatacacacgta

SEQ ID NO: 35419 - DNA, 2241 bp, Zea Mays
gagatgaaacaatttgccaagagtgatatttttgttctcaagcaacattatgaaaagaaattagatgacttggaacaagaaaataaagctcttcagaaagaaatagagaatcttcaccatgcattaaccaatgtatgttcttctatggatgagaatgctcaaaaactgaaagaaaactatcttcagaagctgaatgcacttgaatcccaggtccatgagctcaagaaacaaaaaagtgatgaggcagcaaagcgtttacaagaagatattcagcatataaaatctcagaaggatcagcttcaacaaaaggccaagcaagagtctgaaaaatttatgtcttggaaggctgcccctgaaaaggaagtaatacagctcaagaaggaagggagacgaaatgaatatgacatgcacaagctcttggctttaaatcagaggcaaaaaatggtcttacagaggaaaactgaagaagcagcagctgctacaaaaagattcatggagttgctggaagcaaagaactcatcacttgagacatatggcagtggaaatgcttcggggatgcaggccttaatgcgagctgttgatgatgaactggaagtcactataagagcacatgaattacgctcgtattaccagcgacaaatgcaagagagagcagcaatatccaaggaaatagcaaagctggaggaggaaccaaagcacaagatgagtgattgtcctcaagctatgtctcctagtgctagaagttttaggatatcagcattagagaacatgtcctcatcatcaagcgctatggtgtctatggcttctcaactatcagaagcagaggagcgggagcgggtattcaatggtaaaggtagatggtatcatgtcaggtccctcccagaggcagagaacataatgaaccaccttttccagttagcatcatcttcaaggtgtaaagaaaaagaacacaccattatggaattgaaggaaaaggtggttgtgcttaatagtgaaatcaggcagttagaaacacaagcgacggatctaaggagcacaaataagaggacatatcctgtgcaatcactcattttggtgcaagcgtgcaatcaaactatccagagcatccaatctagatccaacggtttcatatggaaggggttaaaagtaaaataggtactatgttttagatggaaggggttaaatataaaataacagtcatcattagatctatatcggatgcaccagatcgcttgattgcatgcttgcaccaggataagtgattgcataggatattttccccacaaataagcagcttttcaatggattgaacaattcaaagaaatctgctaggtcgaatggcactggatttgctccacgtcagtgttcgaccttcccagcgttttggttatagcaaggacaacttcaattgggtggacgatatggacatttcagacagtgagcagttggatgagttagagggtatgcgtgatggatctgattcagactcggtacagtcgaccaggaaaggcagaaacacaccagtcaagagcgtgtagccattcaaatcctaacctggatcgtcaaaatacacacagacgatgcaaagccagagaagccctcagacgaaaaagtgcagtttgcccgaaactattccatcggacggctgttcctgctcaaaagcctcatcatgcaagaccaagaagtgccagtgcagaggctcaggttaaaaagtggcgcaattcagcagttcaacccgtccttggatctttacttccctccgagccagagacaccgaagctgcccctcggaacagcgccgacattcccctaaagctaccgagggccatggcaactcctgcggagagcaaccctaccctcacggaccgcaatgctgccaagcccgacaaatccgtcagcaccggcatcaaggatagcaccggagctgccgccacgaggccaccgtctcagctgcgtctgttgcgataatctgattgtgacattcagtatccgtgtcgcggaagtcttttgctgtacaatgggggaggctgcctcctgccttggcgtcctttggagcgaggcaggtagacgtagaccctggaaggctcgctctcggcgtgttcttttgcaacgacaatgccttgtactcgccttagctctgctttggtggaacgcaaccttataatggtgaggtaacatggtgcattaagttatactagtcggttacccgtgcgttgcgacgactcataataatacacacgta

SEQ ID NO: 35420 - DNA, 1728 bp, Zea Mays
gcggcgtttggcgagtcggaggccagcaatatagccttgatgttgcctatggctttgcagaagaatttgggtgagggaagcggtgatgggaactagatcagctacttcagcaaaaggaggtccatgagctcaagaaacaaaaaagtgatgaggcagcaaagcgtttacaagaagatattcagcatataaaatctcagaaggatcagcttcaacaaaaggccaagcaagagtctgaaaaatttatgtcttggaaggctgcccctgaaaaggaagtaatacagctcaagaaggaagggagacgaaatgaatatgacatgcacaagctcttggctttaaatcagaggcaaaaaatggtcttacagaggaaaactgaagaagcagcagctgctacaaaaagattcatggagttgctggaagcaaagaactcatcacttgagacatatggcagtggaaatgcttcggggatgcaggccttaatgcgagctgttgatgatgaactggaagtcactataagagcacatgaattacgctcgtattaccagcgacaaatgcaagagagagcagcaatatccaaggaaatagcaaagctggaggaggaaccaaagcacaagatgagtgattgtcctcaagctatgtctcctagtgctagaagttttaggatatcagcattagagaacatgtcctcatcatcaagcgctatggtgtctatggcttctcaactatcagaagcagaggagcgggagcgggtattcaatggtaaaggtagatggtatcatgtcaggtccctcccagaggcagagaacataatgaaccaccttttccagttagcatcatcttcaaggtgtaaagaaaaagaacacaccattatggaattgaaggaaaaggtggttgtgcttaatagtgaaatcaggcagttagaaacacaagcgacggatctaaggagcacaaataagaggacatatcctgtgcaatcactcattttggtgcaagcgtgcaatcaaactatccagagcatccaatctagatccaacggtttcatatggaaggggttaaaacttttcaatggattgaacaattcaaagaaatctgctaggtcgaatggcactggatttgctccacgtcaggtatttttctttgagtgttttcaagtttatctagtgatattcgtgcgttttggttatagcaaggacaacttcaattgggtggacgatatggacatttcagacagtgagcagttggatgagttagaggccagagacaccgaagctgcccctcggaacagcgccgacattcccctaaagctaccgagggccatggcaactcctgcggagagcaaccctaccctcacggaccgcaatgctgccaagcccgacaaatccgtcagcaccggcatcaaggatagcaccggagctgccgccacgaggccaccgtctcagctgcgtctgttgcgataatctgattgtgacattcagtatccgtgtcgcggaagtcttttgctgtacaatgggggaggctgcctcctgccttggcgtcctttggagcgaggcaggtagacgtagaccctggaaggctcgctctcggcgtgttcttttgcaacgacaatgccttgtactcgccttagctctgctttggtggaacgcaaccttataatggtgaggtaacatggtgcattaagttatactagtcggttacccgtgcgttgcgacgactcataataatacacacgta

SEQ ID NO: 35421 - DNA, 3628 bp, Zea Mays
caatcttggcagggttatgcgaataggttgaggtggagattgactcacacaagcaagaccaggagcacgtcccaactttgtctattgaagcaacactcattgataactctggactatctaacagtatagatgctgatctttcatccgctaatgcagtcaatttgaaaccgaagccaaaacgaactcgaagcccttgtcttggttttcatggttatgtacttggtggaaaaatagaaaatccaaaactttggtctagtgagcatcctaacttatacacgcttgttgttctccttaaagatgccaatgggaagcttattgactgtgaatcatgccaagtgggcattcgtaatgtggtcatggcacacaagcaaatgctcgtcaatggatgtcctgttgtgctaagaggtgtcaacagacatgagcaccatccacgccttggaaagacaaatttagaagcatgcatgatcaaggacctgattttgatgaggcaaaacaatatcaatgctgttagaaatagccattacccacagcacccaaggtggtatgagttatgtgacatttttggtctttatgtcatagatgaagccaacattgagacacatggttttgatgaatctaacactttcaaacatcctacacttgaacctatttgggcaaatgcaatgcttgatcgtgttgttagcatggtggagagagataagaatcatgcatgcattattgtttggtctctaggaaatgaatcttcatatggacctaatcatgcttccatgtctggtaaaatattcttacctgtcagtttaatttctgtacttctcatctaatggtaacattcttctaggttggattcgtgaaagggatccaacaagactcctccattatgagggaggtggttccagaacatcatccacagatattgtgtgccccatgtatatgcgtgtctgggatgttgttaagatagcaaaagatccatctgaaacaaggcctctaattctttgcgaatattcacatgctatgggaaacagtaatgggaatattgatgcgtattggatggccatagacaacacttttggactccaaggaggttttatatgggactgggctgatcaggaggactcagatgggtctaaattttgggcatatggcggcgactttggagatactccaaatgactccaatttttgcctcaatggcattgtgtggcctgatcggacgattcacccagctcttcatgaagtaaaataccttcaccagcctatcaaaatatcatcagcagataatatgcttaagattgaaaatggacacttttttgagacaacagaagctttggacttcagttgggttcttcatggagatggttgtgtcttgggctctggtccattgaatattccaactttggcaccacaaactagtcagctcatcaacatggaatcatcaccttggtttgccctttggagtgcctgtgcagcaaaagaagtatttttgtctgtgaatgtgaaacaaaggcatgaaacacgatgggctaaagctggtcatctcttggcttcagcacaactgtgtttgcctcagaaaaatggctttgtccccagcgtgatagcattgtccagtagccctttggtctgtgaacgcattggtgataatgtaaccatctgcaagaataatgcctggaaaattaaagtaaacagtcagttgggaacaatcgacagctggaaggtcaacgacgttgagcttatgagcaaggggatactcccatgcttttggcgcgcaccaactgacaacgacaaaggaggtttcttcaccaagccatatgactcgcgatggagagaagccttcctcgacaatgtctcgttccacagcagccagttctctgtcaaggagttgccggacaacaccgtggagttctccaccctctactacggtgttcccgggcacctacccaagcctgacgacgaagcctccgagtccattctcttccgggtgaagatggtatgccggatccacgggtcaggcgacgtggttctcgactacgaggtaaaccccaggagcgacctccctccccttccccgggtgggcgtcgtgttcagcgccgggaggtccctgagccacgtcacgtggtacgggcgcgggcccttcgagtgctacccggaccgcaaggcggcggcgcacgtcggcgtgtacgagagcagcgtggaggagctgcacgtgccgtacattgcccccgtggagtgcggcgggcgggcggacgtcaggtgggtggcactccgcgacgccggcgggctcggcctgtacgcgtcggcgcacggcggctccccgccgatgcagatgagcgcgagctactacggcgccgcggagctggacagggcaacgcacgtccacaggctggtgaagggggacgacatcgaggtgcatcttgaccacaggcacatggggctgggcggcgacgacagctggtcgccgtgcgtgcacgagcagtacctgctgccgccgacgcggtacgccttctccctgcggctctgccccctgctgccgtcgtcgtcgtgccatgacatctacaggtctcagctccccagctgatggtgccgtgtgccggagacccgtcgacgtcgagccttgggaaacaacaatgaacgcaatggcctggccagtgaatgaaagtatataatattgtaataaagcagagacgtattagctcctgcaacggcctcgcgatcgcctggatatgtctatgctgagggggtgtttagttaactaataacctaactacatatggcgccaagttactaaaacttaataaataactattactaactaataaatagtaactgaattcctaacttaataaatacttcctccgtttataaatatatgacaccgttgattttttaaaaacaacttagatcactcgtcttattaaaaaaaataatgagttaccatttattttttatggtttatttgatcacttaagatagtttgtgcttgatttaaaattttactttttttaaaaaaatattttaaataagatgagtggtcaaaattttcgaaaaaaagttaacagtgtcatatatttgtgaacggaggtagtagtaagtacctaagtagctaacctactactaactagctaccaacaaaattaatagctatataaactagtatatagctcgtgttaacactacgatcagcgacatgaggggagggattgacggcggcatcagcgacacgaggggaggggttggtggtggccgcacgagtgaagggggtggggaggaggttatgggatagggtctcggtgagggagaggagggatgatccaaataatattgtccattagatttgaataagagagggagtatccaacgatctgaaccgttgattttgatggtttgctaagtttgcgtgtaatttgtttggtggatttagtgaagtttatgggtgtaggggtgatttggttgatgtgccttgcaaagtctaaactgatggattatatagcgttataaataaacaactactgctactctactagttaataactacactagtataatattcatgtgttcgacaaaattttcttaattctaattgtccgggcgtattgtggcggacgacatataaatattcgataaaatgttaactc

SEQ ID NO: 35422 - DNA, 3646 bp, Zea Mays
tgatcccaatcttggcagggttatgcgaataggttgaggtggagattgactcacacaagcaagaccaggagcacgtcccaactttgtctattgaagcaacactcattgataactctggactatctaacagtatagatgctgatctttcatccgctaatgcagtcaatttgaaaccgaagccaaaacgaactcgaagcccttgtcttggttttcatggttatgtacttggtggaaaaatagaaaatccaaaactttggtctagtgagcatcctaacttatacacgcttgttgttctccttaaagatgccaatgggaagcttattgactgtgaatcatgccaagtgggcattcgtaatgtggtcatggcacacaagcaaatgctcgtcaatggatgtcctgttgtgctaagaggtgtcaacagacatgagcaccatccacgccttggaaagacaaatttagaagcatgcatgatcaaggacctgattttgatgaggcaaaacaatatcaatgctgttagaaatagccattacccacagcacccaaggtggtatgagttatgtgacatttttggtctttatgtcatagatgaagccaacattgagacacatggttttgatgaatctaacactttcaaacatcctacacttgaacctatttgggcaaatgcaatgcttgatcgtgttgttagcatggtggagagagataagaatcatgcatgcattattgtttggtctctaggaaatgaatcttcatatggacctaatcatgcttccatgtctggtaaaatattcttacctgtcagtttaatttctgtacttctcatctaatggtaacattcttctaggttggattcgtgaaagggatccaacaagactcctccattatgagggaggtggttccagaacatcatccacagatattgtgtgccccatgtatatgcgtgtctgggatgttgttaagatagcaaaagatccatctgaaacaaggcctctaattctttgcgaatattcacatgctatgggaaacagtaatgggaatattgatgcgtattggatggccatagacaacacttttggactccaaggaggttttatatgggactgggctgatcagggtttactgaaggaggactcagatgggtctaaattttgggcatatggcggcgactttggagatactccaaatgactccaatttttgcctcaatggcattgtgtggcctgatcggacgattcacccagctcttcatgaagtaaaataccttcaccagcctatcaaaatatcatcagcagataatatgcttaagattgaaaatggacacttttttgagacaacagaagctttggacttcagttgggttcttcatggagatggttgtgtcttgggctctggtccattgaatattccaactttggcaccacaaactagtcagctcatcaacatggaatcatcaccttggtttgccctttggagtgcctgtgcagcaaaagaagtatttttgtctgtgaatgtgaaacaaaggcatgaaacacgatgggctaaagctggtcatctcttggcttcagcacaactgtgtttgcctcagaaaaatggctttgtccccagcgtgatagcattgtccagtagccctttggtctgtgaacgcattggtgataatgtaaccatctgcaagaataatgcctggaaaattaaagtaaacagtcagttgggaacaatcgacagctggaaggtcaacgacgttgagcttatgagcaaggggatactcccatgcttttggcgcgcaccaactgacaacgacaaaggaggtttcttcaccaagccatatgactcgcgatggagagaagccttcctcgacaatgtctcgttccacagcagccagttctctgtcaaggagttgccggacaacaccgtggagttctccaccctctactacggtgttcccgggcacctacccaagcctgacgacgaagcctccgagtccattctcttccgggtgaagatggtatgccggatccacgggtcaggcgacgtggttctcgactacgaggtaaaccccaggagcgacctccctccccttccccgggtgggcgtcgtgttcagcgccgggaggtccctgagccacgtcacgtggtacgggcgcgggcccttcgagtgctacccggaccgcaaggcggcggcgcacgtcggcgtgtacgagagcagcgtggaggagctgcacgtgccgtacattgcccccgtggagtgcggcgggcgggcggacgtcaggtgggtggcactccgcgacgccggcgggctcggcctgtacgcgtcggcgcacggcggctccccgccgatgcagatgagcgcgagctactacggcgccgcggagctggacagggcaacgcacgtccacaggctggtgaagggggacgacatcgaggtgcatcttgaccacaggcacatggggctgggcggcgacgacagctggtcgccgtgcgtgcacgagcagtacctgctgccgccgacgcggtacgccttctccctgcggctctgccccctgctgccgtcgtcgtcgtgccatgacatctacaggtctcagctccccagctgatggtgccgtgtgccggagacccgtcgacgtcgagccttgggaaacaacaatgaacgcaatggcctggccagtgaatgaaagtatataatattgtaataaagcagagacgtattagctcctgcaacggcctcgcgatcgcctggatatgtctatgctgagggggtgtttagttaactaataacctaactacatatggcgccaagttactaaaacttaataaataactattactaactaataaatagtaactgaattcctaacttaataaatacttcctccgtttataaatatatgacaccgttgattttttaaaaacaacttagatcactcgtcttattaaaaaaaataatgagttaccatttattttttatggtttatttgatcacttaagatagtttgtgcttgatttaaaattttactttttttaaaaaaatattttaaataagatgagtggtcaaaattttcgaaaaaaagttaacagtgtcatatatttgtgaacggaggtagtagtaagtacctaagtagctaacctactactaactagctaccaacaaaattaatagctatataaactagtatatagctcgtgttaacactacgatcagcgacatgaggggagggattgacggcggcatcagcgacacgaggggaggggttggtggtggccgcacgagtgaagggggtggggaggaggttatgggatagggtctcggtgagggagaggagggatgatccaaataatattgtccattagatttgaataagagagggagtatccaacgatctgaaccgttgattttgatggtttgctaagtttgcgtgtaatttgtttggtggatttagtgaagtttatgggtgtaggggtgatttggttgatgtgccttgcaaagtctaaactgatggattatatagcgttataaataaacaactactgctactctactagttaataactacactagtataatattcatgtgttcgacaaaattttcttaattctaattgtccgggcgtattgtggcggacgacatataaatattcgataaaatgttaactc

SEQ ID NO: 35423 - DNA, 3850 bp, Zea Mays
ttcaggagtggtggagggaggctgaaagcaaggtcggaggatcttgctgcactttgaagctgttgattctgcattctttgcttgggtaaatggagtactagttgggtatagccaggatagcagacttcctgctgagtttgaaattactgattgctgccatccttgtgattcggacaaggaaaatgttcttgctgttcaagttatgaggtggagtgatggctcttatcttgaagatcaggatcactggaggttgtctggtattcacagggatgtgctcctactatcaaagccacagatttttatcacagattacttcttcaaagcaaccttggatgaaaatttcagtttagccgatattgaggttgaggtggagattgactcacacaagcaagaccaggagcacgtcccaactttgtctattgaagcaacactcattgataactctggactatctaacagtatagatgctgatctttcatccgctaatgcagtcaatttgaaaccgaagccaaaacgaactcgaagcccttgtcttggttttcatggttatgtacttggtggaaaaatagaaaatccaaaactttggtctagtgagcatgtaagagatataatgcaagggaaattctattaccaaacattactattacagttcaactgtataaaagctgtcttttgactattctccttcttgtaacagcctaacttatacacgcttgttgttctccttaaagatgccaatgggaagcttattgactgtgaatcatgccaagtgggcattcgtaatgtggtcatggcacacaagcaaatgctcgtcaatggatgtcctgttgtgctaagaggtgtcaacagacatgagcaccatccacgccttggaaagacaaatttagaagcatgcatgatcaaggacctgattttgatgaggcaaaacaatatcaatgctgttagaaatagccattacccacagcacccaaggtggtatgagttatgtgacatttttggtctttatgtcatagatgaagccaacattgagacacatggttttgatgaatctaacactttcaaacatcctacacttgaacctatttgggcaaatgcaatgcttgatcgtgttgttagcatggtggagagagataagaatcatgcatgcattattgtttggtctctaggaaatgaatcttcatatggacctaatcatgcttccatgtctgatattcacatgctatgggaaacagtaatgggaatattgatgcgtattggatggccatagacaacacttttggactccaaggaggttttatatgggactgggctgatcagggtttactgaaggaggactcagatgggtctaaattttgggcatatggcggcgactttggagatactccaaatgactccaatttttgcctcaatggcattgtgtggcctgatcggacgattcacccagctcttcatgaagtaaaataccttcaccagcctatcaaaatatcatcagcagataatatgcttaagattgaaaatggacacttttttgagacaacagaagctttggacttcagttgggttcttcatggagatggttgtgtcttgggctctggtccattgaatattccaactttggcaccacaaactagtcagctcatcaacatggaatcatcaccttggtttgccctttggagtgcctgtgcagcaaaagaagtatttttgtctgtgaatgtgaaacaaaggcatgaaacacgatgggctaaagctggtcatctcttggcttcagcacaactgtgtttgcctcagaaaaatggctttgtccccagcgtgatagcattgtccagtagccctttggtctgtgaacgcattggtgataatgtaaccatctgcaagaataatgcctggaaaattaaagtaaacagtcagttgggaacaatcgacagctggaaggtcaacgacgttgagcttatgagcaaggggatactcccatgcttttggcgcgcaccaactgacaacgacaaaggaggtttcttcaccaagccatatgactcgcgatggagagaagccttcctcgacaatgtctcgttccacagcagccagttctctgtcaaggagttgccggacaacaccgtggagttctccaccctctactacggtgttcccgggcacctacccaagcctgacgacgaagcctccgagtccattctcttccgggtgaagatggtatgccggatccacgggtcaggcgacgtggttctcgactacgaggtaaaccccaggagcgacctccctccccttccccgggtgggcgtcgtgttcagcgccgggaggtccctgagccacgtcacgtggtacgggcgcgggcccttcgagtgctacccggaccgcaaggcggcggcgcacgtcggcgtgtacgagagcagcgtggaggagctgcacgtgccgtacattgcccccgtggagtgcggcgggcgggcggacgtcaggtgggtggcactccgcgacgccggcgggctcggcctgtacgcgtcggcgcacggcggctccccgccgatgcagatgagcgcgagctactacggcgccgcggagctggacagggcaacgcacgtccacaggctggtgaagggggacgacatcgaggtgcatcttgaccacaggcacatggggctgggcggcgacgacagctggtcgccgtgcgtgcacgagcagtacctgctgccgccgacgcggtacgccttctccctgcggctctgccccctgctgccgtcgtcgtcgtgccatgacatctacaggtctcagctccccagctgatggtgccgtgtgccggagacccgtcgacgtcgagccttgggaaacaacaatgaacgcaatggcctggccagtgaatgaaagtatataatattgtaataaagcagagacgtattagctcctgcaacggcctcgcgatcgcctggatatgtctatgctgagggggtgtttagttaactaataacctaactacatatggcgccaagttactaaaacttaataaataactattactaactaataaatagtaactgaattcctaacttaataaatacttcctccgtttataaatatatgacaccgttgattttttaaaaacaacttagatcactcgtcttattaaaaaaaataatgagttaccatttattttttatggtttatttgatcacttaagatagtttgtgcttgatttaaaattttactttttttaaaaaaatattttaaataagatgagtggtcaaaattttcgaaaaaaagttaacagtgtcatatatttgtgaacggaggtagtagtaagtacctaagtagctaacctactactaactagctaccaacaaaattaatagctatataaactagtatatagctcgtgttaacactacgatcagcgacatgaggggagggattgacggcggcatcagcgacacgaggggaggggttggtggtggccgcacgagtgaagggggtggggaggaggttatgggatagggtctcggtgagggagaggagggatgatccaaataatattgtccattagatttgaataagagagggagtatccaacgatctgaaccgttgattttgatggtttgctaagtttgcgtgtaatttgtttggtggatttagtgaagtttatgggtgtaggggtgatttggttgatgtgccttgcaaagtctaaactgatggattatatagcgttataaataaacaactactgctactctactagttaataactacactagtataatattcatgtgttcgacaaaattttcttaattctaattgtccgggcgtattgtggcggacgacatataaatattcgataaaatgttaactc

SEQ ID NO: 35424 - DNA, 3895 bp, Zea Mays
ggactgctgaccttgtgtttcaggagtggtggagggaggctgaaagcaaggtcggaggatcttgctgcactttgaagctgttgattctgcattctttgcttgggtaaatggagtactagttgggtatagccaggatagcagacttcctgctgagtttgaaattactgattgctgccatccttgtgattcggacaaggaaaatgttcttgctgttcaagttatgaggtggagtgatggctcttatcttgaagatcaggatcactggaggttgtctggtattcacagggatgtgctcctactatcaaagccacagatttttatcacagattacttcttcaaagcaaccttggatgaaaatttcagtttagccgatattgaggttgaggtggagattgactcacacaagcaagaccaggagcacgtcccaactttgtctattgaagcaacactcattgataactctggactatctaacagtatagatgctgatctttcatccgctaatgcagtcaatttgaaaccgaagccaaaacgaactcgaagcccttgtcttggttttcatggttatgtacttggtggaaaaatagaaaatccaaaactttggtctagtgagcatatgccaatgggaagcttattgactgtgaatcatgccaagtgggcattcgtaatgtggtcatggcacacaagcaaatgctcgtcaatggatgtcctgttgtgctaagaggtgtcaacagacatgagcaccatccacgccttggaaagacaaatttagaagcatgcatgatcaaggacctgattttgatgaggcaaaacaatatcaatgctgttagaaatagccattacccacagcacccaaggtggtatgagttatgtgacatttttggtctttatgtcatagatgaagccaacattgagacacatggttttgatgaatctaacactttcaaacatcctacacttgaacctatttgggcaaatgcaatgcttgatcgtgttgttagcatggtggagagagataagaatcatgcatgcattattgtttggtctctaggaaatgaatcttcatatggacctaatcatgcttccatgtctggttggattcgtgaaagggatccaacaagactcctccattatgagggaggtggttccagaacatcatccacagatattgtgtgccccatgtatatgcgtgtctgggatgttgttaagatagcaaaagatccatctgaaacaaggcctctaattctttgcgaatattcacatgctatgggaaacagtaatgggaatattgatgcgtattggatggccatagacaacacttttggactccaaggaggttttatatgggactgggctgatcagggtttactgaaggaggactcagatgggtctaaattttgggcatatggcggcgactttggagatactccaaatgactccaatttttgcctcaatggcattgtgtggcctgatcggacgattcacccagctcttcatgaagtaaaataccttcaccagcctatcaaaatatcatcagcagataatatgcttaagattgaaaatggacacttttttgagacaacagaagctttggacttcagttgggttcttcatggagatggttgtgtcttgggctctggtccattgaatattccaactttggcaccacaaactagtcagctcatcaacatggaatcatcaccttggtttgccctttggagtgcctgtgcagcaaaagaagtatttttgtctgtgaatgtgaaacaaaggcatgaaacacgatgggctaaagctggtcatctcttggcttcagcacaactgtgtttgcctcagaaaaatggctttgtccccagcgtgatagcattgtccagtagccctttggtctgtgaacgcattggtgataatgtaaccatctgcaagaataatgcctggaaaattaaagtaaacagtcagttgggaacaatcgacagctggaaggtcaacgacgttgagcttatgagcaaggggatactcccatgcttttggcgcgcaccaactgacaacgacaaaggaggtttcttcaccaagccatatgactcgcgatggagagaagccttcctcgacaatgtctcgttccacagcagccagttctctgtcaaggagttgccggacaacaccgtggagttctccaccctctactacggtgttcccgggcacctacccaagcctgacgacgaagcctccgagtccattctcttccgggtgaagatggtatgccggatccacgggtcaggcgacgtggttctcgactacgaggtaaaccccaggagcgacctccctccccttccccgggtgggcgtcgtgttcagcgccgggaggtccctgagccacgtcacgtggtacgggcgcgggcccttcgagtgctacccggaccgcaaggcggcggcgcacgtcggcgtgtacgagagcagcgtggaggagctgcacgtgccgtacattgcccccgtggagtgcggcgggcgggcggacgtcaggtgggtggcactccgcgacgccggcgggctcggcctgtacgcgtcggcgcacggcggctccccgccgatgcagatgagcgcgagctactacggcgccgcggagctggacagggcaacgcacgtccacaggctggtgaagggggacgacatcgaggtgcatcttgaccacaggcacatggggctgggcggcgacgacagctggtcgccgtgcgtgcacgagcagtacctgctgccgccgacgcggtacgccttctccctgcggctctgccccctgctgccgtcgtcgtcgtgccatgacatctacaggtctcagctccccagctgatggtgccgtgtgccggagacccgtcgacgtcgagccttgggaaacaacaatgaacgcaatggcctggccagtgaatgaaagtatataatattgtaataaagcagagacgtattagctcctgcaacggcctcgcgatcgcctggatatgtctatgctgagggggtgtttagttaactaataacctaactacatatggcgccaagttactaaaacttaataaataactattactaactaataaatagtaactgaattcctaacttaataaatacttcctccgtttataaatatatgacaccgttgattttttaaaaacaacttagatcactcgtcttattaaaaaaaataatgagttaccatttattttttatggtttatttgatcacttaagatagtttgtgcttgatttaaaattttactttttttaaaaaaatattttaaataagatgagtggtcaaaattttcgaaaaaaagttaacagtgtcatatatttgtgaacggaggtagtagtaagtacctaagtagctaacctactactaactagctaccaacaaaattaatagctatataaactagtatatagctcgtgttaacactacgatcagcgacatgaggggagggattgacggcggcatcagcgacacgaggggaggggttggtggtggccgcacgagtgaagggggtggggaggaggttatgggatagggtctcggtgagggagaggagggatgatccaaataatattgtccattagatttgaataagagagggagtatccaacgatctgaaccgttgattttgatggtttgctaagtttgcgtgtaatttgtttggtggatttagtgaagtttatgggtgtaggggtgatttggttgatgtgccttgcaaagtctaaactgatggattatatagcgttataaataaacaactactgctactctactagttaataactacactagtataatattcatgtgttcgacaaaattttcttaattctaattgtccgggcgtattgtggcggacgacatataaatattcgataaaatgttaactc

SEQ ID NO: 35425 - DNA, 3941 bp, Zea Mays
ctttatcccctgggactgctgaccttgtgtttcaggagtggtggagggaggctgaaagcaaggtcggaggatcttgctgcactttgaagctgttgattctgcattctttgcttgggtaaatggagtactagttgggtatagccaggatagcagacttcctgctgagtttgaaattactgattgctgccatccttgtgattcggacaaggaaaatgttcttgctgttcaagttatgaggtggagtgatggctcttatcttgaagatcaggatcactggaggttgtctggtattcacagggatgtgctcctactatcaaagccacagatttttatcacagattacttcttcaaagcaaccttggatgaaaatttcagtttagccgatattgaggttgaggtggagattgactcacacaagcaagaccaggagcacgtcccaactttgtctattgaagcaacactcattgataactctggactatctaacagtatagatgctgatctttcatccgctaatgcagtcaatttgaaaccgaagccaaaacgaactcgaagcccttgtcttggttttcatggttatgtacttggtggaaaaatagaaaatccaaaactttggtctagtgagcatcctaacttatacacgcttgttgttctccttaaagatgccaatgggaagcttattgactgtgaatcatgccaagtgggcattcgtaatgtggtcatggcacacaagcaaatgctcgtcaatggatgtcctgttgtgctaagaggtgtcaacagacatgagcaccatccacgccttggaaagacaaatttagaagcatgcatgatcaaggacctgattttgatgaggcaaaacaatatcaatgctgttagaaatagccattacccacagcacccaaggtggtatgagttatgtgacatttttggtctttatgtcatagatgaagccaacattgagacacatggttttgatgaatctaacactttcaaacatcctacacttgaacctatttgggcaaatgcaatgcttgatcgtgttgttagcatggtggagagagataagaatcatgcatgcattattgtttggtctctaggaaatgaatcttcatatggacctaatcatgcttccatgtctggttggattcgtgaaagggatccaacaagactcctccattatgagggaggtggttccagaacatcatccacagatattgtgtgccccatgtatatgcgtgtctgggatgttgttaagatagcaaaagatccatctgaaacaaggcctctaattctttgcgaatattcacatgctatgggaaacagtaatgggaatattgatgcgtattggatggccatagacaacacttttggactccaaggaggttttatatgggactgggctgatcagggtttactgaaggaggactcagatgggtctaaattttgggcatatggcggcgactttggagatactccaaatgactccaatttttgcctcaatggcattgtgtggcctgatcggacgattcacccagctcttcatgaagtaaaataccttcaccagcctatcaaaatatcatcagcagataatatgcttaagattgaaaatggacacttttttgagacaacagaagctttggacttcagttgggttcttcatggagatggttgtgtcttgggctctggtccattgaatattccaactttggcaccacaaactagtcagctcatcaacatggaatcatcaccttggtttgccctttggagtgcctgtgcagcaaaagaagtatttttgtctgtgaatgtgaaacaaaggcatgaaacacgatgggctaaagctggtcatctcttggcttcagcacaactgtgtttgcctcagaaaaatggctttgtccccagcgtgatagcattgtccagtagccctttggtctgtgaacgcattggtgataatgtaaccatctgcaagaataatgcctggaaaattaaagtaaacagtcagttgggaacaatcgacagctggaaggtcaacgacgttgagcttatgagcaaggggatactcccatgcttttggcgcgcaccaactgacaacgacaaaggaggtttcttcaccaagccatatgactcgcgatggagagaagccttcctcgacaatgtctcgttccacagcagccagttctctgtcaaggagttgccggacaacaccgtggagttctccaccctctactacggtgttcccgggcacctacccaagcctgacgacgaagcctccgagtccattctcttccgggtgaagatggtatgccggatccacgggtcaggcgacgtggttctcgactacgaggtaaaccccaggagcgacctccctccccttccccgggtgggcgtcgtgttcagcgccgggaggtccctgagccacgtcacgtggtacgggcgcgggcccttcgagtgctacccggaccgcaaggcggcggcgcacgtcggcgtgtacgagagcagcgtggaggagctgcacgtgccgtacattgcccccgtggagtgcggcgggcgggcggacgtcaggtgggtggcactccgcgacgccggcgggctcggcctgtacgcgtcggcgcacggcggctccccgccgatgcagatgagcgcgagctactacggcgccgcggagctggacagggcaacgcacgtccacaggctggtgaagggggacgacatcgaggtgcatcttgaccacaggcacatggggctgggcggcgacgacagctggtcgccgtgcgtgcacgagcagtacctgctgccgccgacgcggtacgccttctccctgcggctctgccccctgctgccgtcgtcgtcgtgccatgacatctacaggtctcagctccccagctgatggtgccgtgtgccggagacccgtcgacgtcgagccttgggaaacaacaatgaacgcaatggcctggccagtgaatgaaagtatataatattgtaataaagcagagacgtattagctcctgcaacggcctcgcgatcgcctggatatgtctatgctgagggggtgtttagttaactaataacctaactacatatggcgccaagttactaaaacttaataaataactattactaactaataaatagtaactgaattcctaacttaataaatacttcctccgtttataaatatatgacaccgttgattttttaaaaacaacttagatcactcgtcttattaaaaaaaataatgagttaccatttattttttatggtttatttgatcacttaagatagtttgtgcttgatttaaaattttactttttttaaaaaaatattttaaataagatgagtggtcaaaattttcgaaaaaaagttaacagtgtcatatatttgtgaacggaggtagtagtaagtacctaagtagctaacctactactaactagctaccaacaaaattaatagctatataaactagtatatagctcgtgttaacactacgatcagcgacatgaggggagggattgacggcggcatcagcgacacgaggggaggggttggtggtggccgcacgagtgaagggggtggggaggaggttatgggatagggtctcggtgagggagaggagggatgatccaaataatattgtccattagatttgaataagagagggagtatccaacgatctgaaccgttgattttgatggtttgctaagtttgcgtgtaatttgtttggtggatttagtgaagtttatgggtgtaggggtgatttggttgatgtgccttgcaaagtctaaactgatggattatatagcgttataaataaacaactactgctactctactagttaataactacactagtataatattcatgtgttcgacaaaattttcttaattctaattgtccgggcgtattgtggcggacgacatataaatattcgataaaatgttaactc

SEQ ID NO: 35426 - DNA, 4009 bp, Zea Mays
attttgatttcctgtgtttttgttaaagatatttggtttcaagtcctaagcaaggtggggctgcagtctttatcccctgggactgctgaccttgtgtttcaggagtggtggagggaggctgaaagcaaggtcggaggatcttgctgcactttgaagctgttgattctgcattctttgcttgggtaaatggagtactagttgggtatagccaggatagcagacttcctgctgagtttgaaattactgattgctgccatccttgtgattcggacaaggaaaatgttcttgctgttcaagttatgaggtggagtgatggctcttatcttgaagatcaggatcactggaggttgtctggtattcacagggatgtgctcctactatcaaagccacagatttttatcacagattacttcttcaaagcaaccttggatgaaaatttcagtttagccgatattgagggttgaggtggagattgactcacacaagcaagaccaggagcacgtcccaactttgtctattgaagcaacactcattgataactctggactatctaacagtatagatgctgatctttcatccgctaatgcagtcaatttgaaaccgaagccaaaacgaactcgaagcccttgtcttggttttcatggttatgtacttggtggaaaaatagaaaatccaaaactttggtctagtgagcatcctaacttatacacgcttgttgttctccttaaagatgccaatgggaagcttattgactgtgaatcatgccaagtgggcattcgtaatgtggtcatggcacacaagcaaatgctcgtcaatggatgtcctgttgtgctaagaggtgtcaacagacatgagcaccatccacgccttggaaagacaaatttagaagcatgcatgatcaaggacctgattttgatgaggcaaaacaatatcaatgctgttagaaatagccattacccacagcacccaaggtggtatgagttatgtgacatttttggtctttatgtcatagatgaagccaacattgagacacatggttttgatgaatctaacactttcaaacatcctacacttgaacctatttgggcaaatgcaatgcttgatcgtgttgttagcatggtggagagagataagaatcatgcatgcattattgtttggtctctaggaaatgaatcttcatatggacctaatcatgcttccatgtctggttggattcgtgaaagggatccaacaagactcctccattatgagggaggtggttccagaacatcatccacagatattgtgtgccccatgtatatgcgtgtctgggatgttgttaagatagcaaaagatccatctgaaacaaggcctctaattctttgcgaatattcacatgctatgggaaacagtaatgggaatattgatgcgtattggatggccatagacaacacttttggactccaaggaggttttatatgggactgggctgatcagggtttactgaaggaggactcagatgggtctaaattttgggcatatggcggcgactttggagatactccaaatgactccaatttttgcctcaatggcattgtgtggcctgatcggacgattcacccagctcttcatgaagtaaaataccttcaccagcctatcaaaatatcatcagcagataatatgcttaagattgaaaatggacacttttttgagacaacagaagctttggacttcagttgggttcttcatggagatggttgtgtcttgggctctggtccattgaatattccaactttggcaccacaaactagtcagctcatcaacatggaatcatcaccttggtttgccctttggagtgcctgtgcagcaaaagaagtatttttgtctgtgaatgtgaaacaaaggcatgaaacacgatgggctaaagctggtcatctcttggcttcagcacaactgtgtttgcctcagaaaaatggctttgtccccagcgtgatagcattgtccagtagccctttggtctgtgaacgcattggtgataatgtaaccatctgcaagaataatgcctggaaaattaaagtaaacagtcagttgggaacaatcgacagctggaaggtcaacgacgttgagcttatgagcaaggggatactcccatgcttttggcgcgcaccaactgacaacgacaaaggaggtttcttcaccaagccatatgactcgcgatggagagaagccttcctcgacaatgtctcgttccacagcagccagttctctgtcaaggagttgccggacaacaccgtggagttctccaccctctactacggtgttcccgggcacctacccaagcctgacgacgaagcctccgagtccattctcttccgggtgaagatggtatgccggatccacgggtcaggcgacgtggttctcgactacgaggtaaaccccaggagcgacctccctccccttccccgggtgggcgtcgtgttcagcgccgggaggtccctgagccacgtcacgtggtacgggcgcgggcccttcgagtgctacccggaccgcaaggcggcggcgcacgtcggcgtgtacgagagcagcgtggaggagctgcacgtgccgtacattgcccccgtggagtgcggcgggcgggcggacgtcaggtgggtggcactccgcgacgccggcgggctcggcctgtacgcgtcggcgcacggcggctccccgccgatgcagatgagcgcgagctactacggcgccgcggagctggacagggcaacgcacgtccacaggctggtgaagggggacgacatcgaggtgcatcttgaccacaggcacatggggctgggcggcgacgacagctggtcgccgtgcgtgcacgagcagtacctgctgccgccgacgcggtacgccttctccctgcggctctgccccctgctgccgtcgtcgtcgtgccatgacatctacaggtctcagctccccagctgatggtgccgtgtgccggagacccgtcgacgtcgagccttgggaaacaacaatgaacgcaatggcctggccagtgaatgaaagtatataatattgtaataaagcagagacgtattagctcctgcaacggcctcgcgatcgcctggatatgtctatgctgagggggtgtttagttaactaataacctaactacatatggcgccaagttactaaaacttaataaataactattactaactaataaatagtaactgaattcctaacttaataaatacttcctccgtttataaatatatgacaccgttgattttttaaaaacaacttagatcactcgtcttattaaaaaaaataatgagttaccatttattttttatggtttatttgatcacttaagatagtttgtgcttgatttaaaattttactttttttaaaaaaatattttaaataagatgagtggtcaaaattttcgaaaaaaagttaacagtgtcatatatttgtgaacggaggtagtagtaagtacctaagtagctaacctactactaactagctaccaacaaaattaatagctatataaactagtatatagctcgtgttaacactacgatcagcgacatgaggggagggattgacggcggcatcagcgacacgaggggaggggttggtggtggccgcacgagtgaagggggtggggaggaggttatgggatagggtctcggtgagggagaggagggatgatccaaataatattgtccattagatttgaataagagagggagtatccaacgatctgaaccgttgattttgatggtttgctaagtttgcgtgtaatttgtttggtggatttagtgaagtttatgggtgtaggggtgatttggttgatgtgccttgcaaagtctaaactgatggattatatagcgttataaataaacaactactgctactctactagttaataactacactagtataatattcatgtgttcgacaaaattttcttaattctaattgtccgggcgtattgtggcggacgacatataaatattcgataaaatgttaactc

SEQ ID NO: 35427 - DNA, 4666 bp, Zea Mays
ctcttccgacgcgacggcagatttgggaggtgtcgcggccagagagtgcacaggcacaactgacggtgctcgctcctctgctctgtgactcatcgctcgacgacgaaaacactcgttggatgttgcgctgtgttccaatccaatccgctccgctccgctccgctccgcaacccaattcccatctccgccggtgagggattcgccacaccacacgccaggccgcccctcggtcgcggaacccacttcctgctggcgcgcgccgtcttccgttggtccggacatgtgtctttgacagatcgttacaggaggaaagaggtgcccctgtttgtccacaatggctttagctcatgccagcgccatgtttcctccctcgagcccctcacataaaacttgggaggacccgtcattcttcaagtggagaaagcgtgaggcgcatgtaccactgcgctcacaggacacgctggaagcggctctgaagtattggcatgaacggaggaatgtgaactatcacaatgctgacactgctgtctggaacgatgacgctgttcgcggtgctctggaaagtgctgccttttggtccaagggcttaccgtacgccaaatctctaagcggatactggaaattccttctgtcgccttcagcggaaagtattccggagagattctattatgctcattttgatgattcaaactggtcgggtttgccagttccctcaaattggcaaatgcatgggtttgaccgtccaatctacacaaatgtcacatatcctttcccattgaacccaccatttgtgccggctgataatcccacaggttgttacaggacagtctttcacatcccaaaagagtggaaaggtcggaggatcttgctgcactttgaagctgttgattctgcattctttgcttgggtaaatggagtactagttgggtataggaaaatgttcttgctgttcaagttatgaggtggagtgatggctcttatcttgaagatcaggatcactggaggttgtctggtattcacagggatgtgctcctactatcaaagccacagatttttatcacagattacttcttcaaagcaaccttggatgaaaatttcagtttagccgatattgaggttgaggtggagattgactcacacaagcaagaccaggagcacgtcccaactttgtctattgaagcaacactcattgataactctggactatctaacagtatagatgctgatctttcatccgctaatgcagtcaatttgaaaccgaagccaaaacgaactcgaagcccttgtcttggttttcatggttatgtacttggtggaaaaatagaaaatccaaaactttggtctagtgagcatcctaacttatacacgcttgttgttctccttaaagatgccaatgggaagcttattgactgtgaatcatgccaagtgggcattcgtaatgtggtcatggcacacaagcaaatgctcgtcaatggatgtcctgttgtgctaagaggtgtcaacagacatgagcaccatccacgccttggaaagacaaatttagaagcatgcatgatcaaggacctgattttgatgaggcaaaacaatatcaatgctgttagaaatagccattacccacagcacccaaggtggtatgagttatgtgacatttttggtctttatgtcatagatgaagccaacattgagacacatggttttgatgaatctaacactttcaaacatcctacacttgaacctatttgggcaaatgcaatgcttgatcgtgttgttagcatggtggagagagataagaatcatgcatgcattattgtttggtctctaggaaatgaatcttcatatggacctaatcatgcttccatgtctggttggattcgtgaaagggatccaacaagactcctccattatgagggaggtggttccagaacatcatccacagatattgtgtgccccatgtatatgcgtgtctgggatgttgttaagatagcaaaagatccatctgaaacaaggcctctaattctttgcgaatattcacatgctatgggaaacagtaatgggaatattgatgcgtattggatggccatagacaacacttttggactccaaggaggttttatatgggactgggctgatcagggtttactgaaggaggactcagatgggtctaaattttgggcatatggcggcgactttggagatactccaaatgactccaatttttgcctcaatggcattgtgtggcctgatcggacgattcacccagctcttcatgaagtaaaataccttcaccagcctatcaaaatatcatcagcagataatatgcttaagattgaaaatggacacttttttgagacaacagaagctttggacttcagttgggttcttcatggagatggttgtgtcttgggctctggtccattgaatattccaactttggcaccacaaactagtcagctcatcaacatggaatcatcaccttggtttgccctttggagtgcctgtgcagcaaaagaagtatttttgtctgtgaatgtgaaacaaaggcatgaaacacgatgggctaaagctggtcatctcttggcttcagcacaactgtgtttgcctcagaaaaatggctttgtccccagcgtgatagcattgtccagtagccctttggtctgtgaacgcattggtgataatgtaaccatctgcaagaataatgcctggaaaattaaagtaaacagtcagttgggaacaatcgacagctggaaggtcaacgacgttgagcttatgagcaaggggatactcccatgcttttggcgcgcaccaactgacaacgacaaaggaggtttcttcaccaagccatatgactcgcgatggagagaagccttcctcgacaatgtctcgttccacagcagccagttctctgtcaaggagttgccggacaacaccgtggagttctccaccctctactacggtgttcccgggcacctacccaagcctgacgacgaagcctccgagtccattctcttccgggtgaagatggtatgccggatccacgggtcaggcgacgtggttctcgactacgaggtaaaccccaggagcgacctccctccccttccccgggtgggcgtcgtgttcagcgccgggaggtccctgagccacgtcacgtggtacgggcgcgggcccttcgagtgctacccggaccgcaaggcggcggcgcacgtcggcgtgtacgagagcagcgtggaggagctgcacgtgccgtacattgcccccgtggagtgcggcgggcgggcggacgtcaggtgggtggcactccgcgacgccggcgggctcggcctgtacgcgtcggcgcacggcggctccccgccgatgcagatgagcgcgagctactacggcgccgcggagctggacagggcaacgcacgtccacaggctggtgaagggggacgacatcgaggtgcatcttgaccacaggcacatggggctgggcggcgacgacagctggtcgccgtgcgtgcacgagcagtacctgctgccgccgacgcggtacgccttctccctgcggctctgccccctgctgccgtcgtcgtcgtgccatgacatctacaggtctcagctccccagctgatggtgccgtgtgccggagacccgtcgacgtcgagccttgggaaacaacaatgaacgcaatggcctggccagtgaatgaaagtatataatattgtaataaagcagagacgtattagctcctgcaacggcctcgcgatcgcctggatatgtctatgctgagggggtgtttagttaactaataacctaactacatatggcgccaagttactaaaacttaataaataactattactaactaataaatagtaactgaattcctaacttaataaatacttcctccgtttataaatatatgacaccgttgattttttaaaaacaacttagatcactcgtcttattaaaaaaaataatgagttaccatttattttttatggtttatttgatcacttaagatagtttgtgcttgatttaaaattttactttttttaaaaaaatattttaaataagatgagtggtcaaaattttcgaaaaaaagttaacagtgtcatatatttgtgaacggaggtagtagtaagtacctaagtagctaacctactactaactagctaccaacaaaattaatagctatataaactagtatatagctcgtgttaacactacgatcagcgacatgaggggagggattgacggcggcatcagcgacacgaggggaggggttggtggtggccgcacgagtgaagggggtggggaggaggttatgggatagggtctcggtgagggagaggagggatgatccaaataatattgtccattagatttgaataagagagggagtatccaacgatctgaaccgttgattttgatggtttgctaagtttgcgtgtaatttgtttggtggatttagtgaagtttatgggtgtaggggtgatttggttgatgtgccttgcaaagtctaaactgatggattatatagcgttataaataaacaactactgctactctactagttaataactacactagtataatattcatgtgttcgacaaaattttcttaattctaattgtccgggcgtattgtggcggacgacatataaatattcgataaaatgttaactc

SEQ ID NO: 35428 - DNA, 4589 bp, Zea Mays
cggaaaccaggcctcaattgatccagctcaggccagcaaatcctccgaaatgcaagcggcccacctgcttccgacggcatagcgtcttggactctctctcctctctctctgagtctctgtctctgtctcttccgacgcgacggcagatttgggaggtgtcgcggccagagagtgcacaggcacaactgacggtgctcgctcctctgctctgtgactcatcgctcgacgacgaaaacactcgttggatgttgcgctgtgttccaatccaatccgctccgctccgctccgctccgcaacccaattcccatctccgccggtgagggattcgccacaccacacgccaggccgcccctcggtcgcggaacccacttcctgctggcgcgcgccgtcttccgttggtccggacatgtgtctttgacagatcgttacaggaggaaagaggtgcccctgtttgtccacaatggctttagctcatgccagcgccatgtttcctccctcgagcccctcacataaaacttgggaggacccgtcattcttcaagtggagaaagcgtgaggcgcatgtaccactgcgctcacaggacacgctggaagcggctctgaagtattggcatgaacggaggaatgtgaactatcacaatgctgacactgctgtctggaacgatgacgctgttcgcggtgctctggaaagtgctgccttttggtccaagggcttaccgtacgccaaatctctaagcggatactggaaattccttctgtcgccttcagcggaaagtattccggagagattctattatgctcattttgatgattcaaactggtcgggtttgccagttccctcaaattggcaaatgcatgggtttgaccgtccaatctacacaaatgtcacatatcctttcccattgaacccaccatttgtgccggctgataatcccacaggttgttacaggacagtctttcacatcccaaaagagtggaaaggtcggaggatcttgctgcactttgaagctgttgattctgcattctttgcttgggtaaatggagtactagttgggtatagccaggatagcagacttcctgctgagtttgaaattactgattgctgccatccttgtgattcggacaaggaaaatgttcttgctgttcaagttatgaggtggagtgatggctcttatcttgaagatcaggatcactggaggttgtctggtattcacagggatgtgctcctactatcaaagccacagatttttatcacagattacttcttcaaagcaaccttggatgaaaatttcagtttagccgatattgaggttgaggtggagattgactcacacaagcaagaccaggagcacgtcccaactttgtctattgaagcaacactcattgataactctggactatctaacagtatagatgctgatctttcatccgctaatgcagtcaatttgaaaccgaagccaaaacgaactcgaagcccttgtcttggttttcatggttatgtacttggtggaaaaatagaaaatccaaaactttggtctagtgagcatatgccaatgggaagcttattgactgtgaatcatgccaagtgggcattcgtaatgtggtcatggcacacaagcaaatgctcgtcaatggatgtcctgttgtgctaagaggtgtcaacagacatgagcaccatccacgccttggaaagacaaatttagaagcatgcatgatcaaggacctgattttgatgaggcaaaacaatatcaatgctgttagaaatagccattacccacagcacccaaggttggattcgtgaaagggatccaacaagactcctccattatgagggaggtggttccagaacatcatccacagatattgtgtgccccatgtatatgcgtgtctgggatgttgttaagatagcaaaagatccatctgaaacaaggcctctaattctttgcgaatattcacatgctatgggaaacagtaatgggaatattgatgcgtattggatggccatagacaacacttttggactccaaggaggttttatatgggactgggctgatcagggtttactgaaggaggactcagatgggtctaaattttgggcatatggcggcgactttggagatactccaaatgactccaatttttgcctcaatggcattgtgtggcctgatcggacgattcacccagctcttcatgaagtaaaataccttcaccagcctatcaaaatatcatcagcagataatatgcttaagattgaaaatggacacttttttgagacaacagaagctttggacttcagttgggttcttcatggagatggttgtgtcttgggctctggtccattgaatattccaactttggcaccacaaactagtcagctcatcaacatggaatcatcaccttggtttgccctttggagtgcctgtgcagcaaaagaagtatttttgtctgtgaatgtgaaacaaaggcatgaaacacgatgggctaaagctggtcatctcttggcttcagcacaactgtgtttgcctcagaaaaatggctttgtccccagcgtgatagcattgtccagtagccctttggtctgtgaacgcattggtgataatgtaaccatctgcaagaataatgcctggaaaattaaagtaaacagtcagttgggaacaatcgacagctggaaggtcaacgacgttgagcttatgagcaaggggatactcccatgcttttggcgcgcaccaactgacaacgacaaaggaggtttcttcaccaagccatatgactcgcgatggagagaagccttcctcgacaatgtctcgttccacagcagccagttctctgtcaaggagttgccggacaacaccgtggagttctccaccctctactacggtgttcccgggcacctacccaagcctgacgacgaagcctccgagtccattctcttccgggtgaagatggtatgccggatccacgggtcaggcgacgtggttctcgactacgaggtaaaccccaggagcgacctccctccccttccccgggtgggcgtcgtgttcagcgccgggaggtccctgagccacgtcacgtggtacgggcgcgggcccttcgagtgctacccggaccgcaaggcggcggcgcacgtcggcgtgtacgagagcagcgtggaggagctgcacgtgccgtacattgcccccgtggagtgcggcgggcgggcggacgtcaggtgggtggcactccgcgacgccggcgggctcggcctgtacgcgtcggcgcacggcggctccccgccgatgcagatgagcgcgagctactacggcgccgcggagctggacagggcaacgcacgtccacaggctggtgaagggggacgacatcgaggtgcatcttgaccacaggcacatggggctgggcggcgacgacagctggtcgccgtgcgtgcacgagcagtacctgctgccgccgacgcggtacgccttctccctgcggctctgccccctgctgccgtcgtcgtcgtgccatgacatctacaggtctcagctccccagctgatggtgccgtgtgccggagacccgtcgacgtcgagccttgggaaacaacaatgaacgcaatggcctggccagtgaatgaaagtatataatattgtaataaagcagagacgtattagctcctgcaacggcctcgcgatcgcctggatatgtctatgctgagggggtgtttagttaactaataacctaactacatatggcgccaagttactaaaacttaataaataactattactaactaataaatagtaactgaattcctaacttaataaatacttcctccgtttataaatatatgacaccgttgattttttaaaaacaacttagatcactcgtcttattaaaaaaaataatgagttaccatttattttttatggtttatttgatcacttaagatagtttgtgcttgatttaaaattttactttttttaaaaaaatattttaaataagatgagtggtcaaaattttcgaaaaaaagttaacagtgtcatatatttgtgaacggaggtagtagtaagtacctaagtagctaacctactactaactagctaccaacaaaattaatagctatataaactagtatatagctcgtgttaacactacgatcagcgacatgaggggagggattgacggcggcatcagcgacacgaggggaggggttggtggtggccgcacgagtgaagggggtggggaggaggttatgggatagggtctcggtgagggagaggagggatgatccaaataatattgtccattagatttgaataagagagggagtatccaacgatctgaaccgttgattttgatggtttgctaagtttgcgtgtaatttgtttggtggatttagtgaagtttatgggtgtaggggtgatttggttgatgtgccttgcaaagtctaaactgatggattatatagcgttataaataaacaactactgctactctactagttaataactacactagtataatattcatgtgttcgacaaaattttcttaattctaattgtccgggcgtattgtggcggacgacatataaatattcgataaaatgttaactc

SEQ ID NO: 35429 - DNA, 4799 bp, Zea Mays
cctgcatccaccgctccgccgaccgaggccgaggaaggcccgtgatatacgacagaataggtcatcttgtcctaccaggcctgtcggaaaccaggcctcaattgatccagctcaggccagcaaatcctccgaaatgcaagcggcccacctgcttccgacggcatagcgtcttggactctctctcctctctctctgagtctctgtctctgtctcttccgacgcgacggcagatttgggaggtgtcgcggccagagagtgcacaggcacaactgacggtgctcgctcctctgctctgtgactcatcgctcgacgacgaaaacactcgttggatgttgcgctgtgttccaatccaatccgctccgctccgctccgctccgcaacccaattcccatctccgccggtgagggattcgccacaccacacgccaggccgcccctcggtcgcggaacccacttcctgctggcgcgcgccgtcttccgttggtccggacatgtgtctttgacagatcgttacaggaggaaagaggtgcccctgtttgtccacaatggctttagctcatgccagcgccatgtttcctccctcgagcccctcacataaaacttgggaggacccgtcattcttcaagtggagaaagcgtgaggcgcatgtaccactgcgctcacaggacacgctggaagcggctctgaagtattggcatgaacggaggaatgtgaactatcacaatgctgacactgctgtctggaacgatgacgctgttcgcggtgctctggaaagtgctgccttttggtccaagggcttaccgtacgccaaatctctaagcggatactggaaattccttctgtcgccttcagcggaaagtattccggagagattctattatgctcattttgatgattcaaactggtcgggtttgccagttccctcaaattggcaaatgcatgggtttgaccgtccaatctacacaaatgtcacatatcctttcccattgaacccaccatttgtgccggctgataatcccacaggttgttacaggacagtctttcacatcccaaaagagtggaaaggtcggaggatcttgctgcactttgaagctgttgattctgcattctttgcttgggtaaatggagtactagttgggtatagccaggatagcagacttcctgctgagtttgaaattactgattgctgccatccttgtgattcggacaaggaaaatgttcttgctgttcaagttatgaggtggagtgatggctcttatcttgaagatcaggatcactggaggttgtctggtattcacagggatgtgctcctactatcaaagccacagatttttatcacagattacttcttcaaagcaaccttggatgaaaatttcagtttagccgatattgaggttgaggtggagattgactcacacaagcaagaccaggagcacgtcccaactttgtctattgaagcaacactcattgataactctggactatctaacagtatagatgctgatctttcatccgctaatgcagtcaatttgaaaccgaagccaaaacgaactcgaagcccttgtcttggttttcatggttatgtacttggtggaaaaatagaaaatccaaaactttggtctagtgagcatcctaacttatacacgcttgttgttctccttaaagatgccaatgggaagcttattgactgtgaatcatgccaagtgggcattcgtaatgtggtcatggcacacaagcaaatgctcgtcaatggatgtcctgttgtgctaagaggtgtcaacagacatgagcaccatccacgccttggaaagacaaatttagaagcatgcatgatcaaggacctgattttgatgaggcaaaacaatatcaatgctgttagaaatagccattacccacagcacccaagcatggtggagagagataagaatcatgcatgcattattgtttggtctctaggaaatgaatcttcatatggacctaatcatgcttccatgtctggttggattcgtgaaagggatccaacaagactcctccattatgagggaggtggttccagaacatcatccacagatattgtgtgccccatgtatatgcgtgtctgggatgttgttaagatagcaaaagatccatctgaaacaaggcctctaattctttgcgaatattcacatgctatgggaaacagtaatgggaatattgatgcgtattggatggccatagacaacacttttggactccaaggaggttttatatgggactgggctgatcagggtttactgaaggaggactcagatgggtctaaattttgggcatatggcggcgactttggagatactccaaatgactccaatttttgcctcaatggcattgtgtggcctgatcggacgattcacccagctcttcatgaagtaaaataccttcaccagcctatcaaaatatcatcagcagataatatgcttaagattgaaaatggacacttttttgagacaacagaagctttggacttcagttgggttcttcatggagatggttgtgtcttgggctctggtccattgaatattccaactttggcaccacaaactagtcagctcatcaacatggaatcatcaccttggtttgccctttggagtgcctgtgcagcaaaagaagtatttttgtctgtgaatgtgaaacaaaggcatgaaacacgatgggctaaagctggtcatctcttggcttcagcacaactgtgtttgcctcagaaaaatggctttgtccccagcgtgatagcattgtccagtagccctttggtctgtgaacgcattggtgataatgtaaccatctgcaagaataatgcctggaaaattaaagtaaacagtcagttgggaacaatcgacagctggaaggtcaacgacgttgagcttatgagcaaggggatactcccatgcttttggcgcgcaccaactgacaacgacaaaggaggtttcttcaccaagccatatgactcgcgatggagagaagccttcctcgacaatgtctcgttccacagcagccagttctctgtcaaggagttgccggacaacaccgtggagttctccaccctctactacggtgttcccgggcacctacccaagcctgacgacgaagcctccgagtccattctcttccgggtgaagatggtatgccggatccacgggtcaggcgacgtggttctcgactacgaggtaaaccccaggagcgacctccctccccttccccgggtgggcgtcgtgttcagcgccgggaggtccctgagccacgtcacgtggtacgggcgcgggcccttcgagtgctacccggaccgcaaggcggcggcgcacgtcggcgtgtacgagagcagcgtggaggagctgcacgtgccgtacattgcccccgtggagtgcggcgggcgggcggacgtcaggtgggtggcactccgcgacgccggcgggctcggcctgtacgcgtcggcgcacggcggctccccgccgatgcagatgagcgcgagctactacggcgccgcggagctggacagggcaacgcacgtccacaggctggtgaagggggacgacatcgaggtgcatcttgaccacaggcacatggggctgggcggcgacgacagctggtcgccgtgcgtgcacgagcagtacctgctgccgccgacgcggtacgccttctccctgcggctctgccccctgctgccgtcgtcgtcgtgccatgacatctacaggtctcagctccccagctgatggtgccgtgtgccggagacccgtcgacgtcgagccttgggaaacaacaatgaacgcaatggcctggccagtgaatgaaagtatataatattgtaataaagcagagacgtattagctcctgcaacggcctcgcgatcgcctggatatgtctatgctgagggggtgtttagttaactaataacctaactacatatggcgccaagttactaaaacttaataaataactattactaactaataaatagtaactgaattcctaacttaataaatacttcctccgtttataaatatatgacaccgttgattttttaaaaacaacttagatcactcgtcttattaaaaaaaataatgagttaccatttattttttatggtttatttgatcacttaagatagtttgtgcttgatttaaaattttactttttttaaaaaaatattttaaataagatgagtggtcaaaattttcgaaaaaaagttaacagtgtcatatatttgtgaacggaggtagtagtaagtacctaagtagctaacctactactaactagctaccaacaaaattaatagctatataaactagtatatagctcgtgttaacactacgatcagcgacatgaggggagggattgacggcggcatcagcgacacgaggggaggggttggtggtggccgcacgagtgaagggggtggggaggaggttatgggatagggtctcggtgagggagaggagggatgatccaaataatattgtccattagatttgaataagagagggagtatccaacgatctgaaccgttgattttgatggtttgctaagtttgcgtgtaatttgtttggtggatttagtgaagtttatgggtgtaggggtgatttggttgatgtgccttgcaaagtctaaactgatggattatatagcgttataaataaacaactactgctactctactagttaataactacactagtataatattcatgtgttcgacaaaattttcttaattctaattgtccgggcgtattgtggcggacgacatataaatattcgataaaatgttaactc

SEQ ID NO: 35430 - DNA, 4763 bp, Zea Mays
ataagatgcatgaaactaagcattaaacattgttgttgaactaaaaacatagattaaaaataaataaaataaataaatagataaaaatgctgtcacacgtctgtagactgcatcctgcatccaccgctccgccgaccgaggccgaggaaggcccgtgatatacgacagaataggtcatcttgtcctaccaggcctgtcggaaaccaggcctcaattgatccagctcaggccagcaaatcctccgaaatgcaagcggcccacctgcttccgacggcatagcgtcttggactctctctcctctctctctgagtctctgtctctgtctcttccgacgcgacggcagatttgggaggtgtcgcggccagagagtgcacaggcacaactgacggtgctcgctcctctgctctgtgactcatcgctcgacgacgaaaacactcgttggatgttgcgctgtgttccaatccaatccgctccgctccgctccgctccgcaacccaattcccatctccgccggtgagggattcgccacaccacacgccaggccgcccctcggtcgcggaacccacttcctgctggcgcgcgccgtcttccgttggtccggacatgtgtctttgacagatcgttacaggaggaaagaggtgcccctgtttgtccacaatggctttagctcatgccagcgccatgtttcctccctcgagcccctcacataaaacttgggaggacccgtcattcttcaagtggagaaagcgtgaggcgcatgtaccactgcgctcacaggacacgctggaagcggctctgaagtattggcatgaacggaggaatgtgaactatcacaatgctgacactgctgtctggaacgatgacgctgttcgcggtgctctggaaagtgctgccttttggtccaagggcttaccgtacgccaaatctctaagcggatactggaaattccttctgtcgccttcagcggaaagtattccggagagattctattatgctcattttgatgattcaaactggtcgggtttgccagttccctcaaattggcaaatgcatgggtttgaccgtccaatctacacaaatgtcacatatcctttcccattgaacccaccatttgtgccggctgataatcccacaggttgttacaggacagtctttcacatcccaaaagagtggaaaggtcggaggatcttgctgcactttgaagctgttgattctgcattctttgcttgggtaaatggagtactagttgggtatagccaggatagcagacttcctgctgagtttgaaattactgattgctgccatccttgtgattcggacaaggaaaatgttcttgctgttcaagttatgaggtggagtgatggctcttatcttgaagatcaggatcactggaggttgtctggtattcacagggatgtgctcctactatcaaagccacagatttttatcacagattacttcttcaaagcaaccttggatgaaaatttcagtttagccgatattgaggttgaggtggagattgactcacacaagcaagaccaggagcacgtcccaactttgtctattgaagcaacactcattgataactctggactatctaacagtatagatgctgatctttcatccgctaatgcagtcaatttgaaaccgaagccaaaacgaactcgaagcccttgtcttggttttcatggttatgtacttggtggaaaaatagaaaatccaaaactttggtctagtgagcatcctaacttatacacgcttgttgttctccttaaagatgccaatgggaagcttattgactgtgaatcatgccaagtgggcattcgtaatgtggtcatggcacacaagcaaatgctcgtcaatggatgtcctgttgtgctaagaggtgtcaacagacatgagcaccatccacgccttggaaagacaaatttagaagcatgcatgatcaaggacctgattttgatgaggcaaaacaatatcaatgctgttagaaatagccattacccacagcacccaaggtggtatgagttatgtgacatttttggtctttatgtcatagatgaagccaacattgagacacatggttttgatgaatctaacactttcaaacatcctacacttgaacctatttgggcaaatgcaatgcttgatcgtgttgttagcatggtggagagagataagaatcatgcatgcattattgtttggtctctaggaaatgaatcttcatatggacctaatcatgcttccatgtctggttggattcgtgaaagggatccaacaagactcctccattatgagggaggtggttccagaacatcatccacagatattgtgtgccccatgtatatgcgtgtctgggatgttgttaagatagcaaaagatccatctgaaacaaggcctctaattctttgcgaatattcacatgctatgggaaacagtaatgggaatattgatgcgtattggatggccatagacaacacttttggactccaaggaggttttatatgggactgggctgatcagggtttactgaaggaggactcagatgggtctaaattttgggcatatggcggcgactttggagatactccaaatgactccaatttttgcctcaatggcattgtgtggcctgatcggacgattcacccagctcttcatgaagtaaaataccttcaccagcctatcaaaatatcatcagcagataatatgcttaagattgaaaatggacacttttttgagacaacagaagctttggacttcagttgggttcttcatggagatggttgtgtcttgggctctggtccattgaatattccaactttggcaccacaaactagtcagctcatcaacatggaatcatcaccttggtttgccctttggagtgcctgtgcagcaaaagaagtatttttgtctgtgaatgtgaaacaaaggcatgaaacacgatgggctaaagctggtcatctcttggcttcagcacaactgtgtttgcctcagaaaaatggctttgtccccagcgtgatagcattgtccagtagccctttggtctgtgaacgcattggtgataatgtaaccatctgcaagaataatgcctggaaaattaaagtaaacagtcagttgggaacaatcgacagctggaaggtcaacgacgttgagcttatgagcaaggggatactcccatgcttttggcgcgcaccaactgacaacgacaaaggaggtttcttcaccaagccatatgactcgcgatggagagaagccttcctcgacaatgtctcgttccacagcagccagttctctgtcaaggagttgccggacaacaccgtggagttctccaccctctactacggtgttcccgggcacctacccaagcctgacgacgaagcctccgagtccattctcttccgggtgaagatggtatgccggatccacgggtcaggcgacgtggttctcgactacgaggtaaaccccaggagcgacctccctccccttccccggggcaacgcacgtccacaggctggtgaagggggacgacatcgaggtgcatcttgaccacaggcacatggggctgggcggcgacgacagctggtcgccgtgcgtgcacgagcagtacctgctgccgccgacgcggtacgccttctccctgcggctctgccccctgctgccgtcgtcgtcgtgccatgacatctacaggtctcagctccccagctgatggtgccgtgtgccggagacccgtcgacgtcgagccttgggaaacaacaatgaacgcaatggcctggccagtgaatgaaagtatataatattgtaataaagcagagacgtattagctcctgcaacggcctcgcgatcgcctggatatgtctatgctgagggggtgtttagttaactaataacctaactacatatggcgccaagttactaaaacttaataaataactattactaactaataaatagtaactgaattcctaacttaataaatacttcctccgtttataaatatatgacaccgttgattttttaaaaacaacttagatcactcgtcttattaaaaaaaataatgagttaccatttattttttatggtttatttgatcacttaagatagtttgtgcttgatttaaaattttactttttttaaaaaaatattttaaataagatgagtggtcaaaattttcgaaaaaaagttaacagtgtcatatatttgtgaacggaggtagtagtaagtacctaagtagctaacctactactaactagctaccaacaaaattaatagctatataaactagtatatagctcgtgttaacactacgatcagcgacatgaggggagggattgacggcggcatcagcgacacgaggggaggggttggtggtggccgcacgagtgaagggggtggggaggaggttatgggatagggtctcggtgagggagaggagggatgatccaaataatattgtccattagatttgaataagagagggagtatccaacgatctgaaccgttgattttgatggtttgctaagtttgcgtgtaatttgtttggtggatttagtgaagtttatgggtgtaggggtgatttggttgatgtgccttgcaaagtctaaactgatggattatatagcgttataaataaacaactactgctactctactagttaataactacactagtataatattcatgtgttcgacaaaattttcttaattctaattgtccgggcgtattgtggcggacgacatataaatattcgataaaatgttaactc

SEQ ID NO: 35431 - DNA, 5132 bp, Zea Mays
ccatcgcatccaagaattgaccgactcccagtgacgccctgtgtgctggcttggctctgcctctgtgtgttggcctgttgggtagagagagactggtgaccgaagaagcaaggaaggcagctgtgctgtgcagtgagaggtccgtgcaggcaaagcctagctgcagttgcttgcttgccatccacaccacacacccacagcaaagccacgaaccaactcatcgggcgcggagaccaccgcggggggaaaagcgagggaggggggagaggactgaagagaaatcatggagccgatttgctgtggagattcgggcgcgtgatccggtcggatcttgctttcccggggggcgatcgaggccacgccgctgctgccgcggtgccctccctctgcctctgggctctgcgtgtgacgtgccgtgccatggcgctcgccctcgcctatatccccagcctccctcgccccgccgctggccgccgcattcagtaaaaagccacctaccctaccctcctgcgctggtactacttactacctagccaggccaaggagcccaacgagggggaacgctgcggtaggcgcgcgctgctcgtcccaccccacgccgccatgacggtgccagatgccgagtcgcgcttccatgtcctcgcggtggacgacagcctcgtcgacaggaaactcatcgagatgctgctcaagacctcgtcctaccaagtgaccacggtggattccgggagcaaggcgctggagctgctggggctgagggacgcgtcgtcgccgtctccgtcctcgcctgaccaccaggagatcgacgtgaatctcatcatcactgactactgcatgccaggcatgacaggatacgatctgctcaagagagtgaaggggtcctcctcgctcaaggacattcctgtggtgatcatgtcgtctgagaatgtgcctgcccggatcagcaggacatgtgtctttgacagatcgttacaggaggaaagaggtgcccctgtttgtccacaatggctttagctcatgccagcgccatgtttcctccctcgagcccctcacataaaacttgggaggacccgtcattcttcaagtggagaaagcgtgaggcgcatgtaccactgcgctcacaggacacgctggaagcggctctgaagtattggcatgaacggaggaatgtgaactatcacaatgctgacactgctgtctggaacgatgacgctgttcgcggtgctctggaaagtgctgccttttggtccaagggcttaccgtacgccaaatctctaagcggatactggaaattccttctgtcgccttcagcggaaagtattccggagagattctattatgctcattttgatgattcaaactggtcgggtttgccagttccctcaaattggcaaatgcatgggtttgaccgtccaatctacacaaatgtcacatatcctttcccattgaacccaccatttgtgccggctgataatcccacaggttgttacaggacagtctttcacatcccaaaagagtggaaaggtcggaggatcttgctgcactttgaagctgttgattctgcattctttgcttgggtaaatggagtactagttgggtatagccaggatagcagacttcctgctgagtttgaaattactgattgctgccatccttgtgattcggacaaggaaaatgttcttgctgttcaagttatgaggtggagtgatggctcttatcttgaagatcaggatcactggaggttgtctggtattcacagggatgtgctcctactatcaaagccacagatttttatcacagattacttcttcaaagcaaccttggatgaaaatttcagtttagccgatattgagatgccaatgggaagcttattgactgtgaatcatgccaagtgggcattcgtaatgtggtcatggcacacaagcaaatgctcgtcaatggatgtcctgttgtgctaagaggtgtcaacagacatgagcaccatccacgccttggaaagacaaatttagaagcatgcatgatcaaggacctgattttgatgaggcaaaacaatatcaatgctgttagaaatagccattacccacagcacccaaggtggtatgagttatgtgacatttttggtctttatgtcatagatgaagccaacattgagacacatggttttgatgaatctaacactttcaaacatcctacacttgaacctatttgggcaaatgcaatgcttgatcgtgttgttagcatggtggagagagataagaatcatgcatgcattattgtttggtctctaggaaatgaatcttcatatggacctaatcatgcttccatgtctggttggattcgtgaaagggatccaacaagactcctccattatgagggaggtggttccagaacatcatccacagatattgtgtgccccatgtatatgcgtgtctgggatgttgttaagatagcaaaagatccatctgaaacaaggcctctaattctttgcgaatattcacatgctatgggaaacagtaatgggaatattgatgcgtattggatggccatagacaacacttttggactccaaggaggttttatatgggactgggctgatcagggtttactgaaggaggactcagatgggtctaaattttgggcatatggcggcgactttggagatactccaaatgactccaatttttgcctcaatggcattgtgtggcctgatcggacgattcacccagctcttcatgaagtaaaataccttcaccagcctatcaaaatatcatcagcagataatatgcttaagattgaaaatggacacttttttgagacaacagaagctttggacttcagttgggttcttcatggagatggttgtgtcttgggctctggtccattgaatattccaactttggcaccacaaactagtcagctcatcaacatggaatcatcaccttggtttgccctttggagtgcctgtgcagcaaaagaagtatttttgtctgtgaatgtgaaacaaaggcatgaaacacgatgggctaaagctggtcatctcttggcttcagcacaactgtgtttgcctcagaaaaatggctttgtccccagcgtgatagcattgtccagtagccctttggtctgtgaacgcattggtgataatgtaaccatctgcaagaataatgcctggaaaattaaagtaaacagtcagttgggaacaatcgacagctggaaggtcaacgacgttgagcttatgagcaaggggatactcccatgcttttggcgcgcaccaactgacaacgacaaaggaggtttcttcaccaagccatatgactcgcgatggagagaagccttcctcgacaatgtctcgttccacagcagccagttctctgtcaaggagttgccggacaacaccgtggagttctccaccctctactacggtgttcccgggcacctacccaagcctgacgacgaagcctccgagtccattctcttccgggtgaagatggtatgccggatccacgggtcaggcgacgtggttctcgactacgaggtaaaccccaggagcgacctccctccccttccccgggtgggcgtcgtgttcagcgccgggaggtccctgagccacgtcacgtggtacgggcgcgggcccttcgagtgctacccggaccgcaaggcggcggcgcacgtcggcgtgtacgagagcagcgtggaggagctgcacgtgccgtacattgcccccgtggagtgcggcgggcgggcggacgtcaggtgggtggcactccgcgacgccggcgggctcggcctgtacgcgtcggcgcacggcggctccccgccgatgcagatgagcgcgagctactacggcgccgcggagctggacagggcaacgcacgtccacaggctggtgaagggggacgacatcgaggtgcatcttgaccacaggcacatggggctgggcggcgacgacagctggtcgccgtgcgtgcacgagcagtacctgctgccgccgacgcggtacgccttctccctgcggctctgccccctgctgccgtcgtcgtcgtgccatgacatctacaggtctcagctccccagctgatggtgccgtgtgccggagacccgtcgacgtcgagccttgggaaacaacaatgaacgcaatggcctggccagtgaatgaaagtatataatattgtaataaagcagagacgtattagctcctgcaacggcctcgcgatcgcctggatatgtctatgctgagggggtgtttagttaactaataacctaactacatatggcgccaagttactaaaacttaataaataactattactaactaataaatagtaactgaattcctaacttaataaatacttcctccgtttataaatatatgacaccgttgattttttaaaaacaacttagatcactcgtcttattaaaaaaaataatgagttaccatttattttttatggtttatttgatcacttaagatagtttgtgcttgatttaaaattttactttttttaaaaaaatattttaaataagatgagtggtcaaaattttcgaaaaaaagttaacagtgtcatatatttgtgaacggaggtagtagtaagtacctaagtagctaacctactactaactagctaccaacaaaattaatagctatataaactagtatatagctcgtgttaacactacgatcagcgacatgaggggagggattgacggcggcatcagcgacacgaggggaggggttggtggtggccgcacgagtgaagggggtggggaggaggttatgggatagggtctcggtgagggagaggagggatgatccaaataatattgtccattagatttgaataagagagggagtatccaacgatctgaaccgttgattttgatggtttgctaagtttgcgtgtaatttgtttggtggatttagtgaagtttatgggtgtaggggtgatttggttgatgtgccttgcaaagtctaaactgatggattatatagcgttataaataaacaactactgctactctactagttaataactacactagtataatattcatgtgttcgacaaaattttcttaattctaattgtccgggcgtattgtggcggacgacatataaatattcgataaaatgttaactc

SEQ ID NO: 35432 - DNA, 5338 bp, Zea Mays
ccatcgcatccaagaattgaccgactcccagtgacgccctgtgtgctggcttggctctgcctctgtgtgttggcctgttgggtagagagagactggtgaccgaagaagcaaggaaggcagctgtgctgtgcagtgagaggtccgtgcaggcaaagcctagctgcagttgcttgcttgccatccacaccacacacccacagcaaagccacgaaccaactcatcgggcgcggagaccaccgcggggggaaaagcgagggaggggggagaggactgaagagaaatcatggagccgatttgctgtggagattcgggcgcgtgatccggtcggatcttgctttcccggggggcgatcgaggccacgccgctgctgccgcggtgccctccctctgcctctgggctctgcgtgtgacgtgccgtgccatggcgctcgccctcgcctatatccccagcctccctcgccccgccgctggccgccgcattcagtaaaaagccacctaccctaccctcctgcgctggtactacttactacctagccaggccaaggagcccaacgagggggaacgctgcggtaggcgcgcgctgctcgtcccaccccacgccgccatgacggtgccagatgccgagtcgcgcttccatgtcctcgcggtggacgacagcctcgtcgacaggaaactcatcgagatgctgctcaagacctcgtcctaccaagtgaccacggtggattccgggagcaaggcgctggagctgctggggctgagggacgcgtcgtcgccgtctccgtcctcgcctgaccaccaggagatcgacgtgaatctcatcatcactgactactgcatgccaggcatgacaggatacgatctgctcaagagagtgaaggggtcctcctcgctcaaggacattcctgtggtgatcatgtcgtctgagaatgtgcctgcccggatcagcaggacatgtgtctttgacagatcgttacaggaggaaagaggtgcccctgtttgtccacaatggctttagctcatgccagcgccatgtttcctccctcgagcccctcacataaaacttgggaggacccgtcattcttcaagtggagaaagcgtgaggcgcatgtaccactgcgctcacaggacacgctggaagcggctctgaagtattggcatgaacggaggaatgtgaactatcacaatgctgacactgctgtctggaacgatgacgctgttcgcggtgctctggaaagtgctgccttttggtccaagggcttaccgtacgccaaatctctaagcggatactggaaattccttctgtcgccttcagcggaaagtattccggagagattctattatgctcattttgatgattcaaactggtcgggtttgccagttccctcaaattggcaaatgcatgggtttgaccgtccaatctacacaaatgtcacatatcctttcccattgaacccaccatttgtgccggctgataatcccacaggttgttacaggacagtctttcacatcccaaaagagtggaaaggtcggaggatcttgctgcactttgaagctgttgattctgcattctttgcttgggtaaatggagtactagttgggtatagccaggatagcagacttcctgctgagtttgaaattactgattgctgccatccttgtgattcggacaaggaaaatgttcttgctgttcaagttatgaggtggagtgatggctcttatcttgaagatcaggatcactggaggttgtctggtattcacagggatgtgctcctactatcaaagccacagatttttatcacagattacttcttcaaagcaaccttggatgaaaatttcagtttagccgatattgaggttgaggtggagattgactcacacaagcaagaccaggagcacgtcccaactttgtctattgaagcaacactcattgataactctggactatctaacagtatagatgctgatctttcatccgctaatgcagtcaatttgaaaccgaagccaaaacgaactcgaagcccttgtcttggttttcatggttatgtacttggtggaaaaatagaaaatccaaaactttggtctagtgagcatatgccaatgggaagcttattgactgtgaatcatgccaagtgggcattcgtaatgtggtcatggcacacaagcaaatgctcgtcaatggatgtcctgttgtgctaagaggtgtcaacagacatgagcaccatccacgccttggaaagacaaatttagaagcatgcatgatcaaggacctgattttgatgaggcaaaacaatatcaatgctgttagaaatagccattacccacagcacccaaggtggtatgagttatgtgacatttttggtctttatgtcatagatgaagccaacattgagacacatggttttgatgaatctaacactttcaaacatcctacacttgaacctatttgggcaaatgcaatgcttgatcgtgttgttagcatggtggagagagataagaatcatgcatgcattattgtttggtctctaggaaatgaatcttcatatggacctaatcatgcttccatgtctggttggattcgtgaaagggatccaacaagactcctccattatgagggaggtggttccagaacatcatccacagatattgtgtgccccatgtatatgcgtgtctgggatgttgttaagatagcaaaagatccatctgaaacaaggcctctaattctttgcgaatattcacatgctatgggaaacagtaatgggaatattgatgcgtattggatggccatagacaacacttttggactccaaggaggttttatatgggactgggctgatcagggtttactgaaggaggactcagatgggtctaaattttgggcatatggcggcgactttggagatactccaaatgactccaatttttgcctcaatggcattgtgtggcctgatcggacgattcacccagctcttcatgaagtaaaataccttcaccagcctatcaaaatatcatcagcagataatatgcttaagaagctttggacttcagttgggttcttcatggagatggttgtgtcttgggctctggtccattgaatattccaactttggcaccacaaactagtcagctcatcaacatggaatcatcaccttggtttgccctttggagtgcctgtgcagcaaaagaagtatttttgtctgtgaatgtgaaacaaaggcatgaaacacgatgggctaaagctggtcatctcttggcttcagcacaactgtgtttgcctcagaaaaatggctttgtccccagcgtgatagcattgtccagtagccctttggtctgtgaacgcattggtgataatgtaaccatctgcaagaataatgcctggaaaattaaagtaaacagtcagttgggaacaatcgacagctggaaggtcaacgacgttgagcttatgagcaaggggatactcccatgcttttggcgcgcaccaactgacaacgacaaaggaggtttcttcaccaagccatatgactcgcgatggagagaagccttcctcgacaatgtctcgttccacagcagccagttctctgtcaaggagttgccggacaacaccgtggagttctccaccctctactacggtgttcccgggcacctacccaagcctgacgacgaagcctccgagtccattctcttccgggtgaagatggtatgccggatccacgggtcaggcgacgtggttctcgactacgaggtaaaccccaggagcgacctccctccccttccccgggtgggcgtcgtgttcagcgccgggaggtccctgagccacgtcacgtggtacgggcgcgggcccttcgagtgctacccggaccgcaaggcggcggcgcacgtcggcgtgtacgagagcagcgtggaggagctgcacgtgccgtacattgcccccgtggagtgcggcgggcgggcggacgtcaggtgggtggcactccgcgacgccggcgggctcggcctgtacgcgtcggcgcacggcggctccccgccgatgcagatgagcgcgagctactacggcgccgcggagctggacagggcaacgcacgtccacaggctggtgaagggggacgacatcgaggtgcatcttgaccacaggcacatggggctgggcggcgacgacagctggtcgccgtgcgtgcacgagcagtacctgctgccgccgacgcggtacgccttctccctgcggctctgccccctgctgccgtcgtcgtcgtgccatgacatctacaggtctcagctccccagctgatggtgccgtgtgccggagacccgtcgacgtcgagccttgggaaacaacaatgaacgcaatggcctggccagtgaatgaaagtatataatattgtaataaagcagagacgtattagctcctgcaacggcctcgcgatcgcctggatatgtctatgctgagggggtgtttagttaactaataacctaactacatatggcgccaagttactaaaacttaataaataactattactaactaataaatagtaactgaattcctaacttaataaatacttcctccgtttataaatatatgacaccgttgattttttaaaaacaacttagatcactcgtcttattaaaaaaaataatgagttaccatttattttttatggtttatttgatcacttaagatagtttgtgcttgatttaaaattttactttttttaaaaaaatattttaaataagatgagtggtcaaaattttcgaaaaaaagttaacagtgtcatatatttgtgaacggaggtagtagtaagtacctaagtagctaacctactactaactagctaccaacaaaattaatagctatataaactagtatatagctcgtgttaacactacgatcagcgacatgaggggagggattgacggcggcatcagcgacacgaggggaggggttggtggtggccgcacgagtgaagggggtggggaggaggttatgggatagggtctcggtgagggagaggagggatgatccaaataatattgtccattagatttgaataagagagggagtatccaacgatctgaaccgttgattttgatggtttgctaagtttgcgtgtaatttgtttggtggatttagtgaagtttatgggtgtaggggtgatttggttgatgtgccttgcaaagtctaaactgatggattatatagcgttataaataaacaactactgctactctactagttaataactacactagtataatattcatgtgttcgacaaaattttcttaattctaattgtccgggcgtattgtggcggacgacatataaatattcgataaaatgttaactc

SEQ ID NO: 35433 - DNA, 5420 bp, Zea Mays
ccatcgcatccaagaattgaccgactcccagtgacgccctgtgtgctggcttggctctgcctctgtgtgttggcctgttgggtagagagagactggtgaccgaagaagcaaggaaggcagctgtgctgtgcagtgagaggtccgtgcaggcaaagcctagctgcagttgcttgcttgccatccacaccacacacccacagcaaagccacgaaccaactcatcgggcgcggagaccaccgcggggggaaaagcgagggaggggggagaggactgaagagaaatcatggagccgatttgctgtggagattcgggcgcgtgatccggtcggatcttgctttcccggggggcgatcgaggccacgccgctgctgccgcggtgccctccctctgcctctgggctctgcgtgtgacgtgccgtgccatggcgctcgccctcgcctatatccccagcctccctcgccccgccgctggccgccgcattcagtaaaaagccacctaccctaccctcctgcgctggtactacttactacctagccaggccaaggagcccaacgagggggaacgctgcggtaggcgcgcgctgctcgtcccaccccacgccgccatgacggtgccagatgccgagtcgcgcttccatgtcctcgcggtggacgacagcctcgtcgacaggaaactcatcgagatgctgctcaagacctcgtcctaccaagtgaccacggtggattccgggagcaaggcgctggagctgctggggctgagggacgcgtcgtcgccgtctccgtcctcgcctgaccaccaggagatcgacgtgaatctcatcatcactgactactgcatgccaggcatgacaggatacgatctgctcaagagagtgaaggggtcctcctcgctcaaggacattcctgtggtgatcatgtcgtctgagaatgtgcctgcccggatcagcaggacatgtgtctttgacagatcgttacaggaggaaagaggtgcccctgtttgtccacaatggctttagctcatgccagcgccatgtttcctccctcgagcccctcacataaaacttgggaggacccgtcattcttcaagtggagaaagcgtgaggcgcatgtaccactgcgctcacaggacacgctggaagcggctctgaagtattggcatgaacggaggaatgtgaactatcacaatgctgacactgctgtctggaacgatgacgctgttcgcggtgctctggaaagtgctgccttttggtccaagggcttaccgtacgccaaatctctaagcggatactggaaattccttctgtcgccttcagcggaaagtattccggagagattctattatgctcattttgatgattcaaactggtcgggtttgccagttccctcaaattggcaaatgcatgggtttgaccgtccaatctacacaaatgtcacatatcctttcccattgaacccaccatttgtgccggctgataatcccacaggttgttacaggacagtctttcacatcccaaaagagtggaaaggtcggaggatcttgctgcactttgaagctgttgattctgcattctttgcttgggtaaatggagtactagttgggtatagccaggatagcagacttcctgctgagtttgaaattactgattgctgccatccttgtgattcggacaaggaaaatgttcttgctgttcaagttatgaggtggagtgatggctcttatcttgaagatcaggatcactggaggttgtctggtattcacagggatgtgctcctactatcaaagccacaggttactccttgattcttacatgatttttatcacagattacttcttcaaagcaaccttggatgaaaatttcagtttagccgatattgaggttgaggtggagattgactcacacaagcaagaccaggagcacgtcccaactttgtctattgaagcaacactcattgataactctggactatctaacagtatagatgctgatctttcatccgctaatgcagtcaatttgaaaccgaagccaaaacgaactcgaagcccttgtcttggttttcatggttatgtacttggtggaaaaatagaaaatccaaaactttggtctagtgagcatcctaacttatacacgcttgttgttctccttaaagatgccaatgggaagcttattgactgtgaatcatgccaagtgggcattcgtaatgtggtcatggcacacaagcaaatgctcgtcaatggatgtcctgttgtgctaagaggtgtcaacagacatgagcaccatccacgccttggaaagacaaatttagaagcatgcatgatcaaggacctgattttgatgaggcaaaacaatatcaatgctgttagaaatagccattacccacagcacccaaggtggtatgagttatgtgacatttttggtctttatgtcatagatgaagccaacattgagacacatggttttgatgaatctaacactttcaaacatcctacacttgaacctatttgggcaaatgcaatgcttgatcgtgttgttagcatggtggagagagataagaatcatgcatgcattattgtttggtctctaggaaatgaatcttcatatggacctaatcatgcttccatgttggattcgtgaaagggatccaacaagactcctccattatgagggaggtggttccagaacatcatccacagatattgtgtgccccatgtatatgcgtgtctgggatgttgttaagatagcaaaagatccatctgaaacaaggcctctaattctttgcgaatattcacatgctatgggaaacagtaatgggaatattgatgcgtattggatggccatagacaacacttttggactccaaggaggttttatatgggactgggctgatcagggtttactgaaggaggactcagatgggtctaaattttgggcatatggcggcgactttggagatactccaaatgactccaatttttgcctcaatggcattgtgtggcctgatcggacgattcacccagctcttcatgaagtaaaataccttcaccagcctatcaaaatatcatcagcagataatatgcttaagattgaaaatggacacttttttgagacaacagaagctttggacttcagttgggttcttcatggagatggttgtgtcttgggctctggtccattgaatattccaactttggcaccacaaactagtcagctcatcaacatggaatcatcaccttggtttgccctttggagtgcctgtgcagcaaaagaagtatttttgtctgtgaatgtgaaacaaaggcatgaaacacgatgggctaaagctggtcatctcttggcttcagcacaactgtgtttgcctcagaaaaatggctttgtccccagcgtgatagcattgtccagtagccctttggtctgtgaacgcattggtgataatgtaaccatctgcaagaataatgcctggaaaattaaagtaaacagtcagttgggaacaatcgacagctggaaggtcaacgacgttgagcttatgagcaaggggatactcccatgcttttggcgcgcaccaactgacaacgacaaaggaggtttcttcaccaagccatatgactcgcgatggagagaagccttcctcgacaatgtctcgttccacagcagccagttctctgtcaaggagttgccggacaacaccgtggagttctccaccctctactacggtgttcccgggcacctacccaagcctgacgacgaagcctccgagtccattctcttccgggtgaagatggtatgccggatccacgggtcaggcgacgtggttctcgactacgaggtaaaccccaggagcgacctccctccccttccccgggtgggcgtcgtgttcagcgccgggaggtccctgagccacgtcacgtggtacgggcgcgggcccttcgagtgctacccggaccgcaaggcggcggcgcacgtcggcgtgtacgagagcagcgtggaggagctgcacgtgccgtacattgcccccgtggagtgcggcgggcgggcggacgtcaggtgggtggcactccgcgacgccggcgggctcggcctgtacgcgtcggcgcacggcggctccccgccgatgcagatgagcgcgagctactacggcgccgcggagctggacagggcaacgcacgtccacaggctggtgaagggggacgacatcgaggtgcatcttgaccacaggcacatggggctgggcggcgacgacagctggtcgccgtgcgtgcacgagcagtacctgctgccgccgacgcggtacgccttctccctgcggctctgccccctgctgccgtcgtcgtcgtgccatgacatctacaggtctcagctccccagctgatggtgccgtgtgccggagacccgtcgacgtcgagccttgggaaacaacaatgaacgcaatggcctggccagtgaatgaaagtatataatattgtaataaagcagagacgtattagctcctgcaacggcctcgcgatcgcctggatatgtctatgctgagggggtgtttagttaactaataacctaactacatatggcgccaagttactaaaacttaataaataactattactaactaataaatagtaactgaattcctaacttaataaatacttcctccgtttataaatatatgacaccgttgattttttaaaaacaacttagatcactcgtcttattaaaaaaaataatgagttaccatttattttttatggtttatttgatcacttaagatagtttgtgcttgatttaaaattttactttttttaaaaaaatattttaaataagatgagtggtcaaaattttcgaaaaaaagttaacagtgtcatatatttgtgaacggaggtagtagtaagtacctaagtagctaacctactactaactagctaccaacaaaattaatagctatataaactagtatatagctcgtgttaacactacgatcagcgacatgaggggagggattgacggcggcatcagcgacacgaggggaggggttggtggtggccgcacgagtgaagggggtggggaggaggttatgggatagggtctcggtgagggagaggagggatgatccaaataatattgtccattagatttgaataagagagggagtatccaacgatctgaaccgttgattttgatggtttgctaagtttgcgtgtaatttgtttggtggatttagtgaagtttatgggtgtaggggtgatttggttgatgtgccttgcaaagtctaaactgatggattatatagcgttataaataaacaactactgctactctactagttaataactacactagtataatattcatgtgttcgacaaaattttcttaattctaattgtccgggcgtattgtggcggacgacatataaatattcgataaaatgttaactc

SEQ ID NO: 35434 - DNA, 5300 bp, Zea Mays
cgggcctccgctttgcttggaagacctgcgcgcgccgggccgacgcccatccaccatccatcgcatccaagaattgaccgactcccagtgacgccctgtgtgctggcttggctctgcctctgtgtgttggcctgttgggtagagagagactggtgaccgaagaagcaaggaaggcagctgtgctgtgcagtgagaggtccgtgcaggcaaagcctagctgcagttgcttgcttgccatccacaccacacacccacagcaaagccacgaaccaactcatcgggcgcggagaccaccgcggggggaaaagcgagggaggggggagaggactgaagagaaatcatggagccgatttgctgtggagattcgggcgcgtgatccggtcggatcttgctttcccggggggcgatcgaggccacgccgctgctgccgcggtgccctccctctgcctctgggctctgcgtgtgacgtgccgtgccatggcgctcgccctcgcctatatccccagcctccctcgccccgccgctggccgccgcattcagtaaaaagccacctaccctaccctcctgcgctggtactacttactacctagccaggccaaggagcccaacgagggggaacgctgcggtaggcgcgcgctgctcgtcccaccccacgccgccatgacggtgccagatgccgagtcgcgcttccatgtcctcgcggtggacgacagcctcgtcgacaggaaactcatcgagatgctgctcaagacctcgtcctaccaagtgaccacggtggattccgggagcaaggcgctggagctgctggggctgagggacgcgtcgtcgccgtctccgtcctcgcctgaccaccaggagatcgacgtgaatctcatcatcactgactactgcatgccaggcatgacaggatacgatctgctcaagagagtgaaggggtcctcctcgctcaaggacattcctgtggtgatcatgtcgtctgagaatgtgcctgcccggatcagcaggacatgtgtctttgacagatcgttacaggaggaaagaggtgcccctgtttgtccacaatggctttagctcatgccagcgccatgtttcctccctcgagcccctcacataaaacttgggaggacccgtcattcttcaagtggagaaagcgtgaggcgcatgtaccactgcgctcacaggacacgctggaagcggctctgaagtattggcatgaacggaggaatgtgaactatcacaatgctgacactgctgtctggaacgatgacgctgttcgcggtgctctggaaagtgctgccttttggtccaagggcttaccgtacgccaaatctctaagcggatactggaaattccttctgtcgccttcagcggaaagtattccggagagattctattatgctcattttgatgattcaaactggtcgggtttgccagttccctcaaattggcaaatgcatgggtttgaccgtccaatctacacaaatgtcacatatcctttcccattgaacccaccatttgtgccggctgataatcccacaggttgttacaggacagtctttcacatcccaaaagagtggaaaggtcggaggatcttgctgcactttgaagctgttgattctgcattctttgcttgggtaaatggagtactagttgggtatagccaggatagcagacttcctgctgagtttgaaattactgattgctgccatccttgtgattcggacaaggaaaatgttcttgctgttcaagttatgaggtggagtgatggctcttatcttgaagatcaggatcactggaggttgtctggtattcacagggatgtgctcctactatcaaagccacagatttttatcacagattacttcttcaaagcaaccttggatgaaaatttcagtttagccgatattgaggttgaggtggagattgactcacacaagcaagaccaggagcacgtcccaactttgtctattgaagcaacactcattgataactctggactatctaacagtatagatgctgatctttcatccgctaatgcagtcaatttgaaaccgaagccaaaacgaactcgaagcccttgtcttggttttcatggttatgtacttggtggaaaaatagaaaatccaaaactttggtctagtgagcatcctaacttatacacgcttgttgttctccttaaagatgccaatgggaagcttattgactgtgaatcatgccaagtgggcattcgtaatgtggtcatggcacacaagcaaatgctcgtcaatggatgtcctgttgtgctaagaggtgtcaacagacatgagcaccatccacgccttggaaagacaaatttagaagcatgcatgatcaaggacctgattttgatgaggcaaaacaatatcaatgctgttagaaatagccattacccacagcacccaaggtggtatgagttatgtgacatttttggtctttatgtcatagatgaagccaacattgagacacatggttttgatgaatctaacactttcaaacatcctacacttgaacctatttgggcaaatgcaatgcttgatcgtgttgttagcatggtggagagagataagaatcatgcatgcattattgtttggtctctaggaaatgaatcttcatatggacctaatcatgcttccatgtctgatattcacatgctatgggaaacagtaatgggaatattgatgcgtattggatggccatagacaacacttttggactccaaggaggttttatatgggactgggctgatcagggtttactgaaggaggactcagatgggtctaaattttgggcatatggcggcgactttggagatactccaaatgactccaatttttgcctcaatggcattgtgtggcctgatcggacgattcacccagctcttcatgaagtaaaataccttcaccagcctatcaaaatatcatcagcagataatatgcttaagattgaaaatggacacttttttgagacaacagaagctttggacttcagttgggttcttcatggagatggttgtgtcttgggctctggtccattgaatattccaactttggcaccacaaactagtcagctcatcaacatggaatcatcaccttggtttgccctttggagtgcctgtgcagcaaaagaagtatttttgtctgtgaatgtgaaacaaaggcatgaaacacgatgggctaaagctggtcatctcttggcttcagcacaactgtgtttgcctcagaaaaatggctttgtccccagcgtgatagcattgtccagtagccctttggtctgtgaacgcattggtgataatgtaaccatctgcaagaataatgcctggaaaattaaagtaaacagtcagttgggaacaatcgacagctggaaggtcaacgacgttgagcttatgagcaaggggatactcccatgcttttggcgcgcaccaactgacaacgacaaaggaggtttcttcaccaagccatatgactcgcgatggagagaagccttcctcgacaatgtctcgttccacagcagccagttctctgtcaaggagttgccggacaacaccgtggagttctccaccctctactacggtgttcccgggcacctacccaagcctgacgacgaagcctccgagtccattctcttccgggtgaagatggtatgccggatccacgggtcaggcgacgtggttctcgactacgaggtaaaccccaggagcgacctccctccccttccccgggtgggcgtcgtgttcagcgccgggaggtccctgagccacgtcacgtggtacgggcgcgggcccttcgagtgctacccggaccgcaaggcggcggcgcacgtcggcgtgtacgagagcagcgtggaggagctgcacgtgccgtacattgcccccgtggagtgcggcgggcgggcggacgtcaggtgggtggcactccgcgacgccggcgggctcggcctgtacgcgtcggcgcacggcggctccccgccgatgcagatgagcgcgagctactacggcgccgcggagctggacagggcaacgcacgtccacaggctggtgaagggggacgacatcgaggtgcatcttgaccacaggcacatggggctgggcggcgacgacagctggtcgccgtgcgtgcacgagcagtacctgctgccgccgacgcggtacgccttctccctgcggctctgccccctgctgccgtcgtcgtcgtgccatgacatctacaggtctcagctccccagctgatggtgccgtgtgccggagacccgtcgacgtcgagccttgggaaacaacaatgaacgcaatggcctggccagtgaatgaaagtatataatattgtaataaagcagagacgtattagctcctgcaacggcctcgcgatcgcctggatatgtctatgctgagggggtgtttagttaactaataacctaactacatatggcgccaagttactaaaacttaataaataactattactaactaataaatagtaactgaattcctaacttaataaatacttcctccgtttataaatatatgacaccgttgattttttaaaaacaacttagatcactcgtcttattaaaaaaaataatgagttaccatttattttttatggtttatttgatcacttaagatagtttgtgcttgatttaaaattttactttttttaaaaaaatattttaaataagatgagtggtcaaaattttcgaaaaaaagttaacagtgtcatatatttgtgaacggaggtagtagtaagtacctaagtagctaacctactactaactagctaccaacaaaattaatagctatataaactagtatatagctcgtgttaacactacgatcagcgacatgaggggagggattgacggcggcatcagcgacacgaggggaggggttggtggtggccgcacgagtgaagggggtggggaggaggttatgggatagggtctcggtgagggagaggagggatgatccaaataatattgtccattagatttgaataagagagggagtatccaacgatctgaaccgttgattttgatggtttgctaagtttgcgtgtaatttgtttggtggatttagtgaagtttatgggtgtaggggtgatttggttgatgtgccttgcaaagtctaaactgatggattatatagcgttataaataaacaactactgctactctactagttaataactacactagtataatattcatgtgttcgacaaaattttcttaattctaattgtccgggcgtattgtggcggacgacatataaatattcgataaaatgttaactc

SEQ ID NO: 35435 - DNA, 5507 bp, Zea Mays
cggatcggaggggctcgtggctccgcctccgggctccccgccccggtcgggcctccgctttgcttggaagacctgcgcgcgccgggccgacgcccatccaccatccatcgcatccaagaattgaccgactcccagtgacgccctgtgtgctggcttggctctgcctctgtgtgttggcctgttgggtagagagagactggtgaccgaagaagcaaggaaggcagctgtgctgtgcagtgagaggtccgtgcaggcaaagcctagctgcagttgcttgcttgccatccacaccacacacccacagcaaagccacgaaccaactcatcgggcgcggagaccaccgcggggggaaaagcgagggaggggggagaggactgaagagaaatcatggagccgatttgctgtggagattcgggcgcgtgatccggtcggatcttgctttcccggggggcgatcgaggccacgccgctgctgccgcggtgccctccctctgcctctgggctctgcgtgtgacgtgccgtgccatggcgctcgccctcgcctatatccccagcctccctcgccccgccgctggccgccgcattcagtaaaaagccacctaccctaccctcctgcgctggtactacttactacctagccaggccaaggagcccaacgagggggaacgctgcggtaggcgcgcgctgctcgtcccaccccacgccgccatgacggtgccagatgccgagtcgcgcttccatgtcctcgcggtggacgacagcctcgtcgacaggaaactcatcgagatgctgctcaagacctcgtcctaccaagtgaccacggtggattccgggagcaaggcgctggagctgctggggctgagggacgcgtcgtcgccgtctccgtcctcgcctgaccaccaggagatcgacgtgaatctcatcatcactgactactgcatgccaggcatgacaggatacgatctgctcaagagagtgaaggggtcctcctcgctcaaggacattcctgtggtgatcatgtcgtctgagaatgtgcctgcccggatcagcaggacatgtgtctttgacagatcgttacaggaggaaagaggtgcccctgtttgtccacaatggctttagctcatgccagcgccatgtttcctccctcgagcccctcacataaaacttgggaggacccgtcattcttcaagtggagaaagcgtgaggcgcatgtaccactgcgctcacaggacacgctggaagcggctctgaagtattggcatgaacggaggaatgtgaactatcacaatgctgacactgctgtctggaacgatgacgctgttcgcggtgctctggaaagtgctgccttttggtccaagggcttaccgtacgccaaatctctaagcggatactggaaattccttctgtcgccttcagcggaaagtattccggagagattctattatgctcattttgatgattcaaactggtcgggtttgccagttccctcaaattggcaaatgcatgggtttgaccgtccaatctacacaaatgtcacatatcctttcccattgaacccaccatttgtgccggctgataatcccacaggttgttacaggacagtctttcacatcccaaaagagtggaaaggtcggaggatcttgctgcactttgaagctgttgattctgcattctttgcttgggtaaatggagtactagttgggtatagccaggatagcagacttcctgctgagtttgaaattactgattgctgccatccttgtgattcggacaaggaaaatgttcttgctgttcaagttatgaggtggagtgatggctcttatcttgaagatcaggatcactggaggttgtctggtattcacagggatgtgctcctactatcaaagccacagatttttatcacagattacttcttcaaagcaaccttggatgaaaatttcagtttagccgatattgaggttgaggtggagattgactcacacaagcaagaccaggagcacgtcccaactttgtctattgaagcaacactcattgataactctggactatctaacagtatagatgctgatctttcatccgctaatgcagtcaatttgaaaccgaagccaaaacgaactcgaagcccttgtcttggttttcatggttatgtacttggtggaaaaatagaaaatccaaaactttggtctagtgagcatcctaacttatacacgcttgttgttctccttaaagatgccaatgggaagcttattgactgtgaatcatgccaagtgggcattcgtaatgtggtcatggcacacaagcaaatgctcgtcaatggatgtcctgttgtgctaagaggtgtcaacagacatgagcaccatccacgccttggaaagacaaatttagaagcatgcatgatcaaggacctgattttgatgaggcaaaacaatatcaatgctgttagaaatagccattacccacagcacccaaggtggtatgagttatgtgacatttttggtctttatgtcatagatgaagccaacattgagacacatggttttgatgaatctaacactttcaaacatcctacacttgaacctatttgggcaaatgcaatgcttgatcgtgttgttagcatggtggagagagataagaatcatgcatgcattattgtttggtctctaggaaatgaatcttcatatggacctaatcatgcttccatgtctggttggattcgtgaaagggatccaacaagactcctccattatgagggaggtggttccagaacatcatccacagatattgtgtgccccatgtatatgcgtgtctgggatgttgttaagatagcaaaagatccatctgaaacaaggcctctaattctttgcgaatattcacatgctatgggaaacagtaatgggaatattgatgcgtattggatggccatagacaacacttttggactccaaggaggttttatatgggactgggctgatcagggtttactgaaggaggactcagatgggtctaaattttgggcatatggcggcgactttggagatactccaaatgactccaatttttgcctcaatggcattgtgtggcctgatcggacgattcacccagctcttcatgaagtaaaataccttcaccagcctatcaaaatatcatcagcagataatatgcttaagattgaaaatggacacttttttgagacaacagaagctttggacttcagttgggttcttcatggagatggttgtgtcttgggctctggtccattgaatattccaactttggcaccacaaactagtcagctcatcaacatggaatcatcaccttggtttgccctttggagtgcctgtgcagcaaaagaagtatttttgtctgtgaatgtgaaacaaaggcatgaaacacgatgggctaaagctggtcatctcttggcttcagcacaactgtgtttgcctcagaaaaatggctttgtccccagcgtgatagcattgtccagtagccctttggtctgtgaacgcattggtgataatgtaaccatctgcaagaataatgcctggaaaattaaagtaaacagtcagttgggaacaatcgacagctggaaggtcaacgacgttgagcttatgagcaaggggatactcccatgcttttggcgcgcaccaactgacaacgacaaaggaggtttcttcaccaagccatatgactcgcgatggagagaagccttcctcgacaatgtctcgttccacagcagccagttctctgtcaaggagttgccggacaacaccgtggagttctccaccctctactacggtgttcccgggcacctacccaagcctgacgacgaagcctccgagtccattctcttccgggtgaagatggtatgccggatccacgggtcaggcgacgtggttctcgactacgaggtaaaccccaggagcgacctccctccccttccccgggtgggcgtcgtgttcagcgccgggaggtccctgagccacgtcacgtggtacgggcgcgggcccttcgagtgctacccggaccgcaaggcggcggcgcacgtcggcgtgtacgagagcagcgtggaggagctgcacgtgccgtacattgcccccgtggagtgcggcgggcgggcggacgtcaggtgggtggcactccgcgacgccggcgggctcggcctgtacgcgtcggcgcacggcggctccccgccgatgcagatgagcgcgagctactacggcgccgcggagctggacagggcaacgcacgtccacaggctggtgaagggggacgacatcgaggtgcatcttgaccacaggcacatggggctgggcggcgacgacagctggtcgccgtgcgtgcacgagcagtacctgctgccgccgacgcggtacgccttctccctgcggctctgccccctgctgccgtcgtcgtcgtgccatgacatctacaggtctcagctccccagctgatggtgccgtgtgccggagacccgtcgacgtcgagccttgggaaacaacaatgaacgcaatggcctggccagtgaatgaaagtatataatattgtaataaagcagagacgtattagctcctgcaacggcctcgcgatcgcctggatatgtctatgctgagggggtgtttagttaactaataacctaactacatatggcgccaagttactaaaacttaataaataactattactaactaataaatagtaactgaattcctaacttaataaatacttcctccgtttataaatatatgacaccgttgattttttaaaaacaacttagatcactcgtcttattaaaaaaaataatgagttaccatttattttttatggtttatttgatcacttaagatagtttgtgcttgatttaaaattttactttttttaaaaaaatattttaaataagatgagtggtcaaaattttcgaaaaaaagttaacagtgtcatatatttgtgaacggaggtagtagtaagtacctaagtagctaacctactactaactagctaccaacaaaattaatagctatataaactagtatatagctcgtgttaacactacgatcagcgacatgaggggagggattgacggcggcatcagcgacacgaggggaggggttggtggtggccgcacgagtgaagggggtggggaggaggttatgggatagggtctcggtgagggagaggagggatgatccaaataatattgtccattagatttgaataagagagggagtatccaacgatctgaaccgttgattttgatggtttgctaagtttgcgtgtaatttgtttggtggatttagtgaagtttatgggtgtaggggtgatttggttgatgtgccttgcaaagtctaaactgatggattatatagcgttataaataaacaactactgctactctactagttaataactacactagtataatattcatgtgttcgacaaaattttcttaattctaattgtccgggcgtattgtggcggacgacatataaatattcgataaaatgttaactc

SEQ ID NO: 35436 - DNA, 2232 bp, Zea Mays
tggcacaaggtagcctagagatttgccggctgctggcccctgcctgctgtgcgcccgtgcgccgcgcctccctgcctgttctaagcaactgcaagcagcaatctgcttaacgcacgtcggcgcctcgccggcgcgacgggcacaacagcccgcctggcatttggcccgtgaccgtgagccacccaccctacgcctttggcaccgcgacatgccttgccggcacaccccatcgaggcgtcgaccatccccgccgccgatcacccaaacttcgcacggcaccccgcccaccttcgccgatggagccccacctgcccgctcacctcacgcgcctcctcaagacccaaccgctgcacgccctcctgtccgacgcgtccacctaccgcgccgcacgccacctgttcgacgcggtgccccgcccgacagccgccctgtgctgcgctttcgtctccgttctctcaaagctctcgctgcaccaggagctcatcgaggccgtctcctcgctacaccgcaggggtggcgccattccgtcgggctgcatcccgcttgtcctaaagtcctgtgcgctgtcggcagcgtcctgccagggcacccagacgcattgtcatgcccttgtgcgtgggatgctaggagatgtgttcgtgcagactgctctggtcgatttctacgccaagaatggcaacatggactcagctgtgatggccttcgaggaaatgccgatcaaggatccgataccgatgaactgcttgatcactgggtattccagatcaggggatgtggaggaggcaaggaggcttttcgacagtatgccgagaaagacgtctgcttcatggaattcgatgattgcttgctatgcacatggcggagagttccaggaagcattgacattgtttgatcagatgttgcgcgagggtgcaagtccgaatgctatcactatcacgacggtgttctccatctgcgccaaaaccggtgatcttgagactggaaggcgggcaaaggcgtgggttagcgaggaagacttgcagaacgtgatagtccacaccgctctgatggagatgtacgtcaagtgccgtgctatcgacgaggcacgtcgcgagttcgatcggatgccacgaagggatgttgtagcatggagcaccatgattgctggttattcacacaatgggagaccacatgaatctcttgagctgttcgagaggatgaaggcgaccaattgcaagccaaatgaggttactctcgttggtgtgttgtctgcatgtgcacagctgggttctgatgaacttggggaacagatcgggagctacatcgagagtcagacactgccacttaccagctaccttggatctgctctgattgatatgtacaccaagtgcgggcatgttgccagagctcgcgatgtcttccaccggatggaacagaaggtggttattgcttggaactccatgatcagaggccttgcactgaacggctttgcagaagatgcaatcgccttgtacggggaaatggtaggagatggggttcagcccaacgagatcacctttctcgcgctgttgacagcgtgtacccatgctggcttggtagacaaaggcatggcattcttccaagagatgaagaagaacaagcagcatgcctctcctcaagttgagcactgcgcttgcatagtggacctcctctgcaagtctggcaggctgtgggaagcctacaagttcatctgcgacatggaagtcgagccaaacgcggtgatctggaccacgctgctcagcgcctgcagagcccacgcggacgtcgagcttgccaagctcgccgcgggcaagcttgtagtactggagcccaatagctcgtcgatctacgttctcctctccaacatctacgctgacgcagggctctggggcgatgtgagggagatcagagacctgatgaggagcaagaacttgcagaagctgtccgcctacagctggatcgagctagacggtgaggtgcacaggttcctggtacaggatacgtatcacccgaggtcagctgagatttacaacgtcgtcgatggcctgggcttgcagctggagaggactagtcctgatcatgagttaatttcagagttaggtctcccaagcacaagacggccagagcccagaacaccagattccgttcccctaaagtcctaaacccgggcttagatcgagttggagtcggaagctgacagggccgcggcgctgatacaatttcactctatataat

SEQ ID NO: 35437 - DNA, 4040 bp, Zea Mays
cccccccccccccccttcacagcatcttctctctctcctcttcctctctcctgactccgccgcgtcgcgatctccccacctctcctgccgctcccacctccccgcactgccaaacccctcgccccccccccctcctccgctgcgctccgatccagtctgccgcgtccccggcggcgcgccctgagctcgtcgccccgcgcgcacgcgagttgccctgcccaccctgacccgcgcaggcgagcgagcccccattgaagcgcgccgcctcccctgcgcgcggcggcagggctcggtgaacgaggccagcggtccgcgcgcgcctggccgtgatggggcggtgccggcgccggggctgatgcggaggccgctgccatgtcggacgtctcgtcggatctcggcggcatccgggcggggcccgtggagcgtgacatcgagcaggctatcactgctctcaagaaaggagcatacttactgaagtatgggcgtagaggaaagccaaagttttgtccctttaggttatccaatgatgaatctgtactgatatggttctcagggaaagaagagaaacatctaaggttgagccatgtatccaggataattcctgggcaaaggactgcaatttttcagaggtatccacggcctgagaaggaatgccagtctttttctctaatttcacatgataggtcattggatataatatgcaaagataaagatgaagctgaagtatggttcgctgggctgaaaacactgatttcacgttgtcaccaaagaaaatggagaactgaatctagaagtgatatcctttcctctggtgcaactagtccgaggacttacacacgacggagttctcctttgagttcacctttcagcagcaatgacagcatccacaaggatggcagtgacaactaccgactccgtactccatatgggagccctccaaagaatggattggagaaggcattttctgatgtcatgttgtatgcagttcctcccaggggtttctttccatcagattctaatgctggatcagtccattctatgtcttctggacaatcggataacacaaacgggcactcaagaggcgtcccaatggatgctttccgagttagttattcaagtgccgttagttcatctagtcatggttctggtcatgatgatggtgatgctttaggcgatgttttcatatggggagaaggaactggggaaggaattcttggcggtggtggttcaagagtcggaagctcctcaggtgcaaaaatggactgccttgtaccaaaaccattagaatttgccgtgcgacttgatgtgcagaacatatcttgtggaggaaggcatgctgcacttgttactaaacaagccaaacttattgatgctctttctcatatgaacattgagcttgtagcatgtggagaataccacacttgtgctgttacactatctggagatctttacacatggggggatggcacatttaaatttgggcttttgggtcatggaaatgatgtcagtcactgggtacccaagcatgtgaatggaccattagagggtatacatgtttcgtcaatttcatgtggaccttggcatacagccctagtaacttccgctggacagcttttcacatttggtgatggatcttttggggtcctgggccatggagatcgtgagagtatctcggtccccagggaagttgaatctctcaaagggttacgtacggtgcgggcagcttgtggtgtttggcacactgctgcagttgtagaagtaatgtctgtgaattcaaattctagcaattgttcttctggtaagatatttacatggggtgatggtgataaaggtcgcttaggtcatggtgacaaggaaccaaaacttgtcccaacttgtgtggctgctttggtggagcccaatttttgtcaggttgcttgtgggcattgcttgacagtagccctaacaacttctgggcatgtgtatacaatgggcagtgctgtctatggtcaacttgggaatgcacaagctgatggcatgcttcctgtgcgtgttgaaggcaagctatacaaaaactttgtggaggagatttcatgtggtgcttatcatgtggctgtattgacttctaggactgaggtgtacacatggggaaaaggtgcaaatggccggttaggtcatggcgatactgaggataagaatactcctacattggttgaagcactgaaagataaacaagtcagaaatgttgtttgtggaattaatttcactgcagcaatatgcattcacaaatgggtatctggagttgatcaatcaatgtgctcaggttgccgtcagccattcaacttgaggagaaaacgccataattgctacaactgtgctctagtattttgtcattcctgcagcagtaaaaaatctctgaaggcttcattagcgcctaatggaaacaagccttaccgtgtctgcgatacctgctacagcaaactgacaaagggacttgagacagatatgcatttttcagcgaaacgggctgctaccgtaccaggattcagtgatacaattgaggaggatctggaaacaaggtcaaatgctcaactatcaaggttgtcgtcaatggaatcttttaagcatttggatagcagatattccaagaaaaacaagaagtttgaatttaatagcacccgtgtttcccctgtgcccaatgggagttcacattggagtggactaaacatttcaagatctttcaatcctgtatttggatcttcaaagaagtttttctcagcatcagttcctggatcaagaattgtttctagggcaacatcacctatttcaagaagaacaagccctccacgatctacaacaccaacacctactctgggtggcctaacgtctcccagagttcccactgacggcaagccaacaaatgatgcattaagccaagaggttctgaatttgagatctcaggtggagagtcttaccaggaagtctcaactcctggagttggagctggaaagaactaccaaacaattgaaggaagctatttccattgccggcgaggaaactgcaaagtgcaaggcggcaaaggaagtaatcaagtcactcactgcacagttgaaggggatggcagagagattacctggaggagcagccaagaacactaagttgccacctcttcctggaatttccattccaagtgacatctcgtctttggctatggagagtgtgggcagcccaagcagctccggagaacaaatcataaatggtcataatggattgcttgcgtctaatggaccaagttctgttaggaataagacaagccatccagaagtgggtaagaatggaagtaggccgcctgatgctgaatcttgccatgatgctgaatgggtagagcaagatgaaccaggtgtttacattactctcaccgcgttgcctggaggcgccagagatctcaagcgggttcggttcagccggaagagattcagcgagacacaagcagaacagtggtggcaggagaaccgggcgagggtataccagcagtacaatgtccgcgtggttgacaaatcaacggccagtgccgacaatgacattgcagctaactgacactagactgacctggagaaacatacctgattacaagtggagctgaggccatgtaccctacctacgtgaaggctctctagtcagtcaagctgggttgctaacgtggctaccattttacctaggtggttttcgctcccaggaaaacaggaggtttttttaatccggttttacataattctttctcttactcccttctcttttctccttgtgtggaaagtagagtgcttgagcagaggtaatgtaaatgcttagtagaagcaggctaatctaccttgtaaatgcataagcaagcatcgattttagaatgtcttggaaattttctgatatggttgcaaatggcaaatctgggctaagtggtgatggtccctggcggttgtagtagaacctgtatgcatgaatctgaagcaatcacgagggctcaacacttgagtccgatcccatctgattggcttagactgtatcca

SEQ ID NO: 35438 - DNA, 4000 bp, Zea Mays
cccccccccccccccttcacagcatcttctctctctcctcttcctctctcctgactccgccgcgtcgcgatctccccacctctcctgccgctcccacctccccgcactgccaaacccctcgccccccccccctcctccgctgcgctccgatccagtctgccgcgtccccggcggcgcgccctgagctcgtcgccccgcgcgcacgcgagttgccctgcccaccctgacccgcgcaggcgagcgagcccccattgaagcgcgccgcctcccctgcgcgcggcggcagggctcggtgaacgaggccagcggtccgcgcgcgcctggccgtgatggggcggtgccggcgccggggctgatgcggaggccgctgccatgtcggacgtctcgtcggatctcggcggcatccgggcggggcccgtggagcgtgacatcgagcaggctatcactgctctcaagaaaggagcatacttactgaagtatgggcgtagaggaaagccaaagttttgtccctttaggttatccaatgatgaatctgtactgatatggttctcagggaaagaagagaaacatctaaggcaatttttcagaggtatccacggcctgagaaggaatgccagtctttttctctaatttcacatgataggtcattggatataatatgcaaagataaagatgaagctgaagtatggttcgctgggctgaaaacactgatttcacgttgtcaccaaagaaaatggagaactgaatctagaagtgatatcctttcctctggtgcaactagtccgaggacttacacacgacggagttctcctttgagttcacctttcagcagcaatgacagcatccacaaggatggcagtgacaactaccgactccgtactccatatgggagccctccaaagaatggattggagaaggcattttctgatgtcatgttgtatgcagttcctcccaggggtttctttccatcagattctaatgctggatcagtccattctatgtcttctggacaatcggataacacaaacgggcactcaagaggcgtcccaatggatgctttccgagttagttattcaagtgccgttagttcatctagtcatggttctggtcatgatgatggtgatgctttaggcgatgttttcatatggggagaaggaactggggaaggaattcttggcggtggtggttcaagagtcggaagctcctcaggtgcaaaaatggactgccttgtaccaaaaccattagaatttgccgtgcgacttgatgtgcagaacatatcttgtggaggaaggcatgctgcacttgttactaaacaagccaaacttattgatgctctttctcatatgaacattgagcttgtagcatgtggagaataccacacttgtgctgttacactatctggagatctttacacatggggggatggcacatttaaatttgggcttttgggtcatggaaatgatgtcagtcactgggtacccaagcatgtgaatggaccattagagggtatacatgtttcgtcaatttcatgtggaccttggcatacagccctagtaacttccgctggacagcttttcacatttggtgatggatcttttggggtcctgggccatggagatcgtgagagtatctcggtccccagggaagttgaatctctcaaagggttacgtacggtgcgggcagcttgtggtgtttggcacactgctgcagttgtagaagtaatgtctgtgaattcaaattctagcaattgttcttctggtaagatatttacatggggtgatggtgataaaggtcgcttaggtcatggtgacaaggaaccaaaacttgtcccaacttgtgtggctgctttggtggagcccaatttttgtcaggttgcttgtgggcattgcttgacagtagccctaacaacttctgggcatgtgtatacaatgggcagtgctgtctatggtcaacttgggaatgcacaagctgatggcatgcttcctgtgcgtgttgaaggcaagctatacaaaaactttgtggaggagatttcatgtggtgcttatcatgtggctgtattgacttctaggactgaggtgtacacatggggaaaaggtgcaaatggccggttaggtcatggcgatactgaggataagaatactcctacattggttgaagcactgaaagataaacaagtcagaaatgttgtttgtggaattaatttcactgcagcaatatgcattcacaaatgggtatctggagttgatcaatcaatgtgctcaggttgccgtcagccattcaacttgaggagaaaacgccataattgctacaactgtgctctagtattttgtcattcctgcagcagtaaaaaatctctgaaggcttcattagcgcctaatggaaacaagccttaccgtgtctgcgatacctgctacagcaaactgacaaagggacttgagacagatatgcatttttcagcgaaacgggctgctaccgtaccaggattcagtgatacaattgaggaggatctggaaacaaggtcaaatgctcaactatcaaggttgtcgtcaatggaatcttttaagcatttggatagcagatattccaagaaaaacaagaagtttgaatttaatagcacccgtgtttcccctgtgcccaatgggagttcacattggagtggactaaacatttcaagatctttcaatcctgtatttggatcttcaaagaagtttttctcagcatcagttcctggatcaagaattgtttctagggcaacatcacctatttcaagaagaacaagccctccacgatctacaacaccaacacctactctgggtggcctaacgtctcccagagttcccactgacggcaagccaacaaatgatgcattaagccaagaggttctgaatttgagatctcaggtggagagtcttaccaggaagtctcaactcctggagttggagctggaaagaactaccaaacaattgaaggaagctatttccattgccggcgaggaaactgcaaagtgcaaggcggcaaaggaagtaatcaagtcactcactgcacagttgaaggggatggcagagagattacctggaggagcagccaagaacactaagttgccacctcttcctggaatttccattccaagtgacatctcgtctttggctatggagagtgtgggcagcccaagcagctccggagaacaaatcataaatggtcataatggattgcttgcgtctaatggaccaagttctgttaggaataagacaagccatccagaagtgggtaagaatggaagtaggccgcctgatgctgaatcttgccatgatgctgaatgggtagagcaagatgaaccaggtgtttacattactctcaccgcgttgcctggaggcgccagagatctcaagcgggttcggttcagccggaagagattcagcgagacacaagcagaacagtggtggcaggagaaccgggcgagggtataccagcagtacaatgtccgcgtggttgacaaatcaacggccagtgccgacaatgacattgcagctaactgacactagactgacctggagaaacatacctgattacaagtggagctgaggccatgtaccctacctacgtgaaggctctctagtcagtcaagctgggttgctaacgtggctaccattttacctaggtggttttcgctcccaggaaaacaggaggtttttttaatccggttttacataattctttctcttactcccttctcttttctccttgtgtggaaagtagagtgcttgagcagaggtaatgtaaatgcttagtagaagcaggctaatctaccttgtaaatgcataagcaagcatcgattttagaatgtcttggaaattttctgatatggttgcaaatggcaaatctgggctaagtggtgatggtccctggcggttgtagtagaacctgtatgcatgaatctgaagcaatcacgagggctcaacacttgagtccgatcccatctgattggcttagactgtatcca

SEQ ID NO: 35439 - DNA, 3732 bp, Zea Mays
agacctaaatcacctaatatatttcaatccggagagccaggcaatgtgacagctgttcattatgtcagtaatatttcctgtgttgttgtcaaccttcctcagaggttaagcctttttttgaatggcatgtgcaactgggatgctaggaaagcgttgcttgattttgattgggcttctcatgacaatacacactgtgatgaccaatccgtttggagatgcactgattgtcacgtgcttgattgcgaggaccataagatagcatcgatatcaaataaagaaaagtcatttgacctgcacgaaatcttcaagacactccctggtgttaggatggagaagaacatgcaggtagcaagaataacaccagacgaaagagcactggaactgggtatttggtccgtccctgatgatgtattgcataaagtactaattctactcaaacccagagatttggtaagagtggcagcaacttgtcatcatctaaggactcttgctgccactgttatgccttgcatgaagcttaagctcttcccccatcaagaggctgctgttgaatggatgttgaagcgagagcagaacgtgcatgtcctagcacatcctttgtacaaggatttctgcactgaggatggtttcccattctacataaatgttatctctgctgaaatatctaccggtgatgctccaacaataaatgatttctgtggaggtctgttttgtgatgaacctggcctagggaagacagtaaccacactatctctgattctgaaaacccacggaacaatggcgtaccctccacaaggggtagatgtgagttggtgcatgcataagcctgataaaaaatgcggttactatgaattaagtcccagcttttcttctaatagaaacagctcgtctgtgtcaaaaaagcttttgggagaggatgtgatagcagattgtccaagtccagatgattctgtctgcagtaccagatcttcaagaaagagaggtaggttactgagccctgatccaaccaaggtaatgttgcatgctgcgattgagaattccccatcatcatcaaacagcaaagtgcaaccaatgccagctatgcatatactgaagttcactaaaaactcgagacaagttaggaaaaaccccatggatgcatacagcgacgtttcagttggcaataaaaggaagattgacaccacctctgaggtaagtgagacctgggttcagtgtgatgcttgtagaaagtggcgaagggtatctgatggaacagttcttgattctaccacagtgtggttttgcactatgaaccctgatcctacacgacagaaatgcactgccccagaggaatcctgggattttaagagaaagataacctatttgccaggattttacaagaaaaattctttgcctggaaatgaggaaaacgtatcatttttcacaaacatattgaaagattatgttactatgatcaattcagaaaccaagaaggctttgttatggttagcaaaactttctcctacaaaacttcttgagatggagtttgttggtttgactcgcccagttctagatacacgtgcaactacaggcaagggtgcccatccatattacaagatattccaagcatttggccttgtgagaaagattgagaaagccaccttgatagtggtgcctgctaacctaattgatcactggacaacacagatacaacgccatgtgtcctcggatacccttaatgtctttgtgtggggagaccacaagaagccatctgctcacaaccttgcttgggactatgacattgtcataaccacattcagcaggctaagtgcagaatggggtccacagaagagaagtccactaaagcagatccattggttcagggttatactggatgaagggcatacactaggttccagccttgccctgacaaacaagttacagatggctgtcgctttggttgcatcaaataggtggatattaactggtacacctacaccaaacacaccaactagtcaggttgctcatcttcacctcatgcttaagtttcttcatgatgaaacttatggtcagaattaccagtcatgggactctgggatccataggccttttgaggcgcaaatggaagaggggcgtgttcgtcttgtgcagctgcttcagagaacaatgatcagtgcaagaaaagcggatctgaaaactattcctccttgcataaagaagataaccttcctagacttcaatgaggggcatgcaaaaagttacaatgaactggtggttactatacgccgaaatatactgatggcggattggaatgacccttctcatgtagaatcccttcttaaccccaagcagtggaaatttcgtgctgctactttgaagaatgtccgtttgtcttgctgtgttgccgggcatatcaaagtagctgaggcaggtcaggatatacaggaaacaatggatgaattggtgcaacagggccttgatccttcttcagatgaatatcagttgataagatattctcttttaaacggtgccagttgtttcaggtgtagcgtttggtgtcgcttgcctgtgatcacaccctgtcgacatcttttgtgccttgactgtgtagctcttgatagtgaaaaatgcacattaccaggttgtggatatcattatgagatgcagtctcctgagactcgtgcaaggccagaaaatccaaacccaaagtggccagtgcctaaggatctaattgaattgcaaccttcatataagcaggatgattgggatcccgattggcaatcaacatctagcagcaaagttgcttacatgattgagaagctaagaagtctgcgagaagcacacatgaatcatgggaataacataaccaacagtgttggtcattctaatacactatcttatcaaccacaggcaatgctggacaaagttataattttttctcagtttctagagcatattcacgtgattgaacagcagctgactattgctggaataatatattcgggaatgtatagtccaatgcctctagctagtaagagaagtgcacttacgaagtttcaagaggacccaacgtgtatggctttagtcatggatgggactgctgcactggggcttgatttgagttttgtgactcgtgtttttctcatggaaccaatatgggataggagtatggaggaacaggttattagtcgggcacatcgaatgggggctacgcgtccaatacatgtagaaactttggctatgcgtggtaccattgaagagcaaatgcttaagcttttgcaggattctaacgcctgcagaaaaatagtggataaaagaacaggcagcactgacaatgaaggagggcggtcccatcggagcctccatgattttgctgaaagcagctatctggcgcaactcagctctgtgtagacaggatctaaagcaacaattcacattggttgttggtagcactaactggattcgtgatttcggttccttccttctgatcattcctttgcaatagtgatagtatttgcttcgaagccagttgttgttctcgattccaaaccagtgttgatcggggttcttttgtgtaaataactgcgttccttttgttaaacgcggtattcccagttgaagaagccttatactgggcaatatcaggattctaccgtagatttgtgcttttactaataaccttatgaactttgaacagtttaagttgaagctaacgtttatactccctctgttataaattacccttcgttgtcc

SEQ ID NO: 35440 - DNA, 4143 bp, Zea Mays
cggaagcacaggtccgtcagacccgatccgagccccagattccagccgaagccgaccccacacatctctcccggtccaggtagttacgcgtcctcttcctcctcgtcgcctcgcctcccagtcggccagtcgccaccgcccgagaagccgagcccgcagccaccggatcccagcgggcatcgccacccaccccgctctccatggtggcacgcgagagcgagacctaaccctaccttaaccttactacctcacaatggccgccgcgggggagcgccgcaagctttgtggctacctacgcgccgtggtgtccatccccggcggggacgtcgcggcggcggcgtctatccttccgctgtccccgtgcacgctctccgcgtgcggggccgtggcccttgcgccgctccccgacgacgtgcgggcccagccgcggtggcccaggtcgcgcgcccccggcgtcgtgcgcctgctcaggacgctcgtggcgaaccgctgcgtggaggtggagggtacgcttctccgggtcgtgaccaggaggaggcctggggaaggggaaggggaaggggacggcgccgcggtggaggccagggccgtcgtgctgctcgacgtctacatacccgtcgccgcgtggtccggttggcagttcccgcgctcgcgctctgctgccgccgccgtcttcaagcatgttaggtgcaactgggatgctaggaaagcgttgcttgattttgattgggcttctcatgacaatacacactgtgatgaccaatccgtttggagatgcactgattgtcacgtgcttgattgcgaggaccataagatagcatcgatatcaaataaagaaaagtcatttgacctgcacgaaatcttcaagacactccctggtgttaggatggagaagaacatgcaggtagcaagaataacaccagacgaaagagcactggaactgggtatttggtccgtccctgatgatgtattgcataaagtactaattctactcaaacccagagatttggtaagagtggcagcaacttgtcatcatctaaggactcttgctgccactgttatgccttgcatgaagcttaagctcttcccccatcaagaggctgctgttgaatggatgttgaagcgagagcagaacgtgcatgtcctagcacatcctttgtacaaggatttctgcactgaggatggtttcccattctacataaatgttatctctgctgaaatatctaccggtgatgctccaacaataaatgatttctgtggaggtctgttttgtgatgaacctggcctagggaagacagtaaccacactatctctgattctgaaaacccacggaacaatggcgtaccctccacaaggggtagatgtgagttggtgcatgcataagcctgataaaaaatgcggttactatgaattaagtcccagcttttcttctaatagaaacagctcgtctgtgtcaaaaaagcttttgggagaggatgtgatagcagattgtccaagtccagatgattctgtctgcagtaccagatcttcaagaaagagaggtaggttactgagccctgatccaaccaaggtaatgttgcatgctgcgattgagaattccccatcatcatcaaacagcaaagtgcaaccaatgccagctatgcatatactgaagttcactaaaaactcgagacaagttaggaaaaaccccatggatgcatacagcgacgtttcagttggcaataaaaggaagattgacaccacctctgaggtaagtgagacctgggttcagtgtgatgcttgtagaaagtggcgaagggtatctgatggaacagttcttgattctaccacagtgtggttttgcactatgaaccctgatcctacacgacagaaatgcactgccccagaggaatcctgggattttaagagaaagataacctatttgccaggattttacaagaaaaattctttgcctggaaatgaggaaaacgtatcatttttcacaaacatattgaaagattatgttactatgatcaattcagaaaccaagaaggctttgttatggttagcaaaactttctcctacaaaacttcttgagatggagtttgttggtttgactcgcccagttctagatacacgtgcaactacaggcaagggtgcccatccatattacaagatattccaagcatttggccttgtgagaaagattgagaaagatacaacgccatgtgtcctcggatacccttaatgtctttgtgtggggagaccacaagaagccatctgctcacaaccttgcttgggactatgacattgtcataaccacattcagcaggctaagtgcagaatggggtccacagaagagaagtccactaaagcagatccattggttcagggttatactggatgaagggcatacactaggttccagccttgccctgacaaacaagttacagatggctgtcgctttggttgcatcaaataggtggatattaactggtacacctacaccaaacacaccaactagtcaggttgctcatcttcacctcatgcttaagtttcttcatgatgaaacttatggtcagaattaccagtcatgggactctgggatccataggccttttgaggcgcaaatggaagaggggcgtgttcgtcttgtgcagctgcttcagagaacaatgatcagtgcaagaaaagcggatctgaaaactattcctccttgcataaagaagataaccttcctagacttcaatgaggggcatgcaaaaagttacaatgaactggtggttactatacgccgaaatatactgatggcggattggaatgacccttctcatgtagaatcccttcttaaccccaagcagtggaaatttcgtgctgctactttgaagaatgtccgtttgtcttgctgtgttgccgggcatatcaaagtagctgaggcaggtcaggatatacaggaaacaatggatgaattggtgcaacagggccttgatccttcttcagatgaatatcagttgataagatattctcttttaaacggtgccagttgtttcaggttgtggatatcattatgagatgcagtctcctgagactcgtgcaaggccagaaaatccaaacccaaagtggccagtgcctaaggatctaattgaattgcaaccttcatataagcaggatgattgggatcccgattggcaatcaacatctagcagcaaagttgcttacatgattgagaagctaagaagtctgcgagaagcacacatgaatcatgggaataacataaccaacagtgttggtcattctaatacactatcttatcaaccacaggcaatgctggacaaagttataattttttctcagtttctagagcatattcacgtgattgaacagcagctgactattgctggaataatatattcgggaatgtatagtccaatgcctctagctagtaagagaagtgcacttacgaagtttcaagaggacccaacgtgtatggctttagtcatggatgggactgctgcactggggcttgatttgagttttgtgactcgtgtttttctcatggaaccaatatgggataggagtatggaggaacaggttattagtcgggcacatcgaatgggggctacgcgtccaatacatgtagaaactttggctatgcgtggtaccattgaagagcaaatgcttaagcttttgcaggattctaacgcctgcagaaaaatagtggataaaagaacaggcagcactgacaatgaaggagggcggtcccatcggagcctccatgattttgctgaaagcagctatctggcgcaactcagctctgtgtagacaggatctaaagcaacaattcacattggttgttggtagcactaactggattcgtgatttcggttccttccttctgatcattcctttgcaatagtgatagtatttgcttcgaagccagttgttgttctcgattccaaaccagtgttgatcggggttcttttgtgtaaataactgcgttccttttgttaaacgcggtattcccagttgaagaagccttatactgggcaatatcaggattctaccgtagatttgtgcttttactaataaccttatgaactttgaacagtttaagttgaagctaacgtttatactccctctgttataaattacccttcgttgtcc

SEQ ID NO: 35441 - DNA, 4355 bp, Zea Mays
tatgcgggaagtgaaaataattcggacgttgggaaagtcgttccgtacccgtgtgccgtaaaggcgtaaaccacgtattgcgaaaacggctcacagtttcgatgcgatcgaagccggaagcacaggtccgtcagacccgatccgagccccagattccagccgaagccgaccccacacatctctcccggtccaggtagttacgcgtcctcttcctcctcgtcgcctcgcctcccagtcggccagtcgccaccgcccgagaagccgagcccgcagccaccggatcccagcgggcatcgccacccaccccgctctccatggtggcacgcgagagcgagacctaaccctaccttaaccttactacctcacaatggccgccgcgggggagcgccgcaagctttgtggctacctacgcgccgtggtgtccatccccggcggggacgtcgcggcggcggcgtctatccttccgctgtccccgtgcacgctctccgcgtgcggggccgtggcccttgcgccgctccccgacgacgtgcgggcccagccgcggtggcccaggtcgcgcgcccccggcgtcgtgcgcctgctcaggacgctcgtggcgaaccgctgcgtggaggtggagggtacgcttctccgggtcgtgaccaggaggaggcctggggaaggggaaggggaaggggacggcgccgcggtggaggccagggccgtcgtgctgctcgacgtctacatacccgtcgccgcgtggtccggttggcagttcccgcgctcgcgctctgctgccgccgccgtcttcaagcatgttaggtgcaactgggatgctaggaaagcgttgcttgattttgattgggcttctcatgacaatacacactgtgatgaccaatccgtttggagatgcactgattgtcacgtgcttgattgcgaggaccataagatagcatcgatatcaaataaagaaaagtcatttgacctgcacgaaatcttcaagacactccctggtgttaggatggagaagaacatgcaggtagcaagaataacaccagacgaaagagcactggaactgggtatttggtccgtccctgatgatgtattgcataaagtactaattctactcaaacccagagatttggtaagagtggcagcaacttgtcatcatctaaggactcttgctgccactgttatgccttgcatgaagcttaagctcttcccccatcaagaggctgctgttgaatggatgttgaagcgagagcagaacgtgcatgtcctagcacatcctttgtacaaggatttctgcactgaggatggtttcccattctacataaatgttatctctgctgaaatatctaccggtgatgctccaacaataaatgatttctgtggaggtctgttttgtgatgaacctggcctagggaagacagtaaccacactatctctgattctgaaaacccacggaacaatggcgtaccctccacaaggggtagatgtgagttggtgcatgcataagcctgataaaaaatgcggttactatgaattaagtcccagcttttcttctaatagaaacagctcgtctgtgtcaaaaaagcttttgggagaggatgtgatagcagattgtccaagtccagatgattctgtctgcagtaccagatcttcaagaaagagaggtaggttactgagccctgatccaaccaaggtaatgttgcatgctgcgattgagaattccccatcatcatcaaacagcaaagtgcaaccaatgccagctatgcatatactgaagttcactaaaaactcgagacaagttaggaaaaaccccatggatgcatacagcgacgtttcagttggcaataaaaggaagattgacaccacctctgaggtaagtgagacctgggttcagtgtgatgcttgtagaaagtggcgaagggtatctgatggaacagttcttgattctaccacagtgtggttttgcactatgaaccctgatcctacacgacagaaatgcactgccccagaggaatcctgggattttaagagaaagataacctatttgccaggattttacaagaaaaattctttgcctggaaatgaggaaaacgtatcatttttcacaaacatattgaaagattatgttactatgatcaattcagaaaccaagaaggctttgttatggttagcaaaactttctcctacaaaacttcttgagatggagtttgttggtttgactcgcccagttctagatacacgtgcaactacaggcaagggtgcccatccatattacaagatattccaagcatttggccttgtgagaaagattgagaaagatacaacgccatgtgtcctcggatacccttaatgtctttgtgtggggagaccacaagaagccatctgctcacaaccttgcttgggactatgacattgtcataaccacattcagcaggctaagtgcagaatggggtccacagaagagaagtccactaaagcagatccattggttcagggttatactggatgaagggcatacactaggttccagccttgccctgacaaacaagttacagatggctgtcgctttggttgcatcaaataggtggatattaactggtacacctacaccaaacacaccaactagtcaggttgctcatcttcacctcatgcttaagtttcttcatgatgaaacttatggtcagaattaccagtcatgggactctgggatccataggccttttgaggcgcaaatggaagaggggcgtgttcgtcttgtgcagctgcttcagagaacaatgatcagtgcaagaaaagcggatctgaaaactattcctccttgcataaagaagataaccttcctagacttcaatgaggggcatgcaaaaagttacaatgaactggtggttactatacgccgaaatatactgatggcggattggaatgacccttctcatgtagaatcccttcttaaccccaagcagtggaaatttcgtgctgctactttgaagaatgtccgtttgtcttgctgtgttgccgggcatatcaaagtagctgaggcaggtcaggatatacaggaaacaatggatgaattggtgcaacagggccttgatccttcttcagatgaatatcagttgataagatattctcttttaaacggtgccagttgtttcaggtgtagcgtttggtgtcgcttgcctgtgatcacaccctgtcgacatcttttgtgccttgactgtgtagctcttgatagtgaaaaatgcacattaccaggttgtggatatcattatgagatgcagtctcctgagactcgtgcaaggccagaaaatccaaacccaaagtggccagtgcctaaggatctaattgaattgcaaccttcatataagcaggatgattgggatcccgattggcaatcaacatctagcagcaaagttgcttacatgattgagaagctaagaagtctgcgagaagcacacatgaatcatgggaataacataaccaacagtgttggtcattctaatacactatcttatcaaccacaggcaatgctggacaaagttataattttttctcagtttctagagcatattcacgtgattgaacagcagctgactattgctggaataatatattcgggaatgtatagtccaatgcctctagctagtaagagaagtgcacttacgaagtttcaagaggacccaacgtgtatggctttagtcatggatgggactgctgcactggggcttgatttgagttttgtgactcgtgtttttctcatggaaccaatatgggataggagtatggaggaacaggttattagtcgggcacatcgaatgggggctacgcgtccaatacatgtagaaactttggctatgcgtggtaccattgaagagcaaatgcttaagcttttgcaggattctaacgcctgcagaaaaatagtggataaaagaacaggcagcactgacaatgaaggagggcggtcccatcggagcctccatgattttgctgaaagcagctatctggcgcaactcagctctgtgtagacaggatctaaagcaacaattcacattggttgttggtagcactaactggattcgtgatttcggttccttccttctgatcattcctttgcaatagtgatagtatttgcttcgaagccagttgttgttctcgattccaaaccagtgttgatcggggttcttttgtgtaaataactgcgttccttttgttaaacgcggtattcccagttgaagaagccttatactgggcaatatcaggattctaccgtagatttgtgcttttactaataaccttatgaactttgaacagtttaagttgaagctaacgtttatactccctctgttataaattacccttcgttgtcc

SEQ ID NO: 35442 - DNA, 3024 bp, Zea Mays
agacctaaatcacctaatatatttcaatccggagagccaggcaatgtgacagctgttcattatgtcagtaatatttcctgtgttgttgtcaaccttcctcagaggttaagcctttttttgaatggcatgtgcaactgggatgctaggaaagcgttgcttgattttgattgggcttctcatgacaatacacactgtgatgaccaatccgtttggagatgcactgattgtcacgtgcttgattgcgaggaccataagatagcatcgatatcaaataaagaaaagtcatttgacctgcacgaaatcttcaagacactccctggtgttaggatggagaagaacatgcaggtagcaagaataacaccagacgaaagagcactggaactgggtatttggtccgtccctgatgatgtattgcataaagtactaattctactcaaacccagagatttggtaagagtggcagcaacttgtcatcatctaaggactcttgctgccactgttatgccttgcatgaagcttaagctcttcccccatcaagaggctgctgttgaatggatgttgaagcgagagcagaacgtgcatgtcctagcacatcctttgtacaaggatttctgcactgaggatggtttcccattctacataaatgttatctctgctgaaatatctaccggtgatgctccaacaataaatgatttctgtggaggtctgttttgtgatgaacctggcctagggaagacagtaaccacactatctctgattctgaaaacccacggaacaatggcgtaccctccacaaggggtagatgtgagttggtgcatgcataagcctgataaaaaatgcggttactatgaattaagtcccagcttttcttctaatagaaacagctcgtctgtgtcaaaaaagcttttgggagaggatgtgatagcagattgtccaagtccagatgattctgtctgcagtaccagatcttcaagaaagagaggtaggttactgagccctgatccaaccaaggtaatgttgcatgctgcgattgagaattccccatcatcatcaaacagcaaagtgcaaccaatgccagctatgcatatactgaagttcactaaaaactcgagacaagttaggaaaaaccccatggatgcatacagcgacgtttcagttggcaataaaaggaagattgacaccacctctgaggtaagtgagacctgggttcagtgtgatgcttgtagaaagtggcgaagggtatctgatggaacagttcttgattctaccacagtgtggttttgcactatgaaccctgatcctacacgacagaaatgcactgccccagaggaatcctgggattttaagagaaagataacctatttgccaggattttacaagaaaaattctttgcctggaaatgaggaaaacgtatcatttttcacaaacatattgaaagattatgttactatgatcaattcagaaaccaagaaggctttgttatggttagcaaaactttctcctacaaaacttcttgagatggagtttgttggtttgactcgcccagttctagatacacgtgcaactacaggcaagggtgcccatccatattacaagatattccaagcatttggccttgtgagaaagattgagaaagccaccttgatagtggtgcctgctaacctaattgatcactggacaacacagatacaacgccatgtgtcctcggatacccttaatgtctttgtgtggggagaccacaagaagccatctgctcacaaccttgcttgggactatgacattgtcataaccacattcagcaggctaagtgcagaatggggtccacagaagagaagtccactaaagcagatccattggttcagggttatactggatgaagggcatacactaggttccagccttgccctgacaaacaagttacagatggctgtcgctttggttgcatcaaataggtggatattaactggtacacctacaccaaacacaccaactagtcaggttgctcatcttcacctcatgcttaagtttcttcatgatgaaacttatggtcagaattaccagtcatgggactctgggatccataggccttttgaggcgcaaatggaagaggggcgtgttcgtcttgtgcagctgcttcagagaacaatgatcagtgcaagaaaagcggatctgaaaactattcctccttgcataaagaagataaccttcctagacttcaatgaggggcatgcaaaaagttacaatgaactggtggttactatacgccgaaatatactgatggcggattggaatgacccttctcatgtagaatcccttcttaaccccaagcagtggaaatttcgtgctgctactttgaagaatgtccgtttgtcttgctgtgttgccgggcatatcaaagtagctgaggcaggtcaggatatacaggaaacaatggatgaattggtgcaacagggccttgatccttcttcagatgaatatcagttgataagatattctcttttaaacggtgccagttgtttcaggtgtagcgtttggtgtcgcttgcctgtgatcacaccctgtcgacatcttttgtgccttgactgtgtagctcttgatagtgaaaaatgcacattaccaggttgtggatatcattatgagatgcagtctcctgagactcgtgcaaggccagaaaatccaaacccaaagtggccagtgcctaaggatctaattgaattgcaaccttcatataagcaggatgattgggatcccgattggcaatcaacatctagcagcaaagttgcttacatgattgagaagctaagaagtctgcgagaagcacacatgaatcatgggaataacataaccaacagtgttggtcattctaatacactatcttatcaaccacaggcaatgctggacaaagttataattttttctcagtttctagagcatattcacgtgattgaacagcagctgactattgctggaataatatattcgggaatgtatagtccaatgcctctagctagtaagtatttgtag

SEQ ID NO: 35443 - DNA, 2202 bp, Zea Mays
cgcctcccagtcggccagtcgccaccgcccgagaagccgagcccgcagccaccggatcccagcgggcatcgccacccaccccgctctccatggtggcacgcgagagcgagacctaaccctaccttaaccttactacctcacaatggccgccgcgggggagcgccgcaagctttgtggctacctacgcgccgtggtgtccatccccggcggggacgtcgcggcggcggcgtctatccttccgctgtccccgtgcacgctctccgcgtgcggggccgtggcccttgcgccgctccccgacgacgtgcgggcccagccgcggtggcccaggtcgcgcgcccccggcgtcgtgcgcctgctcaggacgctcgtggcgaaccgctgcgtggaggtggagggtacgcttctccgggtcgtgaccaggaggaggcctggggaaggggaaggggaaggggacggcgccgcggtggaggccagggccgtcgtgctgctcgacgtctacatacccgtcgccgcgtggtccggttggcagttcccgcgctcgcgctctgctgccgccgccgtcttcaagcatgttaggcaactggaataaggaagccaacgtatttctctctgacagaagttcctgattccctcggcagtggcgtggttgcctatgtttgctgtctgttttgatctactcgttttttcgctgtcttgtgctcgctgtcttccgtggtgtttcagtagcaatggaaaagggtgagtgagcctgtgttgtgttacaagcatcccagttcaatgggaaaacaaacacaaaagacatgaaccaactgaacagcttgatttaatggaaaatgctaacacaactaacatgacaacgtaatagacgaactgaacagtttgattatataagtccatatgacactccaagctaatgggtagagcaccttgcatctccaaatgtttcttcttcacgtgaggaatgccatagtgctgtcctccattatgcttcataatctccattatgcagccttgtcgtgttcaaaaaatccgatgggcacgatcaacagggtactcacggaatgccttctcgaccttggccacaatttgctcaatattgtttagtgttcctctctcaaacaacgattggatagctgaaaaaaacccaaggcctgacacattaagatccggtgaattttgtgtctgacaagttagcctaatgtcccatccatcagcttgggcagcggctacaaaagctgggtcattcaatgcaatatgagtcctggcattatcttgtggaataaatatgggcatatgtctttcctccgctggccactttgccttgatcgcatgcaacaccttgtttataaggaagtcacgactatgttctttctttactgatgtcattgcctttatgatcaaagttcctacaagcaaataaagcaaatttagcaaaaatgattaactgaaaatgccaaaataaactatgaatgcattccatacctctgtccctacgctctttctctttgctggctccatataggtgaagggaaagatgcctactttaccattaaatatgcaatttccacttgcatcaaatcttggtcgagtgaccacaacgaacatcaccttctctataaagtttttgcttttaacctccctaggtggcatttcttcatctttcgcaagataatacttttggtttcttctagtcctgtagaaccatttctcacatatgtacacgacgttgtacaaggccttgaagctaggacaattatctaggtattgtgcctagagcatggacaagcagtacctaacacgagtcttcttgttctcatcggtcaacatcaatttgaggtcgttaatgtgtctatggaaatatccttccttgtaacggttataaagagaggttttcttaacacccaacgcattggcaagaccctggaatgttgtgtactctctcaaaggcacatctttgccgcttccatgtttatttctattctcttgcgaccacaatttctaacaagctttttgaacacatgctattgaaagggaaatgtgccattgggccatttctataagtattttggtgattagatgtccaacacatattgagtgagttcttatgtgccaaatgagtgagaagtatgaaatcaagaacaagggtcaaacgtcaactggctgctctcgggaaaagagagagacaacgtggctataattcac

SEQ ID NO: 35444 - DNA, 4161 bp, Zea Mays
cctcctccctctctcccccgtgtccgtccgccctccgcctgtggcctcgcctccccgcattccgctcgcccctccctgatacggtgataccgcgatcagcggggcgccccgcgcccgcctcttctctctctctcgcgcgcgcgagagtagcagatccggcgattcgcattccgctcgcccctccctgatacggtgataccgcgatcggcggggcgcccgcgcccgcctcttctctctctcgcgcgcgagagcagcagatccggcgatccgcaggccctccgccggcgccccgcctgcccgacgatctagatccaggtatttggggaagcatctgctatcattttgttttcctcaaagtaatccaaggaaagttgtttccagatgtcaactgcaaaagtgttagatcctgcttttcaaggggctggccagaaagttgggacagaaatatggcggattgaagattttaagccagttgcactgccaaaatctgattatggtaaattctactgtggagattcatacatagttctgcagacgacctgtactaaaggtggtgcctatctatacgatatccacttctggattgggaaagattcgagtcaagatgaagctgggactgcagccatcaagacagttgaacttgatgccatccttgggggtcgtgcaattcaacatagggaactccaaggttacgaatctgacaaattcttgtcatacttcaagccttgcattatacctttggagggtggttttgcctctgggttcaaaaagcctgaagaggaaaagtttgaaacacggttgtatatatgcagagggaagagagctattcgggttaaagaggttcccttcgcccggtcgtcattaaaccatgatgatgtgtttgtcttagatactgaaaataagatataccagtttaatggtgctaactccaatatccaagaaagggccaaagcgttggaagtaatacaacatttaaaggagaaataccatgggggtgtttgcgatgttgccatcgttgatgatgggaaactacaagcagagtcagactctggtgaattctgggtcctttttggaggttttgcaccaattgggaaaaaaactgtgagtgatgatgatgttgtacttgaaactacagcaccaaaactgtacagtatcaatgatggccaattgaagctggaagaaacagctcttacaaaagctgtgcttgaaaataccaaatgtttcttacttgactgtggggctgaaatatatgtatgggttggacgggtaacacaaatggaggatagaaaatctgccactaaagcagttgatgaattcctcattaatcaaaagcgtccaaagacaacgagggtaactcaagtgattcaaggttatgagagtcatgctttcaagtccaagtttgaatcgtggccagtgggtaatgctgctgggaaccctggcacagaggaagggcggggaaaagttgccgctttattgaagcaacaacgcgttgatcccaagggagctgcaaaaagcaccactccagtaaatgaggaagttcctcctttgcttgatggcggtgggaagcttgaggtatggtgcgttgatgggaacactaagactgccctgccaaaagaggacattggaaagttttacagtggagactgttatatcattctctatacacatcattcgggcgacaagaaagaagagtactatctcagctactggattgggaaggatagcttggtggacgatcaagtgtcggcatctcaaataatcaatacaatgtggaattcattgaaaggacggccagttctgggccgtatataccaagggaaggagccaccacaatttgttgctcttttccagcccatggttatcttgaagggtggaatcggatctggatacaagaagctcatagaagaaaaaggtgctatgggtgagacttatactactgaaggcatagctctaattcgagtatctgagacatctatctacaacaacaagactcttcaagtagatgcggtagcaacgtctttaagctcaacggagtctttcgtactgcaatctggaaatgctatgtttacatggtttggcaattctagcacatatgagcaacagcagtgggcagcaaaagttgctgaatttttgaagcctggcgttgcagtgaagcactgcaaggaggggacagagagttctgctttctggtttgctcttggagggaaacagagttatacaaataaaaacactcctcaggatattattactagagagcctcacttgtatgcattctcattcaagaacgggagactggaggttactgagatcttcaacttttctcaagatgatttgttaactgaagacatgatggtacttgacacacatggtgaagttttcatttggattggtcagtatgtggaatcaaaagagaaacagaaggcatttgacattggccagaaatacgtggagcatgcaaattctattgaagatctttctccacatgtaccactatataaagtcatggaagggaatgagccatgcttcttcaagacgtacttttcttgggataacacaaaatctttggttcatggaaattccttccagaagaaactctcgctgctttttggattgcgttctgagggtgcacctaggagctctggtaatggtgggccaactcagagggcatctgcattagcagctctatcatccgcattcaatccatcatctcaacaaaggctgtctaatgagaggcctaaaagcacaggcgatggacccacgcaacgtgcctcagcactggctgccttatctaatgcattcaacccatccttaaaacccaaaacatcacctccatctcgctcaggtcgaggttctcaaagagcagctgctgtagctgctctatcctctgtgctgactgctgagcaatctggatcttcagaatttctacgatccaaagctagcaacacagcatataagactgatgtcgaccggattgtcataactccagctggcccatcaggcccatcttctcctcagtctgaagctggggagtccaatgtgtttcaccaggaaaaagatgctgcagcagatggggcaccgcctgacactgatggagcagtggctgaggccggagaggaagaaacaacggaaaatgttggtgaagcgacatttagctatgaccgcttgatatccaaatccaccgatccagttcgtgggatagattacaaacgcagagaggcatacttatcagatagtgaattccaaactgtttttggcatgaccaaggatgcattctaccgacagccaaattggaagcaagaactacagaagcgaaaagcagatcttttctaaagagaacaagccttgttaccagtggtctgctacagtatgcaatcctcttgtcgtgaatggtcggtcccatgagagttggtgtattaatatattgttggtcgtttctgaggacggtctactggtggctttgcacggttgtttcttttttggcaaccaattttataggtcaattcttttatttgtatatggcctgggttgtgctgcttgcgaggtcctaagatgcttctttgttcttctttgtgaatgtccatatgtgtatatcattttctactcgccagtttgttacgtacgggcatttcctggcaggttcgtcattgcattgtcatctatatgtcttgcacacgaaatatttgtgctgtccgttttgctgttaatggttggcagttgtttgggatttgaacacttggctgaattccatcattttcgtgtggctgttggcgcatgcttgtcatttctaaatagaaaattagatttgtctagtgtctggatcagcagttgtagaaagtggaattagaccagattatgctcattgttatctcatgttttttatcacaaacaaacacgatcattctactggtaagcggttatttcatgtaccgcctggagccctggacacggcattcctgcccaccggcagtccggcatcagctcgagcacgtgcaagtgcgaggagacggccgggccaaaggccggggcggcggcgcgggaaccaggcggaggcggcagtactcatagcagaaccatacgaaaaagaagaaaaatccttcggattgtaatagaattttggattggggtttaaagtcgggtctataatacactatagtttagttt

SEQ ID NO: 35445 - DNA, 3923 bp, Zea Mays
cctcctccctctctcccccgtgtccgtccgccctccgcctgtggcctcgcctccccgcattccgctcgcccctccctgatacggtgataccgcgatcagcggggcgccccgcgcccgcctcttctctctctctcgcgcgcgcgagagtagcagatccggcgattcgcattccgctcgcccctccctgatacggtgataccgcgatcggcggggcgcccgcgcccgcctcttctctctctcgcgcgcgagagcagcagatccggcgatccgcaggccctccgccggcgccccgcctgcccgacgatctagatccaggtatttggggaagcatctgctatcattttgttttcctcaaagtaatccaaggaaagttgtttccagatgtcaactgcaaaagtgttagatcctgcttttcaaggggctggccagaaagttgggacagaaatatggcggattgaagattttaagccagttgcactgccaaaatctgattatggtaaattctactgtggagattcatacatagttctgcagacgacctgtactaaaggtggtgcctatctatacgatatccacttctggattgggaaagattcgagtcaagatgaagctgggactgcagccatcaagacagttgaacttgatgccatccttgggggtcgtgcaattcaacatagggaactccaaggttacgaatctgacaaattcttgtcatacttcaagccttgcattatacctttggagggtggttttgcctctgggttcaaaaagcctgaagaggaaaagtttgaaacacggttgtatatatgcagagggaagagagctattcgggttaaagaggttcccttcgcccggtcgtcattaaaccatgatgatgtgtttgtcttagatactgaaaataagatataccagtttaatggtgctaactccaatatccaagaaagggccaaagcgttggaagtaatacaacatttaaaggagaaataccatgggggtgtttgcgatgttgccatcgttgatgatgggaaactacaagcagagtcagactctggtgaattctgggtcctttttggaggttttgcaccaattgggaaaaaaactgtgagtgatgatgatgttgtacttgaaactacagcaccaaaactgtacagtatcaatgatggccaattgaagctggaagaaacagctcttacaaaagctgtgcttgaaaataccaaatgtttcttacttgactgtggggctgaaatatatgtatgggttggacgggtaacacaaatggaggatagaaaatctgccactaaagcagttgatgaattcctcattaatcaaaagcgtccaaagacaacgagggtaactcaagtgattcaaggttatgagagtcatgctttcaagtccaagtttgaatcgtggccagtgggtaatgctgctgggaaccctggcacagaggaagggcggggaaaagttgccgctttattgaagcaacaacgcgttgatcccaagggagctgcaaaaagcaccactccagtaaatgaggaagttcctcctttgcttgatggcggtgggaagcttgaggtatggtgcgttgatgggaacactaagactgccctgccaaaagaggacattggaaagttttacagtggagactgttatatcattctctatacacatcattcgggcgacaagaaagaagagtactatctcagctactggattgggaaggatagcttggtggacgatcaagtgtcggcatctcaaataatcaatacaatgtggaattcattgaaaggacggccagttctgggccgtatataccaagggaaggagccaccacaatttgttgctcttttccagcccatggttatcttgaagggtggaatcggatctggatacaagaagctcatagaagaaaaaggtgctatgggtgagacttatactactgaaggcatagctctaattcgagtatctgagacatctatctacaacaacaagactcttcaagtagatgcggtagcaacgtctttaagctcaacggagtctttcgtactgcaatctggaaatgctatgtttacatggtttggcaattctagcacatatgagcaacagcagtgggcagcaaaagttgctgaatttttgaagcctggcgttgcagtgaagcactgcaaggaggggacagagagttctgctttctggtttgctcttggagggaaacagagttatacaaataaaaacactcctcaggatattattactagagagcctcacttgtatgcattctcattcaagaacgggagactggaggttactgagatcttcaacttttctcaagatgatttgttaactgaagacatgatggtacttgacacacatggtgaagttttcatttggattggtcagtatgtggaatcaaaagagaaacagaaggcatttgacattggccagaaatacgtggagcatgcaaattctattgaagatctttctccacatgtaccactatataaagtcatggaagggaatgagccatgcttcttcaagacgtacttttcttgggataacacaaaatctttggttcatggaaattccttccagaagaaactctcgctgctttttggattgcgttctgagggtgcacctaggagctctggtaatggtgggccaactcagagggcatctgcattagcagctctatcatccgcattcaatccatcatctcaacaaaggctgatgtcgaccggattgtcataactccagctggcccatcaggcccatcttctcctcagtctgaagctggggagtccaatgtgtttcaccaggaaaaagatgctgcagcagatggggcaccgcctgacactgatggagcagtggctgaggccggagaggaagaaacaacggaaaatgttggtgaagcgacatttagctatgaccgcttgatatccaaatccaccgatccagttcgtgggatagattacaaacgcagagaggcatacttatcagatagtgaattccaaactgtttttggcatgaccaaggatgcattctaccgacagccaaattggaagcaagaactacagaagcgaaaagcagatcttttctaaagagaacaagccttgttaccagtggtctgctacagtatgcaatcctcttgtcgtgaatggtcggtcccatgagagttggtgtattaatatattgttggtcgtttctgaggacggtctactggtggctttgcacggttgtttcttttttggcaaccaattttataggtcaattcttttatttgtatatggcctgggttgtgctgcttgcgaggtcctaagatgcttctttgttcttctttgtgaatgtccatatgtgtatatcattttctactcgccagtttgttacgtacgggcatttcctggcaggttcgtcattgcattgtcatctatatgtcttgcacacgaaatatttgtgctgtccgttttgctgttaatggttggcagttgtttgggatttgaacacttggctgaattccatcattttcgtgtggctgttggcgcatgcttgtcatttctaaatagaaaattagatttgtctagtgtctggatcagcagttgtagaaagtggaattagaccagattatgctcattgttatctcatgttttttatcacaaacaaacacgatcattctactggtaagcggttatttcatgtaccgcctggagccctggacacggcattcctgcccaccggcagtccggcatcagctcgagcacgtgcaagtgcgaggagacggccgggccaaaggccggggcggcggcgcgggaaccaggcggaggcggcagtactcatagcagaaccatacgaaaaagaagaaaaatccttcggattgtaatagaattttggattggggtttaaagtcgggtctataatacactatagtttagttt

SEQ ID NO: 35446 - DNA, 2856 bp, Zea Mays
caatcttctccgggacgctttctctctggtgactcggacaatcgcgatcgcgacgaccgacgagcacaagctagcttggttgtcggcttgtgtgtgttgcacagtcggccactacacacacgccgcccaccaacaccatggacgccgccgcgaaggaggcgctgatcctggacctgcacgcggtggaggccgtgaagctgggcaccttcgtgctcaagtccgggatcacctccccgatctacctggacctgcgcgtgctcgtctcccacccgcgcctgctcgcctccgtcgcgtccctcctcggcgcgctcccggccacgcgcccctacgaccttctctgcggcgtgccctacacagcgctgcccttcgcggccgcgctctccgtcgccgcctccgtgcccatgctgctcagccgctacgacaccaagcgcgtcgagggcgccttccgcgccgcccagaccgtgctcatcgtcgaggacctcgttaccagcggcgcctccgtgctcgagaccgtcgccccgctccgcgccgaggggctcgtggtcgccgacgccgtcgtcgtcatcgaccgcgagcaaggtgggcgcgagaacctcgccgctagcggggtcgcgctgcactcgctcatgaccctcacggagatgctcgccgtgctggcgaggcacgggaaggtcggcgaggagaagatcgcggaggtcaggcggttcctccaagccaacaggaaggtggcggtgcccggggtgcctgctgggccacccaagccgtcggctactgctcggaggaagtcgtttgcggagagggcggggttggccacgaaccccatggggaggaggttgttcgaggtgatggaggcgaagcagagcaacttgtgtgtcgcggctgatgttgggacagccaaggagctacttgagcttgctgacaaggttggtccagagatttgtatgctgaaaacacatgttgatatcttgtctgattttacaccagattttggggccaaccttcgcacaattgctgggaagcacaactttctgatctttgaagaccgcaagtttgctgacattgggaacacagtaactatgcaatctgaaggaggtatattccgcatcttagactgggcggatattattaatgcgcatatagttcctggacctgggattgtagatggcttgaagctcaagggtttgcctaaaggaaggggcctacttttgcttgctgaaatgagctcagctggcaaccttgcttatggagactacactgctgcggctgtaaagattgccgagcaacatcctgactttgtaataggatttatatcagtgaatcctgcatcttggtcaccagcaccgtcaagcccagcatttatccatgccactcctggggttcagatagctgctggaggagatgcccttgggcaacaatataacactcccttttctgtcatcaacgacagaggtagtgatataattatagtcggacgagggattataaaggccagtaaccctgtagagaccgcgagacagtatcgcatggaggggtggcaggcgtatcaatccggcttttcttgaggatgtttaagcaactcgccaaacgtagccggaggacattcgggcgagtgttgatgtgataagagtgcgccccatctatgatctatgtatgcaactgcgttctttcacttttacctgcccatcattgccacgcagtgattttcagtaatggttctgactgtacccccggatgctataatttgcaataagtgccggcctgcgtcgctctcccgcctccttatccgcacaggcagcccgcccttcatcctcagcgtcaccgtcatctcgtacggcggaggcgcctccatgcttgccgcccgcaccgtctccacggcgaacctcctgaccacggcggccacaacggccttcatctgcacatacgccatctccttaccgaggcacgccctcgggccggcgtggaacaccgggtacctcgccgcgtccaccgccacgaactcgcctccgccatcgagccaccgctcggggcggaactcgcggcagtcgtcgccccacagctgcggcatcctccccatcgcgtacgcgcagtagtccgcgaaccagccggcgcgcaccgtcgtgccatccggcagcacgtcccccgcggccgccaccctcgagttgatgggcaccggcggatacagccgcatcgcctcggtgagcgccgcgtgcaggtagtgcagccccctgagctcgtcgtagccgccttcgtcgtcgacgccatatctgtggagcgagagcgacgccacctcctcgtacacgcgccgctcgcagcgcgggttggcggcgaggagccagaagaaccatgtgagcgcggaggacgtggagtccttcccggcgagcacgaagctgacgacgatgtcccgcaggaaccgccgcttcgcctccggcgaccggaacatggcgccgagttcgctcccctcctcttcctccatcgccgccgcgaaccgcgacagaaggtgctgctcgtcgcagccgcctccgtcgccgacgccgcgcgaccgctcctccgactccatgatcgccgcgacgtgctcgtcgacgatgcggatggcctcgcggagccgcctctcgcttccgacgccagcgagctgcatcgccttccacacgacggcggtcgggtggagcatgcgcgcgaaggagatctcgacggcggcgtcgaacgcctcgaagaacgtgtcgtgccggcggggtcgtcccctgccccggccgccggcctcctcgagctcgagcagcgtcgagccctcgactccgaacgcgacgccgcagatgttgtcgaaggcgaagcgcttgagcacgtcctgcaggtcaacggcct

SEQ ID NO: 35447 - DNA, 3729 bp, Zea Mays
accactgcccactgatgacttgggttgagataccgagagctgaaaagaaaccactgcccactgatgactgtatacagatcggctggttcccgaaggactgtatgcagatcggacagcggctggggtaccggcgtgcacgaaggactgtatgcagatcggacagcggctggggtaccggcgtgcagatcggctggttcaagaaggtgctcgagaaacagagtcgagaaagcagggctcccagctgccgcgccggaactgatggccgcccggggaggaagaagcgagggcgaagagcagggagaggagtggatgacggatgggtagactccgtgacgctatccaaacgattttgtaggctcggatacaggttcggatcactctggatccatgccgtgctgcaaaccaaacacgctattgctgagaagcacaactttttgatcttcgaagaccgcaagtttgctgacattgggaatacagtaaccatgcaatatgaaggtggaatattccgcatattggactgggctgatattgttaatgcgcatatagttcctggacctggaatcgtagatggcttgaagttgaagggttcgcctaaaggaagagggctacttctgctcgctgagatgagctctgccggcaatcttgctcatggagattacactgctgctgctgtaaagatcgctgagcaacattctgactttgtgatgggatttatatcagttaatcccgcatcttggtcagtaacaccatcaagcccggcgtttatccatgccacacctggagttcagatggccgctggaggagatgatcttgggcaacaatacaacaatcctgagtctgtgataaattacaggggcagtgacataatcatagttgggcgcgggattataaaggcgagcgatcctttgaagacggcatgtgagtaccggagaaaaatgtcgagtcaagaacttttctcccccgttcgcgcagcacagtcggccactacacacacgccgcccaccaacaccatggacgccgccgcgaaggaggcgctgatcctggacctgcacgcggtggaggccgtgaagctgggcaccttcgtgctcaagtccgggatcacctccccgatctacctggacctgcgcgtgctcgtctcccacccgcgcctgctcgcctccgtcgcgtccctcctcggcgcgctcccggccacgcgcccctacgaccttctctgcggcgtgccctacacagcgctgcccttcgcggccgcgctctccgtcgccgcctccgtgcccatgctgctcagccgctacgacaccaagcgcgtcgagggcgccttccgcgccgcccagaccgtgctcatcgtcgaggacctcgttaccagcggcgcctccgtgctcgagaccgtcgccccgctccgcgccgaggggctcgtggtcgccgacgccgtcgtcgtcatcgaccgcgagcaaggtgggcgcgagaacctcgccgctagcggggtcgcgctgcactcgctcatgaccctcacggagatgctcgccgtgctggcgaggcacgggaaggtcggcgaggagaagatcgcggaggtcaggcggttcctccaagccaacaggaaggtggcggtgcccggggtgcctgctgggccacccaagccgtcggctactgctcggaggaagtcgtttgcggagagggcggggttggccacgaaccccatggggaggaggttgttcgaggtgatggaggcgaagcagagcaacttgtgtgtcgcggctgatgttgggacagccaaggagctacttgagcttgctgacaaggttggtccagagatttgtatgctgaaaacacatgttgatatcttgtctgattttacaccagattttggggccaaccttcgcacaattgctgggaagcacaactttctgatctttgaagaccgcaagtttgctgacattgggaacacagtaactatgcaatctgaaggaggtatattccgcatcttagactgggcggatattattaatgcgcatatagttcctggacctgggattgtagatggcttgaagctcaagggtttgcctaaaggaaggggcctacttttgcttgctgaaatgagctcagctggcaaccttgcttatggagactacactgctgcggctgtaaagattgccgagcaacatcctgactttgtaataggatttatatcagtgaatcctgcatcttggtcaccagcaccgtcaagcccagcatttatccatgccactcctggggttcagatagctgctggaggagatgcccttgggcaacaatataacactcccttttctgtcatcaacgacagaggtagtgatataattatagtcggacgagggattataaaggccagtaaccctgtagagaccgcgagacagtatcgcatggaggggtggcaggcgtatcaatccggcttttcttgaggatgtttaagcaactcgccaaacgtagccggaggacattcgggcgagtgttgatgtgataagagtgcgccccatctatgatctatgtatgcaactgcgttctttcacttttacctgcccatcattgccacgcagtgattttcagtaatggttctgactgtacccccggatgctataatttgcaataagtgccggcctgcgtcgctctcccgcctccttatccgcacaggcagcccgcccttcatcctcagcgtcaccgtcatctcgtacggcggaggcgcctccatgcttgccgcccgcaccgtctccacggcgaacctcctgaccacggcggccacaacggccttcatctgcacatacgccatctccttaccgaggcacgccctcgggccggcgtggaacaccgggtacctcgccgcgtccaccgccacgaactcgcctccgccatcgagccaccgctcggggcggaactcgcggcagtcgtcgccccacagctgcggcatcctccccatcgcgtacgcgcagtagtccgcgaaccagccggcgcgcaccgtcgtgccatccggcagcacgtcccccgcggccgccaccctcgagttgatgggcaccggcggatacagccgcatcgcctcggtgagcgccgcgtgcaggtagtgcagccccctgagctcgtcgtagccgccttcgtcgtcgacgccatatctgtggagcgagagcgacgccacctcctcgtacacgcgccgctcgcagcgcgggttggcggcgaggagccagaagaaccatgtgagcgcggaggacgtggagtccttcccggcgagcacgaagctgacgacgatgtcccgcaggaaccgccgcttcgcctccggcgaccggaacatggcgccgagttcgctcccctcctcttcctccatcgccgccgcgaaccgcgacagaaggtgctgctcgtcgcagccgcctccgtcgccgacgccgcgcgaccgctcctccgactccatgatcgccgcgacgtgctcgtcgacgatgcggatggcctcgcggagccgcctctcgcttccgacgccagcgagctgcatcgccttccacacgacggcggtcgggtggagcatgcgcgcgaaggagatctcgacggcggcgtcgaacgcctcgaagaacgtgtcgtgccggcggggtcgtcccctgccccggccgccggcctcctcgagctcgagcagcgtcgagccctcgactccgaacgcgacgccgcagatgttgtcgaaggcgaagcgcttgagcacgtcctgcaggtcaacggcct

SEQ ID NO: 35448 - DNA, 3655 bp, Zea Mays
cttggggacactagctcgtcaaaaataattttagtgtgcctagaccatacctcaaagtaaggataccatcgaggatttccaaggattttgactgaagtttcaagagatggaggcctaataagcattcctctcgttgtgaccaattgtgtgaaggaacattgctacttgttcctcaacacaacaatggatactatcagaaagaaggcttctttgtttcagtgtatcacacaacaaaaagaatggtgctctcctcaatcttagcatgcgcaaacaactcgtatcatctttatgattgctgagaagcacaactttttgatcttcgaagaccgcaagtttgctgacattgggaatacagtaaccatgcaatatgaaggtggaatattccgcatattggactgggctgatattgttaatgcgcatatagttcctggacctggaatcgtagatggcttgaagttgaagctaatgaatcatggtactcacaccaactgtcgtgttctggccttgaagggttcgcctaaaggaagagggctacttctgctcgctgagatgagctctgccggcaatcttgctcatggagattacactgctgctgctgtaaagatcgctgagcaacattctgactttgtgatgggatttatatcagttaatcccgcatcttggtcagtaacaccatcaagcccggcgtttatccatgccacacctggagttcagatggccgctggaggagatgatcttgggcaacaatacaacaatcctgagtctgtgataaattacaggggcagtgacataatcatagttgggcgcgggattataaaggcgagcgatcctttgaagacggcatgtgagtaccggagaaaaatgtcgagtcaagaacttttctcccccgttcgcgcagcacagtcggccactacacacacgccgcccaccaacaccatggacgccgccgcgaaggaggcgctgatcctggacctgcacgcggtggaggccgtgaagctgggcaccttcgtgctcaagtccgggatcacctccccgatctacctggacctgcgcgtgctcgtctcccacccgcgcctgctcgcctccgtcgcgtccctcctcggcgcgctcccggccacgcgcccctacgaccttctctgcggcgtgccctacacagcgctgcccttcgcggccgcgctctccgtcgccgcctccgtgcccatgctgctcagccgctacgacaccaagcgcgtcgagggcgccttccgcgccgcccagaccgtgctcatcgtcgaggacctcgttaccagcggcgcctccgtgctcgagaccgtcgccccgctccgcgccgaggggctcgtggtcgccgacgccgtcgtcgtcatcgaccgcgagcaaggtgggcgcgagaacctcgccgctagcggggtcgcgctgcactcgctcatgaccctcacggagatgctcgccgtgctggcgaggcacgggaaggtcggcgaggagaagatcgcggaggtcaggcggttcctccaagccaacaggaaggtggcggtgcccggggtgcctgctgggccacccaagccgtcggctactgctcggaggaagtcgtttgcggagagggcggggttggccacgaaccccatggggaggaggttgttcgaggtgatggaggcgaagcagagcaacttgtgtgtcgcggctgatgttgggacagccaaggagctacttgagcttgctgacaaggttggtccagagatttgtatgctgaaaacacatgttgatatcttgtctgattttacaccagattttggggccaaccttcgcacaattgctgggaagcacaactttctgatctttgaagaccgcaagtttgctgacattgggaacacagtaactatgcaatctgaaggaggtatattccgcatcttagactgggcggatattattaatgcgcatatagttcctggacctgggattgtagatggcttgaagctcaagggtttgcctaaaggaaggggcctacttttgcttgctgaaatgagctcagctggcaaccttgcttatggagactacactgctgcggctgtaaagattgccgagcaacatcctgactttgtaataggatttatatcagtgaatcctgcatcttggtcaccagcaccgtcaagcccagcatttatccatgccactcctggggttcagatagctgctggaggagatgcccttgggcaacaatataacactcccttttctgtcatcaacgacagaggtagtgatataattatagtcggacgagggattataaaggccagtaaccctgtagagaccgcgagacagtatcgcatggaggggtggcaggcgtatcaatccggcttttcttgaggatgtttaagcaactcgccaaacgtagccggaggacattcgggcgagtgttgatgtgataagagtgcgccccatctatgatctatgtatgcaactgcgttctttcacttttacctgcccatcattgccacgcagtgattttcagtaatggttctgactgtacccccggatgctataatttgcaataagtgccggcctgcgtcgctctcccgcctccttatccgcacaggcagcccgcccttcatcctcagcgtcaccgtcatctcgtacggcggaggcgcctccatgcttgccgcccgcaccgtctccacggcgaacctcctgaccacggcggccacaacggccttcatctgcacatacgccatctccttaccgaggcacgccctcgggccggcgtggaacaccgggtacctcgccgcgtccaccgccacgaactcgcctccgccatcgagccaccgctcggggcggaactcgcggcagtcgtcgccccacagctgcggcatcctccccatcgcgtacgcgcagtagtccgcgaaccagccggcgcgcaccgtcgtgccatccggcagcacgtcccccgcggccgccaccctcgagttgatgggcaccggcggatacagccgcatcgcctcggtgagcgccgcgtgcaggtagtgcagccccctgagctcgtcgtagccgccttcgtcgtcgacgccatatctgtggagcgagagcgacgccacctcctcgtacacgcgccgctcgcagcgcgggttggcggcgaggagccagaagaaccatgtgagcgcggaggacgtggagtccttcccggcgagcacgaagctgacgacgatgtcccgcaggaaccgccgcttcgcctccggcgaccggaacatggcgccgagttcgctcccctcctcttcctccatcgccgccgcgaaccgcgacagaaggtgctgctcgtcgcagccgcctccgtcgccgacgccgcgcgaccgctcctccgactccatgatcgccgcgacgtgctcgtcgacgatgcggatggcctcgcggagccgcctctcgcttccgacgccagcgagctgcatcgccttccacacgacggcggtcgggtggagcatgcgcgcgaaggagatctcgacggcggcgtcgaacgcctcgaagaacgtgtcgtgccggcggggtcgtcccctgccccggccgccggcctcctcgagctcgagcagcgtcgagccctcgactccgaacgcgacgccgcagatgttgtcgaaggcgaagcgcttgagcacgtcctgcaggtcaacggcct

SEQ ID NO: 35449 - DNA, 1045 bp, Zea Mays
ctttgtttgctggtatttgtagcgcggaataattgaagggtttgtcaaacggtgcataataaatactctctctatcctaaaataaaaatcgttttagataattattagtgaatgtattttgtatatgtgtttatattcatttattattcatttaaatatagacataaaaatcaatatctaaagccactaatatagtgggacggagagagggagtacatgtttttttttaatgtgcacgaagcttctcggctgcttcgttagtcagtttgactgattcgtttagcgcgctcatctcctgatcttgtttatttcgtaggagtagttttgtttttgcggctggtttcataaagaagggggacaagcacatcgactgtatgatcctgacagtaatagttcgtcatgattcagtctttgacttgaggaagccgcggagtggaactggagcgtagactcagggggagacgcagacaactctgtagagttctttgttgatgaggaagcttgagcttgttgcaggaatgggaggtggaggtgctcaggaagggcatgtaaatgccagcaactagtgcttcagaagtccagtctcatccgacaacagtggccctttgagatccagaattacaggagaggagttagtaaggaccgcaggaaacgatggagttggcgtacgtacgtgtcggcgatgcctgaaccgtgtgcttctccaacccaagcagtaatactctagcatccagtggcggccatgaccacgacgacccgtgcttccaatccaagcgtgcatccgtacatcggctacgtgctcgcctgaattttctttttcacccagccccttttttcccgtgcaggacggcaaagggtccgcgcatcaggtgcgtatgatgccagcaaaactgttatctagtctagtcaatagtcatctcccaagagatgattacaggccgcctgtaaatggaacgcgaggctttggaagctgtgtccttgatgcttcaagttatcttaaattaaatatttctataagtccgatcagatttaaagagaaaacaaa

SEQ ID NO: 35450 - DNA, 788 bp, Zea Mays
cccacgtcgccgccgccgaagaaccgcttgcccttcacctgcccctccagcagcttcaggagtagttttgtttttgcggctggtttcataaagaagggggacaagcacatcgactgtatgatcctgacagtaatagttcgtcatgattcagtctttgacttgaggaagccgcggagtggaactggagcgtagactcagggggagacgcagacaactctgtagagttctttgttgatgaggaagcttgagcttgttgcaggaatgggaggtggaggtgctcaggaagggcatgtaaatgccagcaactagtgcttcagaagtccagtctcatccgacaacagtggccctttgagatccagaattacaggagaggagttagtaaggaccgcaggaaacgatggagttggcgtacgtacgtgtcggcgatgcctgaaccgtgtgcttctccaacccaagcagtaatactctagcatccagtggcggccatgaccacgacgacccgtgcttccaatccaagcgtgcatccgtacatcggctacgtgctcgcctgaattttctttttcacccagccccttttttcccgtgcaggacggcaaagggtccgcgcatcaggtgcgtatgatgccagcaaaactgttatctagtctagtcaatagtcatctcccaagagatgattacaggccgcctgtaaatggaacgcgaggctttggaagctgtgtccttgatgcttcaagttatcttaaattaaatatttctataagtccgatcagatttaaagagaaaacaaa

SEQ ID NO: 35451 - DNA, 1623 bp, Zea Mays
ctatgctgaggtcattgcttatggcacgcatcgatggttgccgatgacttctcctatagtattatattatcttcctgatctgatcatgtggccataaatagcaagggccttagattgttcggccagggatagcataacaccgccgaggaagcagcaagcagcaaggtcgacatgtcgtctccgccgccggtgaagctgatcggcttcttcggcagcccgtacgcgttccgcgcggaggcggcgctgtgcctgaaaggcgtgccgtacgagctgatcctggaggacctgttcggcagcaagagcgagctcctgctccaccacaaccccgtgcacaagaaggtgcccgtgctcctccacggcgacggccgggccatctccgagtccctcgtcatcgccgagtacgtcgacgaggccttcgacgggccgccgctgctccccgccgacccctacgcgcgcgccgcggcccgcttctgggccgacttcatcgagaccaggctcaccaagcccttcttcatggcgatctgggtggaggagcgcgaagcgcgcctgcggttcgaggaggaggccaaggagctcgtggcgctgctggaggcgcagctcgagggaaagaggttcttcgccggcgacaggccggggtacctcgacgtggccgcgtccgcgctcgggccctggcgcagcgtcatcgaggagctcaacggtgtggcgctgctcagcgaggatgaccaccccaacctgtgccggtggaccagggactactgcgccttcgaggctctcaagccgtgcatgccggatcgggagaagctcctcgcctacttcactaagaacttcgacaggtacaaggcggccgtcaatgcgacgctatcgcagtcgcagcagtaataactgcccaactgggagtagttttgtttttgcggctggtttcataaagaagggggacaagcacatcgactgtatgatcctgacagtaatagttcgtcatgattcagtctttgacttgaggaagccgcggagtggaactggagcgtagactcagggggagacgcagacaactctgtagagttctttgttgatgaggaagcttgagcttgttgcaggaatgggaggtggaggtgctcaggaagggcatgtaaatgccagcaactagtgcttcagaagtccagtctcatccgacaacagtggccctttgagatccagaattacaggagaggagttagtaaggaccgcaggaaacgatggagttggcgtacgtacgtgtcggcgatgcctgaaccgtgtgcttctccaacccaagcagtaatactctagcatccagtggcggccatgaccacgacgacccgtgcttccaatccaagcgtgcatccgtacatcggctacgtgctcgcctgaattttctttttcacccagccccttttttcccgtgcaggacggcaaagggtccgcgcatcaggtgcgtatgatgccagcaaaactgttatctagtctagtcaatagtcatctcccaagagatgattacaggccgcctgtaaatggaacgcgaggctttggaagctgtgtccttgatgcttcaagttatcttaaattaaatatttctataagtccgatcagatttaaagagaaaacaaa

SEQ ID NO: 35452 - DNA, 1417 bp, Zea Mays
ctatgctgaggtcattgcttatggcacgcatcgatggttgccgatgacttctcctatagtattatattatcttcctgatctgatcatgtggccataaatagcaagggccttagattgttcggccagggatagcataacaccgccgaggaagcagcaagcagcaaggtcgacatgtcgtctccgccgccggtgaagctgatcggcttcttcggcagcccgtacgcgttccgcgcggaggcggcgctgtgcctgaaaggcgtgccgtacgagctgatcctggaggacctgttcggcagcaagagcgagctcctgctccaccacaaccccgtgcacaagaaggtgcccgtgctcctccacggcgacggccgggccatctccgagtccctcgtcatcgccgagtacgtcgacgaggccttcgacgggccgccgctgctccccgccgacccctacgcgcgcgccgcggcccgcttctgggccgacttcatcgagaccaggctcaccaagcccttcttcatggcgatctgggtggaggagcgcgaagcgcgcctgcggttcgaggaggaggccaaggagctcgtggcgctgctggaggcgcagctcgagggaaagaggttcttcgccggcgacaggccggggtacctcgacgtggccgcgtccgcgctcgggccctggcgcagcgtcatcgaggagctcaacggtgtggcgctgctcagcgaggatgaccaccccaacctgtgccggtggaccagggactactgcgccttcgaggctctcaagccgtgcatgccggatcgggagaagctcctcgcctacttcactaagaacttcgacaggtacaaggcggccgtcaatgcgacgctatcgcagtcgcagcagtaataactgcccaactgggaatgggaggtggaggtgctcaggaagggcatgtaaatgccagcaactagtgcttcagaagtccagtctcatccgacaacagtggccctttgagatccagaattacaggagaggagttagtaagaggaaacgatggagttggcgtacgtacgtgtcggcgatgcctgaaccgtgtgcttctccaacccaagcagtaatactctagcatccagtggcggccatgaccacgacgacccgtgcttccaatccaagcgtgcatccgtacatcggctacgtgctcgcctgaattttctttttcacccagccccttttttcccgtgcaggacggcaaagggtccgcgcatcaggtgcgtatgatgccagcaaaactgttatctagtctagtcaatagtcatctcccaagagatgattacaggccgcctgtaaatggaacgcgaggctttggaagctgtgtccttgatgcttcaagttatcttaaattaaatatttctataagtccgatcagatttaaagagaaaacaaa

SEQ ID NO: 35453 - DNA, 1423 bp, Zea Mays
ctatgctgaggtcattgcttatggcacgcatcgatggttgccgatgacttctcctatagtattatattatcttcctgatctgatcatgtggccataaatagcaagggccttagattgttcggccagggatagcataacaccgccgaggaagcagcaagcagcaaggtcgacatgtcgtctccgccgccggtgaagctgatcggcttcttcggcagcccgtacgcgttccgcgcggaggcggcgctgtgcctgaaaggcgtgccgtacgagctgatcctggaggacctgttcggcagcaagagcgagctcctgctccaccacaaccccgtgcacaagaaggtgcccgtgctcctccacggcgacggccgggccatctccgagtccctcgtcatcgccgagtacgtcgacgaggccttcgacgggccgccgctgctccccgccgacccctacgcgcgcgccgcggcccgcttctgggccgacttcatcgagaccaggctcaccaagcccttcttcatggcgatctgggtggaggagcgcgaagcgcgcctgcggttcgaggaggaggccaaggagctcgtggcgctgctggaggcgcagctcgagggaaagaggttcttcgccggcgacaggccggggtacctcgacgtggccgcgtccgcgctcgggccctggcgcagcgtcatcgaggagctcaacggtgtggcgctgctcagcgaggatgaccaccccaacctgtgccggtggaccagggactactgcgccttcgaggctctcaagccgtgcatgccggatcgggagaagctcctcgcctacttcactaagaacttcgacaggtacaaggcggccgtcaatgcgacgctatcgcagtcgcagcagtaataactgcccaactgggaatgggaggtggaggtgctcaggaagggcatgtaaatgccagcaactagtgcttcagaagtccagtctcatccgacaacagtggccctttgagatccagaattacaggagaggagttagtaaggaccgcaggaaacgatggagttggcgtacgtacgtgtcggcgatgcctgaaccgtgtgcttctccaacccaagcagtaatactctagcatccagtggcggccatgaccacgacgacccgtgcttccaatccaagcgtgcatccgtacatcggctacgtgctcgcctgaattttctttttcacccagccccttttttcccgtgcaggacggcaaagggtccgcgcatcaggtgcgtatgatgccagcaaaactgttatctagtctagtcaatagtcatctcccaagagatgattacaggccgcctgtaaatggaacgcgaggctttggaagctgtgtccttgatgcttcaagttatcttaaattaaatatttctataagtccgatcagatttaaagagaaaacaaa

SEQ ID NO: 35454 - DNA, 1624 bp, Zea Mays
ctatgctgaggtcattgcttatggcacgcatcgatggttgccgatgacttctcctatagtattatattatcttcctgatctgatcatgtggccataaatagcaagggccttagattgttcggccagggatagcataacaccgccgaggaagcagcaagcagcaaggtcgacatgtcgtctccgccgccggtgaagctgatcggcttcttcggcagcccgtacgcgttccgcgcggaggcggcgctgtgcctgaaaggcgtgccgtacgagctgatcctggaggacctgttcggcagcaagagcgagctcctgctccaccacaaccccgtgcacaagaaggtgcccgtgctcctccacggcgacggccgggccatctccgagtccctcgtcatcgccgagtacgtcgacgaggccttcgacgggccgccgctgctccccgccgacccctacgcgcgcgccgcggcccgcttctgggccgacttcatcgagaccaggctcaccaagcccttcttcatggcgatctgggtggaggagcgcgaagcgcgcctgcggttcgaggaggaggccaaggagctcgtggcgctgctggaggcgcagctcgagggaaagaggttcttcgccggcgacaggccggggtacctcgacgtggccgcgtccgcgctcgggccctggcgcagcgtcatcgaggagctcaacggtgtggcgctgctcagcgaggatgaccaccccaacctgtgccggtggaccagggactactgcgccttcgaggctctcaagccgtgcatgccggatcgggagaagctcctcgcctacttcactaagaacttcgacaggtacaaggcggccgtcaatgcgacgctatcgcagtcgcagcagtaataactgcccaactggggagtagttttgtttttgcggctggtttcataaagaagggggacaagcacatcgactgtatgatcctgacagtaatagttcgtcatgattcagtctttgacttgaggaagccgcggagtggaactggagcgtagactcagggggagacgcagacaactctgtagagttctttgttgatgaggaagcttgagcttgttgcaggaatgggaggtggaggtgctcaggaagggcatgtaaatgccagcaactagtgcttcagaagtccagtctcatccgacaacagtggccctttgagatccagaattacaggagaggagttagtaaggaccgcaggaaacgatggagttggcgtacgtacgtgtcggcgatgcctgaaccgtgtgcttctccaacccaagcagtaatactctagcatccagtggcggccatgaccacgacgacccgtgcttccaatccaagcgtgcatccgtacatcggctacgtgctcgcctgaattttctttttcacccagccccttttttcccgtgcaggacggcaaagggtccgcgcatcaggtgcgtatgatgccagcaaaactgttatctagtctagtcaatagtcatctcccaagagatgattacaggccgcctgtaaatggaacgcgaggctttggaagctgtgtccttgatgcttcaagttatcttaaattaaatatttctataagtccgatcagatttaaagagaaaacaaa

SEQ ID NO: 35455 - DNA, 1679 bp, Zea Mays
gacacttcaactatgaactgatgaagcgtgctaaacaaaacaaaaaaaaatacccgccagatctatgctgaggtcattgcttatggcacgcatcgatggttgccgatgacttctcctatagtattatattatcttcctgatctgatcatgtggccataaatagcaagggccttagattgttcggccagggatagcataacaccgccgaggaagcagcaagcagcaaggtcgacatgtcgtctccgccgccggtgaagctgatcggcttcttcggcagcccgtacgcgttccgcgcggaggcggcgctgtgcctgaaaggcgtgccgtacgagctgatcctggaggacctgttcggcagcaagagcgagctcctgctccaccacaaccccgtgcacaagaaggtgcccgtgctcctccacggcgacggccgggccatctccgagtccctcgtcatcgccgagtacgtcgacgaggccttcgacgggccgccgctgctccccgccgacccctacgcgcgcgccgcggcccgcttctgggccgacttcatcgagaccaggctcaccaagcccttcttcatggcgatctgggtggaggagcgcgaagcgcgcctgcggttcgaggaggaggccaaggagctcgtggcgctgctggaggcgcagctcgagggaaagaggttcttcgccggcgacaggccggggtacctcgacgtggccgcgtccgcgctcgggccctggcgcagcgtcatcgaggagctcaacggtgtggcgctgctcagcgaggatgaccaccccaacctgtgccggtggaccagggactactgcgccttcgaggctctcaagccgtgcatgccggatcgggagaagctcctcgcctacttcactaagaacttcgacaggtacaaggcggccgtcaatgcgacgctatcgcagtcgcagcagtaataactgcccaactggttttgtttttgcggctggtttcataaagaagggggacaagcacatcgactgtatgatcctgacagtaatagttcgtcatgattcagtctttgacttgaggaagccgcggagtggaactggagcgtagactcagggggagacgcagacaactctgtagagttctttgttgatgaggaagcttgagcttgttgcaggaatgggaggtggaggtgctcaggaagggcatgtaaatgccagcaactagtgcttcagaagtccagtctcatccgacaacagtggccctttgagatccagaattacaggagaggagttagtaaggaccgcaggaaacgatggagttggcgtacgtacgtgtcggcgatgcctgaaccgtgtgcttctccaacccaagcagtaatactctagcatccagtggcggccatgaccacgacgacccgtgcttccaatccaagcgtgcatccgtacatcggctacgtgctcgcctgaattttctttttcacccagccccttttttcccgtgcaggacggcaaagggtccgcgcatcaggtgcgtatgatgccagcaaaactgttatctagtctagtcaatagtcatctcccaagagatgattacaggccgcctgtaaatggaacgcgaggctttggaagctgtgtccttgatgcttcaagttatcttaaattaaatatttctataagtccgatcagatttaaagagaaaacaaa

SEQ ID NO: 35456 - DNA, 3241 bp, Zea Mays
aacagtaagcttgggttcggtccttgcactccataaacctgaactgtaatgatgattaaagtttatacccaaattcaatgcattacatgatagaaatgctgcatccctcggtttcctaggttcggtccttgttgccatccttggtaaggaataaggatgcttgtgaagttatgtggacgttgcaaggtaaaaatacaaggccagggtcacatactcacatgatcttatttcaaaaatgttctttgttgtgtggttagattaatgtgataaaccgataataaaatgaatcaatagtttacaatagttagtcggctcagttctgctcatgaagtaatcttcataaattgccatataaacaaggggtactatattttccaggaatattgaaaccaaataaatttagtactataatgttcactgttaactttagcaagacaatatggatggaaaaaatcttacctactcactttgttctggccaatttaggtgcctacaattaatgaagacactggaatacctagccctactgaaccaactgaaactctgcaaacatatctgtcgggtgaagtgctactttcatagcaataaaaacaaacggcaagtgattgttgcatgcatcttctccgtggaacatgttactctgtatgcagatatgctggtgaaatagcttcataatggcttaaataattgaaactcgtgcttatgtcaatttttctatgtgtactttgtgcaaaatgtaatttgcaagcaatctctgacggtaaatggcgaaggaagaatcatcaaggtcagacatccagtttatgtgacacaatcgatcccttcatctgttgaaatgtcagcctaagtgactgaatcaggacccctaaatataaatgattccaattggttaacaatgcatgcgagacttctatctccatattctccctaacaattggttaacaatgcatgcgagctttgaaccatacttgaaatgtatttcatttagttaatgaaatcttggtttgcctattctagcaactatgtttccttgaccatgctgatctcagagcaattattttggattaagcatcaccgtcagttggcattagatgggactctggcagcacagttggtgaatttgatgggcactcaaagagggttctaagctgtgacttcaagccaacacgtccatttaccattgtgataggtggtgaagatattctagctaacttttatgaaggaccaccatctaaattcaagcattcgataagatcagtagtcattgctggttttctgacctagctaacattgtatagctagctctttgccataattatttgttatgatcttgcttatcttttgccaatgggccaaatatacacatctgatgtggattactttactgcatttattatgtgaatgaaaaccttcatttaccctgtatcaatgatgtagtcatgttaacacaggtgtcatctatcagaacttatcatgtcctacatttgcttatgtagtggattgaatcttatgaatgtttatgtgtgtagatatcttgttagtttataagtgcctctttgagtatccattacagtctgggtactgtcttggtttaggtaggcccaagcagctcttgacatttatctacattatcaatttgattagtcctatgcaatgtttattcagatagtttttggaacaatctctgagttcgctgtatggcactgcatgtgtaaatgacaggtgcgtctaggctcccacctcccattcacacaagtgtgtcatatatggatttcagggattattccatggtgtagtcataattttcaaaaaacagaaaccctacacttgatgtcaaaaactaacctttcgttacagctgtagtcaattctaggtgaaaccactccttggataaaatagataagtagatttggatatattgatatggtcatgcttggtatagaattcgtgagagggggactcgagaagaggtttcatgcctgattcaacattgggtagtggaagcaaagttggtgtggatgtgttttgtgtatgtacattaaatgccccctcaaatttagatttgtatttacgcttcttgtgcatagtttgccaataaatttcagccaactgcatgtattgcaaaccatgagtagaagtttcttagatttttttgtcctgcttcattgcaacctgttcagttctgcttcattgcaacctgttcactgacaatgttctttttgttgtagctacggtgggtatgggactggaggtcgttggtgctgaaaaaacaccaacagaggtcaaatccctactactattaagcacgtagtgtagactcctagcgctaccacgtccctgcctccccctccgcgcatgcgcccgcccaccctgttccacgcccatcccctttgatatggtccaatcataatacagtctcttatttctttgatatatatagatttaggggtttggctctacctcccgcgcctgatccagaccgtccttttttctcttctctctttttccttgataattatttaatcgatttctatgtgttgttcacgcaaggatcattggagaggaatcacaaagagggtcatctcatcccaggttcatgtatctggtcaccctgcatccaattatttttcttgtttctttatatttttattttactttttcctgttgtttggatttaagtttgtactgatgttgtgctcctaatttactgtcatacttaaaaatgcttgattttttctatttaggtttttagggagaatatggagatagaagtctcgcatgcattgttaactaattggtctcgcatgcattattaacgaattagagatatttacttttaccagcatttgtgttgtgatagctatttttagcctaatgtttcaggtcaaagggccatacttcatagctatttccccctcaatgtttcaagttaaatggcctaagagtattggagcgctctatgttacctgctaggcgccaactattcaaaatttactctagggtagtagataatttttcttgtcgagttttattttggtatatgtaactttgtaattgggcctaagcgtattggagcactctaagttaacaggtgcttgaagttgatgatgaaattatacagcttggatgaataaacttttgttgtagtgacataaggagttccgaaactgcaaggaattttaaatttgaatacttttcaatgagatgttgaggttgataatatatgtgttttcgtttttaa

SEQ ID NO: 35457 - DNA, 2202 bp, Zea Mays
aacagtaagcttgggttcggtccttgcactccataaacctgaactgtaatgatgattaaagtttatacccaaattcaatgcattacatgatagaaatgctgcatccctcggtttcctaggttcggtccttgttgccatccttggtaaggaataaggatgcttgtgaagttatgtggacgttgcaaggtaaaaatacaaggccagggtcacatactcacatgatcttatttcaaaaatgttctttgttgtgtggttagattaatgtgataaaccgataataaaatgaatcaatagtttacaatagttagtcggctcagttctgctcatgaagtaatcttcataaattgccatataaacaaggggtactatattttccaggaatattgaaaccaaataaatttagtactataatgttcactgttaactttagcaagacaatatggatggaaaaaatcttacctactcactttgttctggccaatttaggtgcctacaattaatgaagacactggaatacctagccctactgaaccaactgaaactctgcaaacatatctgtcgggtgaagtgctactttcatagcaataaaaacaaacggcaagtgattgttgcatgcatcttctccgtggaacatgttactctgtatgcagatatgctggtgaaatagcttcataatggcttaaataattgaaactcgtgcttatgtcaatttttctatgtgtactttgtgcaaaatgtaatttgcaagcaatctctgacggtaaatggcgaaggaagaatcatcaaggtcagacatccagtttatgtgacacaatcgatcccttcatctgttgaaatgtcagcctaagtgactgaatcaggacccctaaatataaatgattccaattggttaacaatgcatgcgagacttctatctccatattctccctaacaattggttaacaatgcatgcgagctttgaaccatacttgaaatgtatttcatttagttaatgaaatcttggtttgcctattctagcaactatgtttccttgaccatgctgatctcagagcaattattttggattaagcatcaccgtcagttggcattagatgggactctggcagcacagttggtgaatttgatgggcactcaaagagggttctaagctgtgacttcaagccaacacgtccatttaccattgtgatagctacggtgggtatgggactggaggtcgttggtgctgaaaaaacaccaacagaggtcaaatccctactactattaagcacgtagtgtagactcctagcgctaccacgtccctgcctccccctccgcgcatgcgcccgcccaccctgttccacgcccatcccctttgatatggtccaatcataatacagtctcttatttctttgatatatatagatttaggggtttggctctacctcccgcgcctgatccagaccgtccttttttctcttctctctttttccttgataattatttaatcgatttctatgtgttgttcacgcaaggatcattggagaggaatcacaaagagggtcatctcatcccaggttcatgtatctggtcaccctgcatccaattatttttcttgtttctttatatttttattttactttttcctgttgtttggatttaagtttgtactgatgttgtgctcctaatttactgtcatacttaaaaatgcttgattttttctatttaggtttttagggagaatatggagatagaagtctcgcatgcattgttaactaattggtctcgcatgcattattaacgaattagagatatttacttttaccagcatttgtgttgtgatagctatttttagcctaatgtttcaggtcaaagggccatacttcatagctatttccccctcaatgtttcaagttaaatggcctaagagtattggagcgctctatgttacctgctaggcgccaactattcaaaatttactctagggtagtagataatttttcttgtcgagttttattttggtatatgtaactttgtaattgggcctaagcgtattggagcactctaagttaacaggtgcttgaagttgatgatgaaattatacagcttggatgaataaacttttgttgtagtgacataaggagttccgaaactgcaaggaattttaaatttgaatacttttcaatgagatgttgaggttgataatatatgtgttttcgtttttaa

SEQ ID NO: 35458 - DNA, 2959 bp, Zea Mays
atatgtagtacatataaaataaaacagtaagcttgggttcggtccttgcactccataaacctgaactgtaatgatgattaaagtttatacccaaattcaatgcattacatgatagaaatgctgcatccctcggtttcctaggttcggtccttgttgccatccttggtaaggaataaggatgcttgtgaagttatgtggacgttgcaaggtaaaaatacaaggccagggtcacatactcacatgatcttatttcaaaaatgttctttgttgtgtggttagattaatgtgataaaccgataataaaatgaatcaatagtttacaatagttagtcggctcagttctgctcatgaagtaatcttcataaattgccatataaacaaggggtactatattttccaggaatattgaaaccaaataaatttagtactataatgttcactgttaactttagcaagacaatatggatggaaaaaatcttacctactcactttgttctggccaatttaggtgcctacaattaatgaagacactggaatacctagccctactgaaccaactgaaactctgcaaacatatctgtcgggtgaagtgctactttcatagcaataaaaacaaacggcaagtgattgttgcatgcatcttctccgtggaacatgttactctgtatgcagatatgctggtgaaatagcttcataatggcttaaataattgaaactcgtgcttatgtcaatttttctatgtgtactttgtgcaaaatgtaatttgcaagcaatctctgacggtaaatggcgaaggaagaatcatcaagatgggactctggcagcacagttggtgaatttgatgggcactcaaagagggttctaagctgtgacttcaagccaacacgtccatttaccattgtgataggtggtgaagatattctagctaacttttatgaaggaccaccatctaaattcaagcattcgataagatcagtagtcattgctggttttctgacctagctaacattgtatagctagctctttgccataattatttgttatgatcttgcttatcttttgccaatgggccaaatatacacatctgatgtggattactttactgcatttattatgtgaatgaaaaccttcatttaccctgtatcaatgatgtagtcatgttaacacaggtgtcatctatcagaacttatcatgtcctacatttgcttatgtagtggattgaatcttatgaatgtttatgtgtgtagatatcttgttagtttataagtgcctctttgagtatccattacagtctgggtactgtcttggtttaggtaggcccaagcagctcttgacatttatctacattatcaatttgattagtcctatgcaatgtttattcagatagtttttggaacaatctctgagttcgctgtatggcactgcatgtgtaaatgacaggtgcgtctaggctcccacctcccattcacacaagtgtgtcatatatggatttcagggattattccatggtgtagtcataattttcaaaaaacagaaaccctacacttgatgtcaaaaactaacctttcgttacagctgtagtcaattctaggtgaaaccactccttggataaaatagataagtagatttggatatattgatatggtcatgcttggtatagaattcgtgagagggggactcgagaagaggtttcatgcctgattcaacattgggtagtggaagcaaagttggtgtggatgtgttttgtgtatgtacattaaatgccccctcaaatttagatttgtatttacgcttcttgtgcatagtttgccaataaatttcagccaactgcatgtattgcaaaccatgagtagaagtttcttagatttttttgtcctgcttcattgcaacctgttcagttctgcttcattgcaacctgttcactgacaatgttctttttgttgtagctacggtgggtatgggactggaggtcgttggtgctgaaaaaacaccaacagaggtcaaatccctactactattaagcacgtagtgtagactcctagcgctaccacgtccctgcctccccctccgcgcatgcgcccgcccaccctgttccacgcccatcccctttgatatggtccaatcataatacagtctcttatttctttgatatatatagatttaggggtttggctctacctcccgcgcctgatccagaccgtccttttttctcttctctctttttccttgataattatttaatcgatttctatgtgttgttcacgcaaggatcattggagaggaatcacaaagagggtcatctcatcccaggttcatgtatctggtcaccctgcatccaattatttttcttgtttctttatatttttattttactttttcctgttgtttggatttaagtttgtactgatgttgtgctcctaatttactgtcatacttaaaaatgcttgattttttctatttaggtttttagggagaatatggagatagaagtctcgcatgcattgttaactaattggtctcgcatgcattattaacgaattagagatatttacttttaccagcatttgtgttgtgatagctatttttagcctaatgtttcaggtcaaagggccatacttcatagctatttccccctcaatgtttcaagttaaatggcctaagagtattggagcgctctatgttacctgctaggcgccaactattcaaaatttactctagggtagtagataatttttcttgtcgagttttattttggtatatgtaactttgtaattgggcctaagcgtattggagcactctaagttaacaggtgcttgaagttgatgatgaaattatacagcttggatgaataaacttttgttgtagtgacataaggagttccgaaactgcaaggaattttaaatttgaatacttttcaatgagatgttgaggttgataatatatgtgttttcgtttttaa

SEQ ID NO: 35459 - DNA, 1921 bp, Zea Mays
tatatgtagtacatataaaataaaacagtaagcttgggttcggtccttgcactccataaacctgaactgtaatgatgattaaagtttatacccaaattcaatgcattacatgatagaaatgctgcatccctcggtttcctaggttcggtccttgttgccatccttggtaaggaataaggatgcttgtgaagttatgtggacgttgcaaggtaaaaatacaaggccagggtcacatactcacatgatcttatttcaaaaatgttctttgttgtgtggttagattaatgtgataaaccgataataaaatgaatcaatagtttacaatagttagtcggctcagttctgctcatgaagtaatcttcataaattgccatataaacaaggggtactatattttccaggaatattgaaaccaaataaatttagtactataatgttcactgttaactttagcaagacaatatggatggaaaaaatcttacctactcactttgttctggccaatttaggtgcctacaattaatgaagacactggaatacctagccctactgaaccaactgaaactctgcaaacatatctgtcgggtgaagtgctactttcatagcaataaaaacaaacggcaagtgattgttgcatgcatcttctccgtggaacatgttactctgtatgcagatatgctggtgaaatagcttcataatggcttaaataattgaaactcgtgcttatgtcaatttttctatgtgtactttgtgcaaaatgtaatttgcaagcaatctctgacggtaaatggcgaaggaagaatcatcaagatgggactctggcagcacagttggtgaatttgatgggcactcaaagagggttctaagctgtgacttcaagccaacacgtccatttaccattgtgatagctacggtgggtatgggactggaggtcgttggtgctgaaaaaacaccaacagaggtcaaatccctactactattaagcacgtagtgtagactcctagcgctaccacgtccctgcctccccctccgcgcatgcgcccgcccaccctgttccacgcccatcccctttgatatggtccaatcataatacagtctcttatttctttgatatatatagatttaggggtttggctctacctcccgcgcctgatccagaccgtccttttttctcttctctctttttccttgataattatttaatcgatttctatgtgttgttcacgcaaggatcattggagaggaatcacaaagagggtcatctcatcccaggttcatgtatctggtcaccctgcatccaattatttttcttgtttctttatatttttattttactttttcctgttgtttggatttaagtttgtactgatgttgtgctcctaatttactgtcatacttaaaaatgcttgattttttctatttaggtttttagggagaatatggagatagaagtctcgcatgcattgttaactaattggtctcgcatgcattattaacgaattagagatatttacttttaccagcatttgtgttgtgatagctatttttagcctaatgtttcaggtcaaagggccatacttcatagctatttccccctcaatgtttcaagttaaatggcctaagagtattggagcgctctatgttacctgctaggcgccaactattcaaaatttactctagggtagtagataatttttcttgtcgagttttattttggtatatgtaactttgtaattgggcctaagcgtattggagcactctaagttaacaggtgcttgaagttgatgatgaaattatacagcttggatgaataaacttttgttgtagtgacataaggagttccgaaactgcaaggaattttaaatttgaatacttttcaatgagatgttgaggttgataatatatgtgttttcgtttttaa

SEQ ID NO: 35460 - DNA, 2303 bp, Zea Mays
cgcccgcatcccgcatccgctccgcaacccgcagccgcccggcagcggcggcttccatcctccgccctccgtgatcctgccagacgcgactttcatcctccgcactccgcgctcctgccaaccgcggattccatcctcctgcaatcgccaacgcgccccccgtgctcctgctatccgaggaaagccttccatccatggcgcctttactgcaattccccccgtgatctgcgctccctccattgccccacgacaccgccatcccaggaaacccttccatccatggcgcctccccacgaatctctgctgtcaatttttatggagaaatcgcgcctcgccagggtgcccttccatccatggcgtcgttgctgcaagtgccccgcaatcaacgatccccttccaccgacggcactcaccttccatcgacaaaactgctcttcctccattccaccgacggcactcaccctaaaccctcacctctcagatctcgtgctcatcaccatcctgcccctcgctcgccgcctcaccttcactagagccttagctgtccctagataagacacggaggtgcagtgccagtgctttactcaagtgcgccacggattttcggtaccagccaaattgggacgaattcgacattcagcggctccaccaaagatcaagaaattacaggtgcgtttattggctgttgaaggttgtgctgctcttggtaaattgttggagctccaatattgtgtagcgcacattttccagtcattgtcaatttctcccaggctagcgagggggttcggaagaaggaagggagaggcgcttggttgatccggaccggacgacaagacaccgctaggtgttcgttgcagcgcagcgacggcttctgcagcttctcaggccaaggtgcctacaattaatgaagacactggaatacctagccctactgaaccaactgaaactctgcaaacatatctgtcgggtgaagtgctactttcatagcaataaaaacaaacggcaagtgattgttgcatgcatcttctccgtggaacatgttactctgtatgcagatatgctggtgaaatagcttcataatggcttaaataattgaaactcgtgcttatgtcaatttttctatgtgtactttgtgcaaaatgtaatttgcaagcaatctctgacggtaaatggcgaaggaagaatcatcaagatgggactctggcagcacagttggtgaatttgatgggcactcaaagagggttctaagctgtgacttcaagccaacacgtccatttaccattgtgatagctacggtgggtatgggactggaggtcgttggtgctgaaaaaacaccaacagaggtcaaatccctactactattaagcacgtagtgtagactcctagcgctaccacgtccctgcctccccctccgcgcatgcgcccgcccaccctgttccacgcccatcccctttgatatggtccaatcataatacagtctcttatttctttgatatatatagatttaggggtttggctctacctcccgcgcctgatccagaccgtccttttttctcttctctctttttccttgataattatttaatcgatttctatgtgttgttcacgcaaggatcattggagaggaatcacaaagagggtcatctcatcccaggttcatgtatctggtcaccctgcatccaattatttttcttgtttctttatatttttattttactttttcctgttgtttggatttaagtttgtactgatgttgtgctcctaatttactgtcatacttaaaaatgcttgattttttctatttaggtttttagggagaatatggagatagaagtctcgcatgcattgttaactaattggtctcgcatgcattattaacgaattagagatatttacttttaccagcatttgtgttgtgatagctatttttagcctaatgtttcaggtcaaagggccatacttcatagctatttccccctcaatgtttcaagttaaatggcctaagagtattggagcgctctatgttacctgctaggcgccaactattcaaaatttactctagggtagtagataatttttcttgtcgagttttattttggtatatgtaactttgtaattgggcctaagcgtattggagcactctaagttaacaggtgcttgaagttgatgatgaaattatacagcttggatgaataaacttttgttgtagtgacataaggagttccgaaactgcaaggaattttaaatttgaatacttttcaatgagatgttgaggttgataatatatgtgttttcgtttttaa

SEQ ID NO: 35461 - DNA, 2002 bp, Zea Mays
cgcccgcatcccgcatccgctccgcaacccgcagccgcccggcagcggcggcttccatcctccgccctccgtgatcctgccagacgcgactttcatcctccgcactccgcgctcctgccaaccgcggattccatcctcctgcaatcgccaacgcgccccccgtgctcctgctatccgaggaaagccttccatccatggcgcctttactgcaattccccccgtgatctgcgctccctccattgccccacgacaccgccatcccaggaaacccttccatccatggcgcctccccacgaatctctgctgtcaatttttatggagaaatcgcgcctcgccagggtgcccttccatccatggcgtcgttgctgcaagtgccccgcaatcaacgatccccttccaccgacggcactcaccttccatcgacaaaactgctcttcctccattccaccgacggcactcaccctaaaccctcacctctcagatctcgtgctcatcaccatcctgcccctcgctcgccgcctcaccttcactagagccttagctgtccctagataagacacggaggtgcagtgccagtgctttactcaagtgcgccacggattttcggtaccagccaaattgggacgaattcgacattcagcggctccaccaaagatcaagaaattacaggtgcgtttattggctgttgaaggttgtgctgctcttggtaaattgttggagctccaatattgtgtagcgcacattttccagtcattgtcaatttctcccaggctagcgagggggttcggaagaaggaagggagaggcgcttggttgatccggaccggacgacaagacaccgctaggtgttcgttgcagcgcagcgacggcttctgcagcttctcaggccaagatgggactctggcagcacagttggtgaatttgatgggcactcaaagagggttctaagctgtgacttcaagccaacacgtccatttaccattgtgatagctacggtgggtatgggactggaggtcgttggtgctgaaaaaacaccaacagaggtcaaatccctactactattaagcacgtagtgtagactcctagcgctaccacgtccctgcctccccctccgcgcatgcgcccgcccaccctgttccacgcccatcccctttgatatggtccaatcataatacagtctcttatttctttgatatatatagatttaggggtttggctctacctcccgcgcctgatccagaccgtccttttttctcttctctctttttccttgataattatttaatcgatttctatgtgttgttcacgcaaggatcattggagaggaatcacaaagagggtcatctcatcccaggttcatgtatctggtcaccctgcatccaattatttttcttgtttctttatatttttattttactttttcctgttgtttggatttaagtttgtactgatgttgtgctcctaatttactgtcatacttaaaaatgcttgattttttctatttaggtttttagggagaatatggagatagaagtctcgcatgcattgttaactaattggtctcgcatgcattattaacgaattagagatatttacttttaccagcatttgtgttgtgatagctatttttagcctaatgtttcaggtcaaagggccatacttcatagctatttccccctcaatgtttcaagttaaatggcctaagagtattggagcgctctatgttacctgctaggcgccaactattcaaaatttactctagggtagtagataatttttcttgtcgagttttattttggtatatgtaactttgtaattgggcctaagcgtattggagcactctaagttaacaggtgcttgaagttgatgatgaaattatacagcttggatgaataaacttttgttgtagtgacataaggagttccgaaactgcaaggaattttaaatttgaatacttttcaatgagatgttgaggttgataatatatgtgttttcgtttttaa

SEQ ID NO: 35462 - DNA, 3041 bp, Zea Mays
cgcccgcatcccgcatccgctccgcaacccgcagccgcccggcagcggcggcttccatcctccgccctccgtgatcctgccagacgcgactttcatcctccgcactccgcgctcctgccaaccgcggattccatcctcctgcaatcgccaacgcgccccccgtgctcctgctatccgaggaaagccttccatccatggcgcctttactgcaattccccccgtgatctgcgctccctccattgccccacgacaccgccatcccaggaaacccttccatccatggcgcctccccacgaatctctgctgtcaatttttatggagaaatcgcgcctcgccagggtgcccttccatccatggcgtcgttgctgcaagtgccccgcaatcaacgatccccttccaccgacggcactcaccttccatcgacaaaactgctcttcctccattccaccgacggcactcaccctaaaccctcacctctcagatctcgtgctcatcaccatcctgcccctcgctcgccgcctcaccttcactagagccttagctgtccctagataagacacggaggtgcagtgccagtgctttactcaagtgcgccacggattttcggtaccagccaaattgggacgaattcgacattcagcggctccaccaaagatcaagaaattacaggtgcgtttattggctgttgaaggttgtgctgctcttggtaaattgttggagctccaatattgtgtagcgcacattttccagtcattgtcaatttctcccaggctagcgagggggttcggaagaaggaagggagaggcgcttggttgatccggaccggacgacaagacaccgctaggtgttcgttgcagcgcagcgacggcttctgcagcttctcaggccaagatgggactctggcagcacagttggtgaatttgatgggcactcaaagagggttctaagctgtgacttcaagccaacacgtccatttaccattgtgataggtggtgaagatattctagctaacttttatgaaggaccaccatctaaattcaagcattcgataagatcagtagtcattgctggttttctgacctagctaacattgtatagctagctctttgccataattatttgttatgatcttgcttatcttttgccaatgggccaaatatacacatctgatgtggattactttactgcatttattatgtgaatgaaaaccttcatttaccctgtatcaatgatgtagtcatgttaacacaggtgtcatctatcagaacttatcatgtcctacatttgcttatgtagtggattgaatcttatgaatgtttatgtgtgtagatatcttgttagtttataagtgcctctttgagtatccattacagtctgggtactgtcttggtttaggtaggcccaagcagctcttgacatttatctacattatcaatttgattagtcctatgcaatgtttattcagatagtttttggaacaatctctgagttcgctgtatggcactgcatgtgtaaatgacaggtgcgtctaggctcccacctcccattcacacaagtgtgtcatatatggatttcagggattattccatggtgtagtcataattttcaaaaaacagaaaccctacacttgatgtcaaaaactaacctttcgttacagctgtagtcaattctaggtgaaaccactccttggataaaatagataagtagatttggatatattgatatggtcatgcttggtatagaattcgtgagagggggactcgagaagaggtttcatgcctgattcaacattgggtagtggaagcaaagttggtgtggatgtgttttgtgtatgtacattaaatgccccctcaaatttagatttgtatttacgcttcttgtgcatagtttgccaataaatttcagccaactgcatgtattgcaaaccatgagtagaagtttcttagatttttttgtcctgcttcattgcaacctgttcagttctgcttcattgcaacctgttcactgacaatgttctttttgttgtagctacggtgggtatgggactggaggtcgttggtgctgaaaaaacaccaacagaggtcaaatccctactactattaagcacgtagtgtagactcctagcgctaccacgtccctgcctccccctccgcgcatgcgcccgcccaccctgttccacgcccatcccctttgatatggtccaatcataatacagtctcttatttctttgatatatatagatttaggggtttggctctacctcccgcgcctgatccagaccgtccttttttctcttctctctttttccttgataattatttaatcgatttctatgtgttgttcacgcaaggatcattggagaggaatcacaaagagggtcatctcatcccaggttcatgtatctggtcaccctgcatccaattatttttcttgtttctttatatttttattttactttttcctgttgtttggatttaagtttgtactgatgttgtgctcctaatttactgtcatacttaaaaatgcttgattttttctatttaggtttttagggagaatatggagatagaagtctcgcatgcattgttaactaattggtctcgcatgcattattaacgaattagagatatttacttttaccagcatttgtgttgtgatagctatttttagcctaatgtttcaggtcaaagggccatacttcatagctatttccccctcaatgtttcaagttaaatggcctaagagtattggagcgctctatgttacctgctaggcgccaactattcaaaatttactctagggtagtagataatttttcttgtcgagttttattttggtatatgtaactttgtaattgggcctaagcgtattggagcactctaagttaacaggtgcttgaagttgatgatgaaattatacagcttggatgaataaacttttgttgtagtgacataaggagttccgaaactgcaaggaattttaaatttgaatacttttcaatgagatgttgaggttgataatatatgtgttttcgtttttaa

SEQ ID NO: 35463 - DNA, 2004 bp, Zea Mays
cgcccgcatcccgcatccgctccgcaacccgcagccgcccggcagcggcggcttccatcctccgccctccgtgatcctgccagacgcgactttcatcctccgcactccgcgctcctgccaaccgcggattccatcctcctgcaatcgccaacgcgccccccgtgctcctgctatccgaggaaagccttccatccatggcgcctttactgcaattccccccgtgatctgcgctccctccattgccccacgacaccgccatcccaggaaacccttccatccatggcgcctccccacgaatctctgctgtcaatttttatggagaaatcgcgcctcgccagggtgcccttccatccatggcgtcgttgctgcaagtgccccgcaatcaacgatccccttccaccgacggcactcaccttccatcgacaaaactgctcttcctccattccaccgacggcactcaccctaaaccctcacctctcagatctcgtgctcatcaccatcctgcccctcgctcgccgcctcaccttcactagagccttagctgtccctagataagacacggaggtgcagtgccagtgctttactcaagtgcgccacggattttcggtaccagccaaattgggacgaattcgacattcagcggctccaccaaagatcaagaaattacaggtgcgtttattggctgttgaaggttgtgctgctcttggtaaattgttggagctccaatattgtgtagcgcacattttccagtcattgtcaatttctcccaggctagcgagggggttcggaagaaggaagggagaggcgcttggttgatccggaccggacgacaagacaccgctaggtgttcgttgcagcgcagcgacggcttctgcagcttctcaggccaagatgggactctggcagcacagttggtgaatttgatgggcactcaaagagggttctaagctgtgacttcaagccaacacgtccatttaccattgtgataggtctacggtgggtatgggactggaggtcgttggtgctgaaaaaacaccaacagaggtcaaatccctactactattaagcacgtagtgtagactcctagcgctaccacgtccctgcctccccctccgcgcatgcgcccgcccaccctgttccacgcccatcccctttgatatggtccaatcataatacagtctcttatttctttgatatatatagatttaggggtttggctctacctcccgcgcctgatccagaccgtccttttttctcttctctctttttccttgataattatttaatcgatttctatgtgttgttcacgcaaggatcattggagaggaatcacaaagagggtcatctcatcccaggttcatgtatctggtcaccctgcatccaattatttttcttgtttctttatatttttattttactttttcctgttgtttggatttaagtttgtactgatgttgtgctcctaatttactgtcatacttaaaaatgcttgattttttctatttaggtttttagggagaatatggagatagaagtctcgcatgcattgttaactaattggtctcgcatgcattattaacgaattagagatatttacttttaccagcatttgtgttgtgatagctatttttagcctaatgtttcaggtcaaagggccatacttcatagctatttccccctcaatgtttcaagttaaatggcctaagagtattggagcgctctatgttacctgctaggcgccaactattcaaaatttactctagggtagtagataatttttcttgtcgagttttattttggtatatgtaactttgtaattgggcctaagcgtattggagcactctaagttaacaggtgcttgaagttgatgatgaaattatacagcttggatgaataaacttttgttgtagtgacataaggagttccgaaactgcaaggaattttaaatttgaatacttttcaatgagatgttgaggttgataatatatgtgttttcgtttttaa

SEQ ID NO: 35464 - DNA, 3646 bp, Zea Mays
cgcccgcatcccgcatccgctccgcaacccgcagccgcccggcagcggcggcttccatcctccgccctccgtgatcctgccagacgcgactttcatcctccgcactccgcgctcctgccaaccgcggattccatcctcctgcaatcgccaacgcgccccccgtgctcctgctatccgaggaaagccttccatccatggcgcctttactgcaattccccccgtgatctgcgctccctccattgccccacgacaccgccatcccaggaaacccttccatccatggcgcctccccacgaatctctgctgtcaatttttatggagaaatcgcgcctcgccagggtgcccttccatccatggcgtcgttgctgcaagtgccccgcaatcaacgatccccttccaccgacggcactcaccttccatcgacaaaactgctcttcctccattccaccgacggcactcaccctaaaccctcacctctcagatctcgtgctcatcaccatcctgcccctcgctcgccgcctcaccttcactagagccttagctgtccctagataagacacggaggtgcagtgccagtgctttactcaagtgcgccacggattttcggtaccagccaaattgggacgaattcgacattcagcggctccaccaaagatcaagaaattacaggtgcgtttattggctgttgaaggttgtgctgctcttggtaaattgttggagctccaatattgtgtagcgcacattttccagtcattgtcaatttctcccaggctagcgagggggttcggaagaaggaagggagaggcgcttggttgatccggaccggacgacaagacaccgctaggtgttcgttgcagcgcagcgacggcttctgcagcttctcaggccaaggtgcctacaattaatgaagacactggaatacctagccctactgaaccaactgaaactctgcaaacatatctgtcgggtgaagtgctactttcatagcaataaaaacaaacggcaagtgattgttgcatgcatcttctccgtggaacatgttactctgtatgcagatatgctggtgaaatagcttcataatggcttaaataattgaaactcgtgcttatgtcaatttttctatgtgtactttgtgcaaaatgtaatttgcaagcaatctctgacggtaaatggcgaaggaagaatcatcaaggtcagacatccagtttatgtgacacaatcgatcccttcatctgttgaaatgtcagcctaagtgactgaatcaggacccctaaatataaatgattccaattggttaacaatgcatgcgagacttctatctccatattctccctaacaattggttaacaatgcatgcgagctttgaaccatacttgaaatgtatttcatttagttaatgaaatcttggtttgcctattctagcaactatgtttccttgaccatgctgatctcagagcaattattttggattaagcatcaccgtcagttggcattagatgggactctggcagcacagttggtgaatttgatgggcactcaaagagggttctaagctgtgacttcaagccaacacgtccatttaccattgtgataggtggtgaagatattctagctaacttttatgaaggaccaccatctaaattcaagcattcgataagatcagtagtcattgctggttttctgacctagctaacattgtatagctagctctttgccataattatttgttatgatcttgcttatcttttgccaatgggccaaatatacacatctgatgtggattactttactgcatttattatgtgaatgaaaaccttcatttaccctgtatcaatgatgtagtcatgttaacacaggtgtcatctatcagaacttatcatgtcctacatttgcttatgtagtggattgaatcttatgaatgtttatgtgtgtagatatcttgttagtttataagtgcctctttgagtatccattacagtctgggtactgtcttggtttaggtaggcccaagcagctcttgacatttatctacattatcaatttgattagtcctatgcaatgtttattcagatagtttttggaacaatctctgagttcgctgtatggcactgcatgtgtaaatgacaggtgcgtctaggctcccacctcccattcacacaagtgtgtcatatatggatttcagggattattccatggtgtagtcataattttcaaaaaacagaaaccctacacttgatgtcaaaaactaacctttcgttacagctgtagtcaattctaggtgaaaccactccttggataaaatagataagtagatttggatatattgatatggtcatgcttggtatagaattcgtgagagggggactcgagaagaggtttcatgcctgattcaacattgggtagtggaagcaaagttggtgtggatgtgttttgtgtatgtacattaaatgccccctcaaatttagatttgtatttacgcttcttgtgcatagtttgccaataaatttcagccaactgcatgtattgcaaaccatgagtagaagtttcttagatttttttgtcctgcttcattgcaacctgttcagttctgcttcattgcaacctgttcactgacaatgttctttttgttgtagctacggtgggtatgggactggaggtcgttggtgctgaaaaaacaccaacagaggtcaaatccctactactattaagcacgtagtgtagactcctagcgctaccacgtccctgcctccccctccgcgcatgcgcccgcccaccctgttccacgcccatcccctttgatatggtccaatcataatacagtctcttatttctttgatatatatagatttaggggtttggctctacctcccgcgcctgatccagaccgtccttttttctcttctctctttttccttgataattatttaatcgatttctatgtgttgttcacgcaaggatcattggagaggaatcacaaagagggtcatctcatcccaggttcatgtatctggtcaccctgcatccaattatttttcttgtttctttatatttttattttactttttcctgttgtttggatttaagtttgtactgatgttgtgctcctaatttactgtcatacttaaaaatgcttgattttttctatttaggtttttagggagaatatggagatagaagtctcgcatgcattgttaactaattggtctcgcatgcattattaacgaattagagatatttacttttaccagcatttgtgttgtgatagctatttttagcctaatgtttcaggtcaaagggccatacttcatagctatttccccctcaatgtttcaagttaaatggcctaagagtattggagcgctctatgttacctgctaggcgccaactattcaaaatttactctagggtagtagataatttttcttgtcgagttttattttggtatatgtaactttgtaattgggcctaagcgtattggagcactctaagttaacaggtgcttgaagttgatgatgaaattatacagcttggatgaataaacttttgttgtagtgacataaggagttccgaaactgcaaggaattttaaatttgaatacttttcaatgagatgttgaggttgataatatatgtgttttcgtttttaa

SEQ ID NO: 35465 - DNA, 2555 bp, Zea Mays
cgcccgcatcccgcatccgctccgcaacccgcagccgcccggcagcggcggcttccatcctccgccctccgtgatcctgccagacgcgactttcatcctccgcactccgcgctcctgccaaccgcggattccatcctcctgcaatcgccaacgcgccccccgtgctcctgctatccgaggaaagccttccatccatggcgcctttactgcaattccccccgtgatctgcgctccctccattgccccacgacaccgccatcccaggaaacccttccatccatggcgcctccccacgaatctctgctgtcaatttttatggagaaatcgcgcctcgccagggtgcccttccatccatggcgtcgttgctgcaagtgccccgcaatcaacgatccccttccaccgacggcactcaccttccatcgacaaaactgctcttcctccattccaccgacggcactcaccctaaaccctcacctctcagatctcgtgctcatcaccatcctgcccctcgctcgccgcctcaccttcactagagccttagctgtccctagataagacacggaggtgcagtgccagtgctttactcaagtgcgccacggattttcggtaccagccaaattgggacgaattcgacattcagcggctccaccaaagatcaagaaattacaggtgcgtttattggctgttgaaggttgtgctgctcttggtaaattgttggagctccaatattgtgtagcgcacattttccagtcattgtcaatttctcccaggctagcgagggggttcggaagaaggaagggagaggcgcttggttgatccggaccggacgacaagacaccgctaggtgttcgttgcagcgcagcgacggcttctgcagcttctcaggccaaggtaagctttcaagcgaatttgtcgctgcaactgttatttagtatcctgcgatatgttagtgaatttgtcgcttaaacataaaatgaactgacttcttttaaatgcttcccctaatataacttttatatatgacatatgttaagtaatgcaatgccgaacttgtgtgtattgggggttttattggggtataaagtttatatgcaatcttccggtatgtatcggttgatgctaatttttagataaaattgtgcgtggggaggcattagacattctctttgtagagtcgaaggccttattttgctgctcgtctccaaagaaaaacttgttttgcttcaagccatctaacagtaccctgcaaatttgtatggcaacaaagtatttaatcccaagcgaggataatatagagattgaaacatgaccagaaccacacaaacagaagaaacataccaccctcttcttttcaggcatgtaataataatataatagtactaaatctcaaggtcattcatgtttttttaaaacagcagaattctgtgtccctgcttcccccttccctatcctcactctcccctacactccacacaacatcatccatgacatgtttgtagactggctattggtcagacaatccttgatctagcaatattgctttgatcattatcatttgatgacacacgtcttggtgcaagaacttttctctcaatagtttcacaaatgaatccatgattttgaccggagctagaactctcctcctgaatgtttggcaatctagctgtctgagaaaataaaggattaaataaatgtcaagtacccgtgctcatgagcatcctggcatttgctctcaacatcagtggaaggctcaaaactagaacttggagcagtggctactggatcttcagacataaccttctttcccatgacaatgattctgcaacaaatctaccgaatgacactgagccatggttgagtaccatttcctgatatgatgaatcctgaaaaacagacaaaaagaaaaggtgagaattcagtatatttcatcatttaaaacagttgactgacaaagaacaaagcatcgtcttctcacttttttctacaagtaatcgagcttcgtcttcttttcaggcatgtaataataatataatagtactgaatctcaaggtcattcatgtttttttaaaacagcagaattctgtgcccctgctttcccccttccctatcctcactctcccctacactacacacaacatcatccatgacatgtctgtagactggctattggtaagacaatcccttgatccagcaatattgctttgatcattatcatttgatgccacacgtcttggtgcaagaacttttctctcaatagtttaacagttgaatctccgcttttgatcagagctagaactctcctccaaaatgtttggcaagcttgctgtctgagaataggtcatgtatgtctttgaatacggtgcaaatttaaagtggtaaagagctctttcaatatgatgtcaatataaaccaaaagaaaacccttttattgcgcaagaaaactaatagacaattttacctaatgcaacacctggtacatccagaaagcattacatcattgatgagcaacatgacaataattgtgttcagtttctcaagaacatatcatattaaag

SEQ ID NO: 35466 - DNA, 517 bp, Zea Mays
cagacttcatggacaggaagccgttctggctggcgcactggacagagggcgacgcgcagaaggctcaggtggaagaggccaagcagaagctggcgctcatggaggcgcagctcgacgggaggaggttcttcgggggcgacaccgtcggctacgtcgacatcgcagcctgcgtgctagctccttggctcagcgtcgtagaggaggtgactggagtggccgtggttgacgaaggtgagttccctgctctgcgccgttggtccagagagtacagctcctgcgaagctctcaagcagtgcgtcccggacagggaccagctcgtcgccttctatactgaaaggaaggaggcgtacaaagtgttcgctaatgcatggttgcagcagtagtttggttttgtgtgtggaataataatgtatggatcacagattgtctgtgctgaaataacagtaatgagcctagctagataagtaaataaccatatgcatgtctcagaaaagtttagatgagttgaccatcgaaa

SEQ ID NO: 35467 - DNA, 829 bp, Zea Mays
attcgagctcccatcgcgccctgatgatgccaatgattgataggtacgcaatcaggacaattcctcaagctcctccccaccttcgcaagaatattcctgttccatgtttgagatcttaagaaaaaaaaatcctccacaagttcaacaaaagatcactacagcttttatctgcatcgagctaaattaacagcctacggattccaccgcgctgagattaccagatttacattggatctaacaaataccaaacaaacatgcaaaaaacattcacatattccgagaggtggaaacacacgaattagagatccacataggagtaggttcgaatcgtctactctttcattcacatagtcaagcatccgcatctctagaacagaagttagctctgaaccactgctttcatccaggctccaatcttgcaaaaagcaatatccgccgtggttcccaattattagtagagagaagaatctagcgctagtgcttctccatgatgatcttggcttctatatacactttacttaagaccgcacacgacgccatacgctcggctgctgtgaacggaggggggggggggggggggggggggggggatgggtggagcagcagggattcgaaagggctggggagggaacctctaattacctaggcgatctttgcgaagcatgctcctcccctggccatcatgaccttgaactcgtcgaaggagatgaggccgtcgccgttctggtcgacgccctcgatcatgcggcggcactgcgcgacggaggcgggctcgccgagatccgcccgtcgccgttcgcgtcgaacttgcggaacacgcgcgccatct

SEQ ID NO: 35468 - DNA, 671 bp, Zea Mays
atgaagacgttcgatccgtaaaaagaacttcttccgccgggaatgaaagcgcatttttccttcctcacggggttcgccatcaccggcttcatcatcactaagatgacggccaacttcaccgaggaggacatcaagaactccaagttcgtccaggagcacaagaagcgctgaccaaccagtaatctatgacatggacgccggatggcactggcagagggatggtgtacggtgttgtccgaattgcctgtctggacagccagttatgttatgctgtttgaatgaaaaattagcttctttttcttcatctaaatgcgtgcagcctatgctccatctgtaatgtaataagaggcaactgacttgatccaaaagctaccagcttctgattatgaatgatacttcaagtttgatctggttctctgacctgggcatcgatccacttatatgcatgcaacaaatgcttatatctttatgtaggttttttctggatgttgggttgttgttgaattagttgccaaaataaaggttttgctggaattcacatcatcgcagagtttgaacttcatgcctctcgtcgtgcaaacaaacatctatctatatatatattgccatacagggtgcgtgaatatagccaaattgctcaggatcatctatcgtaatgaactaaagtccat

SEQ ID NO: 35469 - DNA, 793 bp, Zea Mays
tgcaggtcgtcgcagcgccgctacgagggggaggggatcgaactcgaaggagaatttccattcgaccccatccacttctcacctcaatctcgcgagaagcgaagccggaggaggagggtgcgaggagatcgcgagcagccggagccggagccggagccggaggcctagtagatgaagacgttcgatccgtaaaaagaacttcttccgccgggaatgaaagcgcatttttccttcctcacggggttcgccatcaccggcttcatcatcactaagatgacggccaacttcaccgaggaggacatcaagaactccaagttcgtccaggagcacaagaagcgctgaccaaccaggtgttgtccgaattgcctgtctggacagccagttatgttatgctgtttgaatgaaaaattagcttctttttcttcatctaaatgcgtgcagcctatgctccatctgtaatgtaataagaggcaactgacttgatccaaaagctaccagcttctgattatgaatgatacttcaagtttgatctggttctctgacctgggcatcgatccacttatatgcatgcaacaaatgcttatatctttatgtaggttttttctggatgttgggttgttgttgaattagttgccaaaataaaggttttgctggaattcacatcatcgcagagtttgaacttcatgcctctcgtcgtgcaaacaaacatctatctatatatatattgccatacagggtgcgtgaatatagccaaattgctcaggatcatctatcgtaatgaactaaagtccat

SEQ ID NO: 35470 - DNA, 462 bp, Zea Mays
ctgcatattatgcgggttgtattggaaaatcaagtatattagtcgactggagtatctctggggggatataaaaaagagagaggttgaaattccagattttgttattgaacatgataaggttcttgagcaccggccactgactgattatggcatagaaccagatcccctacatcttgctgatgtacctgctgtgggatactcgcttggaagatatgaagataaatggactccagaagatcgatggtattcaaggaattacatgtgaaattttctgttgtagcttaaaagatgattgtatagtaacacggtactatgagatttgtattagattgctatgaaaaccttgtcaaggtcctgtatttccaactaaatttatacctgtttgaagatttttgagcagacgctatatgctgtctgtggttaacccgccgtataaaactgtggccgatgtgtctgcttatg

SEQ ID NO: 35471 - DNA, 1021 bp, Zea Mays
aagtttattttactcttaagttacatagacggagtgcttgcagcgggcggcaggtaagccaaccgaaaccgatggcgtcgggctccggcagcgggagcgacttctccgtggtcgtggtgggatccgacttcgcggtcgacgccggcgccgcgctcctcgcccccgccgaccacgaggtgtggcacgactgcctccccgtcctcgctgaggcggacgcctgcttctccgacctcgaggagcgccaggtcgtgcgcatccagggcacggatagggcaggccgaaccatcgtccgcgtcgtcggcaagtttttcccggtaattgatggtgaacgtctgaagaagtatgtgttctacaaactgcgcaccgaattgcctgtgggtccattctgcattttgtacatccacagcaccgtacagtctgatgataacaaccctgggatgtcgatcttgaggacaatttatgaggagcttccacctgaatacaaggaaaggcttcaagttttctacttcttgcatcctgggcttcgctccagactggccatcgccacacttggcaggctatttttaagtggagggttgtattggaaaatcaagtatattagtcgactggagtatctctggggggatataaaaaagagagaggttgaaattccagattttgttattgaacatgataaggttcttgagcaccggccactgactgattatggcatagaaccagatcccctacatcttgctgatgtacctgctgtgggatactcgcttggaagatatgaagataaatggactccagaagatcgatggtattcaaggaattacatgtgaaattttctgttgtagcttaaaagatgattgtatagtaacacggtactatgagatttgtattagattgctatgaaaaccttgtcaaggtcctgtatttccaactaaatttatacctgtttgaagatttttgagcagacgctatatgctgtctgtggttaacccgccgtataaaactgtggccgatgtgtctgcttatg

SEQ ID NO: 35472 - DNA, 1022 bp, Zea Mays
aacagcctgaaaagctggacctgcaacaatttccgaggcgggcggcaggtaagccaaccgaaaccgatggcgtcgggctccggcagcgggagcgacttctccgtggtcgtggtgggatccgacttcgcggtcgacgccggcgccgcgctcctcgcccccgccgaccacgaggtgtggcacgactgcctccccgtcctcgctgaggcggacgcctgcttctccgacctcgaggagcgccaggtcgtgcgcatccagggcacggatagggcaggccgaaccatcgtccgcgtcgtcggcaagtttttcccggctccagtaattgatggtgaacgtctgaagaagtatgtgttctacaaactgcgcaccgaattgcctgtgggtccattctgcattttgtacatccacagcaccgtacagtctgatgataacaaccctgggatgtcgatcttgaggacaatttatgaggagcttccacctgaatacaaggaaaggcttcaagttttctacttcttgcatcctgggcttcgctccagactggccatcgccacacttggcaggctatttttaagtggagggttgtattggaaaatcaagtatattagtcgactggagtatctctggggggatataaaaaagagagaggttgaaattccagattttgttattgaacatgataaggttcttgagcaccggccactgactgattatggcatagaaccagatcccctacatcttgctgatgtacctgctgtgggatactcgcttggaagatatgaagataaatggactccagaagatcgatggtattcaaggaattacatgtgaaattttctgttgtagcttaaaagatgattgtatagtaacacggtactatgagatttgtattagattgctatgaaaaccttgtcaaggtcctgtatttccaactaaatttatacctgtttgaagatttttgagcagacgctatatgctgtctgtggttaacccgccgtataaaactgtggccgatgtgtctgcttatg

SEQ ID NO: 35473 - DNA, 2547 bp, Zea Mays
gtaagcatcacagccacagagtgggtgctgatcattcaacatagttcgttcttaggtctgcaacatccattttagagttgtagtgaatttaaattaaatcttgtgaggtttcactttcttgctacaataaagcaatcatgacatggctatagatatttattggtagtctgtagccttgattaacctctctacaattctctagcagtctacttgtgtttcttcagtttattttcctaaagtgaaattgtgtgataattggcagaaatagaagttatagttcagttggttgtagaagtctggtagccttgctattatcaaactgatatcatataattgaccatgttttacacaatgtttggaagaagccatagtaatgaccagatgacagtttccctgtccttgatgttttgactatcaaacagtatcaaattcatttttttaaaaggtaatatggctggtttgattgaaaccatatggatttcatttatctatatctactcttttaaagcacgagttccatgcttcgtgtgtcacatgaactatgcgccaattgcgagctcgggtgaggatacagtaagaatctcttagcatcataagattggcctgcatcataaaatttgtattagttataaacttgtgaactttgcgaatttattatattttgaattgtggacttatgacctttgtgatctttattgtattatgaacttgtgatatggatgtgttatctttgcgatatttattgtattatgaacttgttatattgatctgtttaccgatcgtattctagatttcgaccgttaccggtgtattttccgtaccgaactttcatttctgaggtttccgaaataccgatatcgtttccgtttcctaagttaccgttttcgatttcaattccgataaaaaatatggaaacggtaatggttttagtgtttatcgatcgtttccgaccgttttcatccctagcggcagcacgggaggagggggaggggcggtggggtcatggggagagggggaggcaggagtttagtgtgtgtaagggatgagggatgaaggttgatctaaatatgttactgatgcttttgtggactgccaataccagaggcggcggcgccaagatccagcccaaggagcagcagaagcaagtaaggaaagtgatcagaaaagtggctagcaatcgggctgcagcaagcaactggacgatgatggcttccaggcagtcagagaacaatgcacaagaagaaacatcaccattgacgactcctaacgccaacatagccaggatcatcccttcgctgcccctcgagaccaggtggccaccgttccctctccgacggtacgccaatttttggctgcctgaggtagcattgaaggaaggcgtccccggcgttcattcctgcttcgagccgagacccaccgacgtgttcctcgcaagcttccccaagtctggcaccacctggctcaaggccctcgccttcgcgacgctgaagcgttccacgcatccgccgttcgacgacgaccatccgctgcgccattgcaaccctcatgactgtgtcaggttcctcgaacttgatttcaaccagcagaaggatgagctcgaggcgctcccgtccccgcgtgtgctggccacgcacctcccctactccctgctgcccggcagcatcaccggcgacggagagcgctcggggtgccggatcgtctacgtttgccgggaacccaaggacgtgctggtctcctcctggctgttcacgagaaaggcagcgccggcttgtggggttgacgcccggtcgttcacgatccaggaggccttggagctgttctgtgatggccgctgtctcggcggcccacagtggaaccacgtcctccactactggaaggagagcgtgaggaggcctgacagggtgttgttccttcgttacgaggaggtgctgattgagcccgaggcgcacgtcagaaagctggccaatttcatgggctgtggattctcagaggaggaggaggagcgcggggtggtgagcgccatcgtggagctgtgtagcttggggaagctgagagacatggaggtaaatagaaatggaagcactttgttggggatcaagaacgaaagcttcttcaggaagggagttgttggggactggagcaagcatatgacgcaggagatggcgcagaggctagacaaggtcgtagaggatgcattgcaagggactggattcacctttgcgagcacagcatgatgaggcagtgcgctcatagtagttgcgaactacagaataatgccaaggtcaactcgttttattggtgttgctggttggagatcataccagtcatggtgagcattcttctttggtgatgaagggggaaatatggacatcatcttatcatttaacgaaaattgatttgtgtacaattcatttgtataactttgttacaaaccatatgttgtggcaccttggcacgccaaaaccatatgcattactgtgtaagatttgtcataaagccatgtatcatcattgatatattatcgattaatgtttggagaagctacaa

SEQ ID NO: 35474 - DNA, 2036 bp, Zea Mays
atggcgtccgataacctcagcagatccacgtccgtacgtgcctgtcttgtctccctcgccaaccgcgaatacgactccgcgcccgctgaagccttcttcttcctatattgtgctactgtaagagctgctgcattcgccaagggaaacgcggccagtttgccagcacagcaccaacacggccctgccggcatcgtctttctgcttctgcaaaagacgaacaaatcaaaagggtgatcatctcggtgcccaccaaacctcaacaaccaagtttcatgtctaatctcgacgttcagcttccatctgctttggcaaatgctgaggctctggtgttggtcctggaacgaaggattacgtgcatgtgcgcatctaagagcgcaatgatagaaagactttgactacagtccagggtctgaataaagaatccagttataacaagatcctcaaggatctgaagaaggaattctgctgcaatggtactgtagttcaggacccagagctaggccaggtcattcagctccaaggtgatcaacacaagaacgccctcacgtccaccatagtgcagcaattgcccgtgtgtatttcctgtctcagaggcggcggcgccaagatccagcccaaggagcagcagaagcaagtaaggaaagtgatcagaaaagtggctagcaatcgggctgcagcaagcaactggacgatgatggcttccaggcagtcagagaacaatgcacaagaagaaacatcaccattgacgactcctaacgccaacatagccaggatcatcccttcgctgcccctcgagaccaggtggccaccgttccctctccgacggtacgccaatttttggctgcctgaggtagcattgaaggaaggcgtccccggcgttcattcctgcttcgagccgagacccaccgacgtgttcctcgcaagcttccccaagtctggcaccacctggctcaaggccctcgccttcgcgacgctgaagcgttccacgcatccgccgttcgacgacgaccatccgctgcgccattgcaaccctcatgactgtgtcaggttcctcgaacttgatttcaaccagcagaaggatgagctcgaggcgctcccgtccccgcgtgtgctggccacgcacctcccctactccctgctgcccggcagcatcaccggcgacggagagcgctcggggtgccggatcgtctacgtttgccgggaacccaaggacgtgctggtctcctcctggctgttcacgagaaaggcagcgccggcttgtggggttgacgcccggtcgttcacgatccaggaggccttggagctgttctgtgatggccgctgtctcggcggcccacagtggaaccacgtcctccactactggaaggagagcgtgaggaggcctgacagggtgttgttccttcgttacgaggaggtgctgattgagcccgaggcgcacgtcagaaagctggccaatttcatgggctgtggattctcagaggaggaggaggagcgcggggtggtgagcgccatcgtggagctgtgtagcttggggaagctgagagacatggaggtaaatagaaatggaagcactttgttggggatcaagaacgaaagcttcttcaggaagggagttgttggggactggagcaagcatatgacgcaggagatggcgcagaggctagacaaggtcgtagaggatgcattgcaagggactggattcacctttgcgagcacagcatgatgaggcagtgcgctcatagtagttgcgaactacagaataatgccaaggtcaactcgttttattggtgttgctggttggagatcataccagtcatggtgagcattcttctttggtgatgaagggggaaatatggacatcatcttatcatttaacgaaaattgatttgtgtacaattcatttgtataactttgttacaaaccatatgttgtggcaccttggcacgccaaaaccatatgcattactgtgtaagatttgtcataaagccatgtatcatcattgatatattatcgattaatgtttggagaagctacaa

SEQ ID NO: 35475 - DNA, 2626 bp, Zea Mays
atggcgtccgataacctcagcagatccacgtccgtacgtgcctgtcttgtctccctcgccaaccgcgaatacgactccgcgcccgctgaagccttcttcttcctatattgtgctactgtaagagctgctgcattcgccaagggaaacgcggccagtttgccagcacagcaccaacacggccctgccggcatcgtctttctgcttctgcaaaagacgaacaaatcaaaagggtgatcatctcggtgcccaccaaacctcaacaaccaagtttcatgtctaatctcgacgttcagcttccatctgctttgatctgtttgttgaggcaaatgctgaggctctggtgttggtcctggaacgaaggattacgtgcatgtgcgcatctaagagcgcaatgatagaaagactttgactacagtccagggtctgaataaagaatccagttataacaagatcctcaaggatctgaagaaggaattctgctgcaatggtactgtagttcaggacccagagctaggccaggtcattcagctccaaggtgatcaacacaagaacgccctcacgtaaaactactatatcttagacgtagtgtttttgttgttgttttatgtggtaccattgattgttcagtttggatcttctttttttattaatataattgggtatttggcaactctgctgcttggtttgcttaaaaaagatctcggtatcgatgtaaagtaacacactggtaaagaaatgggcgtcaacccaccatgtcttcattctgagcaagaattataaaagaagcatgatccactaacaatatgcaaattatcagacacacaaccattgactggtttcaaattcccatacatgactgctgcattctcataatcttcagccatactgaacaaacaagctaactataattcaacaccagaatatcttgtagtgtgtaacatgatcatgcacttgtacgaatcttgtagtgtgcaaattatattggctggtttcaaattcccatggatttatattgagtttggcctgttgtgtttaggatggctttggtctattctgcctccaacgattcagtagcagtgagcatttgctatcggttttcacttgacaactttgttggcttctttcatttgccataggtccaccatagtgcagcaattgcccgtgtgtatttcctgtctcagaggcggcggcgccaagatccagcccaaggagcagcagaagcaagtaaggaaagtgatcagaaaagtggctagcaatcgggctgcagcaagcaactggacgatgatggcttccaggcagtcagagaacaatgcacaagaagaaacatcaccattgacgactcctaacgccaacatagccaggatcatcccttcgctgcccctcgagaccaggtggccaccgttccctctccgacggtacgccaatttttggctgcctgaggtagcattgaaggaaggcgtccccggcgttcattcctgcttcgagccgagacccaccgacgtgttcctcgcaagcttccccaagtctggcaccacctggctcaaggccctcgccttcgcgacgctgaagcgttccacgcatccgccgttcgacgacgaccatccgctgcgccattgcaaccctcatgactgtgtcaggttcctcgaacttgatttcaaccagcagaaggatgagctcgaggcgctcccgtccccgcgtgtgctggccacgcacctcccctactccctgctgcccggcagcatcaccggcgacggagagcgctcggggtgccggatcgtctacgtttgccgggaacccaaggacgtgctggtctcctcctggctgttcacgagaaaggcagcgccggcttgtggggttgacgcccggtcgttcacgatccaggaggccttggagctgttctgtgatggccgctgtctcggcggcccacagtggaaccacgtcctccactactggaaggagagcgtgaggaggcctgacagggtgttgttccttcgttacgaggaggtgctgattgagcccgaggcgcacgtcagaaagctggccaatttcatgggctgtggattctcagaggaggaggaggagcgcggggtggtgagcgccatcgtggagctgtgtagcttggggaagctgagagacatggaggtaaatagaaatggaagcactttgttggggatcaagaacgaaagcttcttcaggaagggagttgttggggactggagcaagcatatgacgcaggagatggcgcagaggctagacaaggtcgtagaggatgcattgcaagggactggattcacctttgcgagcacagcatgatgaggcagtgcgctcatagtagttgcgaactacagaataatgccaaggtcaactcgttttattggtgttgctggttggagatcataccagtcatggtgagcattcttctttggtgatgaagggggaaatatggacatcatcttatcatttaacgaaaattgatttgtgtacaattcatttgtataactttgttacaaaccatatgttgtggcaccttggcacgccaaaaccatatgcattactgtgtaagatttgtcataaagccatgtatcatcattgatatattatcgattaatgtttggagaagctacaa

SEQ ID NO: 35476 - DNA, 2039 bp, Zea Mays
atggcgtccgataacctcagcagatccacgtccgtacgtgcctgtcttgtctccctcgccaaccgcgaatacgactccgcgcccgctgaagccttcttcttcctatattgtgctactgtaagagctgctgcattcgccaagggaaacgcggccagtttgccagcacagcaccaacacggccctgccggcatcgtctttctgcttctgcaaaagacgaacaaatcaaaagggtgatcatctcggtgcccaccaaacctcaacaaccaagtttcatgtctaatctcgacgttcagcttccatctgctttgatctgtttgttgaggcaaatgctgaggctctggtgttggtcctggaacgaaggattacgtgcatgtgcgcatctaagagcgcaatgatagaaagactttgactacagtccagggtctgaataaagaatccagttataacaagatcctcaaggatctgaagaaggaattctgctgcaatggtactgtagttcaggacccagagctaggccaggtcattcagctccaaggtgatcaacacaagaacgccctcactgcagcaattgcccgtgtgtatttcctgtctcagaggcggcggcgccaagatccagcccaaggagcagcagaagcaagtaaggaaagtgatcagaaaagtggctagcaatcgggctgcagcaagcaactggacgatgatggcttccaggcagtcagagaacaatgcacaagaagaaacatcaccattgacgactcctaacgccaacatagccaggatcatcccttcgctgcccctcgagaccaggtggccaccgttccctctccgacggtacgccaatttttggctgcctgaggtagcattgaaggaaggcgtccccggcgttcattcctgcttcgagccgagacccaccgacgtgttcctcgcaagcttccccaagtctggcaccacctggctcaaggccctcgccttcgcgacgctgaagcgttccacgcatccgccgttcgacgacgaccatccgctgcgccattgcaaccctcatgactgtgtcaggttcctcgaacttgatttcaaccagcagaaggatgagctcgaggcgctcccgtccccgcgtgtgctggccacgcacctcccctactccctgctgcccggcagcatcaccggcgacggagagcgctcggggtgccggatcgtctacgtttgccgggaacccaaggacgtgctggtctcctcctggctgttcacgagaaaggcagcgccggcttgtggggttgacgcccggtcgttcacgatccaggaggccttggagctgttctgtgatggccgctgtctcggcggcccacagtggaaccacgtcctccactactggaaggagagcgtgaggaggcctgacagggtgttgttccttcgttacgaggaggtgctgattgagcccgaggcgcacgtcagaaagctggccaatttcatgggctgtggattctcagaggaggaggaggagcgcggggtggtgagcgccatcgtggagctgtgtagcttggggaagctgagagacatggaggtaaatagaaatggaagcactttgttggggatcaagaacgaaagcttcttcaggaagggagttgttggggactggagcaagcatatgacgcaggagatggcgcagaggctagacaaggtcgtagaggatgcattgcaagggactggattcacctttgcgagcacagcatgatgaggcagtgcgctcatagtagttgcgaactacagaataatgccaaggtcaactcgttttattggtgttgctggttggagatcataccagtcatggtgagcattcttctttggtgatgaagggggaaatatggacatcatcttatcatttaacgaaaattgatttgtgtacaattcatttgtataactttgttacaaaccatatgttgtggcaccttggcacgccaaaaccatatgcattactgtgtaagatttgtcataaagccatgtatcatcattgatatattatcgattaatgtttggagaagctacaa

SEQ ID NO: 35477 - DNA, 1567 bp, Zea Mays
atggcgtccgataacctcagcagatccacgtccgtacgtgcctgtcttgtctccctcgccaaccgcgaatacgactccgcgcccgctgaagccttcttcttcctatattgtgctactgtaagagctgctgcattcgccaagggaaacgcggccagtttgccagcacagcaccaacacggccctgccggcatcgtctttctggctgcagcaagcaactggacgatgatggcttccaggcagtcagagaacaatgcacaagaagaaacatcaccattgacgactcctaacgccaacatagccaggatcatcccttcgctgcccctcgagaccaggtggccaccgttccctctccgacggtacgccaatttttggctgcctgaggtagcattgaaggaaggcgtccccggcgttcattcctgcttcgagccgagacccaccgacgtgttcctcgcaagcttccccaagtctggcaccacctggctcaaggccctcgccttcgcgacgctgaagcgttccacgcatccgccgttcgacgacgaccatccgctgcgccattgcaaccctcatgactgtgtcaggttcctcgaacttgatttcaaccagcagaaggatgagctcgaggcgctcccgtccccgcgtgtgctggccacgcacctcccctactccctgctgcccggcagcatcaccggcgacggagagcgctcggggtgccggatcgtctacgtttgccgggaacccaaggacgtgctggtctcctcctggctgttcacgagaaaggcagcgccggcttgtggggttgacgcccggtcgttcacgatccaggaggccttggagctgttctgtgatggccgctgtctcggcggcccacagtggaaccacgtcctccactactggaaggagagcgtgaggaggcctgacagggtgttgttccttcgttacgaggaggtgctgattgagcccgaggcgcacgtcagaaagctggccaatttcatgggctgtggattctcagaggaggaggaggagcgcggggtggtgagcgccatcgtggagctgtgtagcttggggaagctgagagacatggaggtaaatagaaatggaagcactttgttggggatcaagaacgaaagcttcttcaggaagggagttgttggggactggagcaagcatatgacgcaggagatggcgcagaggctagacaaggtcgtagaggatgcattgcaagggactggattcacctttgcgagcacagcatgatgaggcagtgcgctcatagtagttgcgaactacagaataatgccaaggtcaactcgttttattggtgttgctggttggagatcataccagtcatggtgagcattcttctttggtgatgaagggggaaatatggacatcatcttatcatttaacgaaaattgatttgtgtacaattcatttgtataactttgttacaaaccatatgttgtggcaccttggcacgccaaaaccatatgcattactgtgtaagatttgtcataaagccatgtatcatcattgatatattatcgattaatgtttggagaagctacaa

SEQ ID NO: 35478 - DNA, 1488 bp, Zea Mays
atggcgtccgataacctcagcagatccacgtccgtacgtgcctgtcttgtctccctcgccaaccgcgaatacgactccgcgcccgctgaagccttcttcttcctatattgtgctactgtaagagctgctgcattcgccaagggaaacgcggccagtttgccagcacagcaccaacacggccctgccggcatcgtctttctggatttgttttagccgaatggacaggtgctctgctgcttcatcaagtaatatttacaggaggctaaagcaatatttacaggaggttaacaattagggttttggttgtggcaactgacaagtaagcaacaaaaattgcagccgggctctattcatcttacttgaaaatggattcagattagtagctcgcatgtaagacttttatgccttatgccaaactgctcggacagattaagaaatctagctcagaataacctgtgccataacttctcgctactattttcagttgagttggttagccgccttgaagagttggtaagtggagttggccaccttccggagcatcgcccgagatgctatcgggcgagtcggaattgcgctgcttgtccgaggttggcctcgggcgagccgtgaccgcgtctcccgcccgaggatggcctcgggcgagtggtgattgcgtgtttcccccggggttggcctcaggcgagtcgtgactgcgtctcctgcccgagattggcctcgggcgattcgtgaatgcatctcctgccccgagcgttggcctcggtcgagtcgtgacttaggtctctcgtgccttggtaaggttggtcccactcgagggctcgacccccttggggcatctcattgagtccttccttattcgatcctttattggccctttggttggtctcgccgaccaaagaggagcccgtggccaccccgtctgcccggttaccgcaggagaatgtgaggtatgacctttaacatgggcacgagcaaatgacctataggccggtcacctagcttgtggctcactggaagcctgctcggtccacccctcgctctacgtgagaagttggaggtgagttttgtttttttacatggtcgatatgaggtagttactatggcggcgcggtaaaagatgtgaccgtcatgacatcgttcgacgtgggtggctttatgggacgtgaaacgacccgttcaccatatcgtgcgcaggtggcgtgatggggtcagtgcagcgaccacctacttctcttctttgagacatgcaacagtgacgacaagtcactctggctcgggccacaaacgggaggaagcgaggagttagaggagggaacacggtggagaatggaagtcgacgagaagggggagggatgccgccagggcagtaggggcaggcgcctccctcggcgtgacgacggatgccacaatggatggtgtcgctcgacgatggggatggcgtcagcgtcattagggccagggcaggcgtagacgacgcgctgcgtctgc

SEQ ID NO: 35479 - DNA, 2264 bp, Zea Mays
gcgtcctctacctcgccctcgcctcggggggttcaccgctctcacgcacgcccgtccccttgtctgacagtctcccgtttccgtccgccggttccggcccccatctagccctgcccgtctccctcctcgtcgtcctcgcgcctctcattataagcccacctgccgccgccgtgctcttccctccggtcatcccttttctctctctctctcgggtcgccccctgctgtccggtgccggtgcgcgaggctgctgctgctgctgttccggtcccaagtgggcggcgcgtgtgcaaggctccgtgatcccgagcccgaggccgcaggccgtgtctctagagaggaaggagaaacctcagcgccgccacgacttcctcctcgggccataccatttcggcggtcgtataaatccacaccaccccgagcacacaaaagctctagagctttgcctgcttcacagaccaaccaaactaaagcagcggtggtcgcgtcgccgccgcgtactcgcgtgcgtgccaggaagacgaaccaccagccagcccaggccccaggccaacacgcacgccgtcgctacctggcgaggaaggctgcctgcctgatggtccaggacgaaggctcgtcgtcgtcggtcacatcgtccccgctgcacaacttctccaccatgccgctccacgcgtcgcccggcggcgcgccggccccgacgccgccgtggctggtgcgcgagctccgctccgacgagcgcgggctgtgcctcatccacctcctcctcaaccgcgcgccgccacttcctcgacctctgcccgttcctccgcctcgcgggcgccgccgccaaccagtccgtgctggaggccatggagtcggagaggatggtgcacgtcgtcgacctcggcggcgccgacgccgcgcagtgggtcgagctgctgcacctgctggccgcgcggcccgagggcccgccgcacctccgcctcaccgccgtgcacgagcaccgggacgtgctgacgcagacggccgtggcgctgaccaaggaggcggagcggctggacgtgccgttccagttcaaccccgtggtgtcccggctggaggcgctggacgtggagtccctccgcgtgaagaccggcgaggcgctggccgtcacctccagcctgcagctgcactgcctcctggcatccgacgacgactccggcaagcaccaccagggcagcggggaccacaagaggcagcggagcccggagtccggggtgtccccgtccacgtcgcgcgcggacgcgttcctgggcgcgctgtggggcctgtcgcccaaggtggtggtggtgacggagcaggaggcgtcgcacaacgcggcgccgctgacggagcggttcgtggaggcgctcaactactacgcggcgctgttcgactgcctggagtcggcggcgccccgcgggtcggtggagcgcgcgcgcgtcgagcgctggctcctcggggaggaggtgaagaacatcgtggcctgcgacggcgcggaccggcgggagcggcacgagcgcctggaccgctgggcggcgcggatggagggcgccggcttcgcccgcgtcccgctcagctactacgcgctgctgcaggcccggcgggcggcgcaggggctgggctgcgacgggttcaaggtgcgggaggagaagggcgccttcttcctctgctggcaggagcgcgccatcttctccgtctccgcctggcgcggccgtcgcttcgactgatggaggaacgcgtcgacgccttcccgtatttgtgcggaggaggagacgggccgcccgtcgtggcgttgcgcgtcaggtggccgtcacgcacgttggggcttcttttggtcgttttgtgtgttcagtttacgccgtatctagttagatttcaatcaggtttgttcatagtgtacccctgccgctctccaatttggatggatggaatctcatgcttgtttggatcagtcagtccttttagatctgttaatgtaacaactagagctgcttaacagctactatctcactcggtcccggtcccggtcctataacaagcgtggtaatgtacttgtggagtttcaaattttctgacaattatggacatttgtaacaaacacttctggagtttaaaatttgatggatggattagatttgttttgatgctctttttttagctcatccaccatagcaaagcaaagaaagcgtggcgtccgtcgttgtcgctacacttgcattgacattttggcaaggctaagtgctcctacaaaaaacgtgaaccaac

SEQ ID NO: 35480 - DNA, 2559 bp, Zea Mays
acaaaagatcccccgccccttttttttgtcgccacccacctgcaccgcatccgcatcccccgaaaaaagtccaaggcatagcagcgtcctctacctcgccctcgcctcggggggttcaccgctctcacgcacgcccgtccccttgtctgacagtctcccgtttccgtccgccggttccggcccccatctagccctgcccgtctccctcctcgtcgtcctcgcgcctctcattataagcccacctgccgccgccgtgctcttccctccggtcatcccttttctctctctctctcgggtcgccccctgctgtccggtgccggtgcgcgaggctgctgctgctgctgttccggtcccaagtgggcggcgcgtgtgcaaggctccgtgatcccgagcccgaggccgcaggccgtgtctctagagaggaaggagaaacctcagcgccgccacgacttcctcctcgggccataccatttcggcggtcgtataaatccacaccaccccgagcacacaaaagctctagagctttgcctgcttcacagaccaaccaaactaaagcagcggtggtcgcgtcgccgccgcgtactcgcgtgcgtgccaggaagacgaaccaccagccagcccaggccccaggccaacacgcacgccgtcgctacctggcgaggaaggctgcctgcctgatggtccaggacgaaggctcgtcgtcgtcggtcacatcgtccccgctgcacaacttctccaccatgccgctccacgcgtcgcccggcggcgcgccggccccgacgccgccgtggctggtgcgcgagctccgctccgacgagcgcgggctgtgcctcatccacctcctcctcaactgcgccgcggcggcgggcgcgggccgcctggacgccgccaacgccgcgctggagcacatcgcgtcgctggcgtcccccgacggcgacgccatgcagcgcgtggccgccgccttcgcggaggcgctggcgcggcgcgccctgcgcgcgtggcccgggctgtgccgcgcgctgctgctgccccgggccgggcccacgcccgccgagctcgccgccgcgcgccgccacttcctcgacctctgcccgttcctccgcctcgcgggcgccgccgccaaccagtccgtgctggaggccatggagtcggagaggatggtgcacgtcgtcgacctcggcggcgccgacgccgcgcagtgggtcgagctgctgcacctgctggccgcgcggcccgagggcccgccgcacctccgcctcaccgccgtgcacgagcaccgggacgtgctgacgcagacggccgtggcgctgaccaaggaggcggagcggctggacgtgccgttccagttcaaccccgtggtgtcccggctggaggcgctggacgtggagtccctccgcgtgaagaccggcgaggcgctggccgtcacctccagcctgcagctgcactgcctcctggcatccgacgacgactccggcaagcaccaccagggcagcggggaccacaagaggcagcggagcccggagtccggggtgtccccgtccacgtcgcgcgcggacgcgttcctgggcgcgctgtggggcctgtcgcccaaggtggtggtggtgacggagcaggaggcgtcgcacaacgcggcgccgctgacggagcggttcgtggaggcgctcaactactacgcggcgctgttcgactgcctggagtcggcggcgccccgcgggtcggtggagcgcgcgcgcgtcgagcgctggctcctcggggaggaggtgaagaacatcgtggcctgcgacggcgcggaccggcgggagcggcacgagcgcctggaccgctgggcggcgcggatggagggcgccggcttcgcccgcgtcccgctcagctactacgcgctgctgcaggcccggcgggcggcgcaggggctgggctgcgacgggttcaaggtgcgggaggagaagggcgccttcttcctctgctggcaggagcgcgccatcttctccgtctccgcctggcgcggccgtcgcttcgactgatggaggaacgcgtcgacgccttcccgtatttgtgcggaggaggagacgggccgcccgtcgtggcgttgcgcgtcaggtggccgtcacgcacgttggggcttcttttggtcgttttgtgtgttcagtttacgccgtatctagttagatttcaatcaggtttgttcatagtgtacccctgccgctctccaatttggatggatggaatctcatgcttgtttggatcagtcagtccttttagatctgttaatgtaacaactagagctgcttaacagctactatctcactcggtcccggtcccggtcctataacaagcgtggtaatgtacttgtggagtttcaaattttctgacaattatggacatttgtaacaaacacttctggagtttaaaatttgatggatggattagatttgttttgatgctctttttttagctcatccaccatagcaaagcaaagaaagcgtggcgtccgtcgttgtcgctacacttgcattgacattttggcaaggctaagtgctcctacaaaaaacgtgaaccaac

SEQ ID NO: 35481 - DNA, 2749 bp, Zea Mays
ctccggttgggccgttgcagagtggacggttgacgccgacccgttagtgatgggggcttgggttcggggattttctcggccgagacaattgttttggtctcttcttaatgggtgtgggaacatggctcataaatcatatgaaaagtttctttgaaaagtcgagtcaggatttatctcctgccaaaggaaagaaagcaaaagggacaaaaagttatttgccaaggaagaacactgctgcttatgccatactaataacactccatagggcaaagactagcgggaaagattttatgatgaaacaagagcttattgatgctgctgaagccagtggactgtcacgagacgcgattggtccaaataaaagtaaagcaaaacagagttacgggaaggactggtacactggttggagctgcatgaagacacttctatccaatcgacttgtcaccaagtggagtaacccagcaaagtatatgctaacacaagaaggggaaggcactgcacgtgactgtctttcacggtctggattagatgattctgcacggcctctaacgataattggtgctcacaacacatctgctatggatccttctgttgccaggcacagtcctgagcttgtcagcgacagttctctgacaaaaaagaagagcaattgctaccgtcaagttcaagctactaattacgaaggaatcatttgttgcgattcagattcagaagagccatgtggaaaggacattcccctaaaaggcatggagcctattactagttgtggaccaccagatatttctcgtccattccaaggaacacccaaactgcaatcttctacaatgggttctgctaaactagctatgccacctcgtcgagccaatgaaaactttcttgaagcctatgaagttattttaatattggatgaccgtgaaaaattcgggtctcgttcaagaaaagttgctgataacatttgttccctgagccattttgctgtggatgttagttgggatcagagtttgcactcttctatatcatgtcctactttctctctgctgtagaaatgaaaatgggggcatagttatactgattagcgatatctcttatatggtgccagacctagagcctgacaatttcattggccactacattttcccgctttcatgtttatgcctctattacatagttggtttcaaaatataccattggagtcctaattctttcagtcaaggatctttgactattaacaagctacctgaaaaaatattagaaaacaattagaaatgaaaaaggcaaaaaaagtacataaaatacagtgaaaatttagtagaggtaacaagataacttgcttgatattttgtctgtttcaactttcaacttctcatgctggcagcctatagtatctccttgtgctcaaggtggctgatggcatcagtgtctaatgtcacattgtggacagtgttgcaaatcattggattagttttttgtataaacgtctagaatgcatcctcttggatatagtttttgttcttttttaacataagaaaggttgaggcgtgatgcttgattgattcgtttgcgtaatgtgccagagaaagtggttttgattcttcagtttgaaccttgtcgtccaggtcaggcaattgcctgtgggagatggtatttggattgcccgtcataaggaagatcacacagagtatgttcttgatttcattgttgaaaggaaagaggttatggatttagatggctcaattgaagacaaccgatatagagatcagaaattaaggatgaagaaatgtgggctgaggaagttgatatatcttgttgaaggtgatctcaaccgtgcaccaaagagggttaaaacagcctgtttcaccactgagattctcgatggatttgatgttcagagaactactgggtttgccgatacccagaagagatatgttgatcttacacgttcggtaatagcatactatgatgcaagtttctcgatcgttggtaaagcttcccctgtttgcccaacctacgatgacttcaagagaaagtgttatgatcttaagaagaaaacagtgagcgacatatttggctgtcagcttatgcaggtaccacaagtaacagaagaagctgcacaagctgttgtagagctctatccaacccctttgttactggcaaaggcatactctatacttggtggcgatacctctgcacaagagaagatgctaaagaagaagaacgagatggtaaatgcaggagcaagccgaaacatatttcaccttatctggggtgacggatgaaaaatactctggactggaaccagttgcgggccaactgaactttggtggcttatggtgtcaccgtcgtggtgaccatcttttgtgtctccgagatttagaggctcccatgttctaaagcaaatagtggctccatagaacactagggatctagattaggaagagtttctctctacgtcgcgtctagagagtactctgctgtggtgtcgtggttgcacagtggaatgaagtggtcccttggatttacgtggtcgggatttcgtgtatcggtctgggttgtctggattatgtgctgtctcgagctacctcggggctgttaagtctacaggatagcataaaatatcgcagtgtacctacagggaagattgtatgggtcgcccatgtgttccatggtcggcgccttgtctggtcatctttggctgaggccctcctacatacaatgggtgtcgctttggctggccaagacaagagcagac

SEQ ID NO: 35482 - DNA, 2622 bp, Zea Mays
caatggcgggctctctctttcccgctccgaaacattaaaccctagctccgcgcaccatttcccgaatccccaacccagcgatccgcctccagcgccgggccccaatcactgtgcgaccacgatgaggccgctgccgaagaaaccaaatgcagcgctgccggtgccgaagcaactcaaggtgcatcacccggaaaatgagtccctctctcgtttcttcctagagaagtggcgggcgatgatgcaggagccggatgggctctcgcagaacaactacctggccttcgccaacgccaaccgcagcctctgctcctccaaggagccaatccggaccctcaaggacttctcgaacgtcaagggtgtgggaacatggctcataaatcatatgaaaagtttctttgaaaagtcgagtcaggatttatctcctgccaaaggaaagaaagcaaaagggacaaaaagttatttgccaaggaagaacactgctgcttatgccatactaataacactccatagggcaaagactagcgggaaagattttatgatgaaacaagagcttattgatgctgctgaagccagtggactgtcacgagacgcgattggtccaaataaaagtaaagcaaaacagagttacgggaaggactggtacactggttggagctgcatgaagacacttctatccaatcgacttgtcaccaagtggagtaacccagcaaagtatatgctaacacaagaaggggaaggcactgcacgtgactgtctttcacggtctggattagatgattctgcacggcctctaacgataattggtgctcacaacacatctgctatggatccttctgttgccaggcacagtcctgagcttgtcagcgacagttctctgacaaaaaagaagagcaattgctaccgtcaagttcaagctactaattacgaaggaatcatttgttgcgattcagattcagaagagccatgtggaaaggacattcccctaaaaggtttcaattgattttttgttcatatcacataagttctcgaagaattatgtttacttttttgttcctctgctctataacttattatggctacaggttgcgtgttctaaaaaaataccgaaaggggtgttgtaccaaaactgaaaacatgcattcctgttgtatggatatacctacgtttgctatttagatcgtacaaaagtatcgaaacataagtgccattccctaccagtcttcctggttgattcctatacttcaatgcaggcatggagcctattactagttgtggaccaccagatatttctcgtccattccaaggaacacccaaactgcaatcttctacaatgggttctgctaaactagctatgccacctcgtcgagccaatgaaaactttcttgaagcctatgaagttattttaatattggatgaccgtgaaaaattcgggtctcgttcaagaaaagttgctgataacatttgttccctgagccattttgctgtggatgtcaggcaattgcctgtgggagatggtatttggattgcccgtcataaggaagatcacacagagtatgttcttgatttcattgttgaaaggaaagaggttatggatttagatggctcaattgaagacaaccgatatagagatcagaaattaaggatgaagaaatgtgggctgaggaagttgatatatcttgttgaaggtgatctcaaccgtgcaccaaagagggttaaaacagcctgtttcaccactgagattctcgatggatttgatgttcagagaactactgggtttgccgatacccagaagagatatgttgatcttacacgttcggtaatagcatactatgatgcaagtttctcgatcgttggtaaagcttcccctgtttgcccaacctacgatgacttcaagagaaagtgttatgatcttaagaagaaaacagtgagcgacatatttggctgtcagcttatgcaggtaccacaagtaacagaagaagctgcacaagctgttgtagagctctatccaacccctttgttactggcaaaggcatactctatacttggtggcgatacctctgcacaagagaagatgctaaagaagaagaacgagatggtaaatgcaggagcaagccgaaacatatttcaccttatctggggtgacggatgaaaaatactctggactggaaccagttgcgggccaactgaactttggtggcttatggtgtcaccgtcgtggtgaccatcttttgtgtctccgagatttagaggctcccatgttctaaagcaaatagtggctccatagaacactagggatctagattaggaagagtttctctctacgtcgcgtctagagagtactctgctgtggtgtcgtggttgcacagtggaatgaagtggtcccttggatttacgtggtcgggatttcgtgtatcggtctgggttgtctggattatgtgctgtctcgagctacctcggggctgttaagtctacaggatagcataaaatatcgcagtgtacctacagggaagattgtatgggtcgcccatgtgttccatggtcggcgccttgtctggtcatctttggctgaggccctcctacatacaatgggtgtcgctttggctggccaagacaagagcagac

SEQ ID NO: 35483 - DNA, 2362 bp, Zea Mays
caatggcgggctctctctttcccgctccgaaacattaaaccctagctccgcgcaccatttcccgaatccccaacccagcgatccgcctccagcgccgggccccaatcactgtgcgaccacgatgaggccgctgccgaagaaaccaaatgcagcgctgccggtgccgaagcaactcaaggtgcatcacccggaaaatgagtccctctctcgtttcttcctagagaagtggcgggcgatgatgcaggagccggatgggctctcgcagaacaactacctggccttcgccaacgccaaccgcagcctctgctcctccaaggagccaatccggaccctcaaggacttctcgaacgtcaagggtgtgggaacatggctcataaatcatatgaaaagtttctttgaaaagtcgagtcaggatttatctcctgccaaaggaaagaaagcaaaagggacaaaaagttatttgccaaggaagaacactgctgcttatgccatactaataacactccatagggcaaagactagcgggaaagattttatgatgaaacaagagcttattgatgctgctgaagccagtggactgtcacgagacgcgattggtccaaataaaagtaaagcaaaacagagttacgggaaggactggtacactggttggagctgcatgaagacacttctatccaatcgacttgtcaccaagtggagtaacccagcaaagtatatgctaacacaagaaggggaaggcactgcacgtgactgtctttcacggtctggattagatgattctgcacggcctctaacgataattggtgctcacaacacatctgctatggatccttctgttgccaggcacagtcctgagcttgtcagcgacagttctctgacaaaaaagaagagcaattgctaccgtcaagttcaagctactaattacgaaggaatcatttgttgcgattcagattcagaagagccatgtggaaaggacattcccctaaaagggcatggagcctattactagttgtggaccaccagatatttctcgtccattccaaggaacacccaaactgcaatcttctacaatgggttctgctaaactagctatgccacctcgtcgagccaatgaaaactttcttgaagcctatgaagttattttaatattggatgaccgtgaaaaattcgggtctcgttcaagaaaagttgctgataacatttgttccctgagccattttgctgtggatgtcaggcaattgcctgtgggagatggtatttggattgcccgtcataaggaagatcacacagagtatgttcttgatttcattgttgaaaggaaagaggttatggatttagatggctcaattgaagacaaccgatatagagatcagaaattaaggatgaagaaatgtgggctgaggaagttgatatatcttgttgaaggtgatctcaaccgtgcaccaaagagggttaaaacagcctgtttcaccactgagattctcgatggatttgatgttcagagaactactgggtttgccgatacccagaagagatatgttgatcttacacgttcggtaatagcatactatgatgcaagtttctcgatcgttggtaaagcttcccctgtttgcccaacctacgatgacttcaagagaaagtgttatgatcttaagaagaaaacagtgagcgacatatttggctgtcagcttatgcaggtaccacaagtaacagaagaagctgcacaagctgttgtagagctctatccaacccctttgttactggcaaaggcatactctatacttggtggcgatacctctgcacaagagaagatgctaaagaagaagaacgagatggtaaatgcaggagcaagccgaaacatatttcaccttatctggggtgacggatgaaaaatactctggactggaaccagttgcgggccaactgaactttggtggcttatggtgtcaccgtcgtggtgaccatcttttgtgtctccgagatttagaggctcccatgttctaaagcaaatagtggctccatagaacactagggatctagattaggaagagtttctctctacgtcgcgtctagagagtactctgctgtggtgtcgtggttgcacagtggaatgaagtggtcccttggatttacgtggtcgggatttcgtgtatcggtctgggttgtctggattatgtgctgtctcgagctacctcggggctgttaagtctacaggatagcataaaatatcgcagtgtacctacagggaagattgtatgggtcgcccatgtgttccatggtcggcgccttgtctggtcatctttggctgaggccctcctacatacaatgggtgtcgctttggctggccaagacaagagcagac

SEQ ID NO: 35484 - DNA, 2363 bp, Zea Mays
caatggcgggctctctctttcccgctccgaaacattaaaccctagctccgcgcaccatttcccgaatccccaacccagcgatccgcctccagcgccgggccccaatcactgtgcgaccacgatgaggccgctgccgaagaaaccaaatgcagcgctgccggtgccgaagcaactcaaggtgcatcacccggaaaatgagtccctctctcgtttcttcctagagaagtggcgggcgatgatgcaggagccggatgggctctcgcagaacaactacctggccttcgccaacgccaaccgcagcctctgctcctccaaggagccaatccggaccctcaaggacttctcgaacgtcaagggtgtgggaacatggctcataaatcatatgaaaagtttctttgaaaagtcgagtcaggatttatctcctgccaaaggaaagaaagcaaaagggacaaaaagttatttgccaaggaagaacactgctgcttatgccatactaataacactccatagggcaaagactagcgggaaagattttatgatgaaacaagagcttattgatgctgctgaagccagtggactgtcacgagacgcgattggtccaaataaaagtaaagcaaaacagagttacgggaaggactggtacactggttggagctgcatgaagacacttctatccaatcgacttgtcaccaagtggagtaacccagcaaagtatatgctaacacaagaaggggaaggcactgcacgtgactgtctttcacggtctggattagatgattctgcacggcctctaacgataattggtgctcacaacacatctgctatggatccttctgttgccaggcacagtcctgagcttgtcagcgacagttctctgacaaaaaagaagagcaattgctaccgtcaagttcaagctactaattacgaaggaatcatttgttgcgattcagattcagaagagccatgtggaaaggacattcccctaaaagaggcatggagcctattactagttgtggaccaccagatatttctcgtccattccaaggaacacccaaactgcaatcttctacaatgggttctgctaaactagctatgccacctcgtcgagccaatgaaaactttcttgaagcctatgaagttattttaatattggatgaccgtgaaaaattcgggtctcgttcaagaaaagttgctgataacatttgttccctgagccattttgctgtggatgtcaggcaattgcctgtgggagatggtatttggattgcccgtcataaggaagatcacacagagtatgttcttgatttcattgttgaaaggaaagaggttatggatttagatggctcaattgaagacaaccgatatagagatcagaaattaaggatgaagaaatgtgggctgaggaagttgatatatcttgttgaaggtgatctcaaccgtgcaccaaagagggttaaaacagcctgtttcaccactgagattctcgatggatttgatgttcagagaactactgggtttgccgatacccagaagagatatgttgatcttacacgttcggtaatagcatactatgatgcaagtttctcgatcgttggtaaagcttcccctgtttgcccaacctacgatgacttcaagagaaagtgttatgatcttaagaagaaaacagtgagcgacatatttggctgtcagcttatgcaggtaccacaagtaacagaagaagctgcacaagctgttgtagagctctatccaacccctttgttactggcaaaggcatactctatacttggtggcgatacctctgcacaagagaagatgctaaagaagaagaacgagatggtaaatgcaggagcaagccgaaacatatttcaccttatctggggtgacggatgaaaaatactctggactggaaccagttgcgggccaactgaactttggtggcttatggtgtcaccgtcgtggtgaccatcttttgtgtctccgagatttagaggctcccatgttctaaagcaaatagtggctccatagaacactagggatctagattaggaagagtttctctctacgtcgcgtctagagagtactctgctgtggtgtcgtggttgcacagtggaatgaagtggtcccttggatttacgtggtcgggatttcgtgtatcggtctgggttgtctggattatgtgctgtctcgagctacctcggggctgttaagtctacaggatagcataaaatatcgcagtgtacctacagggaagattgtatgggtcgcccatgtgttccatggtcggcgccttgtctggtcatctttggctgaggccctcctacatacaatgggtgtcgctttggctggccaagacaagagcagac

SEQ ID NO: 35485 - DNA, 2789 bp, Zea Mays
ccgcaatggcgggctctctctttcccgctccgaaacattaaaccctagctccgcgcaccatttcccgaatccccaacccagcgatccgcctccagcgccgggccccaatcactgtgcgaccacgatgaggccgctgccgaagaaaccaaatgcagcgctgccggtgccgaagcaactcaaggtgcatcacccggaaaatgagtccctctctcgtttcttcctagagaagtggcgggcgatgatgcaggagccggatgggctctcgcagaacaactacctggccttcgccaacgccaaccgcagcctctgctcctccaaggagccaatccggaccctcaaggacttctcgaacgtcaagggtgtgggaacatggctcataaatcatatgaaaagtttctttgaaaagtcgagtcaggatttatctcctgccaaaggaaagaaagcaaaagggacaaaaagttatttgccaaggaagaacactgctgcttatgccatactaataacactccatagggcaaagactagcgggaaagattttatgatgaaacaagagcttattgatgctgctgaagccagtggactgtcacgagacgcgattggtccaaataaaagtaaagcaaaacagagttacgggaaggactggtacactggttggagctgcatgaagacacttctatccaatcgacttgtcaccaagtggagtaacccagcaaaaattacgaaggaatcatttgttgcgattcagattcagaagagccatgtggaaaggacattcccctaaaaggcatggagcctattactagttgtggaccaccagatatttctcgtccattccaaggaacacccaaactgcaatcttctacaatgggttctgctaaactagctatgccacctcgtcgagccaatgaaaactttcttgaagcctatgaagttattttaatattggatgaccgtgaaaaattcgggtctcgttcaagaaaagttgctgataacatttgttccctgagccattttgctgtggatgttagttgggatcagagtttgcactcttctatatcatgtcctactttctctctgctgtagaaatgaaaatgggggcatagttatactgattagcgatatctcttatatggtgccagacctagagcctgacaatttcattggccactacattttcccgctttcatgtttatgcctctattacatagttggtttcaaaatataccattggagtcctaattctttcagtcaaggatctttgactattaacaagctacctgaaaaaatattagaaaacaattagaaatgaaaaaggcaaaaaaagtacataaaatacagtgaaaatttagtagaggtaacaagataacttgcttgatattttgtctgtttcaactttcaacttctcatgctggcagcctatagtatctccttgtgctcaaggtggctgatggcatcagtgtctaatgtcacattgtggacagtgttgcaaatcattggattagttttttgtataaacgtctagaatgcatcctcttggatatagtttttgttcttttttaacataagaaaggttgaggcgtgatgcttgattgattcgtttgcgtaatgtgccagagaaagtggttttgattcttcagtttgaaccttgtcgtccaggtcaggcaattgcctgtgggagatggtatttggattgcccgtcataaggaagatcacacagagtatgttcttgatttcattgttgaaaggaaagaggttatggatttagatggctcaattgaagacaaccgatatagagatcagaaattaaggatgaagaaatgtgggctgaggaagttgatatatcttgttgaaggtgatctcaaccgtgcaccaaagagggttaaaacagcctgtttcaccactgagattctcgatggatttgatgttcagagaactactgggtttgccgatacccagaagagatatgttgatcttacacgttcggtaatagcatactatgatgcaagtttctcgatcgttggtaaagcttcccctgtttgcccaacctacgatgacttcaagagaaagtgttatgatcttaagaagaaaacagtgagcgacatatttggctgtcagcttatgcaggtaccacaagtaacagaagaagctgcacaagctgttgtagagctctatccaacccctttgttactggcaaaggcatactctatacttggtggcgatacctctgcacaagagaagatgctaaagaagaagaacgagatggtaaatgcaggagcaagccgaaacatatttcaccttatctggggtgacggatgaaaaatactctggactggaaccagttgcgggccaactgaactttggtggcttatggtgtcaccgtcgtggtgaccatcttttgtgtctccgagatttagaggctcccatgttctaaagcaaatagtggctccatagaacactagggatctagattaggaagagtttctctctacgtcgcgtctagagagtactctgctgtggtgtcgtggttgcacagtggaatgaagtggtcccttggatttacgtggtcgggatttcgtgtatcggtctgggttgtctggattatgtgctgtctcgagctacctcggggctgttaagtctacaggatagcataaaatatcgcagtgtacctacagggaagattgtatgggtcgcccatgtgttccatggtcggcgccttgtctggtcatctttggctgaggccctcctacatacaatgggtgtcgctttggctggccaagacaagagcagac

SEQ ID NO: 35486 - DNA, 2360 bp, Zea Mays
cctcgaatcaccccgcaatggcgggctctctctttcccgctccgaaacattaaaccctagctccgcgcaccatttcccgaatccccaacccagcgatccgcctccagcgccgggccccaatcactgtgcgaccacgatgaggccgctgccgaagaaaccaaatgcagcgctgccggtgccgaagcaactcaaggtgcatcacccggaaaatgagtccctctctcgtttcttcctagagaagtggcgggcgatgatgcaggagccggatgggctctcgcagaacaactacctggccttcgccaacgccaaccgcagcctctgctcctccaaggagccaatccggaccctcaaggacttctcgaacgtcaagggtgtgggaacatggctcataaatcatatgaaaagtttctttgaaaagtcgagtcaggatttatctcctgccaaaggaaagaaagcaaaagggacaaaaagttatttgccaaggaagaacactgctgcttatgccatactaataacactccatagggcaaagactagcgggaaagattttatgatgaaacaagagcttattgatgctgctgaagccagtggactgtcacgagacgcgattggtccaaataaaagtaaagcaaaacagagttacgggaaggactggtacactggttggagctgcatgaagacacttctatccaatcgacttgtcaccaagtggagtaacccagcaaagtatatgctaacacaagaaggggaaggcactgcacgtgactgtctttcacggtctggattagatgattctgcacggcctctaacgataattggtgctcacaacacatctgctatggatccttctgttgccaggcacagtcctgagcttgtcagcgacagttctctgacaaaaaagaagagcaattgctaccgtcaagttcaagctactaattacgaaggaatcatttgttgcgattcagattcagaagagccatgtggaaaggacattcccctaaaaggcatggagcctattactagttgtggaccaccagatatttctcgtccattccaaggaacacccaaactgcaatcttctacaatgggttctgctaaactagctatgccacctcgtcgagccaatgaaaactttcttgaagcctatgaagttattttaatattggatgaccgtgaaaaattcgggtctcgttcaagaaaagttgctgataacatttgttccctgagccattttgctgtggatgtcaggcaattgcctgtgggagatggtatttggattgcccgtcataaggaagatcacacagagtatgttcttgatttcattgttgaaaggaaagaggttatggatttagatggctcaattgaagacaaccgatatagagatcagaaattaaggatgaagaaatgtgggctgaggaagttgatatatcttgttgaaggtgatctcaaccgtgcaccaaagagggttaaaacagcctgtttcaccactgagattctcgatggatttgatgttcagagaactactgggtttgccgatacccagaagagatatgttgatcttacacgttcggtaatagcatactatgatgcaagtttctcgatcgttggtaaagcttcccctgtttgcccaacctacgatgacttcaagagaaagtgttatgatcttaagaagaaaacagtgagcgacatatttggctgtcagcttatgcagaagaagctgcacaagctgttgtagagctctatccaacccctttgttactggcaaaggcatactctatacttggtggcgatacctctgcacaagagaagatgctaaagaagaagaacgagatggtaaatgcaggagcaagccgaaacatatttcaccttatctggggtgacggatgaaaaatactctggactggaaccagttgcgggccaactgaactttggtggcttatggtgtcaccgtcgtggtgaccatcttttgtgtctccgagatttagaggctcccatgttctaaagcaaatagtggctccatagaacactagggatctagattaggaagagtttctctctacgtcgcgtctagagagtactctgctgtggtgtcgtggttgcacagtggaatgaagtggtcccttggatttacgtggtcgggatttcgtgtatcggtctgggttgtctggattatgtgctgtctcgagctacctcggggctgttaagtctacaggatagcataaaatatcgcagtgtacctacagggaagattgtatgggtcgcccatgtgttccatggtcggcgccttgtctggtcatctttggctgaggccctcctacatacaatgggtgtcgctttggctggccaagacaagagcagac

SEQ ID NO: 35487 - DNA, 2969 bp, Zea Mays
cctcgaatcaccccgcaatggcgggctctctctttcccgctccgaaacattaaaccctagctccgcgcaccatttcccgaatccccaacccagcgatccgcctccagcgccgggccccaatcactgtgcgaccacgatgaggccgctgccgaagaaaccaaatgcagcgctgccggtgccgaagcaactcaaggtgcatcacccggaaaatgagtccctctctcgtttcttcctagagaagtggcgggcgatgatgcaggagccggatgggctctcgcagaacaactacctggccttcgccaacgccaaccgcagcctctgctcctccaaggagccaatccggaccctcaaggacttctcgaacgtcaagggtgtgggaacatggctcataaatcatatgaaaagtttctttgaaaagtcgagtcaggatttatctcctgccaaaggaaagaaagcaaaagggacaaaaagttatttgccaaggaagaacactgctgcttatgccatactaataacactccatagggcaaagactagcgggaaagattttatgatgaaacaagagcttattgatgctgctgaagccagtggactgtcacgagacgcgattggtccaaataaaagtaaagcaaaacagagttacgggaaggactggtacactggttggagctgcatgaagacacttctatccaatcgacttgtcaccaagtggagtaacccagcaaagtatatgctaacacaagaaggggaaggcactgcacgtgactgtctttcacggtctggattagatgattctgcacggcctctaacgataattggtgctcacaacacatctgctatggatccttctgttgccaggcacagtcctgagcttgtcagcgacagttctctgacaaaaaagaagagcaattgctaccgtcaagttcaagctactaattacgaaggaatcatttgttgcgattcagattcagaagagccatgtggaaaggacattcccctaaaaggcatggagcctattactagttgtggaccaccagatatttctcgtccattccaaggaacacccaaactgcaatcttctacaatgggttctgctaaactagctatgccacctcgtcgagccaatgaaaactttcttgaagcctatgaagttattttaatattggatgaccgtgaaaaattcgggtctcgttcaagaaaagttgctgataacatttgttccctgagccattttgctgtggatgttagttgggatcagagtttgcactcttctatatcatgtcctactttctctctgctgtagaaatgaaaatgggggcatagttatactgattagcgatatctcttatatggtgccagacctagagcctgacaatttcattggccactacattttcccgctttcatgtttatgcctctattacatagttggtttcaaaatataccattggagtcctaattctttcagtcaaggatctttgactattaacaagctacctgaaaaaatattagaaaacaattagaaatgaaaaaggcaaaaaaagtacataaaatacagtgaaaatttagtagaggtaacaagataacttgcttgatattttgtctgtttcaactttcaacttctcatgctggcagcctatagtatctccttgtgctcaaggtggctgatggcatcagtgtctaatgtcacattgtggacagtgttgcaaatcattggattagttttttgtataaacgtctagaatgcatcctcttggatatagtttttgttcttttttaacataagaaaggttgaggcgtgatgcttgattgattcgtttgcgtaatgtgccagagaaagtggttttgattcttcagtttgaaccttgtcgtccaggtcaggcaattgcctgtgggagatggtatttggattgcccgtcataaggaagatcacacagagtatgttcttgatttcattgttgaaaggaaagaggttatggatttagatggctcaattgaagacaaccgatatagagatcagaaattaaggatgaagaaatgtgggctgaggaagttgatatatcttgttgaaggtgatctcaaccgtgcaccaaagagggttaaaacagcagaactactgggtttgccgatacccagaagagatatgttgatcttacacgttcggtaatagcatactatgatgcaagtttctcgatcgttggtaaagcttcccctgtttgcccaacctacgatgacttcaagagaaagtgttatgatcttaagaagaaaacagtgagcgacatatttggctgtcagcttatgcaggtaccacaagtaacagaagaagctgcacaagctgttgtagagctctatccaacccctttgttactggcaaaggcatactctatacttggtggcgatacctctgcacaagagaagatgctaaagaagaagaacgagatggtaaatgcaggagcaagccgaaacatatttcaccttatctggggtgacggatgaaaaatactctggactggaaccagttgcgggccaactgaactttggtggcttatggtgtcaccgtcgtggtgaccatcttttgtgtctccgagatttagaggctcccatgttctaaagcaaatagtggctccatagaacactagggatctagattaggaagagtttctctctacgtcgcgtctagagagtactctgctgtggtgtcgtggttgcacagtggaatgaagtggtcccttggatttacgtggtcgggatttcgtgtatcggtctgggttgtctggattatgtgctgtctcgagctacctcggggctgttaagtctacaggatagcataaaatatcgcagtgtacctacagggaagattgtatgggtcgcccatgtgttccatggtcggcgccttgtctggtcatctttggctgaggccctcctacatacaatgggtgtcgctttggctggccaagacaagagcagac

SEQ ID NO: 35488 - DNA, 2226 bp, Zea Mays
aacacccctcgaatcaccccgcaatggcgggctctctctttcccgctccgaaacattaaaccctagctccgcgcaccatttcccgaatccccaacccagcgatccgcctccagcgccgggccccaatcactgtgcgaccacgatgaggccgctgccgaagaaaccaaatgcagcgctgccggtgccgaagcaactcaaggtgcatcacccggaaaatgagtccctctctcgtttcttcctagagaagtggcgggcgatgatgcaggagccggatgggctctcgcagaacaactacctggccttcgccaacgccaaccgcagcctctgctcctccaaggagccaatccggaccctcaaggacttctcgaacgtcaagggtgtgggaacatggctcataaatcatatgaaaagtttctttgaaaagtcgagtcaggatttatctcctgccaaaggaaagaaagcaaaagggacaaaaagttatttgccaaggaagaacactgctgcttatgccatactaataacactccatagggcaaagactagcgggaaagattttatgatgaaacaagagcttattgatgctgctgaagccagtggactgtcacgagacgcgattggtccaaataaaagtaaagcaaaacagagttacgggaaggactggtacactggttggagctgcatgaagacacttctatccaatcgacttgtcaccaagtggagtaacccagcaaagtatatgctaacacaagaaggggaaggcactgcacgtgactgtctttcacggtctggattagatgattctgcacggcctctaacgataattggtgctcacaacacatctgctatggatccttctgttgccaggcacagtcctgagcttgtcagcgacagttctctgacaaaaaagaagagcaattgctaccgtcaagttcaagctactaattacgaaggaatcatttgttgcgattcagattcagaagagccatgtggaaaggacattcccctaaaaggcatggagcctattactagttgtggaccaccagatatttctcgtccattccaaggaacacccaaactgcaatcttctacaatggtcaggcaattgcctgtgggagatggtatttggattgcccgtcataaggaagatcacacagagtatgttcttgatttcattgttgaaaggaaagaggttatggatttagatggctcaattgaagacaaccgatatagagatcagaaattaaggatgaagaaatgtgggctgaggaagttgatatatcttgttgaaggtgatctcaaccgtgcaccaaagagggttaaaacagcctgtttcaccactgagattctcgatggatttgatgttcagagaactactgggtttgccgatacccagaagagatatgttgatcttacacgttcggtaatagcatactatgatgcaagtttctcgatcgttggtaaagcttcccctgtttgcccaacctacgatgacttcaagagaaagtgttatgatcttaagaagaaaacagtgagcgacatatttggctgtcagcttatgcaggtaccacaagtaacagaagaagctgcacaagctgttgtagagctctatccaacccctttgttactggcaaaggcatactctatacttggtggcgatacctctgcacaagagaagatgctaaagaagaagaacgagatggtaaatgcaggagcaagccgaaacatatttcaccttatctggggtgacggatgaaaaatactctggactggaaccagttgcgggccaactgaactttggtggcttatggtgtcaccgtcgtggtgaccatcttttgtgtctccgagatttagaggctcccatgttctaaagcaaatagtggctccatagaacactagggatctagattaggaagagtttctctctacgtcgcgtctagagagtactctgctgtggtgtcgtggttgcacagtggaatgaagtggtcccttggatttacgtggtcgggatttcgtgtatcggtctgggttgtctggattatgtgctgtctcgagctacctcggggctgttaagtctacaggatagcataaaatatcgcagtgtacctacagggaagattgtatgggtcgcccatgtgttccatggtcggcgccttgtctggtcatctttggctgaggccctcctacatacaatgggtgtcgctttggctggccaagacaagagcagac

SEQ ID NO: 35489 - DNA, 3024 bp, Zea Mays
gcaaactccaacacccctcgaatcaccccgcaatggcgggctctctctttcccgctccgaaacattaaaccctagctccgcgcaccatttcccgaatccccaacccagcgatccgcctccagcgccgggccccaatcactgtgcgaccacgatgaggccgctgccgaagaaaccaaatgcagcgctgccggtgccgaagcaactcaaggtgcatcacccggaaaatgagtccctctctcgtttcttcctagagaagtggcgggcgatgatgcaggagccggatgggctctcgcagaacaactacctggccttcgccaacgccaaccgcagcctctgctcctccaaggagccaatccggaccctcaaggacttctcgaacgtcaagggtgtgggaacatggctcataaatcatatgaaaagtttctttgaaaagtcgagtcaggatttatctcctgccaaaggaaagaaagcaaaagggacaaaaagttatttgccaaggaagaacactgctgcttatgccatactaataacactccatagggcaaagactagcgggaaagattttatgatgaaacaagagcttattgatgctgctgaagccagtggactgtcacgagacgcgattggtccaaataaaagtaaagcaaaacagagttacgggaaggactggtacactggttggagctgcatgaagacacttctatccaatcgacttgtcaccaagtggagtaacccagcaaagtatatgctaacacaagaaggggaaggcactgcacgtgactgtctttcacggtctggattagatgattctgcacggcctctaacgataattggtgctcacaacacatctgctatggatccttctgttgccaggcacagtcctgagcttgtcagcgacagttctctgacaaaaaagaagagcaattgctaccgtcaagttcaagctactaattacgaaggaatcatttgttgcgattcagattcagaagagccatgtggaaaggacattcccctaaaaggcatggagcctattactagttgtggaccaccagatatttctcgtccattccaaggaacacccaaactgcaatcttctacaatgggttctgctaaactagctatgccacctcgtcgagccaatgaaaactttcttgaagcctatgaagttattttaatattggatgaccgtgaaaaattcgggtctcgttcaagaaaagttgctgataacatttgttccctgagccattttgctgtggatgttagttgggatcagagtttgcactcttctatatcatgtcctactttctctctgctgtagaaatgaaaatgggggcatagttatactgattagcgatatctcttatatggtgccagacctagagcctgacaatttcattggccactacattttcccgctttcatgtttatgcctctattacatagttggtttcaaaatataccattggagtcctaattctttcagtcaaggatctttgactattaacaagctacctgaaaaaatattagaaaacaattagaaatgaaaaaggcaaaaaaagtacataaaatacagtgaaaatttagtagaggtaacaagataacttgcttgatattttgtctgtttcaactttcaacttctcatgctggcagcctatagtatctccttgtgctcaaggtggctgatggcatcagtgtctaatgtcacattgtggacagtgttgcaaatcattggattagttttttgtataaacgtctagaatgcatcctcttggatatagtttttgttcttttttaacataagaaaggttgaggcgtgatgcttgattgattcgtttgcgtaatgtgccagagaaagtggttttgattcttcagtttgaaccttgtcgtccaggtcaggcaattgcctgtgggagatggtatttggattgcccgtcataaggaagatcacacagagtatgttcttgatttcattgttgaaaggaaagaggttatggatttagatggctcaattgaagacaaccgatatagagatcagaaattaaggatgaagaaatgtgggctgaggaagttgatatatcttgttgaaggtgatctcaaccgtgcaccaaagagggttaaaacagcctgtttcaccactgagattctcgatggatttgatgttcagagaactactgggtttgccgatacccagaagagatatgttgatcttacacgttcggtaatagcatactatgatgcaagtttctcgatcgttggtaaagcttcccctgtttgcccaacctacgatgacttcaagagaaagtgttatgatcttaagaagaaaacagtgagcgacatatttggctgtcagcttatgcaggtaccacaagtaacagaagaagctgcacaagctgttgtagagctctatccaacccctttgttactggcaaaggcatactctatacttggtggcgatacctctgcacaagagaagatgctaaagaagaagaacgagatggtaaatgcaggagcaagccgaaacatatttcaccttatctggggtgacggatgaaaaatactctggactggaaccagttgcgggccaactgaactttggtggcttatggtgtcaccgtcgtggtgaccatcttttgtgtctccgagatttagaggctcccatgttctaaagcaaatagtggctccatagaacactagggatctagattaggaagagtttctctctacgtcgcgtctagagagtactctgctgtggtgtcgtggttgcacagtggaatgaagtggtcccttggatttacgtggtcgggatttcgtgtatcggtctgggttgtctggattatgtgctgtctcgagctacctcggggctgttaagtctacaggatagcataaaatatcgcagtgtacctacagggaagattgtatgggtcgcccatgtgttccatggtcggcgccttgtctggtcatctttggctgaggccctcctacatacaatgggtgtcgctttggctggccaagacaagagcagac

SEQ ID NO: 35490 - DNA, 2321 bp, Zea Mays
cgcaaactccaacacccctcgaatcaccccgcaatggcgggctctctctttcccgctccgaaacattaaaccctagctccgcgcaccatttcccgaatccccaacccagcgatccgcctccagcgccgggccccaatcactgtgcgaccacgatgaggccgctgccgaagaaaccaaatgcagcgctgccggtgccgaagcaactcaaggtgcatcacccggaaaatgagtccctctctcgtttcttcctagagaagtggcgggcgatgatgcaggagccggatgggctctcgcagaacaactacctggccttcgccaacgccaaccgcagcctctgctcctccaaggagccaatccggaccctcaaggacttctcgaacgtcaagggtgtgggaacatggctcataaatcatatgaaaagtttctttgaaaagtcgagtcaggatttatctcctgccaaaggaaagaaagcaaaagggacaaaaagttatttgccaaggaagaacactgctgcttatgccatactaataacactccatagggcaaagactagcgggaaagattttatgatgaaacaagagcttattgatgctgctgaagccagtggactgtcacgagacgcgattggtccaaataaaagtaaagcaaaacagagttacgggaaggactggtacactggttggagctgcatgaagacacttctatccaatcgacttgtcaccaagtggagtaacccagcaaagtatatgctaacacaagaaggggaaggcactgcacgtgactgtctttcacggtctggattagatgattctgcacggcctctaacgataattggtgctcacaacacatctgctatggatccttctgttgccaggcacagtcctgagcttgtcagcgacagttctctgacaaaaaagaagagcaattgctaccgtcaagttcaagctactaattacgaaggaatcatttgttgcgattcagattcagaagagccatgtggaaaggacattcccctaaaaggcatggagcctattactagttgtggaccaccagatatttctcgtccattccaaggaacacccaaactgcaatcttctacaatgggttctgctaaactagctatgccacctcgtcgagccaatgaaaactttcttgaagcctatgaagttattttaatattggatgaccgtgaaaaattcgggtctcgttcaagaaaagttgctgataacatttgttccctgagccattttgctgtggatgtcaggcaattgcctgtgggagatggtatttggattgcccgtcataaggaagatcacacagagtatgttcttgatttcattgttgaaaggaaagaggttatggatttagatggctcaattgaagacaaccgatatagagatcagaaattaaggatgaagaaatgtgggctgaggaagttgatatatcttgttgaaggtgatctcaaccgtgcaccaaagagggttaaaacagcctgtttcaccactgagattctcgatggatttgatgttcagagaactactgggtttgccgatacccagaagagatatgttgatcttacacgttcggtaatagcatactatgatgcaagtttctcgatcgttggtaaagcttcccctgtttgcccaacctacgatgacttcaagagaaagtgttatgatcttaagaagaaaacagtgagcgacatatttggctgtcagcttatgcaggtaccacaagtaacagaagaagctgcacaagctgttgtagagctctatccaacccctttgttactggcaaaggcatactctatacttggtggcgatacctcttatctggggtgacggatgaaaaatactctggactggaaccagttgcgggccaactgaactttggtggcttatggtgtcaccgtcgtggtgaccatcttttgtgtctccgagatttagaggctcccatgttctaaagcaaatagtggctccatagaacactagggatctagattaggaagagtttctctctacgtcgcgtctagagagtactctgctgtggtgtcgtggttgcacagtggaatgaagtggtcccttggatttacgtggtcgggatttcgtgtatcggtctgggttgtctggattatgtgctgtctcgagctacctcggggctgttaagtctacaggatagcataaaatatcgcagtgtacctacagggaagattgtatgggtcgcccatgtgttccatggtcggcgccttgtctggtcatctttggctgaggccctcctacatacaatgggtgtcgctttggctggccaagacaagagcagac

SEQ ID NO: 35491 - DNA, 2340 bp, Zea Mays
ccattctacttggctattcaaccaaacacggcctaaaataaaacttttcaaaacccgatcgcaaactccaacacccctcgaatcaccccgcaatggcgggctctctctttcccgctccgaaacattaaaccctagctccgcgcaccatttcccgaatccccaacccagcgatccgcctccagcgccgggccccaatcactgtgcgaccacgatgaggccgctgccgaagaaaccaaatgcagcgctgccggtgccgaagcaactcaaggtgcatcacccggaaaatgagtccctctctcgtttcttcctagagaagtggcgggcgatgatgcaggagccggatgggctctcgcagaacaactacctggccttcgccaacgccaaccgcagcctctgctcctccaaggagccaatccggaccctcaaggacttctcgaacgtcaagggtgtgggaacatggctcataaatcatatgaaaagtttctttgaaaagtcgagtcaggatttatctcctgccaaaggaaagaaagcaaaagggacaaaaagttatttgccaaggaagaacactgctgcttatgccatactaataacactccatagggcaaagactagcgggaaagattttatgatgaaacaagagcttattgatgctgctgaagccagtggactgtcacgagacgcgattggtccaaataaaagtaaagcaaaacagagttacgggaaggactggtacactggttggagctgcatgaagacacttctatccaatcgacttgtcaccaagtggagtaacccagcaaagtatatgctaacacaagaaggggaaggcactgcacgtgactgtctttcacggtctggattagatgattctgcacggcctctaacgataattggtgctcacaacacatctgctatggatccttctgttgccaggcacagtcctgagcttgtcagcgacagttctctgacaaaaaagaagagcaattgctaccgtcaagttcaagctactaattacgaaggaatcatttgttgcgattcagattcagaagagccatgtggaaaggacattcccctaaaaggcatggagcctattactagttgtggaccaccagatatttctcgtccattccaaggaacacccaaactgcaatcttctacaatgggttctgctaaactagctatgccacctcgtcgagccaatgaaaactttcttgaagcctatgaagttattttaatattggatgaccgtgaaaaattcgggtctcgttcaagaaaagttgctgataacatttgttccctgagccattttgctgtggatgtcaggcaattgcctgtgggagatggtatttggattgcccgtcataaggaagatcacacagagtatgttcttgatttcattgttgaaaggaaagaggttatggatttagatggctcaattgaagacaaccgatatagagatcagaaattaaggatgaagaaatgtgggctgaggaagttgatatatcttgttgaaggtgatctcaaccgtgcaccaaagagggttaaaacagcagaactactgggtttgccgatacccagaagagatatgttgatcttacacgttcggtaatagcatactatgatgcaagtttctcgatcgttggtaaagcttcccctgtttgcccaacctacgatgacttcaagagaaagtgttatgatcttaagaagaaaacagtgagcgacatatttggctgtcagcttatgcaggtaccacaagtaacagaagaagctgcacaagctgttgtagagctctatccaacccctttgttactggcaaaggcatactctatacttggtggcgatacctcttatctggggtgacggatgaaaaatactctggactggaaccagttgcgggccaactgaactttggtggcttatggtgtcaccgtcgtggtgaccatcttttgtgtctccgagatttagaggctcccatgttctaaagcaaatagtggctccatagaacactagggatctagattaggaagagtttctctctacgtcgcgtctagagagtactctgctgtggtgtcgtggttgcacagtggaatgaagtggtcccttggatttacgtggtcgggatttcgtgtatcggtctgggttgtctggattatgtgctgtctcgagctacctcggggctgttaagtctacaggatagcataaaatatcgcagtgtacctacagggaagattgtatgggtcgcccatgtgttccatggtcggcgccttgtctggtcatctttggctgaggccctcctacatacaatgggtgtcgctttggctggccaagacaagagcagac

SEQ ID NO: 35492 - DNA, 2317 bp, Zea Mays
tttttttttttttttttgaattctgcccgctcctcagtcgtcgccaatcgcggagagagggagctcggctgagagagaagagagaagagagaagcgagcacgcggcggggtgaacgggggagaaaatttgaacaacggttattaacgagtgggcgagcaggcttggagtcgaactaaagcccactaaggattgcccttctagatggacagcccagcccaagccagcttgcgaagatcacatgcatcgtgagtcccgaccgcaaaattcaaatcagttcgagcttcgaaccatttcaacggtgacctgttcttccccacccggccacggctacggccacgggtcacccctccaccccaaaccctagcacccccgatccagcagcagcccccctctccgagctccaaaacctctcagagatggcggcgccggcgccggcgttgatgcagctcaaggtgcggatcccggagaacgaggaggtggctcgctgcctccacgagaagcggctgtctatgagggagcagccggccggtttcaaggagcacctggaccgcacgttcgccaaagcctaccgcaatgtctgcgccgccaatgagcccatccggactctcaaggagttctccaaaatcaatggtgtaggaccatggctcatacgctgtatgaaaggcttctttgcagagtccaagcaggattctccagcgaaaggaaagaaaacaagagtaccaaagtgctgtgtgacaaagaagaaaactgctgcttctgcttctcttggcaagggacctccttccaacttaaattgtcagaatgctcagttttcttcatcccaaggaacattggagctgcaaccatctggtaaaacgggttctactgacttcaatatgctagacaaggatgttgtatcaatgaacaattgtatactggctatgccacctcgtcaatcaagtgaagagtttcttgaagcttacgaggttgttctgatattggatgatcgtgagaattttgggtttgtattgttcaagaaaagttgcttcaaaaaaggttgctgataacattggctcgcagtttaacgtacctgtagaggttaaacgtttgcctgtaggtgatggcatatggatcgctcgtcataaaaaaaattttacagaatatgttctagattttattgttgaaaggaaaaatgttgcagatttaggtagttcaattagagacaatcgatacaaagatcagaaaacaaggctgcagagatgcgggttaaggaagcttatgtatcttgtcgaaggtgatccaaatacttcaaaaggatcagcagcaagcataaaaacagcctgctttaccactgagattttcgaaggatttgatgttctgcgtaccaatgggtatactgataccatgagaacatatggttatcttacactctcgataatggattactacagcacaaatttctgcagacttgataaaagtgcctgtatatgcccaacctatgatgagtttgagagacactgtcattgccttcagaaaagaacagtgagccaaatatttgctctgcagcttatgcaggtgccacaagtaacagagaaagttgcattaactgttatagagttctatccaactcttttctcactcgcaagggcgtactccatgcttgaaggtgatatccatgcccaagaggagatgttgaagaacaagagcaagatgataaatgcaggggctagtagaaatatcttcaggcttgtctggggtgatggatgtcaatcttcagggttaattttggactagccgacttaactgagtatatcaccgacttggtgatctcgaggcatattattgtgtggttcactagccccttatgctcagatattcaattgaaaggctttcgcattctgaaggcaaatgatccaattgaacactgaccgtttgggagcatgtagtcaccatgaaagtgtctgaaagtgcctccacaagatgtagagcctgtttggttcgtggctaaggacatatttggtgtggtgcctacgccgccacaccgcgccacacttttcaagccgcaggtgtggcggccgatttggccgccgcgggttaggcgcggtgtggccgcctaggcgccacaccaaacatgccctaaatgtgccacattttgcctaaggttagtcgtctgtattgaacaattaaccttaggcagaaaggttatgcaaattttaattgcaagttagtcagtgaaccaaatatgctcgtaatgttatctggatgagatgcgttgtgtttcattatgtacatcttgacttttgctcacttgcttgcattatgagatgtctcttgtta

SEQ ID NO: 35493 - DNA, 2280 bp, Zea Mays
tttttttttttttttttgaattctgcccgctcctcagtcgtcgccaatcgcggagagagggagctcggctgagagagaagagagaagagagaagcgagcacgcggcggggtgaacgggggagaaaatttgaacaacggttattaacgagtgggcgagcaggcttggagtcgaactaaagcccactaaggattgcccttctagatggacagcccagcccaagccagcttgcgaagatcacatgcatcgtgagtcccgaccgcaaaattcaaatcagttcgagcttcgaaccatttcaacggtgacctgttcttccccacccggccacggctacggccacgggtcacccctccaccccaaaccctagcacccccgatccagcagcagcccccctctccgagctccaaaacctctcagagatggcggcgccggcgccggcgttgatgcagctcaaggtgcggatcccggagaacgaggaggtggctcgctgcctccacgagaagcggctgtctatgagggagcagccggccggtttcaaggagcacctggaccgcacgttcgccaaagcctaccgcaatgtctgcgccgccaatgagcccatccggactctcaaggagttctccaaaatcaatggtgtaggaccatggctcatacgctgtatgaaaggcttctttgcagagtccaagcaggattctccagcgaaaggaaagaaaacaagagtaccaaagtgctgtgtgacaaagaagaaaactgctgcttctgcttctcttggcaagggacctccttccaacttaaattgtcagaatgctcagttttcttcatcccaaggaacattggagctgcaaccatctggtaaaacgggttctactgacttcaatatgctagacaaggatgttgtatcaatgaacaattgtatactggctatgccacctcgtcaatcaagtgaagagtttcttgaagcttacgaggttgttctgatattggatgatcgtgagaattttgggtattgttcaagaaaagttgcttcaaaaaaggttgctgataacattggctcgcagtttaacgtacctgtagaggttaaacgtttgcctgtaggtgatggcatatggatcgctcgtcataaaaaaaattttacagaatatgttctagattttattgttgaaaggaaaaatgttgcagatttaggtagttcaattagagacaatcgatacaaagatcagaaaacaaggctgcagagatgcgggttaaggaagcttatgtatcttgtcgaaggtgatccaaatacttcaaaaggatcagcagcaagcataaaaacagcctgctttaccactgagattttcgaaggatttgatgttctgcgtaccaatgggtatactgataccatgagaacatatggttatcttacactctcgataatggattactacagcacaaatttctgcagacttgataaaagtgcctgtatatgcccaacctatgatgagtttgagagacactgtcattgccttcagaaaagaacagtgccacaagtaacagagaaagttgcattaactgttatagagttctatccaactcttttctcactcgcaagggcgtactccatgcttgaaggtgatatccatgcccaagaggagatgttgaagaacaagagcaagatgataaatgcaggggctagtagaaatatcttcaggcttgtctggggtgatggatgtcaatcttcagggttaattttggactagccgacttaactgagtatatcaccgacttggtgatctcgaggcatattattgtgtggttcactagccccttatgctcagatattcaattgaaaggctttcgcattctgaaggcaaatgatccaattgaacactgaccgtttgggagcatgtagtcaccatgaaagtgtctgaaagtgcctccacaagatgtagagcctgtttggttcgtggctaaggacatatttggtgtggtgcctacgccgccacaccgcgccacacttttcaagccgcaggtgtggcggccgatttggccgccgcgggttaggcgcggtgtggccgcctaggcgccacaccaaacatgccctaaatgtgccacattttgcctaaggttagtcgtctgtattgaacaattaaccttaggcagaaaggttatgcaaattttaattgcaagttagtcagtgaaccaaatatgctcgtaatgttatctggatgagatgcgttgtgtttcattatgtacatcttgacttttgctcacttgcttgcattatgagatgtctcttgtta

SEQ ID NO: 35494 - DNA, 2240 bp, Zea Mays
cttttttttttttttttttgaattctgcccgctcctcagtcgtcgccaatcgcggagagagggagctcggctgagagagaagagagaagagagaagcgagcacgcggcggggtgaacgggggagaaaatttgaacaacggttattaacgagtgggcgagcaggcttggagtcgaactaaagcccactaaggattgcccttctagatggacagcccagcccaagccagcttgcgaagatcacatgcatcgtgagtcccgaccgcaaaattcaaatcagttcgagcttcgaaccatttcaacggtgacctgttcttccccacccggccacggctacggccacgggtcacccctccaccccaaaccctagcacccccgatccagcagcagcccccctctccgagctccaaaacctctcagagatggcggcgccggcgccggcgttgatgcagctcaaggtgcggatcccggagaacgaggaggtggctcgctgcctccacgagaagcggctgtctatgagggagcagccggccggtttcaaggagcacctggaccgcacgttcgccaaagcctaccgcaatgtctgcgccgccaatgagcccatccggactctcaaggagttctccaaaatcaatggtgtaggaccatggctcatacgctgtatgaaaggcttctttgcagagtccaagcaggattctccagcgaaaggaaagaaaacaagagtaccaaagtgctgtgtgacaaagaagaaaactgctgcttctgcttctcttggcaagggacctccttccaacttaaattgtcagaatgctcagttttcttcatcccaaggaacattggagctgcaaccatctggtaaaacgggttctactgacttcaatatgctagacaaggatgttgtatcaatgaacaattgtatactggctatgccacctcgtcaatcaagtgaagagtttcttgaagcttacgaggttgttctgatattggatgatcgtgagaattttgggtattgttcaagaaaagttgcttcaaaaaaggttgctgataacattggctcgcagtttaacgtacctgtagaggttaaacgtttgcctgtaggtgatggcatatggatcgctcgtcataaaaaaaattttacagaatatgttctagattttattgttgaaaggaaaaatgttgcagatttaggtagttcaattagagacaatcgatacaaagatcagaaaacaaggctgcagagatgcgggttaaggaagcttatgtatcttgtcgaaggtgatccaaatacttcaaaaggatcagcagcaagcataaaaacagcctgctttaccactgagattttcgaaggatttgatgttctgcgtaccaatggacttgataaaagtgcctgtatatgcccaacctatgatgagtttgagagacactgtcattgccttcagaaaagaacagtgagccaaatatttgctctgcagcttatgcaggtgccacaagtaacagagaaagttgcattaactgttatagagttctatccaactcttttctcactcgcaagggcgtactccatgcttgaaggtgatatccatgcccaagaggagatgttgaagaacaagagcaagatgataaatgcaggggctagtagaaatatcttcaggcttgtctggggtgatggatgtcaatcttcagggttaattttggactagccgacttaactgagtatatcaccgacttggtgatctcgaggcatattattgtgtggttcactagccccttatgctcagatattcaattgaaaggctttcgcattctgaaggcaaatgatccaattgaacactgaccgtttgggagcatgtagtcaccatgaaagtgtctgaaagtgcctccacaagatgtagagcctgtttggttcgtggctaaggacatatttggtgtggtgcctacgccgccacaccgcgccacacttttcaagccgcaggtgtggcggccgatttggccgccgcgggttaggcgcggtgtggccgcctaggcgccacaccaaacatgccctaaatgtgccacattttgcctaaggttagtcgtctgtattgaacaattaaccttaggcagaaaggttatgcaaattttaattgcaagttagtcagtgaaccaaatatgctcgtaatgttatctggatgagatgcgttgtgtttcattatgtacatcttgacttttgctcacttgcttgcattatgagatgtctcttgtta

SEQ ID NO: 35495 - DNA, 2200 bp, Zea Mays
tcttttttttttttttttttgaattctgcccgctcctcagtcgtcgccaatcgcggagagagggagctcggctgagagagaagagagaagagagaagcgagcacgcggcggggtgaacgggggagaaaatttgaacaacggttattaacgagtgggcgagcaggcttggagtcgaactaaagcccactaaggattgcccttctagatggacagcccagcccaagccagcttgcgaagatcacatgcatcgtgagtcccgaccgcaaaattcaaatcagttcgagcttcgaaccatttcaacggtgacctgttcttccccacccggccacggctacggccacgggtcacccctccaccccaaaccctagcacccccgatccagcagcagcccccctctccgagctccaaaacctctcagagatggcggcgccggcgccggcgttgatgcagctcaaggtgcggatcccggagaacgaggaggtggctcgctgcctccacgagaagcggctgtctatgagggagcagccggccggtttcaaggagcacctggaccgcacgttcgccaaagcctaccgcaatgtctgcgccgccaatgagcccatccggactctcaaggagttctccaaaatcaagaccatggctcatacgctgtatgaaaggcttctttgcagagtccaagcaggattctccagcgaaaggaaagaaaacaagagtaccaaagtgctgtgtgacaaagaagaaaactgctgcttctgcttctcttggcaagggacctccttccaacttaaattgtcagaatgctcagttttcttcatcccaaggaacattggagctgcaaccatctggtaaaacgggttctactgacttcaatatgctagacaaggatgttgtatcaatgaacaattgtatactggctatgccacctcgtcaatcaagtgaagagtttcttgaagcttacgaggttgttctgatattggatgatcgtgagaattttgggtattgttcaagaaaagttgcttcaaaaaaggttgctgataacattggctcgcagtttaacgtacctgtagaggttaaacgtttgcctgtaggtgatggcatatggatcgctcgtcataaaaaaaattttacagaatatgttctagattttattgttgaaaggaaaaatgttgcagatttaggtagttcaattagagacaatcgatacaaagatcagaaaacaaggctgcagagatgcgggttaaggaagcttatgtatcttgtcgaaggtgatccaaatacttcaaaaggatcagcagcaagcataaaaacagcctgctttaccactgagattttcgaaggatttgatgttctgcgtaccaatggacttgataaaagtgcctgtatatgcccaacctatgatgagtttgagagacactgtcattgccttcagaaaagaacagtgccacaagtaacagagaaagttgcattaactgttatagagttctatccaactcttttctcactcgcaagggcgtactccatgcttgaaggtgatatccatgcccaagaggagatgttgaagaacaagagcaagatgataaatgcaggggctagtagaaatatcttcaggcttgtctggggtgatggatgtcaatcttcagggttaattttggactagccgacttaactgagtatatcaccgacttggtgatctcgaggcatattattgtgtggttcactagccccttatgctcagatattcaattgaaaggctttcgcattctgaaggcaaatgatccaattgaacactgaccgtttgggagcatgtagtcaccatgaaagtgtctgaaagtgcctccacaagatgtagagcctgtttggttcgtggctaaggacatatttggtgtggtgcctacgccgccacaccgcgccacacttttcaagccgcaggtgtggcggccgatttggccgccgcgggttaggcgcggtgtggccgcctaggcgccacaccaaacatgccctaaatgtgccacattttgcctaaggttagtcgtctgtattgaacaattaaccttaggcagaaaggttatgcaaattttaattgcaagttagtcagtgaaccaaatatgctcgtaatgttatctggatgagatgcgttgtgtttcattatgtacatcttgacttttgctcacttgcttgcattatgagatgtctcttgtta

SEQ ID NO: 35496 - DNA, 341 bp, Zea Mays
atttaggaccgagaggtgacgatcgtgcaagtgatgtggtgccaaccacaagctgcagttggtggacgtacggaaggatggtggacttaatcagtggatgctcgccaagcgagtacctcccccagcaaacactatctaagtgtcaaactaaaggtacctccttgctttggttgttggtgtgacttgaccttcatccctgccaccgggatagacggtcgagtgggttactgcttccgcaggagaggaccaggaggagtagcgtggccaggcttcgccatgttactcggttttctccgttagttatctccgctgcattaaaatttatgattattatttctgaa

SEQ ID NO: 35497 - DNA, 1065 bp, Zea Mays
ccaccttgcgtgctggtggcacggatggaggccaaatatatgtgttgaatgacacgatcagaaagaagctggagttccaactgaaaatatactctatcttggaggaccaaacatcgcctcggaaatttataacaaagaatatgcaaacgctcgaatctgtggatccaacaagtggaggaagcctcttgctaagtttttgaggcagccacatttcattgtctgggacaacagtgatcttgtcacccatgaggtgatgggtggcctgaagaatgtctatgcaatcggtgctggaatggtggcagctttaacaaacgagagtgcaacaagcaaatctgtatattttgctcattgcacgtcgcaatgcatggtatgggcaaatgcttgccaagggagagttgagtcctgacatgggtgatagtatcaaggggaagggaatgattcagggtatctctgcagttggtgcattttttgagctgcttagtcaacccagcttaagtgtgcagcacccagaagaaaacaagcaggttgctccagctgagctatgcccaatcctgaagaggctttacagaatactgataaaaagggagctcccagcaagggacattcttcaagccctgagggacgaaacgatgaatgatcctcgggaaaggattgagatggcacaaagccatgcattctaccgcccgtctctccttggaaaaccatgatctagttagtcttgtagattagtagaatataaacggacgctgtgctgcaggtttctccactgtgcttgctgtccttgtgtccgagctacatggggatggggctttgtcagttgtcgaattctttgtgcttcctcgttgccatggtgtacaagagattactgaaccaataaatgttctaagtgcatattatatgaacacccaatttgaaagtacccgaggaagatttcttatgcatggatttgtttggtccaacgtcatatgctagtttgggtggcaacatctatattctcatgattgtagattattattcaaggtatacttaggttttcttacttcaaaacaagactaaagttgcatc

SEQ ID NO: 35498 - DNA, 1133 bp, Zea Mays
ttaaagcatgtttggaagagccaccagcggccattttggggctggagttccaactgaaaatatactctatcttggaggaccaaacatcgcctcggaaatttataacaaagaatatgcaaacgctcgaatctgtggatccaacaagtggaggaagcctcttgctaagtttttgaggcagccacatttcattgtctgggacaacagtgatcttgtcacccatgaggtgatgggtggcctgaagaatgtctatgcaatcggtgctggaatggtggcagctttaacaaacgagagtgcaacaagcaaatctgtatattttgctcattgcacgtcagagatgatattcattactcatttgctgacagagcaacctgagaaactcgctggtcctctgctggctgacacgtatgtaactctcttaaaaggtcgcaatgcatggtatgggcaaatgcttgccaagggagagttgagtcctgacatgggtgatagtatcaaggggaagggaatgattcagggtatctctgcagttggtgcattttttgagctgcttagtcaacccagcttaagtgtgcagcacccagaagaaaacaagcaggttgctccagctgagctatgcccaatcctgaagaggctttacagaatactgataaaaagggagctcccagcaagggacattcttcaagccctgagggacgaaacgatgaatgatcctcgggaaaggattgagatggcacaaagccatgcattctaccgcccgtctctccttggaaaaccatgatctagttagtcttgtagattagtagaatataaacggacgctgtgctgcaggtttctccactgtgcttgctgtccttgtgtccgagctacatggggatggggctttgtcagttgtcgaattctttgtgcttcctcgttgccatggtgtacaagagattactgaaccaataaatgttctaagtgcatattatatgaacacccaatttgaaagtacccgaggaagatttcttatgcatggatttgtttggtccaacgtcatatgctagtttgggtggcaacatctatattctcatgattgtagattattattcaaggtatacttaggttttcttacttcaaaacaagactaaagttgcatc

SEQ ID NO: 35499 - DNA, 3245 bp, Zea Mays
gatcaactcgatctgttgcctgtttcgtgatagcatcccccatatccctccccatcgagtactcatcccccatctctgtcgtcgtcgctggcgcatcggtgtcgatcgcagcagttcgcttcatcactcaaaaatccatcttcgtcaataaccagttcgggaagctgcgagcgaagcactgaagcagatgcttgtcttgtcttgtcccggccctctcatcctcctcccccactccactacggcactcccggccctcgctcgcttgctcattaatggcgggcactgcatggttggcgccatccatgcccattaacgcctccacccacctccgggccgcccccgcccccatctacttttattcacgccgatcgggcacttgcttccaatacagcgccggccgggccgttgcgtccgtccatcctcatccccatccgccacccaccccgcgcccctccttctcactccagtgctggctgccggccagctccgcccccggggtccttgagctggaggtggcggtggatgaccagctctcggagttttctgaggcgaggatcggagggcgttgcgttaggtccgcggttggtgagcggcggtcggagcggtctcgcgcgcggcggggtcgttcgatgacgcaggaatcgcgctctgggagggtgggaatacctcgcgctcgcgctcaaggtgctcgattaatttactgcctgaggctgagggggggcgcgcctgtgagctgaaccgttcccgctgcactgactcctgagctcgggaaatggttgggagcgtgcacgtcaatggatcggtccacggcggcaatggcacggccacggaggagcggctggacgagctgcgccggctgctcggcaagtcggagggggaccttctcaagatcgtcagcgtcggcgccggcgcgtggggcagcgtcttcgccgcgctactacaggacgcgtacggccatttccgggacaaggtgcagataaggatctggcgtcgcccgggccggacggtggaccgctccaccgcggagcacctgttcgaggtgatcaactccagggaggacgtgctcaggcgcctcatccgccgctgcgcctacctcaagtacgtcgaggcgcggctcggagaccgcacgctgtatgccgacgagatactcaaggacggcttctgcctgaacatgatcgagacgccgctctgccctctcaaggtcgtcactaacctgcaggaggccgtctgggatgccgacatcgtcgtgaatggggtgccgtccaccgagacgagggaggtgtttgatgagatcagcgagtattggaaggagaggattagtgtcccggtgataatttccctcgccaagggaattgaggcctcgttggatccaatacctcgtatcattacacctactcaaatgattagctctgcaactggagttccaactgaaaatatactctatcttggaggaccaaacatcgcctcggaaatttataacaaagaatatgcaaacgctcgaatctgtggatccaacaagtggaggaagcctcttgctaagtttttgaggcagccacatttcattgtctgggacaacagtgatcttgtcacccatgaggtgatgggtggcctgaagaatgtctatgcaatcggtgctggtaatactaacttctgtctttttttaactgacaatattattgtacaataggcatcctactacttgatgttgaagaaaacataacaaacatgtaaatgtttttctttgcttaagttttagttgatcccttaatggtcgtccattgggctgtcactgactctctttgcctgaatagagtatgggtggatcggagtacactaaaatcagaagggctttttagaattttaagaaaagaaacaatcaatttggaaatccgatgtcgggtcaaatacttgctgcttactttttgaatagtttccattctaacgttgttttggtcataaaatggcaaggggcacaaataggatagtttcttctactttgttttactacattttctgtgagtaccagttttataaaaaaaacttgacctgcggggggtaagacagcccccgggtattgtattaagaataagaccttctcacacaggtcaagaaaacccccgaacccctgccccacacatacacagcggcatcgaagctcatgtgagaacgaccacgaccagggctgagccttagacctatgctttggcgtggaacagacgagaggatttttttaaccacagcctggaaattcgctcccacggggagtcgaactcaggacctgaggagtgctactcagaccacctaaccaactcagctagaggccctttcgcgagtaccagttttatcatatttctctaattctctttatgtttcaggaatggtggcagctttaacaaacgagagtgcaacaagcaaatctgtatattttgctcattgcacgtcagagatgatattcattactcatttgctgacagagcaacctgagaaactcgctggtcctctgctggctgacacgtatgtaactctcttaaaaggtcgcaatgcatggtatgggcaaatgcttgccaagggagagttgagtcctgacatgggtgatagtatcaaggggaagggaatgattcagggtatctctgcagttggtgcattttttgagctgcttagtcaacccagcttaagtgtgcagcacccagaagaaaacaagcaggttgctccagctgagctatgcccaatcctgaagaggctttacagaatactgataaaaagggagctcccagcaagggacattcttcaagccctgagggacgaaacgatgaatgatcctcgggaaaggattgagatggcacaaagccatgcattctaccgcccgtctctccttggaaaaccatgatctagttagtcttgtagattagtagaatataaacggacgctgtgctgcaggtttctccactgtgcttgctgtccttgtgtccgagctacatggggatggggctttgtcagttgtcgaattctttgtgcttcctcgttgccatggtgtacaagagattactgaaccaataaatgttctaagtgcatattatatgaacacccaatttgaaagtacccgaggaagatttcttatgcatggatttgtttggtccaacgtcatatgctagtttgggtggcaacatctatattctcatgattgtagattattattcaaggtatacttaggttttcttacttcaaaacaagactaaagttgcatc

SEQ ID NO: 35500 - DNA, 7455 bp, Zea Mays
aagcgttggagcccacacgacgccggcgtgctgagcctttcatccaccggaaggcttggccgcaggcgacggcgtctgagatcaccaaggtggagcgtgttggtaaccaggggcaaccaacggagaagcttattgttgactcaacccgtcacacttcgccaatggacagagtagcgactctgaagagctatcgccgtgcccgtgggttatgtgaccgatgcgcagaaaagtggactccaggtcacaaatgtgcaaccacagttcagctccatgctattgaagaggtatgggatcttcttactttggatgaccaggagaatacagaacctgtgagcagtctgaacaagtggttatggcgttatcactatcttcagcagcctgggagggcagtaacagattggtgacgatgagattatctggaacgattcagcaacaggacctggttattcttattgattcgggatcgtcacactcgttcctctttgatcgtcttcgaccactgctagctggtgtccaggaacttgctcagccgttctcagttcagctttggatttagtggtgggcatggactggttgcaacggtttagtcctatgcatgtcgattgggcaaacaagtggttggtaattccatacaatggatcgtcagtgtgcttacaaggacttcagtcatcttttccttctggttctgtggtgcagttgctgctatcagctgagatacagctcaattcagttcaagaagagtctcagttggaggtacatcccaaggttcaagcggttcttcaacaattttcagatgtgtttgctgatcctgtgggtttacctcccagccgacagtgtgaccatgctattccattggtccctggtgctcaccctttcaatgtcaagccctatcgttatccaccggctctcaaggatgaaatagagacacaagtacgtgacatgctgtcgcagggagtcatccaaaagagccacagtctgtttgcatcgccagtattgctggtcaagaagaaagatcaaacgtggcgcttctgtattgattaccgctatctcaacgctataacagtgaagagctcgtatcctgttccaatctttgatcagctgatggatgaactgtcctctgcacaatggtttagcaagcttgatctgaaagcgggttaccatcaaatctgtctagtaccaggagaagaaccaaagacggccttccaaacacatttgggtcatttcgagtttcgagtaatggcttttggcttgactggagctcccaacacttttctgggtgccatgaatgatacactggcaccagtattgcgtcgttgtgccctcgtgttcttcgatgacatacttatttacagtcctacatttgagtcccacttgcaacatttatccgaggtcctcactttgttgaagcaagatcactggaagatcaagttgtccaaatgtgcttttgcccagaccactattgcttatctcggtcatataatcagtgctcacggtgtggcgactgacccagctaagttgcaaattattcagcagtggtcagccccaacaaatactaaggagctacgcagttttctcggtttggctggtttttaccgtaaattcgtacgacatttcagcatcatcgccaaacctctgacggacttactcaagaaaaattccctgttcgtttggacatcagatcatcagtcagcatttgagaccctcatgcaggctttaatatctgctccagtgctggctcttccagacttcaaccaaccattctgcatttatacagatgcctgcagtacaggcgtaggtgcggtcctgatgcaaaaggggcacccgttggcgttcttgagcaaggctctgggtcccaaaaaccaaggcttgtcgacatacgagaaggaatatcttgcaattgtgattgctatagcacagtggcgctcataccttcagttggcagaattccatatttatacggatcaccaaagcttggctcagttaaacgaacaacgtctccacactgtttggcaacaaaaggtatacaccaagctggccggccttcaatacaagattgtttacaaaaaagggtgtgacaacgctgccgcagacgcactgtccaggtactcacatcagccggaccaattgctgcatatttctcactgtacgccaacttgggttcaggaaatcgtggagggttatcaacatgaccagcaggcacagagtttgttatcgcagttggcccttgatccgtcggcactagctgcaacatacactcttaaagatggcttgattcgacataagggacgtctatggttaggcaagaatgaggtgttacaacaaaaggtcatcgccgccttccacgactcagctttggggggtcactcgggtgtgcctgtcacttatcgacgagtgaagcaattattttcatggaagggcatgaagaagacagttcaccagtttgtgcagtcatgtcccatatgccagcaagcgaagccggatcgtgctaaatacccaggtctgcttgctcctctacccattccaccgcacgcctggcattcaatttctatggatttcatagaaggcctaccgaaatcgggatcctggaactgcattctagtggtggtcgaccgtttctcaaaatatagtcattttctggcccttgctcatccattcacagccgcgggggtggccaaggttttcttggacaatatttataagcttcacggtatgccagcaagtattgtgtcggatcgagatcgaatcttcacaagtcaattctggcagcagctgtttacattgactagaacacagctttgcatgagctcggcttaccatccccagtctgatggtcaaactgagcgagtaaaccaatgtattgaaacttatctcaggtgttttgtccatgcttgtcccaagaaatgctgtcactggctgtcagtcgcggaattttggtataacaccaactaccattcggcaattgggcgttcaccctttgaggttctatatggtcatgcagctcgccattttggtattgattcagtctcgtccgtcgcagtggaggacctcagacagtggttgacggacagagaaatcatatccaagttgattcaccagcatttgactcgagctcagtcccgcatgaaaaaacaggctgacaagaaacgttcggagcgatcattccagttcgctcgaatcaaaagctcgcatttcgattcttcggcccttacacagtgctgcaacgggtgggcaccgtggcgtacaagcttcagttaccggagacctcttctatacatccaatatttcatgtttcccaactaaaagcttcaatcggccgtcagcattcagtggttcctcagttacctgatgctaatcctagttttcaagtgcctgtccaggttctggctcaccgcattattcagcgaggaggagctctgattccacaaatcaaagtggtgtggtcaggttgggatcccgccttagcgatatgggaggacgctgaggccctgaaagctgcgtttccgaacgcgccggcttggggacaagccgcttccaaaggagaggggactgtcagcacctctgtggaggaggaggctgtggaagagacggaagtggaacaggcagcactcggcggcaaacgcactcgacgcaccaacgtttgtgtgatgagcccagaatgggctgtgtaatcctagtctcttgtaattcagggccagcccatgtgacggtataatacctagtctgtggtttctgaagaggcatgcaaaacttaaacaaactcatacgcaataacatccgtcgccttctgcctcctgttcactgttcttctctaatctctgattcttcttccacttctgatctctgagcataacagtaggccgttcgagttgcgaccatacaggctcgcggaaaatcgtggacagcgatacttgcggatgttgctcgcctgtcccagtcctgcatgtgcacgtatgtgccagtgtcaacgaagacagcgatcaactcgatctgttgcctgtttcgtgatagcatcccccatatccctccccatcgagtactcatcccccatctctgtcgtcgtcgctggcgcatcggtgtcgatcgcagcagttcgcttcatcactcaaaaatccatcttcgtcaataaccagttcgggaagctgcgagcgaagcactgaagcagatgcttgtcttgtcttgtcccggccctctcatcctcctcccccactccactacggcactcccggccctcgctcgcttgctcattaatggcgggcactgcatggttggcgccatccatgcccattaacgcctccacccacctccgggccgcccccgcccccatctacttttattcacgccgatcgggcacttgcttccaatacagcgccggccgggccgttgcgtccgtccatcctcatccccatccgccacccaccccgcgcccctccttctcactccagtgctggctgccggccagctccgcccccggggtccttgagctggaggtggcggtggatgaccagctctcggagttttctgaggcgaggatcggagggcgttgcgttaggtccgcggttggtgagcggcggtcggagcggtctcgcgcgcggcggggtcgttcgatgacgcaggaatcgcgctctgggagggtgggaatacctcgcgctcgcgctcaaggtgctcgattaatttactgcctgaggctgagggggggcgcgcctgtgagctgaaccgttcccgctgcactgactcctgagctcgggaaatggttgggagcgtgcacgtcaatggatcggtccacggcggcaatggcacggccacggaggagcggctggacgagctgcgccggctgctcggcaagtcggagggggaccttctcaagatcgtcagcgtcggcgccggcgcgtggggcagcgtcttcgccgcgctactacaggacgcgtacggccatttccgggacaaggtgcagataaggatctggcgtcgcccgggccggacggtggaccgctccaccgcggagcacctgttcgaggtgatcaactccagggaggacgtgctcaggcgcctcatccgccgctgcgcctacctcaagtacgtcgaggcgcggctcggagaccgcacgctgtatgccgacgagatactcaaggacggcttctgcctgaacatgatcgagacgccgctctgccctctcaaggtcgtcactaacctgcaggaggccgtctgggatgccgacatcgtcgtgaatggggtgccgtccaccgagacgagggaggtgtttgatgagatcagcgagtattggaaggagaggattagtgtcccggtgataatttccctcgccaagggaattgaggcctcgttggatccaatacctcgtatcattacacctactcaaatgattagctctgcaactggagttccaactgaaaatatactctatcttggaggaccaaacatcgcctcggaaatttataacaaagaatatgcaaacgctcgaatctgtggatccaacaagtggaggaagcctcttgctaagtttttgaggcagccacatttcattgtctgggacaacagtgatcttgtcacccatgaggtgatgggtggcctgaagaatgtctatgcaatcggtgctggtaatactaacttctgtctttttttaactgacaatattattgtacaataggcatcctactacttgatgttgaagaaaacataacaaacatgtaaatgtttttctttgcttaagttttagttgatcccttaatggtcgtccattgggctgtcactgactctctttgcctgaatagagtatgggtggatcggagtacactaaaatcagaagggctttttagaattttaagaaaagaaacaatcaatttggaaatccgatgtcgggtcaaatacttgctgcttactttttgaatagtttccattctaacgttgttttggtcataaaatggcaaggggcacaaataggatagtttcttctactttgttttactacattttctgtgagtaccagttttataaaaaaaacttgacctgcggggggtaagacagcccccgggtattgtattaagaataagaccttctcacacaggtcaagaaaacccccgaacccctgccccacacatacacagcggcatcgaagctcatgtgagaacgaccacgaccagggctgagccttagacctatgctttggcgtggaacagacgagaggatttttttaaccacagcctggaaattcgctcccacggggagtcgaactcaggacctgaggagtgctactcagaccacctaaccaactcagctagaggccctttcgcgagtaccagttttatcatatttctctaattctctttatgtttcaggaatggtggcagctttaacaaacgagagtgcaacaagcaaatctgtatattttgctcattgcacgtcagagatgatattcattactcatttgctgacagagcaacctgagaaactcgctggtcctctgctggctgacacgtatgtaactctcttaaaaggtcgcaatgcatggtatgggcaaatgcttgccaagggagagttgagtcctgacatgggtgatagtatcaaggggaagggaatgattcaggtaatggaatgacttttttctttccattttgtcttgttttattctgagaagatgtcaaagctattatagtactacatccgttctcgaatatttgtcgcccgctagttcatttttgaactaaaccacgacaaataaaaaagaatggagtgagtatttgataaccctgacatttgcagccatccaattttgcttttttacacggttaccatgatcattttaccattccattggacagggtatctctgcagttggtgcattttttgagctgcttagtcaacccagcttaagtgtgcagcacccagaagaaaacaagcaggttgctccagctgagctatgcccaatcctgaagaggctttacagaatactgataaaaagggagctcccagcaagggacattcttcaagccctgagggacgaaacgatgaatgatcctcgggaaaggattgagatggcacaaagccatgcattctaccgcccgtctctccttggaaaaccatgatctagttagtcttgtagattagtagaatataaacggacgctgtgctgcaggtttctccactgtgcttgctgtccttgtgtccgagctacatggggatggggctttgtcagttgtcgaattctttgtgcttcctcgttgccatggtgtacaagagattactgaaccaataaatgttctaagtgcatattatatgaacacccaatttgaaagtacccgaggaagatttcttatgcatggatttgtttggtccaacgtcatatgctagtttgggtggcaacatctatattctcatgattgtagattattattcaaggtatacttaggttttcttacttcaaaacaagactaaagttgcatc

SEQ ID NO: 35501 - DNA, 2571 bp, Zea Mays
atgtatacgtcgtcagtagattcttatcatgaaaatcccccggcctctacggcctcgatcgaccacccggacacctccagctctggccgtcaccacccacctcctgcagctccgaacgagagcttgcggtaatgcccccgaacgcgcggcggcggactcccgcccggcccccaacggcgctgcgtacgaacgacccagataggtgtcagcacctctgtggaggagaaggaggctgtggaagagacggaagtggaacaggcagcactcggcggcaaacgcactcgacgcaccaacgttcgtgtgatgggtccagaatgggctgtgtaatcctaatctcttgtaattcatggccagcccatgtgagggtataatacctagtatgtggtttctggagaggcatgcaaaacttgaacaaactcatacgcaataacatccgccgccttctgcctcctgttcactgttcttctctaatctctgattcttcttccacttctgatctctgagcataacatttggtatcaaagacttgtcatcctggatctgctgccggaggtgccgcggcgggcgcgatcgtctgcgatggagcaatcggagactatcacccacaagttgcttgaggaaatgcgtctcatggaggcgcgtctatctgagcaaatcagcgggcgctgcgccggcgtcgagcgccgcgtggaggaacactgtgaggagatacgcgtgccttcacccagcgctgcgatgccatccaccaacaagtggatgttgcggcgttgcgcggtgaagaacgcctgatcgccctcgaactcatgaagaccgaggctgatatgtggcgtcccgatctggagaagcgggtcgacgatctggagttggaagttacccgtgtcaacaaattccttgaacgggaacgtcgccagccagccttcgacaagccgggactctttggtccacacgcgtcggcatccgtgcgtcctccagccggatttcctcacgctgatggggcccgtggccaccgcttcgaaccaccaaaccgggagggtgagtttgggttccctgcgacccaacctcacggcctggtcaaggctggagttccaactgaaaatatactctatcttggaggaccaaacatcgcctcggaaatttataacaaagaatatgcaaacgctcgaatctgtggatccaacaagtggaggaagcctcttgctaagtttttgaggcagccacatttcattgtctgggacaacagtgatcttgtcacccatgaggtgatgggtggcctgaagaatgtctatgcaatcggtgctggaatggtggcagctttaacaaacgagagtgcaacaagcaaatctgtatattttgctcattgcacgtcagagatgatattcattactcatttgctgacagagcaacctgagaaactcgctggtcctctgctggctgacacgtatgtaactctcttaaaaggtcgcaatgcatggtatgggcaaatgcttgccaagggagagttgagtcctgacatgggtgatagtatcaaggggaagggaatgattcaggtaatggaatgacttttttctttccattttgtcttgttttattctgagaagatgtcaaagctattatagtactacatccgttctcgaatatttgtcgcccgctagttcatttttgaactaaaccacgacaaataaaaaagaatggagtgagtatttgataaccctgacatttgcagccatccaattttgcttttttacacggttaccatgatcattttaccattccattggacagggtatctctgcagttggtgcattttttgagctgcttagtcaacccagcttaagtgtgcagcacccagaagaaaacaagcaggttgctccagctgagctatgcccaatcctgaagaggctttacagaatactgataaaaaggtttgtgctatgtatcatcactactctccatatttggagagtttacagtgtgcttgaggagtgagtgccgcagtgcagacgaagtgagaagtgaccacttctcactcattcattttattggtttcattttactctcctgattagatatagacctgacttatgtgcagggagctcccagcaagggacattcttcaagccctgagggacgaaacgatgaatgatcctcgggaaaggattgagatggcacaaagccatgcattctaccgcccgtctctccttggaaaaccatgatctagttagtcttgtagattagtagaatataaacggacgctgtgctgcaggtttctccactgtgcttgctgtccttgtgtccgagctacatggggatggggctttgtcagttgtcgaattctttgtgcttcctcgttgccatggtgtacaagagattactgaaccaataaatgttctaagtgcatattatatgaacacccaatttgaaagtacccgaggaagatttcttatgcatggatttgtttggtccaacgtcatatgctagtttgggtggcaacatctatattctcatgattgtagattattattcaaggtatacttaggttttcttacttcaaaacaagactaaagttgcatc

SEQ ID NO: 35502 - DNA, 2169 bp, Zea Mays
atgtatacgtcgtcagtagattcttatcatgaaaatcccccggcctctacggcctcgatcgaccacccggacacctccagctctggccgtcaccacccacctcctgcagctccgaacgagagcttgcggtaatgcccccgaacgcgcggcggcggactcccgcccggcccccaacggcgctgcgtacgaacgacccagataggtgtcagcacctctgtggaggagaaggaggctgtggaagagacggaagtggaacaggcagcactcggcggcaaacgcactcgacgcaccaacgttcgtgtgatgggtccagaatgggctgtgtaatcctaatctcttgtaattcatggccagcccatgtgagggtataatacctagtatgtggtttctggagaggcatgcaaaacttgaacaaactcatacgcaataacatccgccgccttctgcctcctgttcactgttcttctctaatctctgattcttcttccacttctgatctctgagcataacatttggtatcaaagacttgtcatcctggatctgctgccggaggtgccgcggcgggcgcgatcgtctgcgatggagcaatcggagactatcacccacaagttgcttgaggaaatgcgtctcatggaggcgcgtctatctgagcaaatcagcgggcgctgcgccggcgtcgagcgccgcgtggaggaacactgtgaggagatacgcgtgccttcacccagcgctgcgatgccatccaccaacaagtggatgttgcggcgttgcgcggtgaagaacgcctgatcgccctcgaactcatgaagaccgaggctgatatgtggcgtcccgatctggagaagcgggtcgacgatctggagttggaagttacccgtgtcaacaaattccttgaacgggaacgtcgccagccagccttcgacaagccgggactctttggtccacacgcgtcggcatccgtgcgtcctccagccggatttcctcacgctgatggggcccgtggccaccgcttcgaaccaccaaaccgggagggtgagtttgggttccctgcgacccaacctcacggcctggtcaaggctggagttccaactgaaaatatactctatcttggaggaccaaacatcgcctcggaaatttataacaaagaatatgcaaacgctcgaatctgtggatccaacaagtggaggaagcctcttgctaagtttttgaggcagccacatttcattgtctgggacaacagtgatcttgtcacccatgaggtgatgggtggcctgaagaatgtctatgcaatcggtgctggaatggtggcagctttaacaaacgagagtgcaacaagcaaatctgtatattttgctcattgcacgtcagagatgatattcattactcatttgctgacagagcaacctgagaaactcgctggtcctctgctggctgacacgtatgtaactctcttaaaaggtcgcaatgcatggtatgggcaaatgcttgccaagggagagttgagtcctgacatgggtgatagtatcaaggggaagggaatgattcagggtatctctgcagttggtgcattttttgagctgcttagtcaacccagcttaagtgtgcagcacccagaagaaaacaagcaggttgctccagctgagctatgcccaatcctgaagaggctttacagaatactgataaaaagggagctcccagcaagggacattcttcaagccctgagggacgaaacgatgaatgatcctcgggaaaggattgagatggcacaaagccatgcattctaccgcccgtctctccttggaaaaccatgatctagttagtcttgtagattagtagaatataaacggacgctgtgctgcaggtttctccactgtgcttgctgtccttgtgtccgagctacatggggatggggctttgtcagttgtcgaattctttgtgcttcctcgttgccatggtgtacaagagattactgaaccaataaatgttctaagtgcatattatatgaacacccaatttgaaagtacccgaggaagatttcttatgcatggatttgtttggtccaacgtcatatgctagtttgggtggcaacatctatattctcatgattgtagattattattcaaggtatacttaggttttcttacttcaaaacaagactaaagttgcatc

SEQ ID NO: 35503 - DNA, 139 bp, Zea Mays
gtcgcatcgcagttctccatcgaccggtctcctcgtggttcctcgattaaggagaaggtttattcccttatctttgggttagttacttcttgtggatgacttgaagcttagaatgtttatgtatatatcttatggaaag

SEQ ID NO: 35504 - DNA, 1211 bp, Zea Mays
ttggtgttccctcgtctctatggagctgaagtgttatgtattggcagcgtgactggtacttgacaatactctagattaaccgaacaacagtttgagccagggattatagccaaaagggattatacccccaaggggttcaagtgacaaagaggggattaactcaatccctcctggattcaatacctctctggaataaaaacctgtaaaccgaacatgcccctagggaagtaatccattgcaaacgaacatgccctcagggtttactattgtgtccgctcccaccgggtctgcgcatcagagaccgacaagactgggaaatccagagatgcatttttctaccgatcagctgatcggctcggcgttcattgcctttgggctcacattgttcgtgtgtttcttctacgttgccgtcgtgtccaagctgcttccgccacatcaaaatggattcctggccgccatccaaaacgactggtattactgtctgcttgtgccgttgacgcttcctgtaataatcgtggctgtctacctgcactggctcagcatgaagatgttcaagcacgcatgaagcagtcatgcagcttccttccggtttcagaatcctggtcaaaatcgaggatgcattcacaatcccaaggcataggaagtgctgcagggaacgccctaattccaccgcagcttcgtggaaggagcaatgttgttactgaagacatgagcaaactctttgtggctaaacgaaaagagtagcatcttaaccttttctggacctgaacctctgtttggactccatagactgataaacgcatgtactggtcccatagtgcaatggatgtgccggcatgatccaaggttgttgctgaatcctaaagaaccggacgaaggatgctaacggtaggacgacctggtctcttagcctacagtgggctgttgtcagatgtcaaaaatgccctcttagaagtttagaacatttctttggtgctcactcgcgtttcatgttcaacggtgctacatgactggtgctggatgcatgtaaactctgcaaccctatcatgttatggcagctagatgctactacgtctatcttttgatcggtgattacaaccatgtattacgtctagtagtggtaatacatcgcgatccaaatgcttcttaataaaatagtagaaccctaaataattatagttaaaaaatgaatagaaataagattctgatat

SEQ ID NO: 35505 - DNA, 2836 bp, Zea Mays
ggggtatttagctaaagtgtggcagtgaatttcagtttcaatggcaacattataaatgtctctatggagctgaagtgttatgtattggcagcgtgactggtacttgacaatactctagattaaccgaacaacagtttgagccagggattatagccaaaagggattatacccccaaggggttcaagtgacaaagaggggattaactcaatccctcctggattcaatacctctctggaataaaaacctgtaaaccgaacatgcccctagggaagtaatccattgcaaacgaacatgccctcagggtttactattgtgtccgctcccaccgggtctgcgcatcagagaccgacaagactgggaaatccagagatgcatttttctaccgatcagctgatcggctcggcgttcattgcctttgggctcacattgttcgtgtgtttcttctacgttgccgtcgtgtccaagctgcttccgccacatcaaaatggattcctggccgccatccaaaacgactggtattactgtctgcttgtgccgttgacgcttcctgtaataatcgtggctgtctacctgcactggctcagcatgaagatgttcaagcacgcatgaagcagtcatgcagcttccttccggtttcagaatcctggtcaaaatcgaggttggtttggtttagctgaaagtgtcaaggcaatagccaatttgcttatatacagcctgcattttttttgctgtctccaagatgtaatctggctatcgaatcactgtactaacaaaccctgcatcaatacgagctgcaatccattgtttcgctttactccatagctcacggtagcgcgacatatctcgtaggaaggttcaattcggaataattactggcatgtatgcgttttttttcaatgtgcacctttagggatgctattatctatgctatgcagcttcaaaagtcaaaaccatgggttcttcccttctatacatatctggtcatcagtatgtgcttgcccctctttagagacgagggtacatgtaggccctgtttgggacagctgctgcttgttgaaaaagcagcttatctgataagctggtaaaaagcagcttctgcttgttggctgcttttagttcattttgagaagcagctgaactgataagctgctgcagaagctgcctgtttggcaggacttcagcttaaatttgtgaagaagctgaaaataagctgtaccaaacagggccgtaagacatctccactttacctctttttaccctgtatagatgtagtatattcaatccacaagcttagcagcactcacaactgaacagtgtaactaaatgataaggttagttcagtgacatctcattgatcacgatgttgttccctattttgtaatgtttagaatgcttaatgatggctcaatcgacctcacgtagagtgcattttgtttgtggcggaagtaactgtatgttaactagttagtcacatataacttctggactaatgcatttttcctctactgctactgcattgggttctgcacagtccttcctcctaatgctcaccatgtaccacaagtagatgatcattatgttcttctttagcatgctatcataaatcaatctggaaatattgtacttatctataagacccaactaatttggtggtggtttcggtgtagcgctaaatttctcttatcatggtttatacattctgcttatcatcagaacgagacactaatccactaatatattatgtgcctattctgcttcttctgtacgggcctgatagtttctctaaattttaactagcaagaaagagcatatttgccttgtgccattgtccttgatcttctgcctttttttagaaaaaggaattaaatggtactcctaacaggataagttggattattagatgccctgtgatgctttggtttattgggaaaaaagatcgcaattgatattggttattcaaagcagacacttccctactgcatttaatctttactgtatttcctttgttatgttatatttcattgccccctctttattttggttcctggccttgttcttttgtttcttctgattcattttcagttctagctgtgtgctgaagtgttattctggatgtatacttgattatttgtcagtttcctaaacgcacagcacattactaccattactccccccattgccatctaggtctgatatggtttttgtgagttcttaacttgtcgcgcaataaatttccaaggatgcattcacaatcccaaggcataggaagtgctgcagggaacgccctaattccaccgcagcttcgtggaaggagcaatgttgttactgaagacatgagcaaactctttgtggctaaacgaaaagagtagcatcttaaccttttctggacctgaacctctgtttggactccatagactgataaacgcatgtactggtcccatagtgcaatggatgtgccggcatgatccaaggttgttgctgaatcctaaagaaccggacgaaggatgctaacggtaggacgacctggtctcttagcctacagtgggctgttgtcagatgtcaaaaatgccctcttagaagtttagaacatttctttggtgctcactcgcgtttcatgttcaacggtgctacatgactggtgctggatgcatgtaaactctgcaaccctatcatgttatggcagctagatgctactacgtctatcttttgatcggtgattacaaccatgtattacgtctagtagtggtaatacatcgcgatccaaatgcttcttaataaaatagtagaaccctaaataattatagttaaaaaatgaatagaaataagattctgatat

SEQ ID NO: 35506 - DNA, 2578 bp, Zea Mays
tgccattctactgattttgggggtatttagctaaagtgtggcagtgaatttcagtttcaatggcaacattataaatgtctctatggagctgaagtgttatgtattggcagcgtgactggtacttgacaatactctagattaaccgaacaacagtttgagccagggattatagccaaaagggattatacccccaaggggttcaagtgacaaagaggggattaactcaatccctcctggattcaatacctctctggaataaaaacctgtaaaccgaacatgcccctagggaagtaatccattgcaaacgaacatgccctcagggtttactattgtgtccgctcccaccgggtctgcgcatcagagaccgacaagactgggaaatccagagatgcatttttctaccgatcagctgatcggctcggcgttcattgcctttgggctcacattgttcgtgtgtttcttctacgttgccgtcgtgtccaagctgcttccgccacatcaaaatggattcctggccgccatccaaaacgactggtattactgtctgcttgtgccgttgacgcttcctgtaataatcgtggctgtctacctgcactggctcagcatgaagatgttcaagcacgcatgaagcagtcatgcagcttccttccggtttcagaatcctggtcaaaatcgagcttcaaaagtcaaaaccatgggttcttcccttctatacatatctggtcatcagtatgtgcttgcccctctttagagacgagggtacatgtaggccctgtttgggacagctgctgcttgttgaaaaagcagcttatctgataagctggtaaaaagcagcttctgcttgttggctgcttttagttcattttgagaagcagctgaactgataagctgctgcagaagctgcctgtttggcaggacttcagcttaaatttgtgaagaagctgaaaataagctgtaccaaacagggccgtaagacatctccactttacctctttttaccctgtatagatgtagtatattcaatccacaagcttagcagcactcacaactgaacagtgtaactaaatgataaggttagttcagtgacatctcattgatcacgatgttgttccctattttgtaatgtttagaatgcttaatgatggctcaatcgacctcacgtagagtgcattttgtttgtggcggaagtaactgtatgttaactagttagtcacatataacttctggactaatgcatttttcctctactgctactgcattgggttctgcacagtccttcctcctaatgctcaccatgtaccacaagtagatgatcattatgttcttctttagcatgctatcataaatcaatctggaaatattgtacttatctataagacccaactaatttggtggtggtttcggtgtagcgctaaatttctcttatcatggtttatacattctgcttatcatcagaacgagacactaatccactaatatattatgtgcctattctgcttcttctgtacgggcctgatagtttctctaaattttaactagcaagaaagagcatatttgccttgtgccattgtccttgatcttctgcctttttttagaaaaaggaattaaatggtactcctaacaggataagttggattattagatgccctgtgatgctttggtttattgggaaaaaagatcgcaattgatattggttattcaaagcagacacttccctactgcatttaatctttactgtatttcctttgttatgttatatttcattgccccctctttattttggttcctggccttgttcttttgtttcttctgattcattttcagttctagctgtgtgctgaagtgttattctggatgtatacttgattatttgtcagtttcctaaacgcacagcacattactaccattactccccccattgccatctaggtctgatatggtttttgtgagttcttaacttgtcgcgcaataaatttccaaggatgcattcacaatcccaaggcataggaagtgctgcagggaacgccctaattccaccgcagcttcgtggaaggagcaatgttgttactgaagacatgagcaaactctttgtggctaaacgaaaagagtagcatcttaaccttttctggacctgaacctctgtttggactccatagactgataaacgcatgtactggtcccatagtgcaatggatgtgccggcatgatccaaggttgttgctgaatcctaaagaaccggacgaaggatgctaacggtaggacgacctggtctcttagcctacagtgggctgttgtcagatgtcaaaaatgccctcttagaagtttagaacatttctttggtgctcactcgcgtttcatgttcaacggtgctacatgactggtgctggatgcatgtaaactctgcaaccctatcatgttatggcagctagatgctactacgtctatcttttgatcggtgattacaaccatgtattacgtctagtagtggtaatacatcgcgatccaaatgcttcttaataaaatagtagaaccctaaataattatagttaaaaaatgaatagaaataagattctgatat

SEQ ID NO: 35507 - DNA, 1293 bp, Zea Mays
caggaagccaggcattgtctgccattctactgattttgggggtatttagctaaagtgtggcagtgaatttcagtttcaatggcaacattataaatgtctctatggagctgaagtgttatgtattggcagcgtgactggtacttgacaatactctagattaaccgaacaacagtttgagccagggattatagccaaaagggattatacccccaaggggttcaagtgacaaagaggggattaactcaatccctcctggattcaatacctctctggaataaaaacctgtaaaccgaacatgcccctagggaagtaatccattgcaaacgaacatgccctcagggtttactattgtgtccgctcccaccgggtctgcgcatcagagaccgacaagactgggaaatccagagatgcatttttctaccgatcagctgatcggctcggcgttcattgcctttgggctcacattgttcgtgtgtttcttctacgttgccgtcgtgtccaagctgcttccgccacatcaaaatggattcctggccgccatccaaaacgactggtattactgtctgcttgtgccgttgacgcttcctgtaataatcgtggctgtctacctgcactggctcagcatgaagatgttcaagcacgcatgaagcagtcatgcagcttccttccggtttcagaatcctggtcaaaatcgaggatgcattcacaatcccaaggcataggaagtgctgcagggaacgccctaattccaccgcagcttcgtggaaggagcaatgttgttactgaagacatgagcaaactctttgtggctaaacgaaaagagtagcatcttaaccttttctggacctgaacctctgtttggactccatagactgataaacgcatgtactggtcccatagtgcaatggatgtgccggcatgatccaaggttgttgctgaatcctaaagaaccggacgaaggatgctaacggtaggacgacctggtctcttagcctacagtgggctgttgtcagatgtcaaaaatgccctcttagaagtttagaacatttctttggtgctcactcgcgtttcatgttcaacggtgctacatgactggtgctggatgcatgtaaactctgcaaccctatcatgttatggcagctagatgctactacgtctatcttttgatcggtgattacaaccatgtattacgtctagtagtggtaatacatcgcgatccaaatgcttcttaataaaatagtagaaccctaaataattatagttaaaaaatgaatagaaataagattctgatat

SEQ ID NO: 35508 - DNA, 1572 bp, Zea Mays
gtccggccgtccctgctctgctggacgctcggagaggcggagagcggacgccggcagagacgcagagggcagaccgtgtcctctctccattgtccagtgatccagtctcctccggcctccgcgaccgtgggtgcacggagccggacagccgatcagccggccgcgagctcgccgcgaggacaaaggaggccgccggaccggagcctggagactggagagccagccgccagagccgaggtatcctgttgccggcttgccgctgttggatctagcggccaggagggcgatttggtgccgttgccgtactgccgtgagccaagagtgactgctgttggcgctcggcgattgggcccatattgccatacactgaagcagtctctatggagctgaagtgttatgtattggcagcgtgactggtacttgacaatactctagattaaccgaacaacagtttgagccagggattatagccaaaagggattatacccccaaggggttcaagtgacaaagaggggattaactcaatccctcctggattcaatacctctctggaataaaaacctgtaaaccgaacatgcccctagggaagtaatccattgcaaacgaacatgccctcagggtttactattgtgtccgctcccaccgggtctgcgcatcagagaccgacaagactgggaaatccagagatgcatttttctaccgatcagctgatcggctcggcgttcattgcctttgggctcacattgttcgtgtgtttcttctacgttgccgtcgtgtccaagctgcttccgccacatcaaaatggattcctggccgccatccaaaacgactggtattactgtctgcttgtgccgttgacgcttcctgtaataatcgtggctgtctacctgcactggctcagcatgaagatgttcaagcacgcatgaagcagtcatgcagcttccttccggtttcagaatcctggtcaaaatcgaggatgcattcacaatcccaaggcataggaagtgctgcagggaacgccctaattccaccgcagcttcgtggaaggagcaatgttgttactgaagacatgagcaaactctttgtggctaaacgaaaagagtagcatcttaaccttttctggacctgaacctctgtttggactccatagactgataaacgcatgtactggtcccatagtgcaatggatgtgccggcatgatccaaggttgttgctgaatcctaaagaaccggacgaaggatgctaacggtaggacgacctggtctcttagcctacagtgggctgttgtcagatgtcaaaaatgccctcttagaagtttagaacatttctttggtgctcactcgcgtttcatgttcaacggtgctacatgactggtgctggatgcatgtaaactctgcaaccctatcatgttatggcagctagatgctactacgtctatcttttgatcggtgattacaaccatgtattacgtctagtagtggtaatacatcgcgatccaaatgcttcttaataaaatagtagaaccctaaataattatagttaaaaaatgaatagaaataagattctgatat

SEQ ID NO: 35509 - DNA, 1249 bp, Zea Mays
actgggtctgcgcattagagaccgacaagactgggaaatccagagatgcatttttctaccgattagctgatcgactcggcgttcattgcctttgggatcacattgttcgtgtgtttcttctacgttgccgtcgtgtccaagttgcttccgccacatcaaaatggattcctggctgccatctaaccaagagagatgcttgttaagcatgcactaaactaggtgatccttgtgcaacagcgtacaacccgtgcaaattatacaagaaattcacgccttcttcgtaattctgcaggtattactgtctgcttgtgccgttgatgcttcctgtaataatcgtggttgtctacctgcactggctcagcatgaagatgttcaagcacgcatgaagcagtcatgcagcttccttccggtttcagaatcctggtcaaaatcgaggtgctcggagagctatagagatgggacaacaatgttcttgggagatttagagaagaggataggtgagggaactttgcgccgggttttaggtgctccgcaagctggaaaccttggctgtccaaatgagtctggaatgggtggcgcaacttggcatgccaagaacaagtttggagacagatgcaatgcaacaaccttgggactagctgctcgatggagacacgcacacgcagacgccgccttcttcctgaccagcggtacaggcggtccagccttccagagtctagacgccgccaggcgccagcgccgccgcccgccagcagcaggatccagctccacgtccagccgcactgccgcagccagcagccagggctccacgtccagccgcagccagggctcgccggggatcctagacgccgagtcgcccaccacgccggtcggccacgccatccaggaccaggctcgcagtgccgccagcctggtgtgaccccgggatcaggttctgattccgaagaggcaaaagggaatgcgaagtggaatccggctacatggctttgcattatatcactagtgtaaattgtaatgtcgtaatggtgctgattatagagtggtgatcaaatgtctttttgtgacacgctgctcaacaaagcctagaagaatcttgcgagagttcaagtcggactggttttgtttctggttattttggtctcaaatggcaccagcaggatctcaaccgctcgcttcgttaaaattttattcctaatccgacctcgcaggctcttgagtatcctgaataccaattattattgtggttgtg

SEQ ID NO: 35510 - DNA, 89 bp, Zea Mays
tagatcggagcgcgaggtcgcggaccatcggtgtcccaggtccagagcagagcagaagattgatcctttcctccctacctcgaagaagg

SEQ ID NO: 35511 - DNA, 2048 bp, Zea Mays
ctcattcctcactcaccaaagcgataaatcaagatcacagggtggaccagactctaagaaggatctaattatccataaggatgggaatagtcaaaatattgcagcacagactttcacttttcgtgagctcgctgcagccactaagaacttcaggcaagattgccttttaggagagggaggttttggtcgtgtatataaaggacgcttggagaatgggcaggctgttgctgtgaaacaacttgatcgtaatggtctccaaggaaacagggaatttctggttgaggttctcatgctcagtctcttacatcacactaacctggtcaatctaattggctactgtgctgatggtgaccaacgccttcttgtttatgagtttatgccattggggtcactagaagatcatctgcatgatctgccaccagataaagagcctcttgattggaacacacggatgaagatagctgcaggtgcagctaagggcttagaacaccttcatgacaaggcgagtcctcctgtgatttaccgggattttaagtcatcaaacattcttcttggagaaggatttcatccgaagctatcggactttggccttgcaaaacttggtccggttggtgacaagacccatgtttcaacacgtgtgatgggtacatatggctactgtgccccagaatatgcaatgactgggcagctgacggttaaatccgatgtgtatagctttggtgttgtgttccttgaacttatcacggggcgtaaagcaattgacaatactaagacccaaggggagcaaaatttagtggcatgggctcgtccactgttcaaggaccgaaggaaattccctaaaatggctgatccaatgcttcagggccgcttccctatgaggggtctataccaggccttagccgttgctgccatgtgcttgcaagagcaagctgctacacgtcctcacatcggggatgtcgtcactgctctctcatatcttgcttctcaggcatatgacccaaatgcccctgttcaacacgtccggagcaattcatccacccccagggccagaaaccctgctgggtggaacggcgaccagcgcagcgtgcgctcgcctaaccatcattctccagacccgcggcgcagagacgctgcgggggcatccaagtatggagcagaggttagcaggactagctctaccagcgactctggccggcgatcaggcctggatgacatggacctgaccgggtcgcaagtgggaagcccagcgcagaccggaagaagaagagaagctccaaggggcaccgacagacagcgtgctgtcgcagaggccaggacatggggggagaattcaagggagcgaacaaatggccatggcagcttcgacagcacccatgagtgaagccgtcaggttctgttccagtcatcattccagaacccccaccatgggttgagtccactcattcatcagcaccagtcagatccgatcttgggacatggcgtcggtccaagtgtctgtgaataaggcttttcttgccctcctgtggcgaatgcaattctcctggcgcccattccttgccaatgcgacctgtgtgtgtcatgcctctggcgactgggagcctcaggaggagcctgtaggattcagtcagaggtagacaggtcagtgaagaaagaggaggggcgcggagtcacattggcgagtgttttgttttttttggcggctaaatgctgagtatgttcagctgcatgtgtcctttttgtgtatgtgtacgtgtaagacgtgtaatagcaaccgtgtcaggtttggctacctgagaggcctttgaagcttctgctgctgcttccttccccttgggaattgggagttcagagttgaaatgtaggataggcgatgttgttgagtacatcaactgtttttacccttccatgttgtacggcgacgcttccctgaacaatatgaccatgatgtgcccccctgtccgccaatggccaatccgtgtaggtgcagacgactggtctctgcacgcgtcaagacacccggaggcggccgccggcatcgcaccatcccc

SEQ ID NO: 35512 - DNA, 2263 bp, Zea Mays
ctttcttacatccccgcttgccaatcactcgatctggaaggggaagctgttggcggttggtctgaaggtgcaggacattggggaagtgaaaggaagcagagaggttgcgagtggtggcagcacatctggaggaggacaaactcagagagggaagcgacagtcagggtgggggcaagggcagaggtggaagaatggccctggagaaggatgcctctggaatctggatcatgatgtatagataaatcaagatcacagggtggaccagactctaagaaggatctaattatccataaggatgggaatagtcaaaatattgcagcacagactttcacttttcgtgagctcgctgcagccactaagaacttcaggcaagattgccttttaggagagggaggttttggtcgtgtatataaaggacgcttggagaatgggcaggctgttgctgtgaaacaacttgatcgtaatggtctccaaggaaacagggaatttctggttgaggttctcatgctcagtctcttacatcacactaacctggtcaatctaattggctactgtgctgatggtgaccaacgccttcttgtttatgagtttatgccattggggtcactagaagatcatctgcatgatctgccaccagataaagagcctcttgattggaacacacggatgaagatagctgcaggtgcagctaagggcttagaacaccttcatgacaaggcgagtcctcctgtgatttaccgggattttaagtcatcaaacattcttcttggagaaggatttcatccgaagctatcggactttggccttgcaaaacttggtccggttggtgacaagacccatgtttcaacacgtgtgatgggtacatatggctactgtgccccagaatatgcaatgactgggcagctgacggttaaatccgatgtgtatagctttggtgttgtgttccttgaacttatcacggggcgtaaagcaattgacaatactaagacccaaggggagcaaaatttagtggcatgggctcgtccactgttcaaggaccgaaggaaattccctaaaatggctgatccaatgcttcagggccgcttccctatgaggggtctataccaggccttagccgttgctgccatgtgcttgcaagagcaagctgctacacgtcctcacatcggggatgtcgtcactgctctctcatatcttgcttctcaggcatatgacccaaatgcccctgttcaacacgtccggagcaattcatccacccccagggccagaaaccctgctgggtggaacggcgaccagcgcagcgtgcgctcgcctaaccatcattctccagacccgcggcgcagagacgctgcgggggcatccaagtatggagcagaggttagcaggactagctctaccagcgactctggccggcgatcaggcctggatgacatggacctgaccgggtcgcaagtgggaagcccagcgcagaccggaagaagaagagaagctccaaggggcaccgacagacagcgtgctgtcgcagaggccaggacatggggggagaattcaagggagcgaacaaatggccatggcagcttcgacagcacccatgagtgaagccgtcaggttctgttccagtcatcattccagaacccccaccatgggttgagtccactcattcatcagcaccagtcagatccgatcttgggacatggcgtcggtccaagtgtctgtgaataaggcttttcttgccctcctgtggcgaatgcaattctcctggcgcccattccttgccaatgcgacctgtgtgtgtcatgcctctggcgactgggagcctcaggaggagcctgtaggattcagtcagaggtagacaggtcagtgaagaaagaggaggggcgcggagtcacattggcgagtgttttgttttttttggcggctaaatgctgagtatgttcagctgcatgtgtcctttttgtgtatgtgtacgtgtaagacgtgtaatagcaaccgtgtcaggtttggctacctgagaggcctttgaagcttctgctgctgcttccttccccttgggaattgggagttcagagttgaaatgtaggataggcgatgttgttgagtacatcaactgtttttacccttccatgttgtacggcgacgcttccctgaacaatatgaccatgatgtgcccccctgtccgccaatggccaatccgtgtaggtgcagacgactggtctctgcacgcgtcaagacacccggaggcggccgccggcatcgcaccatcccc

SEQ ID NO: 35513 - DNA, 3059 bp, Zea Mays
ctggacgcgctgtggcctgccctgccaacctcacactggccgctgctgagcagagctgacttttgctccgcttgccttgccccaaacctcatattcccctcctccttgctgtagctatagctgtagctttcaccccactccctccacggcaccgcgcctccctcccccccttccccaaatcctcctcccctccccaattgggccaatagcccgctccgcttccagtcgcggcgtcggtcggggaagaagcttcgctcccgtgccgcagatcgggagaggagctccccgctcccgcctcgtcgtccgcttccccgccgccggtctctccgggaggcgtctccgtcgccggcgatgagctgcttcgtctgcttcgggtcggcggcgcaggacgaggagcctaggaagcccgctgccgcgggcgccggcaaggacgccgcgccggatcgcgcagtggctcgcgtcggatcagataaatcaagatcacagggtggaccagactctaagaaggatctaattatccataaggatgggaatagtcaaaatattgcagcacagactttcacttttcgtgagctcgctgcagccactaagaacttcaggcaagattgccttttaggagagggaggttttggtcgtgtatataaaggacgcttggagaatgggcaggctgttgctgtgaaacaacttgatcgtaatggtctccaaggaaacagggaatttctggttgaggttctcatgctcagtctcttacatcacactaacctggtcaatctaattggctactgtgctgatggtgaccaacgccttcttgtttatgagtttatgccattggggtcactagaagatcatctgcatggtctgtgtatctcctctttgtcatatactcttccgaatattccatgagtgcctgtagcaatgtaatgaagcattgtcttattctataggaatgacatgcttcatctgattgttaaatctattttatgtctagcgtgactgtaactgtgtgcttaggttgatagatcataattcttgattcagcttaaactgatcagcatgcgtgttgttctactattggatgtaccttataggtagggtgctaatttttttgtatcgtgtgcctggccatgtaatttttcatatgctatctatacttaaaacaaaacaaagttgaccagagggagagatacccccccctgattttgtttataagaagtttgtgccacccttccaacctgaactggtgattagaggtttcttcaacctccagacttcaattgctaagtagtgtaactcaggaggagttggcttttcaattttcataggataaaatgaatctatagatgtttgcctggggcttcgtttgtatttagccagacctttggatgaagcttgctgtatatggacaatttcttctgactagaatctgccaccagataaagagcctcttgattggaacacacggatgaagatagctgcaggtgcagctaagggcttagaacaccttcatgacaaggcgagtcctcctgtgatttaccgggattttaagtcatcaaacattcttcttggagaaggatttcatccgaagctatcggactttggccttgcaaaacttggtccggttggtgacaagacccatgtttcaacacgtgtgatgggtacatatggctactgtgccccagaatatgcaatgactgggcagctgacggttaaatccgatgtgtatagctttggtgttgtgttccttgaacttatcacggggcgtaaagcaattgacaatactaagacccaaggggagcaaaatttagtggcatgggctcgtccactgttcaaggaccgaaggaaattccctaaaatggctgatccaatgcttcagggccgcttccctatgaggggtctataccaggccttagccgttgctgccatgtgcttgcaagagcaagctgctacacgtcctcacatcggggatgtcgtcactgctctctcatatcttgcttctcaggcatatgacccaaatgcccctgttcaacacgtccggagcaattcatccacccccagggccagaaaccctgctgggtggaacggcgaccagcgcagcgtgcgctcgcctaaccatcattctccagacccgcggcgcagagacgctgcgggggcatccaagtatggagcagaggttagcaggactagctctaccagcgactctggccggcgatcaggcctggatgacatggacctgaccgggtcgcaagtgggaagcccagcgcagaccggaagaagaagagaagctccaaggggcaccgacagacagcgtgctgtcgcagaggccaggacatggggggagaattcaagggagcgaacaaatggccatggcagcttcgacagcacccatgagtgaagccgtcaggttctgttccagtcatcattccagaacccccaccatgggttgagtccactcattcatcagcaccagtcagatccgatcttgggacatggcgtcggtccaagtgtctgtgaataaggcttttcttgccctcctgtggcgaatgcaattctcctggcgcccattccttgccaatgcgacctgtgtgtgtcatgcctctggcgactgggagcctcaggaggagcctgtaggattcagtcagaggtagacaggtcagtgaagaaagaggaggggcgcggagtcacattggcgagtgttttgttttttttggcggctaaatgctgagtatgttcagctgcatgtgtcctttttgtgtatgtgtacgtgtaagacgtgtaatagcaaccgtgtcaggtttggctacctgagaggcctttgaagcttctgctgctgcttccttccccttgggaattgggagttcagagttgaaatgtaggataggcgatgttgttgagtacatcaactgtttttacccttccatgttgtacggcgacgcttccctgaacaatatgaccatgatgtgcccccctgtccgccaatggccaatccgtgtaggtgcagacgactggtctctgcacgcgtcaagacacccggaggcggccgccggcatcgcaccatcccc

SEQ ID NO: 35514 - DNA, 2653 bp, Zea Mays
ctggacgcgctgtggcctgccctgccaacctcacactggccgctgctgagcagagctgacttttgctccgcttgccttgccccaaacctcatattcccctcctccttgctgtagctatagctgtagctttcaccccactccctccacggcaccgcgcctccctcccccccttccccaaatcctcctcccctccccaattgggccaatagcccgctccgcttccagtcgcggcgtcggtcggggaagaagcttcgctcccgtgccgcagatcgggagaggagctccccgctcccgcctcgtcgtccgcttccccgccgccggtctctccgggaggcgtctccgtcgccggcgatgagctgcttcgtctgcttcgggtcggcggcgcaggacgaggagcctaggaagcccgctgccgcgggcgccggcaaggacgccgcgccggatcgcgcagtggctcgcgtcggatcagataaatcaagatcacagggtggaccagactctaagaaggatctaattatccataaggatgggaatagtcaaaatattgcagcacagactttcacttttcgtgagctcgctgcagccactaagaacttcaggcaagattgccttttaggagagggaggttttggtcgtgtatataaaggacgcttggagaatgggcaggtaagtatctcttaaacatgatgcatcgacattttatctgtgaagctaaatccttccaaatttggcttctgagttgaaacattaagtaaaatattggaaggaaatgctaacataacgattatacttaagccctggattagtcctggatactaacagagttttacttcccaggctgttgctgtgaaacaacttgatcgtaatggtctccaaggaaacagggaatttctggttgaggttctcatgctcagtctcttacatcacactaacctggtcaatctaattggctactgtgctgatggtgaccaacgccttcttgtttatgagtttatgccattggggtcactagaagatcatctgcatgataaagagcctcttgattggaacacacggatgaagatagctgcaggtgcagctaagggcttagaacaccttcatgacaaggcgagtcctcctgtgatttaccgggattttaagtcatcaaacattcttcttggagaaggatttcatccgaagctatcggactttggccttgcaaaacttggtccggttggtgacaagacccatgtttcaacacgtgtgatgggtacatatggctactgtgccccagaatatgcaatgactgggcagctgacggttaaatccgatgtgtatagctttggtgttgtgttccttgaacttatcacggggcgtaaagcaattgacaatactaagacccaaggggagcaaaatttagtggcatgggctcgtccactgttcaaggaccgaaggaaattccctaaaatggctgatccaatgcttcagggccgcttccctatgaggggtctataccaggccttagccgttgctgccatgtgcttgcaagagcaagctgctacacgtcctcacatcggggatgtcgtcactgctctctcatatcttgcttctcaggcatatgacccaaatgcccctgttcaacacgtccggagcaattcatccacccccagggccagaaaccctgctgggtggaacggcgaccagcgcagcgtgcgctcgcctaaccatcattctccagacccgcggcgcagagacgctgcgggggcatccaagtatggagcagaggttagcaggactagctctaccagcgactctggccggcgatcaggcctggatgacatggacctgaccgggtcgcaagtgggaagcccagcgcagaccggaagaagaagagaagctccaaggggcaccgacagacagcgtgctgtcgcagaggccaggacatggggggagaattcaagggagcgaacaaatggccatggcagcttcgacagcacccatgagtgaagccgtcaggttctgttccagtcatcattccagaacccccaccatgggttgagtccactcattcatcagcaccagtcagatccgatcttgggacatggcgtcggtccaagtgtctgtgaataaggcttttcttgccctcctgtggcgaatgcaattctcctggcgcccattccttgccaatgcgacctgtgtgtgtcatgcctctggcgactgggagcctcaggaggagcctgtaggattcagtcagaggtagacaggtcagtgaagaaagaggaggggcgcggagtcacattggcgagtgttttgttttttttggcggctaaatgctgagtatgttcagctgcatgtgtcctttttgtgtatgtgtacgtgtaagacgtgtaatagcaaccgtgtcaggtttggctacctgagaggcctttgaagcttctgctgctgcttccttccccttgggaattgggagttcagagttgaaatgtaggataggcgatgttgttgagtacatcaactgtttttacccttccatgttgtacggcgacgcttccctgaacaatatgaccatgatgtgcccccctgtccgccaatggccaatccgtgtaggtgcagacgactggtctctgcacgcgtcaagacacccggaggcggccgccggcatcgcaccatcccc

SEQ ID NO: 35515 - DNA, 1081 bp, Zea Mays
cacctcctggcggtctttgagaccaggctacgacaacttagcatagcgttgcctttaatgtgttgcgcagcagatatgctctctgttccttcaaggaagcaggtagtgatagtggggcagaaaggatctgaagaatttcaggacatggtagcagctacgttttcgtcatatgatccgaatagaacagtaagtgaagattgttctgtggccaaattattctttttggttagtgtaccagttctgctagccaatgtgcctcagatattatgaccacataaccattgctgcacctgtcttctatacataaaaccacttgtgactagaatgagtgccagcacaagttgctggtcaagccctctgtccaaatgaataaagttactagggaactatgcgcgttatcatagtcagtctattttaccacgttgcatctatctgattcaggtatgaactcgatatatgtgttgttccttcaaatctaaccacccttgtgagttgtatgcatgatttttggttcctgctgtatgatagtgactttgggcaccttatttgttgaaccaggtgatccaaatcgaccctaggaacacagaagaaatggaattctgggacggcaacaatgcaaacatcgcgcaaatggcacggggcagccctccggggaaaccggcggtggcgcatgtgtgccaggacttcaagtgcagcccgccggtaacctctcctgggtcgcttcgcgagctgctgaacaagacactggctgctgcaagctcagcctgaggccttttgcctcctgctatgttcgtagatgttctgataccagtgtaacaatagttaaaaaaaaacctgtgtacatatttacatgtgagaaatataaataggattgtcagttaagctgtacagcctgttaaagccttctcagctgtacacatgttcacaataataaggcacggagcataatggtttccttttcagcgttttcttcgagttgttttagtcaaagaacaggagcatccaaaattgtaagtcgattggtgaaaactgaccagtttttgcggttgtggaacaacattgaaaacgctgccaacattga

SEQ ID NO: 35516 - DNA, 2838 bp, Zea Mays
  misc_feature (1)..(2): n is a, c, g, or t
nnttaatggcactatgcccgaatatataacaatataactaatacatgatagagactgtgtgtaacaaggacactatatgggaccgaatacaacaagggcacatgcgtaggtatctaaaaaccccatcgaaatcaaggtggatcaacacatggagtttggaaagaaaacctatgccaagatctggtttgcgccctcgtgaagaaatctgccaactgaagctttgaaggcacatagtgaagatcaatcacatcatcttgaacatgtgcatgcgtgtaatagacatcaacacctatatgcttaataagctcatgcttgatcggatcccgagtgatactaataacacagtcaatcaaaagaggagtcattatggaaacagctaataacacctgtactgtcagtcaaaagaggagtttgtatagaaacataaaatctgcaagcaaccagcgtaaccaagttacctatacagtcacaagagctgaagcacacaactcggcctctacactagaaagagaaactgttgtctgctttttagtcttccaagcaaataagagagacaccaagaaaaacacaatccgtagaaagagattggcgatcagagaaatcactagccagcctagagctataaagaacttgtatgtggaaagaatggaaagaatagatgacatgaagcaggtgactatagtgaagctgagtgggggctgaaacaaattaagaatatgcacaaaataagaaatatcgagacgagtgacaacaagactcctgactatgtgacgataatgggtaggatcaccaagaagctcaccatcagtggcactaatatgaacattgagctccatcggagtctcaacggtacagtgatcaggaagagaagcatgatcaagaagaccctaaatgtacatacttttcttgagatagatagaagccctcaggtgtggtggagacctcaattccaagaaaataacaaaggaccaagatcaagcataagaaacgtctcattcagacgtgccttcacaacggcaatatattgtgcatcatcaccaattataatcgtatcgtatcatcaacataaagaaagtctgcccatgagattatgtgtgcacaaaaagagcaggatcatgagcactaacagaaaaaaccagtagcaatgatcacagaagtaaaatgctgccgagcctaagcaacagcaaatcatcgaggatccaaattctcgaagggacttcacctaccaagaaccgagtccttcgaagggcttgggtacctgcggcagtccctcgctccagtgtgggccgtgaaggcccagacgaaggttccactgaaggcaaagcccttggccccctgaaggcataagtagagcccaagggtgaactgaggggacttctgcgaagacttggagtcgagggccctcaacatgaggggtcgaatagctgagtttaggcagcaagggcatggtgggccttccgttgaacgcagcaggcccacatatcggtccagcaggcccacctgttggtccagggaacacttttgttccaactgtgggtacaataatgggtgtaattagggtttgggccgcaccctgtatttacgtcgttgtacaatatatttcgggaatgtggcatgtaaccgagggtagggatatattttagagccctacctcttggttaccctataaatacccccactcaaacggggagaggacacacttgacaagacattttgagaaccactgttcctcgtttgtctcgttgtttcacctagtcgctcaagttgtttggttcccacctgtcagaacccaacaaagttcatagatagaggagtgacacatgaggccacacatggcacttgatcgagcagaggtggttggtgcaggtgaggagaggctgactgtgcgggcggtgccggcaagaggcgtcctacgcgggcgggaagcgggcagacgagcgagccgactggagcgggtggccagatgggtgcgcttgctagaggcaggtagacggacgagcgagcgccgatagacgggtggttgcagttgtcgggtgaactccaacaagcggacatgaagatgagtgccaccaggccaaatgagccgactgcgaagctgtgcagagccgcaaggcaacaggacagagccaccaagcgacgcggtctttgagaccaggctacgacaacttagcatagcgttgcctttaatgtgttgcgcagcagatatgctctctgttccttcaaggaagcaggtagtgatagtggggcagaaaggatctgaagaatttcaggacatggtagcagctacgttttcgtcatatgatccgaatagaacagtgatccaaatcgaccctaggaacacagaagaaatggaattctgggacggcaacaatgcaaacatcgcgcaaatggcacggggcagccctccggggaaaccggcggtggcgcatgtgtgccaggacttcaagtgcagcccgccggtaacctctcctgggtcgcttcgcgagctgctgaacaagacactggctgctgcaagctcagcctgaggccttttgcctcctgctatgttcgtagatgttctgataccagtgtaacaatagttaaaaaaaaacctgtgtacatatttacatgtgagaaatataaataggattgtcagttaagctgtacagcctgttaaagccttctcagctgtacacatgttcacaataataaggcacggagcataatggtttccttttcagcgttttcttcgagttgttttagtcaaagaacaggagcatccaaaattgtaagtcgattggtgaaaactgaccagtttttgcggttgtggaacaacattgaaaacgctgccaacattga

SEQ ID NO: 35517 - DNA, 1051 bp, Zea Mays
atgtcccccgccgcttccgcaccggtcttctcccacctcggccccctcatccctcctccaactccaatgctctccactcttctccgccaccgcctcaccgccgccgcctcctcctcgtcgccgacccacagcacgcctctccgtctgcgccccctcgccgcagccatgtcgtcgtccgcgtccgcgcctcacggcggccggaagccgaaccgcctcgccgccgagcacagcccctacctgctgcagcacgcgcacaacccggttgattggtacccttggggggaagaggctttccagaaggcgcgcgccaaggacgtccccatcttcctctcgagtatgaactctcctgataccattggtgtcatgtgatggaggtggagtcctttgagaatgaggaagtggcaaagttgctgaatgattggtttgttagcatcaaggttgaccgtgaagagcgccctgatgttgataaggtttatatgacatatgtatcggcactgcatggtggtggtggttggcctctaagcgtctttttgtcacctgacttgaaacctctgatgggtggtacatactttccaccggatgataattatggaagaccagggttcaagactgtattgaggaaggtcaaggaagcctgggaaactaaacgtgaagcgcttgagcggacgggaaatcttgttatcgaacaattaagggacgcattatctgctaaggctagctctcaagatgtgccaaatgacctagcagttgtctctgttgatcaatgtgtcgaaaagttagcgagcagctatgatccaaaatttggtggatttggctctgctcccaagtttccaagacctgttgaagattatataatgctatacaaattccataagtacatggaggctgggaaggagattgaagccttgaacataaagaagatggtgactcacacattggactgtatggcaagaggtggagttcatgaccacataggtggtggttttcacagatatagtgtggatgagtgctggcatgttccacattttgagaagatgatttccgatcaggg

SEQ ID NO: 35518 - DNA, 1341 bp, Zea Mays
caggcaggtgtcgctgggcgcgcagcccacatgtcccccgccgcttccgcaccggtcttctcccacctcggccccctcatccctcctccaactccaatgctctccactcttctccgccaccgcctcaccgccgccgcctcctcctcgtcgccgacccacagcacgcctctccgtctgcgccccctcgccgcagccatgtcgtcgtccgcgtccgcgcctcacggcggccggaagccgaaccgcctcgccgccgagcacagcccctacctgctgcagcacgcgcacaacccggttgattggtacccttggggggaagaggctttccagaaggcgcgcgccaaggacgtccccatcttcctctcgagtatgaactctcctgataccattgtgttagctcagtagttttgttgcagccttgcaggcatgtagtgccaccaatgtgtgacatggtaaattgttttgcttaaccatattatgatggtcttgtcaagagagaactaagttaaaatggtaatcgaattttctgattccgttctagtcaactcaaacgttctgtacctaacgttcttattttgcttcattgcaatccggttgtgtcccacaagttggctatagcacatgccattggtgtcatgtgatggaggtggagtcctttgagaatgaggaagtggcaaagttgctgaatgattggtttgttagcatcaagtctgattattaattttgataggttgaccgtgaagagcgccctgatgttgataaggtttatatgacatatgtatcggcactgcatggtggtggtggttggcctctaagcgtctttttgtcacctgacttgaaacctctgatgggtggtacatactttccaccggatgataattatggaagaccagggttcaagactgtattgaggaaggtcaaggaagcctgggaaactaaacgtgaagcgcttgagcggacgggaaatcttgttatcgaacaattaagggacgcattatctgctaaggctagctctcaagatgtgccaaatgacctagcagttgtctctgttgatcaatgtgtcgaaaagttagcgagcagctatgatccaaaatttggtggatttggctctgctcccaagtttccaagacctgttgaagattatataatgctatacaaattccataagtacatggaggctgggaaggagattgaagccttgaacataaagaagatggtgactcacacattggactgtatggcaagaggtggagttcatgaccacataggtggtggttttcacagatatagtgtggatgagtgctggcatgttccacattttgagaagatgatttccgatcaggg

SEQ ID NO: 35519 - DNA, 1379 bp, Zea Mays
cacacacactagcagcaggcgcgcgggccttgcggacgccagcgtgtgccgagcggaggcaggcaggtgtcgctgggcgcgcagcccacatgtcccccgccgcttccgcaccggtcttctcccacctcggccccctcatccctcctccaactccaatgctctccactcttctccgccaccgcctcaccgccgccgcctcctcctcgtcgccgacccacagcacgcctctccgtctgcgccccctcgccgcagccatgtcgtcgtccgcgtccgcgcctcacggcggccggaagccgaaccgcctcgccgccgagcacagcccctacctgctgcagcacgcgcacaacccggttgattggtacccttggggggaagaggctttccagaaggcgcgcgccaaggacgtccccatcttcctctcgagtatgaactctcctgataccattgtgttagctcagtagttttgttgcagccttgcaggcatgtagtgccaccaatgtgtgacatggtaaattgttttgcttaaccatattatgatggtcttgtcaagagagaactaagttaaaatggtaatcgaattttctgattccgttctagtcaactcaaacgttctgtacctaacgttcttattttgcttcattgcaatccggttgtgtcccacaagttggctatagcacatgccattggtgtcatgtgatggaggtggagtcctttgagaatgaggaagtggcaaagttgctgaatgattggtttgttagcatcaaggttgaccgtgaagagcgccctgatgttgataaggtttatatgacatatgtatcggcactgcatggtggtggtggttggcctctaagcgtctttttgtcacctgacttgaaacctctgatgggtggtacatactttccaccggatgataattatggaagaccagggttcaagactgtattgaggaaggtcaaggaagcctgggaaactaaacgtgaagcgcttgagcggacgggaaatcttgttatcgaacaattaagggacgcattatctgctaaggctagctctcaagatgtgccaaatgacctagcagttgtctctgttgatcaatgtgtcgaaaagttagcgagcagctatgatccaaaatttggtggatttggctctgctcccaagtttccaagacctgttgaagattatataatgctatacaaattccataagtacatggaggctgggaaggagattgaagccttgaacataaagaagatggtgactcacacattggactgtatggcaagaggtggagttcatgaccacataggtggtggttttcacagatatagtgtggatgagtgctggcatgttccacattttgagaagatgatttccgatcaggg

SEQ ID NO: 35520 - DNA, 1157 bp, Zea Mays
ccagaacaaagtggcgcacacacactagcagcaggcgcgcgggccttgcggacgccagcgtgtgccgagcggaggcaggcaggtgtcgctgggcgcgcagcccacatgtcccccgccgcttccgcaccggtcttctcccacctcggccccctcatccctcctccaactccaatgctctccactcttctccgccaccgcctcaccgccgccgcctcctcctcgtcgccgacccacagcacgcctctccgtctgcgccccctcgccgcagccatgtcgtcgtccgcgtccgcgcctcacggcggccggaagccgaaccgcctcgccgccgagcacagcccctacctgctgcagcacgcgcacaacccggttgattggtacccttggggggaagaggctttccagaaggcgcgcgccaaggacgtccccatcttcctctcgagtatgaactctcctgataccattgtgtgtcatgtgatggaggtggagtcctttgagaatgaggaagtggcaaagttgctgaatgattggtttgttagcatcaaggttgaccgtgaagagcgccctgatgttgataaggtttatatgacatatgtatcggcactgcatggtggtggtggttggcctctaagcgtctttttgtcacctgacttgaaacctctgatgggtggtacatactttccaccggatgataattatggaagaccagggttcaagactgtattgaggaaggtcaaggaagcctgggaaactaaacgtgaagcgcttgagcggacgggaaatcttgttatcgaacaattaagggacgcattatctgctaaggctagctctcaagatgtgccaaatgacctagcagttgtctctgttgatcaatgtgtcgaaaagttagcgagcagctatgatccaaaatttggtggatttggctctgctcccaagtttccaagacctgttgaagattatataatgctatacaaattccataagtacatggaggctgggaaggagattgaagccttgaacataaagaagatggtgactcacacattggactgtatggcaagaggtggagttcatgaccacataggtggtggttttcacagatatagtgtggatgagtgctggcatgttccacattttgagaagatgatttccgatcaggg

SEQ ID NO: 35521 - DNA, 958 bp, Zea Mays
cgcacacacactagcagcaggcgcgcgggccttgcggacgccagcgtgtgccgagcggaggcaggcaggtgtcgctgggcgcgcagcccacatgtcccccgccgcttccgcaccggtcttctcccacctcggccccctcatccctcctccaactccaatgctctccactcttctccgccaccgcctcaccgccgccgcctcctcctcgtcgccgacccacagcacgcctctccgtctgcgccccctcgccgcagccatgtcgtcgtccgcgtccgcgcctcacggcggccggaagccgaaccgcctcgccgccgagcacagcccctacctgctgcagcacgcgcacaacccggttgattggtacccttggggggaagaggctttccagaaggcgcgcgccaaggacgtccccatcttcctctcgattggctatagcacatgccattggtgtcatgtgatggaggtggagtcctttgagaatgaggaagtggcaaagttgctgaatgattggtttgttagcatcaaggttgaccgtgaagagcgccctgatgttgataaggtttatatgacatatgtatcggcactgcatggtggtggtggttggcctctaagcgtctttttgtcacctgacttgaaacctctgatgggtggtacatactttccaccggatgataattatggaagaccagggttcaagactgtattgaggaaggtcaaggaagcctgggaaactaaacgtgaagcgcttgagcggacgggaaatcttgttatcgaacaattaagggacgcattatctgctaaggctagctctcaagatgtgccaaatgacctagcagttgtctctgttgatcaatgtgtcgaaaagccatctaataaagcatcagttagcccaaccatatcatctagcttcccagagttgcttctgcagaggttctatgactacgcggacatgtactga

SEQ ID NO: 35522 - DNA, 783 bp, Zea Mays
ggaaaatcccttcaaaacccctccggtccctcacccccatccgccgccgctttcctcccacggtcccaccacgcgcgcggccggcgggcggccaacggcggggagcagcaccgcgcgatcgtcaccgacgcttccacctacgaatttgagtagaccgaaaccgaacgaatctgtctgtccagtgggacgtgatcatccaattgtgaatgcttgctttgttgtttggctgccgataacttgcttgccttctctcttattaggtacaaggtgtcatttatagttttaccaattttcgggatggtatctgatgcatatgaaggcttggtgcacatgtacacatataggatactgagctttaaaatcagatctaacggtgcatgctatcagggttttttctatgaaacaaaccagtcatggatgagagtgggtttttaaaatagacgtgcaccgttatatctgattttgaagaccaagattctacatgtgcacaaacccttcgtgtgcactggatatcatcctctgttttttagcagttctgtttttttttctgtcatcccttttaagttagtaccctgagtttcagttatgtatcgtgttatcgaatgcatcatcttgtcatgccttgaccgataacttgtgatggctgtttcatcaatatgttaatcttctcttaggtttttttgccattacgtcaacatgttaaccttgacaacttcattgtacttgtactattcagttttgattaattgataatttatactagtttattttcaagtctgggaa

SEQ ID NO: 35523 - DNA, 1369 bp, Zea Mays
aaacccctccagaacacgcggaaaaccaaaccgatagccgagagcaaaagctcgccacggcacgccaaaatactcctccccctcccctcatcgtcctcctcggctcggccgggctcctctgatcctctcccagtccggcaaaatacacctcccgctctcgcgtcgcgttcctgtcccgtcgtgacaagcacaaacacgtagtagcagcaaaccgaagcgacgcgtgcccgtcccgcgatggccacggcggccgcggccaggcaccagcaccagcaccagcagcgccggggtgcccagcgggggcggcgccgcgggagcgggatacggtgctcgtcgccggcgcaggagttcgcgtcgctggccgcggtgttccggcggcggctggtggtcggggccaccacggcggcggccgcggcggtgggggccaacttcggcggcgtcaccagcttcctgctgggcctgtcgccggagctcggccgctcgctccgcctcgacgtgctctaccccgtcggcggcttcacgcgctgcctcgactccgacaatgggttcggtactcgtcattacaacaagctgcacacagacgcaacgcaacgcattgaagtgctctcggtcgccttcctcaattcatctatccatcaagttgggttggagaccagacgctactgtacagagaagcgaagaaggcagaattgcaaagatcgctagacccaccgccactgccaaacggaggatctccatctgggcctcggaacatcagtgaacctgtggcagcatttggcccccctggatccaatggggagctcaacgtcagtgtcatcgtctccactgtgccacgagacttctcgatcgagacgttcggcagcccaaaagacgtgggggaagtggtgctcagaaggatcgcgaggacgaggcgaagcccggacatcaacgctacccttatcgacgccgccgtgagagaggacgcgggcagggtgaagtactacaagctggagttccgagtcgagagcccttctttccggcggcacaacgtcgcggtctgctgcgtgagggacggcaggctctacaccatgaacgcgcaggcaccggagtcggcgtggaaggcggtccagaaggagttcttggcaatggcggactcgttcggcttagttagcgacgcttgattgacatgcagttaggcacgcagttttggttttgtacccctgagcgttttgtccactagtttgcaaggtctcggtaacgagatgccgtggtttggtgtagagaaactaggacatgatgtttctgtttctgttatactaccttacaatcatgtctgaagttttcttctgaatccgttggatctgatcttacattgcattgcattgcattc

SEQ ID NO: 35524 - DNA, 3699 bp, Zea Mays
caccatgatgtagtatagctaacatatgacaattgggtaagaggccaagggatctgttgaatccaaaagcagttaagtgcatgcagtcactttttgccttgaaggacattcttggcaaaaaagaaacccgagaaattagtttactctgtggggtcactgttacacaggttagggaattctttacagttcaacgatcgcgagtgagaaaatttgttcgtctgtctcaagaaaaagcgctgagaatagagacacccaaagagcaggacaattcatactccataaacactgagcagataccgccggacatagaagcacaagctgaagttattgaacctttgagaactttagaaccggtggtcctacagagctctttgcaaccaacgtgtgtccctcagatctcttcgcaatcaatggagctccaacaaagcgatttgcagcacatggaagtcttccaaaactctttgcaacaagcagaggcacaacataacattgcagctcctataatgccatctggagcaatggttatgcaaccaactgacgctaagattagttcagactctgttcaaaaggaagttaagcaagagggagttcattctggtgttgcgtcagaagataagaagttcttggaaagtatctttgctctaatgcagaaggaggaaacattctctgggcaggttaaattaatggaatggattctgcaaataaataatgttacagttcttagtaggttcgtaacaatgggtggtttgaccattatgtcaacatggttgagtcaagcagcaattgaagagcagacatcagttatccatgttattttcaaggctttaccagtccacatgtcagttgttctgcaaacaattaataagttgcgcttttatagaacacaagggctaggaacctcctctccagattgagcaaagtgcttgtaaggattcaggcattgaagaaacctcagaaggacttaatatgtaaacaaaggataagtgaaattctccgtgacgagtcttggaaatctgaagttgatattaccgaggaggtacttgctttgactgatggtgctaatgagagcagaaagcctgaacccagaaaaacaccaatgcttctcactgcttctgctattgagacaaataaaaggagttctgtgcagacaaaatccaaacaaaaaagaaaagttctacttgtggagcaaccaaacaagaaagctacgtggaagaatgctaattctgtcaggaacacatctacaaacaatagccggccattatctgcagatgatattcaaaaagcaaagatgcgtgccatgttcatgcaggagaagcgtggcaagattgacataaataaattgagtgataaaccacaagcaatggacacgaaaaaagcagctggattagtaaattcaaatccatcagctatgcccataagtccccatacgtcagctgcacaacctgttgacccaagcccatctacttcaaaacaaagcacagatcctcagcctgataatacagaaatttcaggtggtttgaagttaaacataggttccaaaaacaatgtcatagagaagttggattgcaagagagttctttggcaaataccaccagctgtatggatagacccctcgtggagtgtaggagctggtgacaacagcaaggagcttgaggttcaaacacagaggaaccggcgtgaaaaggaaaccttttatacaagccagaaggacgtcccaatgaatccaaaggacccatgggatctggaaatggacttcgatgacagcctgaccccagaggttccaattgaccaggtgccagatgtggacgccatggaaacggaaagcgttggcgcggcgcctagcgctgtggctcctgttaaggacaagcagattgaatctgcctcatcgacatcaggcgcagttgctgatgatgaggaagctaataccgattacgaattgcttacggtgctactcaggaacccggagcttgtctttgcattaacctctaacaagggggagaacatgcctaacgagcagaccattgcgcttctggatacactgaagcagaccggccttagcctatcagagcttgttaaccgtctggggaacggcgctgggctcccaaaagagccagagccggagccagaacctattcccgcttcgcttccgtcaccaactccgccagaccgtacatcaagggctgtctggataccagaacacgcaatgcaggtgagggctgctccaaccttgcatctgccaagccgggggagtacacctcctgttgcaaatgccgtgcaacaaggcttctcaaacgttgtcagttcgttaccctcacaaccttacgcccctccagtctcggtcttgccggcacagattcaagctaacgcacccccatctcttcctctgctggcggtctctgtaaacccgccagtccaacatgtttcccctgtgaataaccttctgaacagagcttcagtgcatcagcatggacagcagcaatacgctttgttgtctgaccctgttgccacgcccttgcatcaacaagcagcggggagcaaaccagctgtagcagcacatccgtcgttgcctgagcctaatgcatcatctcacacagcattcccttggcaatctaatgctgctgacatgacccacgctggacggaatgcgacggctgatccatgggccgccgcccgcgcagctaactcgtatagtacagcatcagcaagcacagtgccgtctgctaaccagaatgcttacggcgatcaaggcaagcagggtgcgtacagctcttatggatcttcggcagcctcgtcccgtcctgttgtaccagggcacgggcatgacagaaatggctacagccggtctgccctggtggagtacccatgggacgggcaccaccagcggcactcgaggtcaccagatcctggcgtggtccgggactacgacaccgactatggcggtgcgcagggctacagtcagcagcccctgacgcagtggagtgcagggaaagtgcagcagcagggctacaatcctgagccgtcaaggcagtggagttcttcccaggcgcaccagggcggctacgcacccgccgagccgtcgaggcagtggagttcttcccaggcgcaccagagctacgctcccgagctaccgaggcagtggagctccgaacgccgtggctacgatgatgcggagccctcgaggacatggagctccggccagcagaacccggaggcgccgaggcagtggagccgcgggaagcaggatccttactacagcccgagccatagccgaagatcgtacgatcagcaccggaggagatagcaaaagcttgctgtattactgctaccacattagctagatcctggatggaggcggtcggttcttgggagggtttgtttcatttgatttgatgtgaggccgggtattcgttgcatttgggctttgtgattgccaccacaagggccattgagaaaagctataggttattatgtatcgatgtagtttttgtctcgaaattaaaaaaaaaatgtatctatctaggtagctggagaggggaaagaagaagaaaaaatgaatgaatgaatgatataactcagggagggtcaagaggccccccggctcgaattgattgcagtcttgaatgctgagtcgaacggttggccaaatttgtcgtctgtgctcgtggttgtccactcaaggtccgtcaattctaggcgtgg

SEQ ID NO: 35525 - DNA, 4041 bp, Zea Mays
ggcccagctccaaaccctagcccgccgccgtgctgactcccctagccaggcacgacgtcgaagagagcagcggcggaggcggcaacctgatgcccagccccccgtgggggccatggagctcgtcctcgtcaagcccgcggcaggagctctcgtcgaggtgggctccgggtccgttgccggcgcgggctcgatcccggcgatggtggcggcgcagcaggagattttgcacgaacaggtggaccagctccaacgcctcgtcgtcgctcagtgccgcctcaccggcgtcaaccccctcgcccaggagatggctgccggtgcattgtctatcaagataggtaagaggccaagggatctgttgaatccaaaagcagttaagtgcatgcagtcactttttgccttgaaggacattcttggcaaaaaagaaacccgagaaattagtttactctgtggggtcactgttacacaggttagggaattctttacagttcaacgatcgcgagtgagaaaatttgttcgtctgtctcaagaaaaagcgctgagaatagagacacccaaagagcaggacaattcatactccataaacactgagcagataccgccggacatagaagcacaagctgaagttattgaacctttgagaactttagaaccggtggtcctacagagctctttgcaaccaacgtgtgtccctcagatctcttcgcaatcaatggagctccaacaaagcgatttgcagcacatggaagtcttccaaaactctttgcaacaagcagaggcacaacataacattgcagctcctataatgccatctggagcaatggttatgcaaccaactgacgctaagattagttcagactctgttcaaaaggaagttaagcaagagggagttcattctggtgttgcgtcagaagataagaagttcttggaaagtatctttgctctaatgcagaaggaggaaacattctctgggcaggttaaattaatggaatggattctgcaaataaataatgttacagttcttagtaggttcgtaacaatgggtggtttgaccattatgtcaacatggttgagtcaagcagcaattgaagagcagacatcagttatccatgttattttcaaggtgctgctccaccttccgttgcataaggctttaccagtccacatgtcagttgttctgcaaacaattaataagttgcgcttttatagaacacaagacatatcgagcagggctaggaacctcctctccagattgagcaaagtgcttgtaaggattcaggcattgaagaaacctcagaaggacttaatatgtaaacaaaggataagtgaaattctccgtgacgagtcttggaaatctgaagttgatattacccaggaggaggtacttgctttgactgatggtgctaatgagagcagaaagcctgaacccagaaaaacaccaatgcttctcactgcttctgctattgagacaaataaaaggagttctgtgcagacaaaatccaaacaaaaaagaaaagttctacttgtggagcaaccaaacaagaaagctacgtggaagaatgctaattctgtcaggaacacatctacaaacaatagccggccattatctgcagatgatattcaaaaagcaaagatgcgtgccatgttcatgcaggagaagcgtggcaagattgacataaataaattgagtgataaaccacaagcaatggacacgaaaaaagcagctggattagtaaattcaaatccatcagctatgcccataagtccccatacgtcagctgcacaacctgttgacccaagcccatctacttcaaaacaaagcacagatcctcagcctgataatacagaaatttcaggtggtttgaagttaaacataggttccaaaaacaatgtcatagagaagttggattgcaagagagttctttggcaaataccaccagctgtatggatagacccctcgtggagtgtaggagctggtgacaacagcaaggagcttgaggttcaaacacagaggaaccggcgtgaaaaggaaaccttttatacaagccagaaggacgtcccaatgaatccaaaggacccatgggatctggaaatggacttcgatgacagcctgaccccagaggttccaattgaccaggtgccagatgtggacgccatggaaacggaaagcgttggcgcggcgcctagcgctgtggctcctgttaaggacaagcagattgaatctgcctcatcgacatcaggcgcagttgctgatgatgaggaagctaataccgattacgaattgcttacggtgctactcaggaacccggagcttgtctttgcattaacctctaacaagggggagaacatgcctaacgagcagaccattgcgcttctggatacactgaagcagaccggccttagcctatcagagcttgttaaccgtctggggaacggcgctgggctcccaaaagagccagagccggagccagaacctattcccgcttcgcttccgtcaccaactccgccagaccgtacatcaagggctgtctggataccagaacacgcaatgcaggtgagggctgctccaaccttgcatctgccaagccgggggagtacacctcctgttgcaaatgccgtgcaacaaggcttctcaaacgttgtcagttcgttaccctcacaaccttacgcccctccagtctcggtcttgccggcacagattcaagctaacgcacccccatctcttcctctgctggcggtctctgtaaacccgccagtccaacatgtttcccctgtgaataaccttctgaacagagcttcagtgcatcagcatggacagcagcaatacgctttgttgtctgaccctgttgccacgcccttgcatcaacaagcagcggggagcaaaccagctgtagcagcacatccgtcgttgcctgagcctaatgcatcatctcacacagcattcccttggcaatctaatgctgctgacatgacccacgctggacggaatgcgacggctgatccatgggccgccgcccgcgcagctaactcgtatagtacagcatcagcaagcacagtgccgtctgctaaccagaatgcttacggcgatcaaggcaagcagggtgcgtacagctcttatggatcttcggcagcctcgtcccgtcctgttgtaccagggcacgggcatgacagaaatggctacagccggtctgccctggtggagtacccatgggacgggcaccaccagcggcactcgaggtcaccagatcctggcgtggtccgggactacgacaccgactatggcggtgcgcagggctacagtcagcagcccctgacgcagtggagtgcagggaaagtgcagcagcagggctacaatcctgagccgtcaaggcagtggagttcttcccaggcgcaccagggcggctacgcacccgccgagccgtcgaggcagtggagttcttcccaggcgcaccagagctacgctcccgagctaccgaggcagtggagctccgaacgccgtggctacgatgatgcggagccctcgaggacatggagctccggccagcagaacccggaggcgccgaggcagtggagccgcgggaagcaggatccttactacagcccgagccatagccgaagatcgtacgatcagcaccggaggagatagcaaaagcttgctgtattactgctaccacattagctagatcctggatggaggcggtcggttcttgggagggtttgtttcatttgatttgatgtgaggccgggtattcgttgcatttgggctttgtgattgccaccacaagggccattgagaaaagctataggttattatgtatcgatgtagtttttgtctcgaaattaaaaaaaaaatgtatctatctaggtagctggagaggggaaagaagaagaaaaaatgaatgaatgaatgatataactcagggagggtcaagaggccccccggctcgaattgattgcagtcttgaatgctgagtcgaacggttggccaaatttgtcgtctgtgctcgtggttgtccactcaaggtccgtcaattctaggcgtgg

SEQ ID NO: 35526 - DNA, 3952 bp, Zea Mays
catctcgttccgcctcctatcggcccagctccaaaccctagcccgccgccgtgctgactcccctagccaggcacgacgtcgaagagagcagcggcggaggcggcaacctgatgcccagccccccgtgggggccatggagctcgtcctcgtcaagcccgcggcaggagctctcgtcgaggtgggctccgggtccgttgccggcgcgggctcgatcccggcgatggtggcggcgcagcaggagattttgcacgaacaggtggaccagctccaacgcctcgtcgtcgctcagtgccgcctcaccggcgtcaaccccctcgcccaggagatggctgccggtgcattgtctatcaagataggtaagaggccaagggatctgttgaatccaaaagcagttaagtgcatgcagtcactttttgccttgaaggacattcttggcaaaaaagaaacccgagaaattagtttactctgtggggtcactgttacacaggttagggaattctttacagttcaacgatcgcgagtgagaaaatttgttcgtctgtctcaagaaaaagcgctgagaatagagacacccaaagagcaggacaattcatactccataaacactgagcagataccgccggacatagaagcacaagctgaagttattgaacctttgagaactttagaaccggtggtcctacagagctctttgcaaccaacgtgtgtccctcagatctcttcgcaatcaatggagctccaacaaagcgatttgcagcacatggaagtcttccaaaactctttgcaacaagcagaggcacaacataacattgcagctcctataatgccatctggagcaatggttatgcaaccaactgacgctaagattagttcagactctgttcaaaaggaagttaagcaagagggagttcattctggtgttgcgtcagaagataagaagttcttggaaagtatctttgctctaatgcagaaggaggaaacattctctgggcaggttaaattaatggaatggattctgcaaataaataatgttacagttcttagtaggttcgtaacaatgggtggtttgaccattatgtcaacatggttgagtcaagcagcaattgaagagcagacatcagttatccatgttattttcaaggctttaccagtccacatgtcagttgttctgcaaacaattaataagttgcgcttttatagaacacaagacatatcgagcagggctaggaacctcctctccagattgagcaaagtgcttgtaaggattcaggcattgaagaaacctcagaaggacttaatatgtaaacaaaggataagtgaaattctccgtgacgagtcttggaaatctgaagttgatattaccgaggaggtacttgctttgactgatggtgctaatgagagcagaatccaaacaaaaaagaaaagttctacttgtggagcaaccaaacaagaaagctacgtggaagaatgctaattctgtcaggaacacatctacaaacaatagccggccattatctgcagatgatattcaaaaagcaaagatgcgtgccatgttcatgcaggagaagcgtggcaagattgacataaataaattgagtgataaaccacaagcaatggacacgaaaaaagcagctggattagtaaattcaaatccatcagctatgcccataagtccccatacgtcagctgcacaacctgttgacccaagcccatctacttcaaaacaaagcacagatcctcagcctgataatacagaaatttcaggtggtttgaagttaaacataggttccaaaaacaatgtcatagagaagttggattgcaagagagttctttggcaaataccaccagctgtatggatagacccctcgtggagtgtaggagctggtgacaacagcaaggagcttgaggttcaaacacagaggaaccggcgtgaaaaggaaaccttttatacaagccagaaggacgtcccaatgaatccaaaggacccatgggatctggaaatggacttcgatgacagcctgaccccagaggttccaattgaccaggtgccagatgtggacgccatggaaacggaaagcgttggcgcggcgcctagcgctgtggctcctgttaaggacaagcagattgaatctgcctcatcgacatcaggcgcagttgctgatgatgaggaagctaataccgattacgaattgcttacggtgctactcaggaacccggagcttgtctttgcattaacctctaacaagggggagaacatgcctaacgagcagaccattgcgcttctggatacactgaagcagaccggccttagcctatcagagcttgttaaccgtctggggaacggcgctgggctcccaaaagagccagagccggagccagaacctattcccgcttcgcttccgtcaccaactccgccagaccgtacatcaagggctgtctggataccagaacacgcaatgcaggtgagggctgctccaaccttgcatctgccaagccgggggagtacacctcctgttgcaaatgccgtgcaacaaggcttctcaaacgttgtcagttcgttaccctcacaaccttacgcccctccagtctcggtcttgccggcacagattcaagctaacgcacccccatctcttcctctgctggcggtctctgtaaacccgccagtccaacatgtttcccctgtgaataaccttctgaacagagcttcagtgcatcagcatggacagcagcaatacgctttgttgtctgaccctgttgccacgcccttgcatcaacaagcagcggggagcaaaccagctgtagcagcacatccgtcgttgcctgagcctaatgcatcatctcacacagcattcccttggcaatctaatgctgctgacatgacccacgctggacggaatgcgacggctgatccatgggccgccgcccgcgcagctaactcgtatagtacagcatcagcaagcacagtgccgtctgctaaccagaatgcttacggcgatcaaggcaagcagggtgcgtacagctcttatggatcttcggcagcctcgtcccgtcctgttgtaccagggcacgggcatgacagaaatggctacagccggtctgccctggtggagtacccatgggacgggcaccaccagcggcactcgaggtcaccagatcctggcgtggtccgggactacgacaccgactatggcggtgcgcagggctacagtcagcagcccctgacgcagtggagtgcagggaaagtgcagcagcagggctacaatcctgagccgtcaaggcagtggagttcttcccaggcgcaccagggcggctacgcacccgccgagccgtcgaggcagtggagttcttcccaggcgcaccagagctacgctcccgagctaccgaggcagtggagctccgaacgccgtggctacgatgatgcggagccctcgaggacatggagctccggccagcagaacccggaggcgccgaggcagtggagccgcgggaagcaggatccttactacagcccgagccatagccgaagatcgtacgatcagcaccggaggagatagcaaaagcttgctgtattactgctaccacattagctagatcctggatggaggcggtcggttcttgggagggtttgtttcatttgatttgatgtgaggccgggtattcgttgcatttgggctttgtgattgccaccacaagggccattgagaaaagctataggttattatgtatcgatgtagtttttgtctcgaaattaaaaaaaaaatgtatctatctaggtagctggagaggggaaagaagaagaaaaaatgaatgaatgaatgatataactcagggagggtcaagaggccccccggctcgaattgattgcagtcttgaatgctgagtcgaacggttggccaaatttgtcgtctgtgctcgtggttgtccactcaaggtccgtcaattctaggcgtgg

SEQ ID NO: 35527 - DNA, 4042 bp, Zea Mays
ctcatctcgttccgcctcctatcggcccagctccaaaccctagcccgccgccgtgctgactcccctagccaggcacgacgtcgaagagagcagcggcggaggcggcaacctgatgcccagccccccgtgggggccatggagctcgtcctcgtcaagcccgcggcaggagctctcgtcgaggtgggctccgggtccgttgccggcgcgggctcgatcccggcgatggtggcggcgcagcaggagattttgcacgaacaggtggaccagctccaacgcctcgtcgtcgctcagtgccgcctcaccggcgtcaaccccctcgcccaggagatggctgccggtgcattgtctatcaagataggtaagaggccaagggatctgttgaatccaaaagcagttaagtgcatgcagtcactttttgccttgaaggacattcttggcaaaaaagaaacccgagaaattagtttactctgtggggtcactgttacacagttcaacgatcgcgagtgagaaaatttgttcgtctgtctcaagaaaaagcgctgagaatagagacacccaaagagcaggacaattcatactccataaacactgagcagataccgccggacatagaagcacaagctgaagttattgaacctttgagaactttagaaccggtggtcctacagagctctttgcaaccaacgtgtgtccctcagatctcttcgcaatcaatggagctccaacaaagcgatttgcagcacatggaagtcttccaaaactctttgcaacaagcagaggcacaacataacattgcagctcctataatgccatctggagcaatggttatgcaaccaactgacgctaagattagttcagactctgttcaaaaggaagttaagcaagagggagttcattctggtgttgcgtcagaagataagaagttcttggaaagtatctttgctctaatgcagaaggaggaaacattctctgggcaggttaaattaatggaatggattctgcaaataaataatgttacagttcttagtaggttcgtaacaatgggtggtttgaccattatgtcaacatggttgagtcaagcagcaattgaagagcagacatcagttatccatgttattttcaaggtgctgctccaccttccgttgcataaggctttaccagtccacatgtcagttgttctgcaaacaattaataagttgcgcttttatagaacacaagacatatcgagcagggctaggaacctcctctccagattgagcaaagtgcttgtaaggattcaggcattgaagaaacctcagaaggacttaatatgtaaacaaaggataagtgaaattctccgtgacgagtcttggaaatctgaagttgatattaccgaggaggtacttgctttgactgatggtgctaatgagagcagaaagcctgaacccagaaaaacaccaatgcttctcactgcttctgctattgagacaaataaaaggagttctgtgcagacaaaatccaaacaaaaaagaaaagttctacttgtggagcaaccaaacaagaaagctacgtggaagaatgctaattctgtcaggaacacatctacaaacaatagccggccattatctgcagatgatattcaaaaagcaaagatgcgtgccatgttcatgcaggagaagcgtggcaagattgacataaataaattgagtgataaaccacaagcaatggacacgaaaaaagcagctggattagtaaattcaaatccatcagctatgcccataagtccccatacgtcagctgcacaacctgttgacccaagcccatctacttcaaaacaaagcacagatcctcagcctgataatacagaaatttcaggtggtttgaagttaaacataggttccaaaaacaatgtcatagagaagttggattgcaagagagttctttggcaaataccaccagctgtatggatagacccctcgtggagtgtaggagctggtgacaacagcaaggagcttgaggttcaaacacagaggaaccggcgtgaaaaggaaaccttttatacaagccagaaggacgtcccaatgaatccaaaggacccatgggatctggaaatggacttcgatgacagcctgaccccagaggttccaattgaccaggtgccagatgtggacgccatggaaacggaaagcgttggcgcggcgcctagcgctgtggctcctgttaaggacaagcagattgaatctgcctcatcgacatcaggcgcagttgctgatgatgaggaagctaataccgattacgaattgcttacggtgctactcaggaacccggagcttgtctttgcattaacctctaacaagggggagaacatgcctaacgagcagaccattgcgcttctggatacactgaagcagaccggccttagcctatcagagcttgttaaccgtctggggaacggcgctgggctcccaaaagagccagagccggagccagaacctattcccgcttcgcttccgtcaccaactccgccagaccgtacatcaagggctgtctggataccagaacacgcaatgcaggtgagggctgctccaaccttgcatctgccaagccgggggagtacacctcctgttgcaaatgccgtgcaacaaggcttctcaaacgttgtcagttcgttaccctcacaaccttacgcccctccagtctcggtcttgccggcacagattcaagctaacgcacccccatctcttcctctgctggcggtctctgtaaacccgccagtccaacatgtttcccctgtgaataaccttctgaacagagcttcagtgcatcagcatggacagcagcaatacgctttgttgtctgaccctgttgccacgcccttgcatcaacaagcagcggggagcaaaccagctgtagcagcacatccgtcgttgcctgagcctaatgcatcatctcacacagcattcccttggcaatctaatgctgctgacatgacccacgctggacggaatgcgacggctgatccatgggccgccgcccgcgcagctaactcgtatagtacagcatcagcaagcacagtgccgtctgctaaccagaatgcttacggcgatcaaggcaagcagggtgcgtacagctcttatggatcttcggcagcctcgtcccgtcctgttgtaccagggcacgggcatgacagaaatggctacagccggtctgccctggtggagtacccatgggacgggcaccaccagcggcactcgaggtcaccagatcctggcgtggtccgggactacgacaccgactatggcggtgcgcagggctacagtcagcagcccctgacgcagtggagtgcagggaaagtgcagcagcagggctacaatcctgagccgtcaaggcagtggagttcttcccaggcgcaccagggcggctacgcacccgccgagccgtcgaggcagtggagttcttcccaggcgcaccagagctacgctcccgagctaccgaggcagtggagctccgaacgccgtggctacgatgatgcggagccctcgaggacatggagctccggccagcagaacccggaggcgccgaggcagtggagccgcgggaagcaggatccttactacagcccgagccatagccgaagatcgtacgatcagcaccggaggagatagcaaaagcttgctgtattactgctaccacattagctagatcctggatggaggcggtcggttcttgggagggtttgtttcatttgatttgatgtgaggccgggtattcgttgcatttgggctttgtgattgccaccacaagggccattgagaaaagctataggttattatgtatcgatgtagtttttgtctcgaaattaaaaaaaaaatgtatctatctaggtagctggagaggggaaagaagaagaaaaaatgaatgaatgaatgatataactcagggagggtcaagaggccccccggctcgaattgattgcagtcttgaatgctgagtcgaacggttggccaaatttgtcgtctgtgctcgtggttgtccactcaaggtccgtcaattctaggcgtgg

SEQ ID NO: 35528 - DNA, 4030 bp, Zea Mays
cgcctcctcatctcgttccgcctcctatcggcccagctccaaaccctagcccgccgccgtgctgactcccctagccaggcacgacgtcgaagagagcagcggcggaggcggcaacctgatgcccagccccccgtgggggccatggagctcgtcctcgtcaagcccgcggcaggagctctcgtcgaggtgggctccgggtccgttgccggcgcgggctcgatcccggcgatggtggcggcgcagcaggagattttgcacgaacaggtggaccagctccaacgcctcgtcgtcgctcagtgccgcctcaccggcgtcaaccccctcgcccaggagatggctgccggtgcattgtctatcaagataggtaagaggccaagggatctgttgaatccaaaagcagttaagtgcatgcagtcactttttgccttgaaggacattcttggcaaaaaagaaacccgagaaattagtttactctgtggggtcactgttacacaggttagggaattctttacagttcaacgatcgcgagtgagaaaatttgttcgtctgtctcaagaaaaagcgctgagaatagagacacccaaagagcaggacaattcatactccataaacactgagcagataccgccggacatagaagcacaagctgaagttattgaacctttgagaactttagaaccggtggtcctacagagctctttgcaaccaacgtgtgtccctcagatctcttcgcaatcaatggagctccaacaaagcgatttgcagcacatggaagtcttccaaaactctttgcaacaagcagaggcacaacataacattgcagctcctataatgccatctggagcaatggttatgcaaccaactgacgctaagattagttcagactctgttcaaaaggaagttaagcaagagggagttcattctggtgttgcgtcagaagataagaagttcttggaaagtatctttgctctaatgcagaaggaggaaacattctctgggcaggttaaattaatggaatggattctgcaaataaataatgttacagttcttagtaggttcgtaacaatgggtggtttgaccattatgtcaacatggttgagtcaagcagcaattgaagagcagacatcagttatccatgttattttcaagtccacatgtcagttgttctgcaaacaattaataagttgcgcttttatagaacacaagacatatcgagcagggctaggaacctcctctccagattgagcaaagtgcttgtaaggattcaggcattgaagaaacctcagaaggacttaatatgtaaacaaaggataagtgaaattctccgtgacgagtcttggaaatctgaagttgatattaccgaggaggtacttgctttgactgatggtgctaatgagagcagaaagcctgaacccagaaaaacaccaatgcttctcactgcttctgctattgagacaaataaaaggagttctgtgcagacaaaatccaaacaaaaaagaaaagttctacttgtggagcaaccaaacaagaaagctacgtggaagaatgctaattctgtcaggaacacatctacaaacaatagccggccattatctgcagatgatattcaaaaagcaaagatgcgtgccatgttcatgcaggagaagcgtggcaagattgacataaataaattgagtgataaaccacaagcaatggacacgaaaaaagcagctggattagtaaattcaaatccatcagctatgcccataagtccccatacgtcagctgcacaacctgttgacccaagcccatctacttcaaaacaaagcacagatcctcagcctgataatacagaaatttcaggtggtttgaagttaaacataggttccaaaaacaatgtcatagagaagttggattgcaagagagttctttggcaaataccaccagctgtatggatagacccctcgtggagtgtaggagctggtgacaacagcaaggagcttgaggttcaaacacagaggaaccggcgtgaaaaggaaaccttttatacaagccagaaggacgtcccaatgaatccaaaggacccatgggatctggaaatggacttcgatgacagcctgaccccagaggttccaattgaccaggtgccagatgtggacgccatggaaacggaaagcgttggcgcggcgcctagcgctgtggctcctgttaaggacaagcagattgaatctgcctcatcgacatcaggcgcagttgctgatgatgaggaagctaataccgattacgaattgcttacggtgctactcaggaacccggagcttgtctttgcattaacctctaacaagggggagaacatgcctaacgagcagaccattgcgcttctggatacactgaagcagaccggccttagcctatcagagcttgttaaccgtctggggaacggcgctgggctcccaaaagagccagagccggagccagaacctattcccgcttcgcttccgtcaccaactccgccagaccgtacatcaagggctgtctggataccagaacacgcaatgcaggtgagggctgctccaaccttgcatctgccaagccgggggagtacacctcctgttgcaaatgccgtgcaacaaggcttctcaaacgttgtcagttcgttaccctcacaaccttacgcccctccagtctcggtcttgccggcacagattcaagctaacgcacccccatctcttcctctgctggcggtctctgtaaacccgccagtccaacatgtttcccctgtgaataaccttctgaacagagcttcagtgcatcagcatggacagcagcaatacgctttgttgtctgaccctgttgccacgcccttgcatcaacaagcagcggggagcaaaccagctgtagcagcacatccgtcgttgcctgagcctaatgcatcatctcacacagcattcccttggcaatctaatgctgctgacatgacccacgctggacggaatgcgacggctgatccatgggccgccgcccgcgcagctaactcgtatagtacagcatcagcaagcacagtgccgtctgctaaccagaatgcttacggcgatcaaggcaagcagggtgcgtacagctcttatggatcttcggcagcctcgtcccgtcctgttgtaccagggcacgggcatgacagaaatggctacagccggtctgccctggtggagtacccatgggacgggcaccaccagcggcactcgaggtcaccagatcctggcgtggtccgggactacgacaccgactatggcggtgcgcagggctacagtcagcagcccctgacgcagtggagtgcagggaaagtgcagcagcagggctacaatcctgagccgtcaaggcagtggagttcttcccaggcgcaccagggcggctacgcacccgccgagccgtcgaggcagtggagttcttcccaggcgcaccagagctacgctcccgagctaccgaggcagtggagctccgaacgccgtggctacgatgatgcggagccctcgaggacatggagctccggccagcagaacccggaggcgccgaggcagtggagccgcgggaagcaggatccttactacagcccgagccatagccgaagatcgtacgatcagcaccggaggagatagcaaaagcttgctgtattactgctaccacattagctagatcctggatggaggcggtcggttcttgggagggtttgtttcatttgatttgatgtgaggccgggtattcgttgcatttgggctttgtgattgccaccacaagggccattgagaaaagctataggttattatgtatcgatgtagtttttgtctcgaaattaaaaaaaaaatgtatctatctaggtagctggagaggggaaagaagaagaaaaaatgaatgaatgaatgatataactcagggagggtcaagaggccccccggctcgaattgattgcagtcttgaatgctgagtcgaacggttggccaaatttgtcgtctgtgctcgtggttgtccactcaaggtccgtcaattctaggcgtgg

SEQ ID NO: 35529 - DNA, 4092 bp, Zea Mays
ctcgtctccctcgcctcctcatctcgttccgcctcctatcggcccagctccaaaccctagcccgccgccgtgctgactcccctagccaggcacgacgtcgaagagagcagcggcggaggcggcaacctgatgcccagccccccgtgggggccatggagctcgtcctcgtcaagcccgcggcaggagctctcgtcgaggtgggctccgggtccgttgccggcgcgggctcgatcccggcgatggtggcggcgcagcaggagattttgcacgaacaggtggaccagctccaacgcctcgtcgtcgctcagtgccgcctcaccggcgtcaaccccctcgcccaggagatggctgccggtgcattgtctatcaagatagttaaagttctgcaggtaagaggccaagggatctgttgaatccaaaagcagttaagtgcatgcagtcactttttgccttgaaggacattcttggcaaaaaagaaacccgagaaattagtttactctgtggggtcactgttacacaggttagggaattctttacagttcaacgatcgcgagtgagaaaatttgttcgtctgtctcaagaaaaagcgctgagaatagagacacccaaagagcaggacaattcatactccataaacactgagcagataccgccggacatagaagcacaagctgaagttattgaacctttgagaactttagaaccggtggtcctacagagctctttgcaaccaacgtgtgtccctcagatctcttcgcaatcaatggagctccaacaaagcgatttgcagcacatggaagtcttccaaaactctttgcaacaagcagaggcacaacataacattgcagctcctataatgccatctggagcaatggttatgcaaccaactgacgctaagattagttcagactctgttcaaaaggaagttaagcaagagggagttcattctggtgttgcgtcagaagataagaagttcttggaaagtatctttgctctaatgcagaaggaggaaacattctctgggcaggttaaattaatggaatggattctgcaaataaataatgttacagttcttagtaggttcgtaacaatgggtggtttgaccattatgtcaacatggttgagtcaagcagcaattgaagagcagacatcagttatccatgttattttcaaggtgctgctccaccttccgttgcataaggctttaccagtccacatgtcagttgttctgcaaacaattaataagttgcgcttttatagaacacaagacatatcgagcagggctaggaacctcctctccagattgagcaaagtgcttgtaaggattcaggcattgaagaaacctcagaaggacttaatatgtaaacaaaggataagtgaaattctccgtgacgagtcttggaaatctgaagttgatattaccgaggaggtacttgctttgactgatggtgctaatgagagcagaaagcctgaacccagaaaaacaccaatgcttctcactgcttctgctattgagacaaataaaaggagttctgtgcagacaaaatccaaacaaaaaagaaaagttctacttgtggagcaaccaaacaagaaagctacgtggaagaatgctaattctgtcaggaacacatctacaaacaatagccggccattatctgcagatgatattcaaaaagcaaagatgcgtgccatgttcatgcaggagaagcgtggcaagattgacataaataaattgagtgataaaccacaagcaatggacacgaaaaaagcagctggattagtaaattcaaatccatcagctatgcccataagtccccatacgtcagctgcacaacctgttgacccaagcccatctacttcaaaacaaagcacagatcctcagcctgataatacagaaatttcaggtggtttgaagttaaacataggttccaaaaacaatgtcatagagaagttggattgcaagagagttctttggcaaataccaccagctgtatggatagacccctcgtggagtgtaggagctggtgacaacagcaaggagcttgaggttcaaacacagaggaaccggcgtgaaaaggaaaccttttatacaagccagaaggacgtcccaatgaatccaaaggacccatgggatctggaaatggacttcgatgacagcctgaccccagaggttccaattgaccaggtgccagatgtggacgccatggaaacggaaagcgttggcgcggcgcctagcgctgtggctcctgttaaggacaagcagattgaatctgcctcatcgacatcaggcgcagttgctgatgatgaggaagctaataccgattacgaattgcttacggtgctactcaggaacccggagcttgtctttgcattaacctctaacaagggggagaacatgcctaacgagcagaccattgcgcttctggatacactgaagcagaccggccttagcctatcagagcttgttaaccgtctggggaacggcgctgggctcccaaaagagccagagccggagccagaacctattcccgcttcgcttccgtcaccaactccgccagaccgtacatcaagggctgtctggataccagaacacgcaatgcaggtgagggctgctccaaccttgcatctgccaagccgggggagtacacctcctgttgcaaatgccgtgcaacaaggcttctcaaacgttgtcagttcgttaccctcacaaccttacgcccctccagtctcggtcttgccggcacagattcaagctaacgcacccccatctcttcctctgctggcggtctctgtaaacccgccagtccaacatgtttcccctgtgaataaccttctgaacagagcttcagtgcatcagcatggacagcagcaatacgctttgttgtctgaccctgttgccacgcccttgcatcaacaagcagcggggagcaaaccagctgtagcagcacatccgtcgttgcctgagcctaatgcatcatctcacacagcattcccttggcaatctaatgctgctgacatgacccacgctggacggaatgcgacggctgatccatgggccgccgcccgcgcagctaactcgtatagtacagcatcagcaagcacagtgccgtctgctaaccagaatgcttacggcgatcaaggcaagcagggtgcgtacagctcttatggatcttcggcagcctcgtcccgtcctgttgtaccagggcacgggcatgacagaaatggctacagccggtctgccctggtggagtacccatgggacgggcaccaccagcggcactcgaggtcaccagatcctggcgtggtccgggactacgacaccgactatggcggtgcgcagggctacagtcagcagcccctgacgcagtggagtgcagggaaagtgcagcagcagggctacaatcctgagccgtcaaggcagtggagttcttcccaggcgcaccagggcggctacgcacccgccgagccgtcgaggcagtggagttcttcccaggcgcaccagagctacgctcccgagctaccgaggcagtggagctccgaacgccgtggctacgatgatgcggagccctcgaggacatggagctccggccagcagaacccggaggcgccgaggcagtggagccgcgggaagcaggatccttactacagcccgagccatagccgaagatcgtacgatcagcaccggaggagatagcaaaagcttgctgtattactgctaccacattagctagatcctggatggaggcggtcggttcttgggagggtttgtttcatttgatttgatgtgaggccgggtattcgttgcatttgggctttgtgattgccaccacaagggccattgagaaaagctataggttattatgtatcgatgtagtttttgtctcgaaattaaaaaaaaaatgtatctatctaggtagctggagaggggaaagaagaagaaaaaatgaatgaatgaatgatataactcagggagggtcaagaggccccccggctcgaattgattgcagtcttgaatgctgagtcgaacggttggccaaatttgtcgtctgtgctcgtggttgtccactcaaggtccgtcaattctaggcgtgg

SEQ ID NO: 35530 - DNA, 4081 bp, Zea Mays
atctcgtctccctcgcctcctcatctcgttccgcctcctatcggcccagctccaaaccctagcccgccgccgtgctgactcccctagccaggcacgacgtcgaagagagcagcggcggaggcggcaacctgatgcccagccccccgtgggggccatggagctcgtcctcgtcaagcccgcggcaggagctctcgtcgaggtgggctccgggtccgttgccggcgcgggctcgatcccggcgatggtggcggcgcagcaggagattttgcacgaacaggtggaccagctccaacgcctcgtcgtcgctcagtgccgcctcaccggcgtcaaccccctcgcccaggagatggctgccggtgcattgtctatcaagatagttaaagttctgcaggtaagaggccaagggatctgttgaatccaaaagcagttaagtgcatgcagtcactttttgccttgaaggacattcttggcaaaaaagaaacccgagaaattagtttactctgtggggtcactgttacacaggttagggaattctttacagttcaacgatcgcgagtgagaaaatttgttcgtctgtctcaagaaaaagcgctgagaatagagacacccaaagagcaggacaattcatactccataaacactgagcagataccgccggacatagaagcacaagctgaagttattgaacctttgagaactttagaaccggtggtcctacagagctctttgcaaccaacgtgtgtccctcagatctcttcgcaatcaatggagctccaacaaagcgatttgcagcacatggaagtcttccaaaactctttgcaacaagcagaggcacaacataacattgcagctcctataatgccatctggagcaatggttatgcaaccaactgacgctaagattagttcagactctgttcaaaaggaagttaagcaagagggagttcattctggtgttgcgtcagaagataagaagttcttggaaagtatctttgctctaatgcagaaggaggaaacattctctgggcaggttaaattaatggaatggattctgcaaataaataatgttacagttcttagtaggttcgtaacaatgggtggtttgaccattatgtcaacatggttgagtcaagcagcaattgaagagcagacatcagttatccatgttattttcaaggtgctgctccaccttccgttgcataaggctttaccagtccacatgtcagttgttctgcaaacaattaataagttgcgcttttatagaacacaagggctaggaacctcctctccagattgagcaaagtgcttgtaaggattcaggcattgaagaaacctcagaaggacttaatatgtaaacaaaggataagtgaaattctccgtgacgagtcttggaaatctgaagttgatattaccgaggaggtacttgctttgactgatggtgctaatgagagcagaaagcctgaacccagaaaaacaccaatgcttctcactgcttctgctattgagacaaataaaaggagttctgtgcagacaaaatccaaacaaaaaagaaaagttctacttgtggagcaaccaaacaagaaagctacgtggaagaatgctaattctgtcaggaacacatctacaaacaatagccggccattatctgcagatgatattcaaaaagcaaagatgcgtgccatgttcatgcaggagaagcgtggcaagattgacataaataaattgagtgataaaccacaagcaatggacacgaaaaaagcagctggattagtaaattcaaatccatcagctatgcccataagtccccatacgtcagctgcacaacctgttgacccaagcccatctacttcaaaacaaagcacagatcctcagcctgataatacagaaatttcaggtggtttgaagttaaacataggttccaaaaacaatgtcatagagaagttggattgcaagagagttctttggcaaataccaccagctgtatggatagacccctcgtggagtgtaggagctggtgacaacagcaaggagcttgaggttcaaacacagaggaaccggcgtgaaaaggaaaccttttatacaagccagaaggacgtcccaatgaatccaaaggacccatgggatctggaaatggacttcgatgacagcctgaccccagaggttccaattgaccaggtgccagatgtggacgccatggaaacggaaagcgttggcgcggcgcctagcgctgtggctcctgttaaggacaagcagattgaatctgcctcatcgacatcaggcgcagttgctgatgatgaggaagctaataccgattacgaattgcttacggtgctactcaggaacccggagcttgtctttgcattaacctctaacaagggggagaacatgcctaacgagcagaccattgcgcttctggatacactgaagcagaccggccttagcctatcagagcttgttaaccgtctggggaacggcgctgggctcccaaaagagccagagccggagccagaacctattcccgcttcgcttccgtcaccaactccgccagaccgtacatcaagggctgtctggataccagaacacgcaatgcaggtgagggctgctccaaccttgcatctgccaagccgggggagtacacctcctgttgcaaatgccgtgcaacaaggcttctcaaacgttgtcagttcgttaccctcacaaccttacgcccctccagtctcggtcttgccggcacagattcaagctaacgcacccccatctcttcctctgctggcggtctctgtaaacccgccagtccaacatgtttcccctgtgaataaccttctgaacagagcttcagtgcatcagcatggacagcagcaatacgctttgttgtctgaccctgttgccacgcccttgcatcaacaagcagcggggagcaaaccagctgtagcagcacatccgtcgttgcctgagcctaatgcatcatctcacacagcattcccttggcaatctaatgctgctgacatgacccacgctggacggaatgcgacggctgatccatgggccgccgcccgcgcagctaactcgtatagtacagcatcagcaagcacagtgccgtctgctaaccagaatgcttacggcgatcaaggcaagcagggtgcgtacagctcttatggatcttcggcagcctcgtcccgtcctgttgtaccagggcacgggcatgacagaaatggctacagccggtctgccctggtggagtacccatgggacgggcaccaccagcggcactcgaggtcaccagatcctggcgtggtccgggactacgacaccgactatggcggtgcgcagggctacagtcagcagcccctgacgcagtggagtgcagggaaagtgcagcagcagggctacaatcctgagccgtcaaggcagtggagttcttcccaggcgcaccagggcggctacgcacccgccgagccgtcgaggcagtggagttcttcccaggcgcaccagagctacgctcccgagctaccgaggcagtggagctccgaacgccgtggctacgatgatgcggagccctcgaggacatggagctccggccagcagaacccggaggcgccgaggcagtggagccgcgggaagcaggatccttactacagcccgagccatagccgaagatcgtacgatcagcaccggaggagatagcaaaagcttgctgtattactgctaccacattagctagatcctggatggaggcggtcggttcttgggagggtttgtttcatttgatttgatgtgaggccgggtattcgttgcatttgggctttgtgattgccaccacaagggccattgagaaaagctataggttattatgtatcgatgtagtttttgtctcgaaattaaaaaaaaaatgtatctatctaggtagctggagaggggaaagaagaagaaaaaatgaatgaatgaatgatataactcagggagggtcaagaggccccccggctcgaattgattgcagtcttgaatgctgagtcgaacggttggccaaatttgtcgtctgtgctcgtggttgtccactcaaggtccgtcaattctaggcgtgg

SEQ ID NO: 35531 - DNA, 4113 bp, Zea Mays
ctcgactctttccatctcgtctccctcgcctcctcatctcgttccgcctcctatcggcccagctccaaaccctagcccgccgccgtgctgactcccctagccaggcacgacgtcgaagagagcagcggcggaggcggcaacctgatgcccagccccccgtgggggccatggagctcgtcctcgtcaagcccgcggcaggagctctcgtcgaggtgggctccgggtccgttgccggcgcgggctcgatcccggcgatggtggcggcgcagcaggagattttgcacgaacaggtggaccagctccaacgcctcgtcgtcgctcagtgccgcctcaccggcgtcaaccccctcgcccaggagatggctgccggtgcattgtctatcaagataggtaagaggccaagggatctgttgaatccaaaagcagttaagtgcatgcagtcactttttgccttgaaggacattcttggcaaaaaagaaacccgagaaattagtttactctgtggggtcactgttacacaggttagggaattctttacagttcaacgatcgcgagtgagaaaatttgttcgtctgtctcaagaaaaagcgctgagaatagagacacccaaagagcaggacaattcatactccataaacactgagcagataccgccggacatagaagcacaagctgaagttattgaacctttgagaactttagaaccggtggtcctacagagctctttgcaaccaacgtgtgtccctcagatctcttcgcaatcaatggagctccaacaaagcgatttgcagcacatggaagtcttccaaaactctttgcaacaagcagaggcacaacataacattgcagctcctataatgccatctggagcaatggttatgcaaccaactgacgctaagattagttcagactctgttcaaaaggaagttaagcaagagggagttcattctggtgttgcgtcagaagataagaagttcttggaaagtatctttgctctaatgcagaaggaggaaacattctctgggcaggttaaattaatggaatggattctgcaaataaataatgttacagttcttagtaggttcgtaacaatgggtggtttgaccattatgtcaacatggttgagtcaagcagcaattgaagagcagacatcagttatccatgttattttcaaggtgctgctccaccttccgttgcataaggctttaccagtccacatgtcagttgttctgcaaacaattaataagttgcgcttttatagaacacaagacatatcgagcagggctaggaacctcctctccagattgagcaaagtgcttgtaaggattcaggcattgaagaaacctcagaaggacttaatatgtaaacaaagttttatattttcttttgcaggataagtgaaattctccgtgacgagtcttggaaatctgaagttgatattaccgaggaggtacttgctttgactgatggtgctaatgagagcagaaagcctgaacccagaaaaacaccaatgcttctcactgcttctgctattgagacaaataaaaggagttctgtgcagacaaaatccaaacaaaaaagaaaagttctacttgtggagcaaccaaacaagaaagctacgtggaagaatgctaattctgtcaggaacacatctacaaacaatagccggccattatctgcagatgatattcaaaaagcaaagatgcgtgccatgttcatgcaggagaagcgtggcaagattgacataaataaattgagtgataaaccacaagcaatggacacgaaaaaagcagctggattagtaaattcaaatccatcagctatgcccataagtccccatacgtcagctgcacaacctgttgacccaagcccatctacttcaaaacaaagcacagatcctcagcctgataatacagaaatttcaggtggtttgaagttaaacataggttccaaaaacaatgtcatagagaagttggattgcaagagagttctttggcaaataccaccagctgtatggatagacccctcgtggagtgtaggagctggtgacaacagcaaggagcttgaggttcaaacacagaggaaccggcgtgaaaaggaaaccttttatacaagccagaaggacgtcccaatgaatccaaaggacccatgggatctggaaatggacttcgatgacagcctgaccccagaggttccaattgaccaggtgccagatgtggacgccatggaaacggaaagcgttggcgcggcgcctagcgctgtggctcctgttaaggacaagcagattgaatctgcctcatcgacatcaggcgcagttgctgatgatgaggaagctaataccgattacgaattgcttacggtgctactcaggaacccggagcttgtctttgcattaacctctaacaagggggagaacatgcctaacgagcagaccattgcgcttctggatacactgaagcagaccggccttagcctatcagagcttgttaaccgtctggggaacggcgctgggctcccaaaagagccagagccggagccagaacctattcccgcttcgcttccgtcaccaactccgccagaccgtacatcaagggctgtctggataccagaacacgcaatgcaggtgagggctgctccaaccttgcatctgccaagccgggggagtacacctcctgttgcaaatgccgtgcaacaaggcttctcaaacgttgtcagttcgttaccctcacaaccttacgcccctccagtctcggtcttgccggcacagattcaagctaacgcacccccatctcttcctctgctggcggtctctgtaaacccgccagtccaacatgtttcccctgtgaataaccttctgaacagagcttcagtgcatcagcatggacagcagcaatacgctttgttgtctgaccctgttgccacgcccttgcatcaacaagcagcggggagcaaaccagctgtagcagcacatccgtcgttgcctgagcctaatgcatcatctcacacagcattcccttggcaatctaatgctgctgacatgacccacgctggacggaatgcgacggctgatccatgggccgccgcccgcgcagctaactcgtatagtacagcatcagcaagcacagtgccgtctgctaaccagaatgcttacggcgatcaaggcaagcagggtgcgtacagctcttatggatcttcggcagcctcgtcccgtcctgttgtaccagggcacgggcatgacagaaatggctacagccggtctgccctggtggagtacccatgggacgggcaccaccagcggcactcgaggtcaccagatcctggcgtggtccgggactacgacaccgactatggcggtgcgcagggctacagtcagcagcccctgacgcagtggagtgcagggaaagtgcagcagcagggctacaatcctgagccgtcaaggcagtggagttcttcccaggcgcaccagggcggctacgcacccgccgagccgtcgaggcagtggagttcttcccaggcgcaccagagctacgctcccgagctaccgaggcagtggagctccgaacgccgtggctacgatgatgcggagccctcgaggacatggagctccggccagcagaacccggaggcgccgaggcagtggagccgcgggaagcaggatccttactacagcccgagccatagccgaagatcgtacgatcagcaccggaggagatagcaaaagcttgctgtattactgctaccacattagctagatcctggatggaggcggtcggttcttgggagggtttgtttcatttgatttgatgtgaggccgggtattcgttgcatttgggctttgtgattgccaccacaagggccattgagaaaagctataggttattatgtatcgatgtagtttttgtctcgaaattaaaaaaaaaatgtatctatctaggtagctggagaggggaaagaagaagaaaaaatgaatgaatgaatgatataactcagggagggtcaagaggccccccggctcgaattgattgcagtcttgaatgctgagtcgaacggttggccaaatttgtcgtctgtgctcgtggttgtccactcaaggtccgtcaattctaggcgtgg

SEQ ID NO: 35532 - DNA, 4124 bp, Zea Mays
aaaaaccctgtccttgtctcccacctcgactctttccatctcgtctccctcgcctcctcatctcgttccgcctcctatcggcccagctccaaaccctagcccgccgccgtgctgactcccctagccaggcacgacgtcgaagagagcagcggcggaggcggcaacctgatgcccagccccccgtgggggccatggagctcgtcctcgtcaagcccgcggcaggagctctcgtcgaggtgggctccgggtccgttgccggcgcgggctcgatcccggcgatggtggcggcgcagcaggagattttgcacgaacaggtggaccagctccaacgcctcgtcgtcgctcagtgccgcctcaccggcgtcaaccccctcgcccaggagatggctgccggtgcattgtctatcaagataggtaagaggccaagggatctgttgaatccaaaagcagttaagtgcatgcagtcactttttgccttgaaggacattcttggcaaaaaagaaacccgagaaattagtttactctgtggggtcactgttacacaggttagggaattctttacagttcaacgatcgcgagtgagaaaatttgttcgtctgtctcaagaaaaagcgctgagaatagagacacccaaagagcaggacaattcatactccataaacactgagcagataccgccggacatagaagcacaagctgaagttattgaacctttgagaactttagaaccggtggtcctacagagctctttgcaaccaacgtgtgtccctcagatctcttcgcaatcaatggagctccaacaaagcgatttgcagcacatggaagtcttccaaaactctttgcaacaagcagaggcacaacataacattgcagctcctataatgccatctggagcaatggttatgcaaccaactgacgctaagattagttcagactctgttcaaaaggaagttaagcaagagggagttcattctggtgttgcgtcagaagataagaagttcttggaaagtatctttgctctaatgcagaaggaggaaacattctctgggcaggttaaattaatggaatggattctgcaaataaataatgttacagttcttagtaggttcgtaacaatgggtggtttgaccattatgtcaacatggttgagtcaagcagcaattgaagagcagacatcagttatccatgttattttcaaggtgctgctccaccttccgttgcataaggctttaccagtccacatgtcagttgttctgcaaacaattaataagttgcgcttttatagaacacaagggctaggaacctcctctccagattgagcaaagtgcttgtaaggattcaggcattgaagaaacctcagaaggacttaatatgtaaacaaagttttatattttcttttgcaggataagtgaaattctccgtgacgagtcttggaaatctgaagttgatattaccgaggaggtacttgctttgactgatggtgctaatgagagcagaaagcctgaacccagaaaaacaccaatgcttctcactgcttctgctattgagacaaataaaaggagttctgtgcagacaaaatccaaacaaaaaagaaaagttctacttgtggagcaaccaaacaagaaagctacgtggaagaatgctaattctgtcaggaacacatctacaaacaatagccggccattatctgcagatgatattcaaaaagcaaagatgcgtgccatgttcatgcaggagaagcgtggcaagattgacataaataaattgagtgataaaccacaagcaatggacacgaaaaaagcagctggattagtaaattcaaatccatcagctatgcccataagtccccatacgtcagctgcacaacctgttgacccaagcccatctacttcaaaacaaagcacagatcctcagcctgataatacagaaatttcaggtggtttgaagttaaacataggttccaaaaacaatgtcatagagaagttggattgcaagagagttctttggcaaataccaccagctgtatggatagacccctcgtggagtgtaggagctggtgacaacagcaaggagcttgaggttcaaacacagaggaaccggcgtgaaaaggaaaccttttatacaagccagaaggacgtcccaatgaatccaaaggacccatgggatctggaaatggacttcgatgacagcctgaccccagaggttccaattgaccaggtgccagatgtggacgccatggaaacggaaagcgttggcgcggcgcctagcgctgtggctcctgttaaggacaagcagattgaatctgcctcatcgacatcaggcgcagttgctgatgatgaggaagctaataccgattacgaattgcttacggtgctactcaggaacccggagcttgtctttgcattaacctctaacaagggggagaacatgcctaacgagcagaccattgcgcttctggatacactgaagcagaccggccttagcctatcagagcttgttaaccgtctggggaacggcgctgggctcccaaaagagccagagccggagccagaacctattcccgcttcgcttccgtcaccaactccgccagaccgtacatcaagggctgtctggataccagaacacgcaatgcaggtgagggctgctccaaccttgcatctgccaagccgggggagtacacctcctgttgcaaatgccgtgcaacaaggcttctcaaacgttgtcagttcgttaccctcacaaccttacgcccctccagtctcggtcttgccggcacagattcaagctaacgcacccccatctcttcctctgctggcggtctctgtaaacccgccagtccaacatgtttcccctgtgaataaccttctgaacagagcttcagtgcatcagcatggacagcagcaatacgctttgttgtctgaccctgttgccacgcccttgcatcaacaagcagcggggagcaaaccagctgtagcagcacatccgtcgttgcctgagcctaatgcatcatctcacacagcattcccttggcaatctaatgctgctgacatgacccacgctggacggaatgcgacggctgatccatgggccgccgcccgcgcagctaactcgtatagtacagcatcagcaagcacagtgccgtctgctaaccagaatgcttacggcgatcaaggcaagcagggtgcgtacagctcttatggatcttcggcagcctcgtcccgtcctgttgtaccagggcacgggcatgacagaaatggctacagccggtctgccctggtggagtacccatgggacgggcaccaccagcggcactcgaggtcaccagatcctggcgtggtccgggactacgacaccgactatggcggtgcgcagggctacagtcagcagcccctgacgcagtggagtgcagggaaagtgcagcagcagggctacaatcctgagccgtcaaggcagtggagttcttcccaggcgcaccagggcggctacgcacccgccgagccgtcgaggcagtggagttcttcccaggcgcaccagagctacgctcccgagctaccgaggcagtggagctccgaacgccgtggctacgatgatgcggagccctcgaggacatggagctccggccagcagaacccggaggcgccgaggcagtggagccgcgggaagcaggatccttactacagcccgagccatagccgaagatcgtacgatcagcaccggaggagatagcaaaagcttgctgtattactgctaccacattagctagatcctggatggaggcggtcggttcttgggagggtttgtttcatttgatttgatgtgaggccgggtattcgttgcatttgggctttgtgattgccaccacaagggccattgagaaaagctataggttattatgtatcgatgtagtttttgtctcgaaattaaaaaaaaaatgtatctatctaggtagctggagaggggaaagaagaagaaaaaatgaatgaatgaatgatataactcagggagggtcaagaggccccccggctcgaattgattgcagtcttgaatgctgagtcgaacggttggccaaatttgtcgtctgtgctcgtggttgtccactcaaggtccgtcaattctaggcgtgg

SEQ ID NO: 35533 - DNA, 4091 bp, Zea Mays
aaaaaaccctgtccttgtctcccacctcgactctttccatctcgtctccctcgcctcctcatctcgttccgcctcctatcggcccagctccaaaccctagcccgccgccgtgctgactcccctagccaggcacgacgtcgaagagagcagcggcggaggcggcaacctgatgcccagccccccgtgggggccatggagctcgtcctcgtcaagcccgcggcaggagctctcgtcgaggtgggctccgggtccgttgccggcgcgggctcgatcccggcgatggtggcggcgcagcaggagattttgcacgaacaggtggaccagctccaacgcctcgtcgtcgctcagtgccgcctcaccggcgtcaaccccctcgcccaggagatggctgccggtgcattgtctatcaagataggtaagaggccaagggatctgttgaatccaaaagcagttaagtgcatgcagtcactttttgccttgaaggacattcttggcaaaaaagaaacccgagaaattagtttactctgtggggtcactgttacacaggttagggaattctttacagttcaacgatcgcgagtgagaaaatttgttcgtctgtctcaagaaaaagcgctgagaatagagacacccaaagagcaggacaattcatactccataaacactgagcagataccgccggacatagaagcacaagctgaagttattgaacctttgagaactttagaaccggtggtcctacagagctctttgcaaccaacgtgtgtccctcagatctcttcgcaatcaatggagctccaacaaagcgatttgcagcacatggaagtcttccaaaactctttgcaacaagcagaggcacaacataacattgcagctcctataatgccatctggagcaatggttatgcaaccaactgacgctaagattagttcagactctgttcaaaaggaagttaagcaagagggagttcattctggtgttgcgtcagaagataagaagttcttggaaagtatctttgctctaatgcagaaggaggaaacattctctgggcaggttaaattaatggaatggattctgcaaataaataatgttacagttcttagtaggttcgtaacaatgggtggtttgaccattatgtcaacatggttgagtcaagcagcaattgaagagcagacatcagttatccatgttattttcaaggctttaccagtccacatgtcagttgttctgcaaacaattaataagttgcgcttttatagaacacaagacatatcgagcagggctaggaacctcctctccagattgagcaaagtgcttgtaaggattcaggcattgaagaaacctcagaaggacttaatatgtaaacaaaggataagtgaaattctccgtgacgagtcttggaaatctgaagttgatattaccgaggaggtacttgctttgactgatggtgctaatgagagcagaaagcctgaacccagaaaaacaccaatgcttctcactgcttctgctattgagacaaataaaaggagttctgtgcagacaaaatccaaacaaaaaagaaaagttctacttgtggagcaaccaaacaagaaagctacgtggaagaatgctaattctgtcaggaacacatctacaaacaatagccggccattatctgcagatgatattcaaaaagcaaagatgcgtgccatgttcatgcaggagaagcgtggcaagattgacataaataaattgagtgataaaccacaagcaatggacacgaaaaaagcagctggattagtaaattcaaatccatcagctatgcccataagtccccatacgtcagctgcacaacctgttgacccaagcccatctacttcaaaacaaagcacagatcctcagcctgataatacagaaatttcaggtggtttgaagttaaacataggttccaaaaacaatgtcatagagaagttggattgcaagagagttctttggcaaataccaccagctgtatggatagacccctcgtggagtgtaggagctggtgacaacagcaaggagcttgaggttcaaacacagaggaaccggcgtgaaaaggaaaccttttatacaagccagaaggacgtcccaatgaatccaaaggacccatgggatctggaaatggacttcgatgacagcctgaccccagaggttccaattgaccaggtgccagatgtggacgccatggaaacggaaagcgttggcgcggcgcctagcgctgtggctcctgttaaggacaagcagattgaatctgcctcatcgacatcaggcgcagttgctgatgatgaggaagctaataccgattacgaattgcttacggtgctactcaggaacccggagcttgtctttgcattaacctctaacaagggggagaacatgcctaacgagcagaccattgcgcttctggatacactgaagcagaccggccttagcctatcagagcttgttaaccgtctggggaacggcgctgggctcccaaaagagccagagccggagccagaacctattcccgcttcgcttccgtcaccaactccgccagaccgtacatcaagggctgtctggataccagaacacgcaatgcaggtgagggctgctccaaccttgcatctgccaagccgggggagtacacctcctgttgcaaatgccgtgcaacaaggcttctcaaacgttgtcagttcgttaccctcacaaccttacgcccctccagtctcggtcttgccggcacagattcaagctaacgcacccccatctcttcctctgctggcggtctctgtaaacccgccagtccaacatgtttcccctgtgaataaccttctgaacagagcttcagtgcatcagcatggacagcagcaatacgctttgttgtctgaccctgttgccacgcccttgcatcaacaagcagcggggagcaaaccagctgtagcagcacatccgtcgttgcctgagcctaatgcatcatctcacacagcattcccttggcaatctaatgctgctgacatgacccacgctggacggaatgcgacggctgatccatgggccgccgcccgcgcagctaactcgtatagtacagcatcagcaagcacagtgccgtctgctaaccagaatgcttacggcgatcaaggcaagcagggtgcgtacagctcttatggatcttcggcagcctcgtcccgtcctgttgtaccagggcacgggcatgacagaaatggctacagccggtctgccctggtggagtacccatgggacgggcaccaccagcggcactcgaggtcaccagatcctggcgtggtccgggactacgacaccgactatggcggtgcgcagggctacagtcagcagcccctgacgcagtggagtgcagggaaagtgcagcagcagggctacaatcctgagccgtcaaggcagtggagttcttcccaggcgcaccagggcggctacgcacccgccgagccgtcgaggcagtggagttcttcccaggcgcaccagagctacgctcccgagctaccgaggcagtggagctccgaacgccgtggctacgatgatgcggagccctcgaggacatggagctccggccagcagaacccggaggcgccgaggcagtggagccgcgggaagcaggatccttactacagcccgagccatagccgaagatcgtacgatcagcaccggaggagatagcaaaagcttgctgtattactgctaccacattagctagatcctggatggaggcggtcggttcttgggagggtttgtttcatttgatttgatgtgaggccgggtattcgttgcatttgggctttgtgattgccaccacaagggccattgagaaaagctataggttattatgtatcgatgtagtttttgtctcgaaattaaaaaaaaaatgtatctatctaggtagctggagaggggaaagaagaagaaaaaatgaatgaatgaatgatataactcagggagggtcaagaggccccccggctcgaattgattgcagtcttgaatgctgagtcgaacggttggccaaatttgtcgtctgtgctcgtggttgtccactcaaggtccgtcaattctaggcgtgg

SEQ ID NO: 35534 - DNA, 4078 bp, Zea Mays
aaaaaaccctgtccttgtctcccacctcgactctttccatctcgtctccctcgcctcctcatctcgttccgcctcctatcggcccagctccaaaccctagcccgccgccgtgctgactcccctagccaggcacgacgtcgaagagagcagcggcggaggcggcaacctgatgcccagccccccgtgggggccatggagctcgtcctcgtcaagcccgcggcaggagctctcgtcgaggtgggctccgggtccgttgccggcgcgggctcgatcccggcgatggtggcggcgcagcaggagattttgcacgaacaggtggaccagctccaacgcctcgtcgtcgctcagtgccgcctcaccggcgtcaaccccctcgcccaggagatggctgccggtgcattgtctatcaagataggtaagaggccaagggatctgttgaatccaaaagcagttaagtgcatgcagtcactttttgccttgaaggacattcttggcaaaaaagaaacccgagaaattagtttactctgtggggtcactgttacacaggttagggaattctttacagttcaacgatcgcgagtgagaaaatttgttcgtctgtctcaagaaaaagcgctgagaatagagacacccaaagagcaggacaattcatactccataaacactgagcagataccgccggacatagaagcacaagctgaagttattgaacctttgagaactttagaaccggtggtcctacagagctctttgcaaccaacgtgtgtccctcagatctcttcgcaatcaatggagctccaacaaagcgatttgcagcacatggaagtcttccaaaactctttgcaacaagcagaggcacaacataacattgcagctcctataatgccatctggagcaatggttatgcaaccaactgacgctaagattagttcagactctgttcaaaaggaagttaagcaagagggagttcattctggtgttgcgtcagaagataagaagttcttggaaagtatctttgctctaatgcagaaggaggaaacattctctgggcaggttaaattaatggaatggattctgcaaataaataatgttacagttcttagtaggttcgtaacaatgggtggtttgaccattatgtcaacatggttgagtcaagcagcaattgaagagcagacatcagttatccatgttattttcaaggctttaccagtccacatgtcagttgttctgcaaacaattaataagttgcgcttttatagaacacaagggctaggaacctcctctccagattgagcaaagtgcttgtaaggattcaggcattgaagaaacctcagaaggacttaatatgtaaacaaaggataagtgaaattctccgtgacgagtcttggaaatctgaagttgatattaccgaggaggtacttgctttgactgatggtgctaatgagagcagaaagcctgaacccagaaaaacaccaatgcttctcactgcttctgctattgagacaaataaaaggagttctgtgcagacaaaatccaaacaaaaaagaaaagttctacttgtggagcaaccaaacaagaaagctacgtggaagaatgctaattctgtcaggaacacatctacaaacaatagccggccattatctgcagatgatattcaaaaagcaaagatgcgtgccatgttcatgcaggagaagcgtggcaagattgacataaataaattgagtgataaaccacaagcaatggacacgaaaaaagcagctggattagtaaattcaaatccatcagctatgcccataagtccccatacgtcagctgcacaacctgttgacccaagcccatctacttcaaaacaaagcacagatcctcagcctgataatacagaaatttcaggtggtttgaagttaaacataggttccaaaaacaatgtcatagagaagttggattgcaagagagttctttggcaaataccaccagctgtatggatagacccctcgtggagtgtaggagctggtgacaacagcaaggagcttgaggttcaaacacagaggaaccggcgtgaaaaggaaaccttttatacaagccagaaggacgtcccaatgaatccaaaggacccatgggatctggaaatggacttcgatgacagcctgaccccagaggttccaattgaccaggtgccagatgtggacgccatggaaacggaaagcgttggcgcggcgcctagcgctgtggctcctgttaaggacaagcagattgaatctgcctcatcgacatcaggcgcagttgctgatgatgaggaagctaataccgattacgaattgcttacggtgctactcaggaacccggagcttgtctttgcattaacctctaacaagggggagaacatgcctaacgagcagaccattgcgcttctggatacactgaagcagaccggccttagcctatcagagcttgttaaccgtctggggaacggcgctgggctcccaaaagagccagagccggagccagaacctattcccgcttcgcttccgtcaccaactccgccagaccgtacatcaagggctgtctggataccagaacacgcaatgcaggtgagggctgctccaaccttgcatctgccaagccgggggagtacacctcctgttgcaaatgccgtgcaacaaggcttctcaaacgttgtcagttcgttaccctcacaaccttacgcccctccagtctcggtcttgccggcacagattcaagctaacgcacccccatctcttcctctgctggcggtctctgtaaacccgccagtccaacatgtttcccctgtgaataaccttctgaacagagcttcagtgcatcagcatggacagcagcaatacgctttgttgtctgaccctgttgccacgcccttgcatcaacaagcagcggggagcaaaccagctgtagcagcacatccgtcgttgcctgagcctaatgcatcatctcacacagcattcccttggcaatctaatgctgctgacatgacccacgctggacggaatgcgacggctgatccatgggccgccgcccgcgcagctaactcgtatagtacagcatcagcaagcacagtgccgtctgctaaccagaatgcttacggcgatcaaggcaagcagggtgcgtacagctcttatggatcttcggcagcctcgtcccgtcctgttgtaccagggcacgggcatgacagaaatggctacagccggtctgccctggtggagtacccatgggacgggcaccaccagcggcactcgaggtcaccagatcctggcgtggtccgggactacgacaccgactatggcggtgcgcagggctacagtcagcagcccctgacgcagtggagtgcagggaaagtgcagcagcagggctacaatcctgagccgtcaaggcagtggagttcttcccaggcgcaccagggcggctacgcacccgccgagccgtcgaggcagtggagttcttcccaggcgcaccagagctacgctcccgagctaccgaggcagtggagctccgaacgccgtggctacgatgatgcggagccctcgaggacatggagctccggccagcagaacccggaggcgccgaggcagtggagccgcgggaagcaggatccttactacagcccgagccatagccgaagatcgtacgatcagcaccggaggagatagcaaaagcttgctgtattactgctaccacattagctagatcctggatggaggcggtcggttcttgggagggtttgtttcatttgatttgatgtgaggccgggtattcgttgcatttgggctttgtgattgccaccacaagggccattgagaaaagctataggttattatgtatcgatgtagtttttgtctcgaaattaaaaaaaaaatgtatctatctaggtagctggagaggggaaagaagaagaaaaaatgaatgaatgaatgatataactcagggagggtcaagaggccccccggctcgaattgattgcagtcttgaatgctgagtcgaacggttggccaaatttgtcgtctgtgctcgtggttgtccactcaaggtccgtcaattctaggcgtgg

SEQ ID NO: 35535 - DNA, 4086 bp, Zea Mays
aaaaaaccctgtccttgtctcccacctcgactctttccatctcgtctccctcgcctcctcatctcgttccgcctcctatcggcccagctccaaaccctagcccgccgccgtgctgactcccctagccaggcacgacgtcgaagagagcagcggcggaggcggcaacctgatgcccagccccccgtgggggccatggagctcgtcctcgtcaagcccgcggcaggagctctcgtcgaggtgggctccgggtccgttgccggcgcgggctcgatcccggcgatggtggcggcgcagcaggagattttgcacgaacaggtggaccagctccaacgcctcgtcgtcgctcagtgccgcctcaccggcgtcaaccccctcgcccaggagatggctgccggtgcattgtctatcaagataggtaagaggccaagggatctgttgaatccaaaagcagttaagtgcatgcagtcactttttgccttgaaggacattcttggcaaaaaagaaacccgagaaattagtttactctgtggggtcactgttacacagttcaacgatcgcgagtgagaaaatttgttcgtctgtctcaagaaaaagcgctgagaatagagacacccaaagagcaggacaattcatactccataaacactgagcagataccgccggacatagaagcacaagctgaagttattgaacctttgagaactttagaaccggtggtcctacagagctctttgcaaccaacgtgtgtccctcagatctcttcgcaatcaatggagctccaacaaagcgatttgcagcacatggaagtcttccaaaactctttgcaacaagcagaggcacaacataacattgcagctcctataatgccatctggagcaatggttatgcaaccaactgacgctaagattagttcagactctgttcaaaaggaagttaagcaagagggagttcattctggtgttgcgtcagaagataagaagttcttggaaagtatctttgctctaatgcagaaggaggaaacattctctgggcaggttaaattaatggaatggattctgcaaataaataatgttacagttcttagtaggttcgtaacaatgggtggtttgaccattatgtcaacatggttgagtcaagcagcaattgaagagcagacatcagttatccatgttattttcaaggtgctgctccaccttccgttgcataaggctttaccagtccacatgtcagttgttctgcaaacaattaataagttgcgcttttatagaacacaagggctaggaacctcctctccagattgagcaaagtgcttgtaaggattcaggcattgaagaaacctcagaaggacttaatatgtaaacaaaggataagtgaaattctccgtgacgagtcttggaaatctgaagttgatattaccgaggaggtacttgctttgactgatggtgctaatgagagcagaaagcctgaacccagaaaaacaccaatgcttctcactgcttctgctattgagacaaataaaaggagttctgtgcagacaaaatccaaacaaaaaagaaaagttctacttgtggagcaaccaaacaagaaagctacgtggaagaatgctaattctgtcaggaacacatctacaaacaatagccggccattatctgcagatgatattcaaaaagcaaagatgcgtgccatgttcatgcaggagaagcgtggcaagattgacataaataaattgagtgataaaccacaagcaatggacacgaaaaaagcagctggattagtaaattcaaatccatcagctatgcccataagtccccatacgtcagctgcacaacctgttgacccaagcccatctacttcaaaacaaagcacagatcctcagcctgataatacagaaatttcaggtggtttgaagttaaacataggttccaaaaacaatgtcatagagaagttggattgcaagagagttctttggcaaataccaccagctgtatggatagacccctcgtggagtgtaggagctggtgacaacagcaaggagcttgaggttcaaacacagaggaaccggcgtgaaaaggaaaccttttatacaagccagaaggacgtcccaatgaatccaaaggacccatgggatctggaaatggacttcgatgacagcctgaccccagaggttccaattgaccaggtgccagatgtggacgccatggaaacggaaagcgttggcgcggcgcctagcgctgtggctcctgttaaggacaagcagattgaatctgcctcatcgacatcaggcgcagttgctgatgatgaggaagctaataccgattacgaattgcttacggtgctactcaggaacccggagcttgtctttgcattaacctctaacaagggggagaacatgcctaacgagcagaccattgcgcttctggatacactgaagcagaccggccttagcctatcagagcttgttaaccgtctggggaacggcgctgggctcccaaaagagccagagccggagccagaacctattcccgcttcgcttccgtcaccaactccgccagaccgtacatcaagggctgtctggataccagaacacgcaatgcaggtgagggctgctccaaccttgcatctgccaagccgggggagtacacctcctgttgcaaatgccgtgcaacaaggcttctcaaacgttgtcagttcgttaccctcacaaccttacgcccctccagtctcggtcttgccggcacagattcaagctaacgcacccccatctcttcctctgctggcggtctctgtaaacccgccagtccaacatgtttcccctgtgaataaccttctgaacagagcttcagtgcatcagcatggacagcagcaatacgctttgttgtctgaccctgttgccacgcccttgcatcaacaagcagcggggagcaaaccagctgtagcagcacatccgtcgttgcctgagcctaatgcatcatctcacacagcattcccttggcaatctaatgctgctgacatgacccacgctggacggaatgcgacggctgatccatgggccgccgcccgcgcagctaactcgtatagtacagcatcagcaagcacagtgccgtctgctaaccagaatgcttacggcgatcaaggcaagcagggtgcgtacagctcttatggatcttcggcagcctcgtcccgtcctgttgtaccagggcacgggcatgacagaaatggctacagccggtctgccctggtggagtacccatgggacgggcaccaccagcggcactcgaggtcaccagatcctggcgtggtccgggactacgacaccgactatggcggtgcgcagggctacagtcagcagcccctgacgcagtggagtgcagggaaagtgcagcagcagggctacaatcctgagccgtcaaggcagtggagttcttcccaggcgcaccagggcggctacgcacccgccgagccgtcgaggcagtggagttcttcccaggcgcaccagagctacgctcccgagctaccgaggcagtggagctccgaacgccgtggctacgatgatgcggagccctcgaggacatggagctccggccagcagaacccggaggcgccgaggcagtggagccgcgggaagcaggatccttactacagcccgagccatagccgaagatcgtacgatcagcaccggaggagatagcaaaagcttgctgtattactgctaccacattagctagatcctggatggaggcggtcggttcttgggagggtttgtttcatttgatttgatgtgaggccgggtattcgttgcatttgggctttgtgattgccaccacaagggccattgagaaaagctataggttattatgtatcgatgtagtttttgtctcgaaattaaaaaaaaaatgtatctatctaggtagctggagaggggaaagaagaagaaaaaatgaatgaatgaatgatataactcagggagggtcaagaggccccccggctcgaattgattgcagtcttgaatgctgagtcgaacggttggccaaatttgtcgtctgtgctcgtggttgtccactcaaggtccgtcaattctaggcgtgg

SEQ ID NO: 35536 - DNA, 4233 bp, Zea Mays
atttatagaaactaaaaaggatagtactaacatcgtggcgcccactgcctcagtaacaggcgatgacccctgagcactgttatgttaattaacaatccgctaactaattacggaagcgaaagaggaaaaaaaaaccctgtccttgtctcccacctcgactctttccatctcgtctccctcgcctcctcatctcgttccgcctcctatcggcccagctccaaaccctagcccgccgccgtgctgactcccctagccaggcacgacgtcgaagagagcagcggcggaggcggcaacctgatgcccagccccccgtgggggccatggagctcgtcctcgtcaagcccgcggcaggagctctcgtcgaggtgggctccgggtccgttgccggcgcgggctcgatcccggcgatggtggcggcgcagcaggagattttgcacgaacaggtggaccagctccaacgcctcgtcgtcgctcagtgccgcctcaccggcgtcaaccccctcgcccaggagatggctgccggtgcattgtctatcaagataggtaagaggccaagggatctgttgaatccaaaagcagttaagtgcatgcagtcactttttgccttgaaggacattcttggcaaaaaagaaacccgagaaattagtttactctgtggggtcactgttacacaggttagggaattctttacagttcaacgatcgcgagtgagaaaatttgttcgtctgtctcaagaaaaagcgctgagaatagagacacccaaagagcaggacaattcatactccataaacactgagcagataccgccggacatagaagcacaagctgaagttattgaacctttgagaactttagaaccggtggtcctacagagctctttgcaaccaacgtgtgtccctcagatctcttcgcaatcaatggagctccaacaaagcgatttgcagcacatggaagtcttccaaaactctttgcaacaagcagaggcacaacataacattgcagctcctataatgccatctggagcaatggttatgcaaccaactgacgctaagattagttcagactctgttcaaaaggaagttaagcaagagggagttcattctggtgttgcgtcagaagataagaagttcttggaaagtatctttgctctaatgcagaaggaggaaacattctctgggcaggttaaattaatggaatggattctgcaaataaataatgttacagttcttagtaggttcgtaacaatgggtggtttgaccattatgtcaacatggttgagtcaagcagcaattgaagagcagacatcagttatccatgttattttcaaggtgctgctccaccttccgttgcataaggctttaccagtccacatgtcagttgttctgcaaacaattaataagttgcgcttttatagaacacaagggctaggaacctcctctccagattgagcaaagtgcttgtaaggattcaggcattgaagaaacctcagaaggacttaatatgtaaacaaaggataagtgaaattctccgtgacgagtcttggaaatctgaagttgatattaccgaggaggtacttgctttgactgatggtgctaatgagagcagaaagcctgaacccagaaaaacaccaatgcttctcactgcttctgctattgagacaaataaaaggagttctgtgcagacaaaatccaaacaaaaaagaaaagttctacttgtggagcaaccaaacaagaaagctacgtggaagaatgctaattctgtcaggaacacatctacaaacaatagccggccattatctgcagatgatattcaaaaagcaaagatgcgtgccatgttcatgcaggagaagcgtggcaagattgacataaataaattgagtgataaaccacaagcaatggacacgaaaaaagcagctggattagtaaattcaaatccatcagctatgcccataagtccccatacgtcagctgcacaacctgttgacccaagcccatctacttcaaaacaaagcacagatcctcagcctgataatacagaaatttcaggtggtttgaagttaaacataggttccaaaaacaatgtcatagagaagttggattgcaagagagttctttggcaaataccaccagctgtatggatagacccctcgtggagtgtaggagctggtgacaacagcaaggagcttgaggttcaaacacagaggaaccggcgtgaaaaggaaaccttttatacaagccagaaggacgtcccaatgaatccaaaggacccatgggatctggaaatggacttcgatgacagcctgaccccagaggttccaattgaccaggtgccagatgtggacgccatggaaacggaaagcgttggcgcggcgcctagcgctgtggctcctgttaaggacaagcagattgaatctgcctcatcgacatcaggcgcagttgctgatgatgaggaagctaataccgattacgaattgcttacggtgctactcaggaacccggagcttgtctttgcattaacctctaacaagggggagaacatgcctaacgagcagaccattgcgcttctggatacactgaagcagaccggccttagcctatcagagcttgttaaccgtctggggaacggcgctgggctcccaaaagagccagagccggagccagaacctattcccgcttcgcttccgtcaccaactccgccagaccgtacatcaagggctgtctggataccagaacacgcaatgcaggtgagggctgctccaaccttgcatctgccaagccgggggagtacacctcctgttgcaaatgccgtgcaacaaggcttctcaaacgttgtcagttcgttaccctcacaaccttacgcccctccagtctcggtcttgccggcacagattcaagctaacgcacccccatctcttcctctgctggcggtctctgtaaacccgccagtccaacatgtttcccctgtgaataaccttctgaacagagcttcagtgcatcagcatggacagcagcaatacgctttgttgtctgaccctgttgccacgcccttgcatcaacaagcagcggggagcaaaccagctgtagcagcacatccgtcgttgcctgagcctaatgcatcatctcacacagcattcccttggcaatctaatgctgctgacatgacccacgctggacggaatgcgacggctgatccatgggccgccgcccgcgcagctaactcgtatagtacagcatcagcaagcacagtgccgtctgctaaccagaatgcttacggcgatcaaggcaagcagggtgcgtacagctcttatggatcttcggcagcctcgtcccgtcctgttgtaccagggcacgggcatgacagaaatggctacagccggtctgccctggtggagtacccatgggacgggcaccaccagcggcactcgaggtcaccagatcctggcgtggtccgggactacgacaccgactatggcggtgcgcagggctacagtcagcagcccctgacgcagtggagtgcagggaaagtgcagcagcagggctacaatcctgagccgtcaaggcagtggagttcttcccaggcgcaccagggcggctacgcacccgccgagccgtcgaggcagtggagttcttcccaggcgcaccagagctacgctcccgagctaccgaggcagtggagctccgaacgccgtggctacgatgatgcggagccctcgaggacatggagctccggccagcagaacccggaggcgccgaggcagtggagccgcgggaagcaggatccttactacagcccgagccatagccgaagatcgtacgatcagcaccggaggagatagcaaaagcttgctgtattactgctaccacattagctagatcctggatggaggcggtcggttcttgggagggtttgtttcatttgatttgatgtgaggccgggtattcgttgcatttgggctttgtgattgccaccacaagggccattgagaaaagctataggttattatgtatcgatgtagtttttgtctcgaaattaaaaaaaaaatgtatctatctaggtagctggagaggggaaagaagaagaaaaaatgaatgaatgaatgatataactcagggagggtcaagaggccccccggctcgaattgattgcagtcttgaatgctgagtcgaacggttggccaaatttgtcgtctgtgctcgtggttgtccactcaaggtccgtcaattctaggcgtgg

SEQ ID NO: 35537 - DNA, 1361 bp, Zea Mays
caaagtccaaactggacaaggatgaactagaatgaacaagggattctggagaggaaatgtaccggctttgttgatgtatatgccatatacagctatacaattcactgtcctacacaaactaaaaacatttgcttctggttcatctaaaacagaggatcatttgcatttgagcccttacttatcctatgtaagtggagctctagcaggatgtgcagcaactatagggtcatatccatttgaccttctgaggactattcttgcatcacagggtgaaccaaaaatttaccccaacatgaggtctgcatttgttgatataattaaaacccgtggtgttcaagggctttattctggtctatctccaactcttgttgaaatcataccatatgctggtttgcagtttggttcatatgacactttcaaacgttctatgatgacatggaacagatataaatattcgcatcttaactttggaagcgaggatgattctgtatcaagtttccagctatttctttgtgggtttgctgctgggacattttcaaaggctgcatgccacccacttgatgttgtaaagaaaaggttccagattgaagggctaaaacgccatccaaggtatggagctcgaattgagagcagcacatacaagggcatgtaccatgccctaaaggagattgtcgcaaaggagggatttggaggcctttataagggccttttcccctctttggtgaaatcggcccctgctggtgctgtgacatttgtggcatatgaatacatctcagactggttagagtcgatactgatgtgaaaatcttcaatgcagatagggagcaaggctggagttgagtgaggtcttgatggatcatggagctatcaagataccatgacgagaactttttgcacaccgtggacatggaggatggagaccggaaggtcaatcgtcaagtgcatacaattcctagagatccgatacatgtaaagccttacatagaaaagagctgttttgtcgtttcttattctttccccaattgcctaatgtggtggtagggcattcgttggcttgtaaaacaaggctgactacaactaacttagtgatcgcgacgcgtcatacatgactaagtcaaaagcagccggcagttttgctgggatcgtgttacgaatcttttctcggctgcagtcatgttttccttgcggcttgttggggctgcgtcttctacagtcttttttatttatatggattgcacctgcaacagactgcagcagctacggttgtagggcagccgaacaaatttcatggttgatggcagtcgtaatttattcaaccattttgttgagcaccatttatagtactgagtatgaccattttg

SEQ ID NO: 35538 - DNA, 1546 bp, Zea Mays
cttgctcttgcactggcatgcctctatctataataggctaaactaaacggcgtcttcttgctggggattctggagaggaaatgtaccggctttgttgatgtatatgccatatacagctatacaattcactgtcctacacaaactaaaaacatttgcttctggttcatctaaaacagaggatcatttgcatttgagcccttacttatcctatgtaagtggagctctagcaggatgtgcagcaactatagggtcatatccatttgaccttctgaggactattcttgcatcacagggtgaaccaaaaatttaccccaacatgaggtctgcatttgttgatataattaaaacccgtggtgttcaagggctttattctggtctatctccaactcttgttgaaatcataccatatgctggtttgcagtttggttcatatgacactttcaaacgttctatgatgacatggaacagatataaatattcgcatcttaactttggaagcgaggatgattctgtatcaagtttccagctatttctttgtgggtttgctgctgggacattttcaaaggctgcatgccacccacttgatgttgtaaagaaaaggttccagattgaagggctaaaacgccatccaaggtatggagctcgaattgagagcagcacatacaagggcatgtaccatgccctaaaggagattgtcgcaaaggagggatttggaggcctttataagggccttttcccctctttggtgaaatcggcccctgctggtgctgtgacatttgtggcatatgaatacatctcagactggttagagtcgatactgatgtgaaaatcttcaatgcagtaatactttatccccctgttttttctgttgctgtttatattatttctccatgctgttatacacttgtgtctggaagaggctgcagttccattggatcttgcagtccatacgaggtttgggacttgggagcctgctaaaatcaactggataattcatgcttgatagggagcaaggctggagttgagtgaggtcttgatggatcatggagctatcaagataccatgacgagaactttttgcacaccgtggacatggaggatggagaccggaaggtcaatcgtcaagtgcatacaattcctagagatccgatacatgtaaagccttacatagaaaagagctgttttgtcgtttcttattctttccccaattgcctaatgtggtggtagggcattcgttggcttgtaaaacaaggctgactacaactaacttagtgatcgcgacgcgtcatacatgactaagtcaaaagcagccggcagttttgctgggatcgtgttacgaatcttttctcggctgcagtcatgttttccttgcggcttgttggggctgcgtcttctacagtcttttttatttatatggattgcacctgcaacagactgcagcagctacggttgtagggcagccgaacaaatttcatggttgatggcagtcgtaatttattcaaccattttgttgagcaccatttatagtactgagtatgaccattttg

SEQ ID NO: 35539 - DNA, 1355 bp, Zea Mays
cagatacttgctcttgcactggcatgcctctatctataataggctaaactaaacggcgtcttcttgctggggattctggagaggaaatgtaccggctttgttgatgtatatgccatatacagctatacaattcactgtcctacacaaactaaaaacatttgcttctggttcatctaaaacagaggatcatttgcatttgagcccttacttatcctatgtaagtggagctctagcaggatgtgcagcaactatagggtcatatccatttgaccttctgaggactattcttgcatcacagggtgaaccaaaaatttaccccaacatgaggtctgcatttgttgatataattaaaacccgtggtgttcaagggctttattctggtctatctccaactcttgttgaaatcataccatatgctggtttgcagtttggttcatatgacactttcaaacgttctatgatgacatggaacagatataaatattcgcatcttaactttggaagcgaggatgattctgtatcaagtttccagctatttctttgtgggtttgctgctgggacattttcaaaggctgcatgccacccacttgatgttgtaaagaaaaggttccagattgaagggctaaaacgccatccaaggtatggagctcgaattgagagcagcacatacaagggcatgtaccatgccctaaaggagattgtcgcaaaggagggatttggaggcctttataagggccttttcccctctttggtgaaatcggcccctgctggtgctgtgacatttgtggcatatgaatacatctcagactggatagggagcaaggctggagttgagtgaggtcttgatggatcatggagctatcaagataccatgacgagaactttttgcacaccgtggacatggaggatggagaccggaaggtcaatcgtcaagtgcatacaattcctagagatccgatacatgtaaagccttacatagaaaagagctgttttgtcgtttcttattctttccccaattgcctaatgtggtggtagggcattcgttggcttgtaaaacaaggctgactacaactaacttagtgatcgcgacgcgtcatacatgactaagtcaaaagcagccggcagttttgctgggatcgtgttacgaatcttttctcggctgcagtcatgttttccttgcggcttgttggggctgcgtcttctacagtcttttttatttatatggattgcacctgcaacagactgcagcagctacggttgtagggcagccgaacaaatttcatggttgatggcagtcgtaatttattcaaccattttgttgagcaccatttatagtactgagtatgaccattttg

SEQ ID NO: 35540 - DNA, 1391 bp, Zea Mays
cagatacttgctcttgcactggcatgcctctatctataataggctaaactaaacggcgtcttcttgctggggattctggagaggaaatgtaccggctttgttgatgtatatgccatatacagctatacaattcactgtcctacacaaactaaaaacatttgcttctggttcatctaaaacagaggatcatttgcatttgagcccttacttatcctatgtaagtggagctctagcaggatgtgcagcaactatagggtcatatccatttgaccttctgaggactattcttgcatcacagggtgaaccaaaaatttaccccaacatgaggtctgcatttgttgatataattaaaacccgtggtgttcaagggctttattctggtctatctccaactcttgttgaaatcataccatatgctggtttgcagtttggttcatatgacactttcaaacgttctatgatgacatggaacagatataaatattcgcatcttaactttggaagcgaggatgattctgtatcaagtttccagctatttctttgtgggtttgctgctgggacattttcaaaggctgcatgccacccacttgatgttgtaaagaaaaggttccagattgaagggctaaaacgccatccaaggtatggagctcgaattgagagcagcacatacaagggcatgtaccatgccctaaaggagattgtcgcaaaggagggatttggaggcctttataagggccttttcccctctttggtgaaatcggcccctgctggtgctgtgacatttgtggcatatgaatacatctcagactggttagagtcgatactgatgtgaaaatcttcaatgcagatagggagcaaggctggagttgagtgaggtcttgatggatcatggagctatcaagataccatgacgagaactttttgcacaccgtggacatggaggatggagaccggaaggtcaatcgtcaagtgcatacaattcctagagatccgatacatgtaaagccttacatagaaaagagctgttttgtcgtttcttattctttccccaattgcctaatgtggtggtagggcattcgttggcttgtaaaacaaggctgactacaactaacttagtgatcgcgacgcgtcatacatgactaagtcaaaagcagccggcagttttgctgggatcgtgttacgaatcttttctcggctgcagtcatgttttccttgcggcttgttggggctgcgtcttctacagtcttttttatttatatggattgcacctgcaacagactgcagcagctacggttgtagggcagccgaacaaatttcatggttgatggcagtcgtaatttattcaaccattttgttgagcaccatttatagtactgagtatgaccattttg

SEQ ID NO: 35541 - DNA, 1632 bp, Zea Mays
cctctggcctcttcgcgcagagccgcacaccgacccacgccggccgcgcccaccaggcagccaggcaccacgacgcggcagcccccggcctcggaagccaagagccataccgcctctttttcctccaaaagccaaaccaccacaccccctaatctctcgctctcttcctttctcacccccgtgaccctgtctcgccccttctcgcctcgccgccgcagccgatgggctccggggaggagccgtcgcagatgcggagggcgctggtggactcgctcgcgggtgccatctccggcggcatctcccgcaccgtcacctcccccctcgacgtcatcaaaatccgcttccaggttcagttagaacccacaacctcgtggggtattcttcgaagggatatatatggaccttccaaatacactgggcttctgcaagcaaccaaagatattctcagagaggaaggtttaccgggattctggagaggaaatgtaccggctttgttgatgtatatgccatatacagctatacaattcactgtcctacacaaactaaaaacatttgcttctggttcatctaaaacagaggatcatttgcatttgagcccttacttatcctatgtaagtggagctctagcaggatgtgcagcaactatagggtcatatccatttgaccttctgaggactattcttgcatcacagggtgaaccaaaaacatggaacagatataaatattcgcatcttaactttggaagcgaggatgattctgtatcaagtttccagctatttctttgtgggtttgctgctgggacattttcaaaggctgcatgccacccacttgatgttgtaaagaaaaggttccagattgaagggctaaaacgccatccaaggtatggagctcgaattgagagcagcacatacaagggcatgtaccatgccctaaaggagattgtcgcaaaggagggatttggaggcctttataagggccttttcccctctttggtgaaatcggcccctgctggtgctgtgacatttgtggcatatgaatacatctcagactggttagagtcgatactgatgtgaaaatcttcaatgcagatagggagcaaggctggagttgagtgaggtcttgatggatcatggagctatcaagataccatgacgagaactttttgcacaccgtggacatggaggatggagaccggaaggtcaatcgtcaagtgcatacaattcctagagatccgatacatgtaaagccttacatagaaaagagctgttttgtcgtttcttattctttccccaattgcctaatgtggtggtagggcattcgttggcttgtaaaacaaggctgactacaactaacttagtgatcgcgacgcgtcatacatgactaagtcaaaagcagccggcagttttgctgggatcgtgttacgaatcttttctcggctgcagtcatgttttccttgcggcttgttggggctgcgtcttctacagtcttttttatttatatggattgcacctgcaacagactgcagcagctacggttgtagggcagccgaacaaatttcatggttgatggcagtcgtaatttattcaaccattttgttgagcaccatttatagtactgagtatgaccattttg

SEQ ID NO: 35542 - DNA, 2150 bp, Zea Mays
cctctggcctcttcgcgcagagccgcacaccgacccacgccggccgcgcccaccaggcagccaggcaccacgacgcggcagcccccggcctcggaagccaagagccataccgcctctttttcctccaaaagccaaaccaccacaccccctaatctctcgctctcttcctttctcacccccgtgaccctgtctcgccccttctcgcctcgccgccgcagccgatgggctccggggaggagccgtcgcagatgcggagggcgctggtggactcgctcgcgggtgccatctccggcggcatctcccgcaccgtcacctcccccctcgacgtcatcaaaatccgcttccaggttcagttagaacccacaacctcgtggggtattcttcgaagggatatatatggaccttccaaatacactgggcttctgcaagcaaccaaagatattctcagagaggaaggtttaccgggattctggagaggaaatgtaccggctttgttgatgtatatgccatatacagctatacaattcactgtcctacacaaactaaaaacatttgcttctggttcatctaaaacagaggatcatttgcatttgagcccttacttatcctatgtaagtggagctctagcaggatgtgcagcaactatagggtcatatccatttgaccttctgaggactattcttgcatcacagggtgaaccaaaaatttaccccaacatgaggtctgcatttgttgatataattaaaacccgtggtgttcaagggctttattctggtctatctccaactcttgttgaaatcataccatatgctggtttgcagtttggttcatatgacactttcaaacgttctatgatgacatggaacagatataaatattcgcatcttaactttggaagcgaggatgattctgtatcaagtttccagctatttctttgtgggtttgctgctgggacattttcaaaggctgcatgccacccacttgatgttgtaaagaaaaggttccagattgaagggctaaaacgccatccaaggtatggagctcgaattgagagcagcacatacaagggcatgtaccatgccctaaaggagattgtcgcaaaggagggatttggaggcctttataagggccttttcccctctttggtgaaatcggcccctgctggtgctgtgacatttgtggcatatgaatacatctcagactggttagagtcgatactgatgtgaaaatcttcaatgcagtaatactttatccccctgttttttctgttgctgtttatattatttctccatgctgttatacacttgtgtctggaagaggctgcagttccattggatcttgcagtccatacgaggtttgggacttgggagcctgctaaaatcaactggataattcatgcttgtaaggtcctctcatgggtttttggcaaactattaggcgttacacaaatcggcaatcgagttggtcaccgaaaatttgcatttctagatgtctatgcactgagccctaccttttcttcaaacctgaagttttacgttttctttgttgatgtctgcatgctcgttcatgtccggagcagtgatagaacctgaaactgatttgcaggatagggagcaaggctggagttgagtgaggtcttgatggatcatggagctatcaagataccatgacgagaactttttgcacaccgtggacatggaggatggagaccggaaggtcaatcgtcaagtgcatacaattcctagagatccgatacatgtaaagccttacatagaaaagagctgttttgtcgtttcttattctttccccaattgcctaatgtggtggtagggcattcgttggcttgtaaaacaaggctgactacaactaacttagtgatcgcgacgcgtcatacatgactaagtcaaaagcagccggcagttttgctgggatcgtgttacgaatcttttctcggctgcagtcatgttttccttgcggcttgttggggctgcgtcttctacagtcttttttatttatatggattgcacctgcaacagactgcagcagctacggttgtagggcagccgaacaaatttcatggttgatggcagtcgtaatttattcaaccattttgttgagcaccatttatagtactgagtatgaccattttg

SEQ ID NO: 35543 - DNA, 1779 bp, Zea Mays
cctctggcctcttcgcgcagagccgcacaccgacccacgccggccgcgcccaccaggcagccaggcaccacgacgcggcagcccccggcctcggaagccaagagccataccgcctctttttcctccaaaagccaaaccaccacaccccctaatctctcgctctcttcctttctcacccccgtgaccctgtctcgccccttctcgcctcgccgccgcagccgatgggctccggggaggagccgtcgcagatgcggagggcgctggtggactcgctcgcgggtgccatctccggcggcatctcccgcaccgtcacctcccccctcgacgtcatcaaaatccgcttccagttagaacccacaacctcgtggggtattcttcgaagggatatatatggaccttccaaatacactgggcttctgcaagcaaccaaagatattctcagagaggaaggtttaccgggattctggagaggaaatgtaccggctttgttgatgtatatgccatatacagctatacaattcactgtcctacacaaactaaaaacatttgcttctggttcatctaaaacagaggatcatttgcatttgagcccttacttatcctatgtaagtggagctctagcaggatgtgcagcaactatagggtcatatccatttgaccttctgaggactattcttgcatcacagggtgaaccaaaaatttaccccaacatgaggtctgcatttgttgatataattaaaacccgtggtgttcaagggctttattctggtctatctccaactcttgttgaaatcataccatatgctggtttgcagtttggttcatatgacactttcaaacgttctatgatgacatggaacagatataaatattcgcatcttaactttggaagcgaggatgattctgtatcaagtttccagctatttctttgtgggtttgctgctgggacattttcaaaggctgcatgccacccacttgatgttgtaaagaaaaggttccagattgaagggctaaaacgccatccaaggtatggagctcgaattgagagcagcacatacaagggcatgtaccatgccctaaaggagattgtcgcaaaggagggatttggaggcctttataagggccttttcccctctttggtgaaatcggcccctgctggtgctgtgacatttgtggcatatgaatacatctcagactggttagagtcgatactgatgtgaaaatcttcaatgcagatagggagcaaggctggagttgagtgaggtcttgatggatcatggagctatcaagataccatgacgagaactttttgcacaccgtggacatggaggatggagaccggaaggtcaatcgtcaagtgcatacaattcctagagatccgatacatgtaaagccttacatagaaaagagctgttttgtcgtttcttattctttccccaattgcctaatgtggtggtagggcattcgttggcttgtaaaacaaggctgactacaactaacttagtgatcgcgacgcgtcatacatgactaagtcaaaagcagccggcagttttgctgggatcgtgttacgaatcttttctcggctgcagtcatgttttccttgcggcttgttggggctgcgtcttctacagtcttttttatttatatggattgcacctgcaacagactgcagcagctacggttgtagggcagccgaacaaatttcatggttgatggcagtcgtaatttattcaaccattttgttgagcaccatttatagtactgagtatgaccattttg

SEQ ID NO: 35544 - DNA, 1877 bp, Zea Mays
gcgcctctggcctcttcgcgcagagccgcacaccgacccacgccggccgcgcccaccaggcagccaggcaccacgacgcggcagcccccggcctcggaagccaagagccataccgcctctttttcctccaaaagccaaaccaccacaccccctaatctctcgctctcttcctttctcacccccgtgaccctgtctcgccccttctcgcctcgccgccgcagccgatgggctccggggaggagccgtcgcagatgcggagggcgctggtggactcgctcgcgggtgccatctccggcggcatctcccgcaccgtcacctcccccctcgacgtcatcaaaatccgcttccaggttcagttagaacccacaacctcgtggggtattcttcgaagggatatatatggaccttccaaatacactgggcttctgcaagcaaccaaagatattctcagagaggaaggtttaccgggattctggagaggaaatgtaccggctttgttgatgtatatgccatatacagctatacaattcactgtcctacacaaactaaaaacatttgcttctggttcatctaaaacagaggatcatttgcatttgagcccttacttatcctatgtaagtggagctctagcaggatgtgcagcaactatagggtcatatccatttgaccttctgaggactattcttgcatcacagggtgaaccaaaaatttaccccaacatgaggtctgcatttgttgatataattaaaacccgtggtgttcaagggctttattctggtctatctccaactcttgttgaaatcataccatatgctggtttgcagtttggttcatatgacactttcaaacgttctatgatgacatggaacagatataaatattcgcatcttaactttggaagcgaggatgattctgtatcaagtttccagctatttctttgtgggtttgctgctgggacattttcaaaggctgcatgccacccacttgatgttgtaaagaaaaggttccagattgaagggctaaaacgccatccaaggtatggagctcgaattgagagcagcacatacaagggcatgtaccatgccctaaaggagattgtcgcaaaggagggatttggaggcctttataagggccttttcccctctttggtgaaatcggcccctgctggtgctgtgacatttgtggcatatgaatacatctcagactggttagagtcgatactgatgtgaaaatcttcaatgcagtaatactttatccccctgttttttctgttgctgtttatattatttctccatgctgttatacacttgtgtctggaagaggctgcagttccattggatcttgcagtccatacgaggtttgggacttgggagcctgctaaaatcaactggataattcatgcttgatagggagcaaggctggagttgagtgaggtcttgatggatcatggagctatcaagataccatgacgagaactttttgcacaccgtggacatggaggatggagaccggaaggtcaatcgtcaagtgcatacaattcctagagatccgatacatggcattcgttggcttgtaaaacaaggctgactacaactaacttagtgatcgcgacgcgtcatacatgactaagtcaaaagcagccggcagttttgctgggatcgtgttacgaatcttttctcggctgcagtcatgttttccttgcggcttgttggggctgcgtcttctacagtcttttttatttatatggattgcacctgcaacagactgcagcagctacggttgtagggcagccgaacaaatttcatggttgatggcagtcgtaatttattcaaccattttgttgagcaccatttatagtactgagtatgaccattttg

SEQ ID NO: 35545 - DNA, 1528 bp, Zea Mays
cgggacactacaggaaaacagatctggtaatctatgcgccgatttttaacatgagaacccatcggcatctcgatttccaaggcagatttcctttctaccttccgcctcatggagatgcaatgcaacggcaatttgcgccattttattagaaattgcggtggcgcaattaaatatatcgcggctgcccctgtcgcccccgcccgtccgcctccttcgtcagctggcagctgctataataaggaaggaagaagataacggagggcaaggaaactcgctcccactctactcctatccactgcggcctggacgcgtgcgagagacttgaccaagcagcagcagcagggatggcgcctctgaagctgtacgggatgccgctgtcccccaacgtggtgcgcgtggccaccgtgctcaacgagaagggcctcgacttcgagatcgtccccgtcgacctcaccaccggcgcccacaagcagcccgacttcctcgccctcaaccctttcggccagatcccggctctcgtcgacggagacgaagtcctcttcgagtcccgtgcgatcaaccggtacatcgccagcaagtacgcgtcggagggcacggacctgctccccgcgacggcgtcggcggcgaagctggaggtgtggctagaggtggagtcgcaccacttctacccgaacgcctcgccaaggtgctcgacgtgtacgaggcgcacctcgcccgcaacaagtacctcgccggggacgagttcacgctcgccgacgccaaccacgcgtcctacctgctctacctcagcaagacccccaaggccgggctcgtcgccgcccgcccccacgtcaaggcctggtgggaggccatcgtcgcccgccccgcgttccagaagaccgtcgccgccatccccttgcccccgccgccctcctcctcggcttgacctcgccttgcgttgcgccgttgcctgggtcgcggatgcgtcggagccccgagtcgaataaaagaggcagcatcctgtcttgcatttgctgctgcgccatgtgttaacagcctgtgtaataaacactgttgctttcgtgtgtgttcattgccttttggttggtctttgcatatcctactagtgctgatctttttgtgaagcttggattggatggacgcgttttcttcaccgtaattcccttcttcctgagcgacgtgactgttgattcgaacaacaacaaaattttcggcccacaaccgcaaggcccgttcctacgactcacctgttgggtttgggttacagttaaggccttcctcttggatgaatttatatcccatatctaattctatggtgggattaaatccatcatttaattcatgtatctctcaaaactagttattttttgatccatacattctaatttaaactcgtgcaatatccttataaagatttgttctatacctaataacctatggataaaatccatgtctttcataatttaaaaaatttctaaacccttaggttataatctacgatgaatttaaccgaataagaataaaaaaa

SEQ ID NO: 35546 - DNA, 521 bp, Zea Mays
gacaactgaaaatcaaagtatcatttgtcaacatcaaaacaagataaacaacctgtggcagaacgcagaacatccacagagcctcctccatcagagtggatttataccatgtagggtcgagcctcacctgcgcttagcctgaggaggggagtggctccgggactgggagggcgacgacgagaaggagcaggagcgcggccgggagcgggacgagatggagccgaaggagatggagtgggacggcgagcaagatgaagatcctgagaaggaacgatgtagggtttacagagtcttactctgacaacagagaccttttgctcggcgtcataggtcgtgacgccgagctacctgatgcgctgccacctacatggtcgtatctcggcaccaacgccgagctccttgagaaattactttccagttgcatgtgcttcgttggtgacggttgcagcatagaaatcagcagcatagaaatcaacaatggacgagacagggccatgtgcttgcgtcatagcaatcgatga

SEQ ID NO: 35547 - DNA, 610 bp, Zea Mays
gacaactgaaaatcaaagtatcatttgtcaacatcaaaacaagataaacaacctgtggcagaacgcagaacatccacagagcctcctccatcagagtggatttataccatgtagggtcgagcctcacctgcgcttagcctgaggaggggagtggctccgggactgggagggcgacgacgagaaggagcaggagcgcggccgggagcgggacgagatggagccgaaggagatggagtgggacggcgagcaagatgaagatcctgagaaggaacgatgtagggtttacagagtcttactctgacaacagagttctatcattgccgaagctcttgttgatggcatcacaaccccatgcataataacggaagcaattgcaggcgaggaacccaacaaggtaatgacagtaaaaatatttaagtcatgggattttgttgtgttaagtcatgatgaatagtattaggtggtacatatacataatatgatttgtttagagatagagttctcaaagatagagttttgaaacctatacagaatagcattttgatgaatctgccatgtgaggagtgctttgatgccgtaacattcataaaatttacatcaacacattatg

SEQ ID NO: 35548 - DNA, 1467 bp, Zea Mays
actagcatgtaaatatagaaatatataggaatataatcttaaataggtttattgatttaatagagaagtaaaaaaaaagaaaaaaagaaaacagttaagattaaggttatatgggccaccagtttcccggtccatgctaaactcaccctgcagccgccacctcatgaactcaccctgcagcaccctcaggcctcaccgcctcagctgccaccctcaccctgcatccgagagagagagaggagagttgccgccggagggaggaggtcgccgcggaggggaggggctcgccggtaggggacatcgccggcgcctggagagctcgtggaggggacagccaccgtcaccgccaggagacaagcgccgccgccgctaggaatcaggagacaagcgagcgcgatggggatggtgagactatggacgaattcgaagaacggttgtttgggggcaaggacacagacaaaggatcactctacgagaagctcgatagggctgagaacactgcgacaggagcagttcaggatggatggatggttatgattcttttaatgatggcttaaatgatacaattgctaatgcggcacgcaacatccaaatggaggaggacgaggacgtcgacggtgactgggaagatgactttgagttcaggcctgatgttcggtttaggcgaggttcaacgtattctgttcgggaccttgaccttagaaaacctgcagccgcaaagaaccctcctagacgacagtttgaaacaactacagcggaggtactgaagaaggctgattttaggaatgttagattcctctccaactttcttacggaagctggaattatcatcaagagaagccagacccgtataagtgcaaaagctcagcgtaagattgcaagagagatcaaaactgcgcgtgcgtttgggttaatgccttttacaacaatgggtagaagaccattcttctttggcagaagtgcggaggagcattattcggatgatggatattttggctttgtgaagcagaaggatggtgagcctgttgagaatgaggacgctgagccaaatgtggaggctgtgtaaacattctggagcatcctttttttgcaagcgctccgttcggtttcttctggtgccttcatgacaagtcacacaatgctcgttttgcgtcttcagatcatagcgtagctcagcttgaataaaactgtaacatcacgcctgttttgtgaaaactcgtgccttgctcaattgtgccactttagcagacatccccagctcacctcatcctggctggagatcatatcatatgcagatatgaaatggaacgttggatcagagttttagtggacgctcaattttttttgaggtagcagcactgatttcagtttctgttggataatgattgtttggctgcttaacgagaaaaatatagtatgcacgtacaaaatgttagattttttaataactaaaatgttttcttcaaa

SEQ ID NO: 35549 - DNA, 2935 bp, Zea Mays
ctcgtttctactttcttctacctcccgattcgctggcctctcccgaccctgccccgcctcatcactccccatcccaccgacacacggcgtgtcaggtgtcacgcgcctccgctaaaaccctagccccacccaggcctgatggctgctccgcggcagccgcacccaccggcagcggaggagggagccgcgccggcgggtcccctgcccgccgccgcgccaggtccgcgtccgtacgacgtgacggtcgcggcaacggagctccggccggtggactgcaatctcgccgcgctctgtgaccacgttcaggcggagggcttcggctccggggccttctccgacctcgtcgtggaggccatgggcgccacctaccgcctccatcgcctcatcctctcccgcagcgcctacttcaggaatatgctacatggtccttggagagagtcgggagcacccacagtggttttgcacatagatgatgccaatgtcgattcagatgcaattgcaattgcgctcgcatatctttatgggcaaccccccaagcttactgatagcaatgcattccgagtgcttgcagctgcatcatttctggatcttcaggacttatgtacaatatgtacagattttatcatttccgagctctggacatcaaactttttacaataccagttgtttgctgagagtcaagattatgggagccatggagaacgtgttaggaacgcttgctggggttatctttgtcaaagtgccacaatggaattacgagaggtgctaccaaagctttcttcacaaactttgcatgctcttcttacatctgacgaattatgggtacctaacgaggagaaaaggttgctatgtgtgagatacaagttagtggtaatgaaacaaatttaccaagtgctgatcgatccatgaggaaggggaagactccaatgaatgaatctggggaggaactgctaatggactctgaattgcagaacttgaagttgcatgataacttggggaatgaaatttcccataacattattgctatttcagatatgaatggtgaagctcccaagagaatggagattgattgttctaccggaggaccatcaggagaaagcacttcatatcaatttaatgaaaataactggatttctagtgagcaaactgcaaataattatttctcaagaacttccagtagtgttgttgttcctactgagtggggaaggcccaatgcaccactttggggtggcagggtcgttggacggcggcaaattagatacattagaggaagctcttgtctatctactgatgaatataatgcttttatgaatatatttgagagaggttctcttctctactgcaatatgtcctttgatgcactgctaagtgttcgaaagcaactcgaagaatttggattcccttgtaaagctgtcaatgatagtctatggctacagatgcttctgtgtcacagggtgcaagcgattgttgctgatacttgcaggaattgttgccttatgaatagttcttgtgcttgcaagcaagcatatgtgagctcgcatacacattacaggcaggagcatgacaggagcagtgcctccgacaacataggtaatgtctaccttgcggatggccagggtgatgggaatggtgtacttgggcctgtccgtgttaatgtaagaggagcagtcgatggacttgctggtattgggagagggaactcaaatgtgcctggtgcagcttgggctcctacacgatatgtcttctcccgtgtcccttatgggcttggttcaagaaatggccagcaatttgccattgatgaatcagaacctagaattgaccgcaatggagatatttcagcagatggtctgactgcattggttaaccttagccaagaaaacaatgctgctcatctgcaggatcaaagtctatttgagacagggatgcagacaagatatcgcagtgttccatctgtttccactccaggtggttcttctgtccagatgcaggagtcaaaggagcatgaacttggatcagattgggaaaccacaaaggatgcaactatatcattagacatgaaaacacctcttagccattttccacctttccgctttggggttgagttcgaggatgtgcacaggcttgctgatggtcaggtgaaacattcgactgaagtgttttatgcaggctctctatggaaggtgagtgtccagccattcaatgatgaggatcctcatgggcgacgcacccttggactatttctccaccgacgcaaggctgagttgttagatcccttgaggaaggctcacttgtacgttgacccccgggaaaaggtcactgctcggtatcagctcatctgtccatcaaagagagaggtcatgatatttggaagcctgaagcaggctgggacgctgctaccaaaagcgccgaagggctggggctggcgcactgctatactatttgatgagcttgctgatcttctccagggtggtgccctgcgaattgctgcagtggtccagcttgtctagattagttgcagaaaacaactgcttgcaaggatggtgatagcacagcagtttgtgtaattgatatactccctccgtcctaaaatatagttttttctggtccttttttccgtccacattcgaacaaatgataatgaatagacatacatacaaactacattcataaattaagttaagtagtcaatgcttgtttagtgtaaaacgaattatattttaggacggggtgagtatgtaagaactcaatctgtcatgtactcgttgtcatgtactcgtgctctgaaatattgtataatctatagcggtttgctgtttggtatataaaagagaatatatcagatgcaaaccaaccacttgtacaaaccgtgtaaaccaacatattgatggaggtgggaggacatattgaaaatatatcagggaaggtaaaagtgccg

SEQ ID NO: 35550 - DNA, 3094 bp, Zea Mays
cctgaatccgagcgatcgctgcttttctcgtttctactttcttctacctcccgattcgctggcctctcccgaccctgccccgcctcatcactccccatcccaccgacacacggcgtgtcaggtgtcacgcgcctccgctaaaaccctagccccacccaggcctgatggctgctccgcggcagccgcacccaccggcagcggaggagggagccgcgccggcgggtcccctgcccgccgccgcgccaggtccgcgtccgtacgacgtgacggtcgcggcaacggagctccggccggtggactgcaatctcgccgcgctctgtgaccacgttcaggcggagggcttcggctccggggccttctccgacctcgtcgtggaggccatgggcgccacctaccgcctccatcgcctcatcctctcccgcagcgcctacttcaggaatatgctacatggtccttggagagagtcgggagcacccacagtggttttgcacatagatgatgccaatgtcgattcagatgcaattgcaattgcgctcgcatatctttatgggcaaccccccaagcttactgatagcaatgcattccgagtgcttgcagctgcatcatttctggatcttcaggacttatgtacaatatgtacagattttatcatttccgagctctggacatcaaactttttacaataccagctttttgtcatttgctaatagttgtttgctgagagtcaagattatgggagccatggagaacgtgttaggaacgcttgctggggttatctttgtcaaagtgccacaatggaattacgagaggtgctaccaaagctttcttcacaaactttgcatgctcttcttacatctgacgaattatgggtacctaacgaggagaaaaggtttgaactagcattacttactctacttgcaaaggttgctatgtgtgagatacaagttagtggtaatgaaacaaatttaccaagtgctgatcgatccatgaggaaggggaagactccaatgaatgaatctggggaggaactgctaatggactctgaattgcagaacttgaagttgcatgataacttggggaatgaaatttcccataacattattgctatttcagatatgaatggtgaagctcccaagagaatggagattgattgttctaccggaggaccatcaggagaaagcacttcatatcaatttaatgaaaataactggatttctagtgagcaaactgcaaataattatttctcaagaacttccagtagtgttgttgttcctactgagtggggaaggcccaatgcaccactttggggtggcagggtcgttggacggcggcaaattagatacattagaggaagctcttgtctatctactgatgaatataatgcttttatgaatatatttgagagaggttctcttctctactgcaatatgtcctttgatgcactgctaagtgttcgaaagcaactcgaagaatttggattcccttgtaaagctgtcaatgatagtctatggctacaggtatttaatctactccctgccttgtggtactctgttcctttcaagactttataaaaccttgatgctttgttattgtagatgcttctgtgtcacagggtgcaagcgattgttgctgatacttgcaggaattgttgccttatgaatagttcttgtgcttgcaagcaagcatatgtgagctcgcatacacattacaggcaggagcatgacaggagcagtgcctccgacaacataggtaatgtctaccttgcggatggccagggtgatgggaatggtgtacttgggcctgtccgtgttaatgtaagaggagcagtcgatggacttgctggtattgggagagggaactcaaatgtgcctggtgcagcttgggctcctacacgatatgtcttctcccgtgtcccttatgggcttggttcaagaaatggccagcaatttgccattgatgaatcagaacctagaattgaccgcaatggagatatttcagcagatggtctgactgcattggttaaccttagccaagaaaacaatgctgctcatctgcaggatcaaagtctatttgagacagggatgcagacaagatatcgcagtgttccatctgtttccactccaggtggttcttctgtccagatgcaggagtcaaaggagcatgaacttggatcagattgggaaaccacaaaggatgcaactatatcattagacatgaaaacacctcttagccattttccacctttccgctttggggttgagttcgaggatgtgcacaggcttgctgatggtcaggtgaaacattcgactgaagtgttttatgcaggctctctatggaaggtgagtgtccagccattcaatgatgaggatcctcatgggcgacgcacccttggactatttctccaccgacgcaaggctgagttgttagatcccttgaggaaggctcacttgtacgttgacccccgggaaaaggtcactgctcggtatcagctcatctgtccatcaaagagagaggtcatgatatttggaagcctgaagcaggctgggacgctgctaccaaaagcgccgaagggctggggctggcgcactgctatactatttgatgagcttgctgatcttctccagggtggtgccctgcgaattgctgcagtggtccagcttgtctagattagttgcagaaaacaactgcttgcaaggatggtgatagcacagcagtttgtgtaattgatatactccctccgtcctaaaatatagttttttctggtccttttttccgtccacattcgaacaaatgataatgaatagacatacatacaaactacattcataaattaagttaagtagtcaatgcttgtttagtgtaaaacgaattatattttaggacggggtgagtatgtaagaactcaatctgtcatgtactcgttgtcatgtactcgtgctctgaaatattgtataatctatagcggtttgctgtttggtatataaaagagaatatatcagatgcaaaccaaccacttgtacaaaccgtgtaaaccaacatattgatggaggtgggaggacatattgaaaatatatcagggaaggtaaaagtgccg

SEQ ID NO: 35551 - DNA, 2818 bp, Zea Mays
gtcgcttgctgggcattggctaaccgtactaaccgtagatcgcagtacatttcctgaatccgagcgatcgctgcttttctcgtttctactttcttctacctcccgattcgctggcctctcccgaccctgccccgcctcatcactccccatcccaccgacacacggcgtgtcaggtgtcacgcgcctccgctaaaaccctagccccacccaggcctgatggctgctccgcggcagccgcacccaccggcagcggaggagggagccgcgccggcgggtcccctgcccgccgccgcgccaggtccgcgtccgtacgacgtgacggtcgcggcaacggagctccggccggtggactgcaatctcgccgcgctctgtgaccacgttcaggcggagggcttcggctccggggccttctccgacctcgtcgtggaggccatgggcgccacctaccgcctccatcgcctcatcctctcccgcagcgcctacttcaggaatatgctacatggtccttggagagagtcgggagcacccacagtggttttgcacatagatgatgccaatgtcgattcagatgcaattgcaattgcgctcgcatatctttatgggcaaccccccaagcttactgatagcaatgcattccgagtgcttgcagctgcatcatttctggatcttcaggacttatgtacaatatgtacagattttatcatttccgagctctggacatcaaactttttacaataccagttgtttgctgagagtcaagattatgggagccatggagaacgtgttaggaacgcttgctggggttatctttgtcaaagtgccacaatggaattacgagaggtgctaccaaagctttcttcacaaactttgcatgctcttcttacatctgacgaattatgggtacctaacgaggagaaaagaatggtgaagctcccaagagaatggagattgattgttctaccggaggaccatcaggagaaagcacttcatatcaatttaatgaaaataactggatttctagtgagcaaactgcaaataattatttctcaagaacttccagtagtgttgttgttcctactgagtggggaaggcccaatgcaccactttggggtggcagggtcgttggacggcggcaaattagatacattagaggaagctcttgtctatctactgatgaatataatgcttttatgaatatatttgagagaggttctcttctctactgcaatatgtcctttgatgcactgctaagtgttcgaaagcaactcgaagaatttggattcccttgtaaagctgtcaatgatagtctatggctacagatgcttctgtgtcacagggtgcaagcgattgttgctgatacttgcaggaattgttgccttatgaatagttcttgtgcttgcaagcaagcatatgtgagctcgcatacacattacaggcaggagcatgacaggagcagtgcctccgacaacataggtaatgtctaccttgcggatggccagggtgatgggaatggtgtacttgggcctgtccgtgttaatgtaagaggagcagtcgatggacttgctggtattgggagagggaactcaaatgtgcctggtgcagcttgggctcctacacgatatgtcttctcccgtgtcccttatgggcttggttcaagaaatggccagcaatttgccattgatgaatcagaacctagaattgaccgcaatggagatatttcagcagatggtctgactgcattggttaaccttagccaagaaaacaatgctgctcatctgcaggatcaaagtctatttgagacagggatgcagacaagatatcgcagtgttccatctgtttccactccaggtggttcttctgtccagatgcaggagtcaaaggagcatgaacttggatcagattgggaaaccacaaaggatgcaactatatcattagacatgaaaacacctcttagccattttccacctttccgctttggggttgagttcgaggatgtgcacaggcttgctgatggtcaggtgaaacattcgactgaagtgttttatgcaggctctctatggaaggtgagtgtccagccattcaatgatgaggatcctcatgggcgacgcacccttggactatttctccaccgacgcaaggctgagttgttagatcccttgaggaaggctcacttgtacgttgacccccgggaaaaggtcactgctcggtatcagctcatctgtccatcaaagagagaggtcatgatatttggaagcctgaagcaggctgggacgctgctaccaaaagcgccgaagggctggggctggcgcactgctatactatttgatgagcttgctgatcttctccagggtggtgccctgcgaattgctgcagtggtccagcttgtctagattagttgcagaaaacaactgcttgcaaggatggtgatagcacagcagtttgtgtaattgatatactccctccgtcctaaaatatagttttttctggtccttttttccgtccacattcgaacaaatgataatgaatagacatacatacaaactacattcataaattaagttaagtagtcaatgcttgtttagtgtaaaacgaattatattttaggacggggtgagtatgtaagaactcaatctgtcatgtactcgttgtcatgtactcgtgctctgaaatattgtataatctatagcggtttgctgtttggtatataaaagagaatatatcagatgcaaaccaaccacttgtacaaaccgtgtaaaccaacatattgatggaggtgggaggacatattgaaaatatatcagggaaggtaaaagtgccg

SEQ ID NO: 35552 - DNA, 3007 bp, Zea Mays
aggagatgtcgcttgctgggcattggctaaccgtactaaccgtagatcgcagtacatttcctgaatccgagcgatcgctgcttttctcgtttctactttcttctacctcccgattcgctggcctctcccgaccctgccccgcctcatcactccccatcccaccgacacacggcgtgtcaggtgtcacgcgcctccgctaaaaccctagccccacccaggcctgatggctgctccgcggcagccgcacccaccggcagcggaggagggagccgcgccggcgggtcccctgcccgccgccgcgccaggtccgcgtccgtacgacgtgacggtcgcggcaacggagctccggccggtggactgcaatctcgccgcgctctgtgaccacgttcaggcggagggcttcggctccggggccttctccgacctcgtcgtggaggccatgggcgccacctaccgcctccatcgcctcatcctctcccgcagcgcctacttcaggaatatgctacatggtccttggagagagtcgggagcacccacagtggttttgcacatagatgatgccaatgtcgattcagatgcaattgcaattgcgctcgcatatctttatgggcaaccccccaagcttactgatagcaatgcattccgagtgcttgcagctgcatcatttctggatcttcaggacttatgtacaatatgtacagattttatcatttccgagctctggacatcaaactttttacaataccagttgtttgctgagagtcaagattatgggagccatggagaacgtgttaggaacgcttgctggggttatctttgtcaaagtgccacaatggaattacgagaggtgctaccaaagctttcttcacaaactttgcatgctcttcttacatctgacgaattatgggtacctaacgaggagaaaaggtttgaactagcattacttactctacttgcaaaggttgctatgtgtgagatacaagttagtggtaatgaaacaaatttaccaagtgctgatcgatccatgaggaaggggaagactccaatgaatgaatctggggaggaactgctaatggactctgaattgcagaacttgaagttgcatgataacttggggaatgaaatttcccataacattattgctatttcagatatgaatggtgaagctcccaagagaatggagattgattgttctaccggaggaccatcaggagaaagcacttcatatcaatttaatgaaaataactggatttctagtgagcaaactgcaaataattatttctcaagaacttccagtagtgttgttgttcctactgagtggggaaggcccaatgcaccactttggggtggcagggtcgttggacggcggcaaattagatacattagaggaagctcttgtctatctactgatgaatataatgcttttatgaatatatttgagagaggttctcttctctactgcaatatgtcctttgatgcactgctaagtgttcgaaagcaactcgaagaatttggattcccttgtaaagctgtcaatgatagtctatggctacaggaattgttgccttatgaatagttcttgtgcttgcaagcaagcatatgtgagctcgcatacacattacaggcaggagcatgacaggagcagtgcctccgacaacataggtaatgtctaccttgcggatggccagggtgatgggaatggtgtacttgggcctgtccgtgttaatgtaagaggagcagtcgatggacttgctggtattgggagagggaactcaaatgtgcctggtgcagcttgggctcctacacgatatgtcttctcccgtgtcccttatgggcttggttcaagaaatggccagcaatttgccattgatgaatcagaacctagaattgaccgcaatggagatatttcagcagatggtctgactgcattggttaaccttagccaagaaaacaatgctgctcatctgcaggatcaaagtctatttgagacagggatgcagacaagatatcgcagtgttccatctgtttccactccaggtggttcttctgtccagatgcaggagtcaaaggagcatgaacttggatcagattgggaaaccacaaaggatgcaactatatcattagacatgaaaacacctcttagccattttccacctttccgctttggggttgagttcgaggatgtgcacaggcttgctgatggtcaggtgaaacattcgactgaagtgttttatgcaggctctctatggaaggtgagtgtccagccattcaatgatgaggatcctcatgggcgacgcacccttggactatttctccaccgacgcaaggctgagttgttagatcccttgaggaaggctcacttgtacgttgacccccgggaaaaggtcactgctcggtatcagctcatctgtccatcaaagagagaggtcatgatatttggaagcctgaagcaggctgggacgctgctaccaaaagcgccgaagggctggggctggcgcactgctatactatttgatgagcttgctgatcttctccagggtggtgccctgcgaattgctgcagtggtccagcttgtctagattagttgcagaaaacaactgcttgcaaggatggtgatagcacagcagtttgtgtaattgatatactccctccgtcctaaaatatagttttttctggtccttttttccgtccacattcgaacaaatgataatgaatagacatacatacaaactacattcataaattaagttaagtagtcaatgcttgtttagtgtaaaacgaattatattttaggacggggtgagtatgtaagaactcaatctgtcatgtactcgttgtcatgtactcgtgctctgaaatattgtataatctatagcggtttgctgtttggtatataaaagagaatatatcagatgcaaaccaaccacttgtacaaaccgtgtaaaccaacatattgatggaggtgggaggacatattgaaaatatatcagggaaggtaaaagtgccg

SEQ ID NO: 35553 - DNA, 3651 bp, Zea Mays
ccaagattcatttgatcatatatacaattattacatctaagcactagagtggagcacgtctcgcgggagtgcatgccgtagcgcgcgtgcgcacagggcggacgacgggatctcaggcggacgttgaggagcggctgatgttggagccgtcaacactcaacaaaaagcacacgttcataccctagctagcatcacgagagaaactgcctataaaatccaagctatgtgaaacagaaacaagaggtcgatcggccagagcaactgagcgtgagagaccccccataccttctagtctagcatggctgaacctcaccacacaagcagcaacggagctgctcacggtgatgctgatgatgcgtcggagaaaatgccgcccaagaggctacagagatatgattcactgcacatggaggctggaatgttccctgctggtggatcgacgcatgcagccaaggttggctgggcgaccacactgcacctagcattccagagcataggtgtggtctacggagacatggggacttctccgctctatgttttctccagcaccttcacaaacgggatcaacaacacagatgacctcctcggagtcatgtctctcattatctacactgtgattctccttccgttgataaaatattgttttattgtcctgcgagctaatgataacggtgatggaggaacgtttgcactttattcattgatatcacggtatgctagggttagcttgatacctaatcagcaggctgaagatgcgatggtatctcactacaagttagagtctcccacatatcccatgaagagggctcattggatcaagaagaagatggaaagcagtccaaaatttaaggtcttgctttttctagtgacagtcctggcaacatccatggtgattggtgatggtgtactaactccatctatgtcagtacttagcgctgtcggggggatccaacaaagagcaacgaacctgactcaaggacaaattgttggcatctcaatagccattttgatcgtcctctttcttgttcagtgctttggcacagacaaagttggttacacatttgcacctataatcttggcatggttcctcctgattgcgggtattggagtttataatttgatcaaacatgatgttagtgtcctgaaagcattcaatccaaaatatatcgtggactatttcaaaaggaatggaaagcagggctggatttctcttggaggagttattttatgcatcacaggtacttttgatggcagaattcttcaatataacaattaccctgatccctaagagatcaacttaacattttggcagaaaaattggtcttacataatggcaccgatagataattttaaccacaagtcatgtaatgtgcattgcattttttgtaaaacaggaactgaggcaatgtttgcggaccttggtcacttcaatgtgagagctattcaggtaatcgagcacttctatttcccggctttacatttttctgaatgcatgcacacacaaactactaaccccattgattatcacaagctgtgattatggagaaacacctttttagtgtgttaagaacatagtcctaaactgtgtaaaactattttcatgttctaaagaaatagtctgaatgttgaacttcaaaattgctttatgtgtcgaatcagttagatattcatggtaaagttttattacactacagattggcttttcagtagttcttttcccttcggtactgctggcatacattggacaagctgcatatcttcgtgtctacccagaaaatgttgcaaatacattctacaaatcaattccaggtccattgtactggccaacatttgtggtggctgtagctgctgctataattgcaagccaagctatgatatctggtgcctttgcaattattgctcagtcccaagttctaggttgctttccacgagttcgtgtcacccacacatcaacgaagtttgaaggacaggtctacatcccagagatcaactatgtcttgatggttttgtgtgtagctgttacagctattttccaaactacagaaaagattggcaatgcatatggtattgctgttgtctttgtgatgtttataacaacacttctagtcactttagtaatggttatgatatggaagacaagcctgctgtggattgcactctttctagtaataattggtggagcagagctcgtatacttatcttccgcattctacaagttcactcaaggtggctacttgccattagcttttgcaggaattttgatgtttataatggccacatggcattatgtccatgttcatcgatacaactatgagctccagaacaaagtatcaagtaactatgtggcagaattgtccgcaaggagaaatctggccaggttgccaggaataggctttttgtactctgagcttgtacaaggcatcccacccatacttcctcacttgatagaaagggtaccttccatccattcagttctcgtgattatctcaataaagtacttaccgatcagcaaaatagaaacaagcgagaggttcctcttccggtatgtggagccaagagattacaggctattccgatgtgtggtgcgctatggatacaatgataaagtggaagacccaagagaatttgagggcttagttattgaacatctgaaacaatttatccatcaagaatcattttacagccaaggagataattcaacagaagaagtagaagatgcaaatgagccttccgtcagagttcaaggggcaacattgtccgatagttcttcagatagaagcactgctgctccatcaaatggatgcatctatgagatccaaacaatacaaagagagatggaggatggtgttgtccatatgctaggagaagctaatgtggtggcagaaccaaatgcagatttcttcaagaagataatagttgactacgcttacaatttcatgaggaagaacttcagacaaccagagaagataacatgtgtccctcataacagactgctccgggttggaatgacatatgagatctagggcgatgctgaactttgtggagcacagcaatttaatcaaagcaggcaggtggttagctacttgacaatggagtcggtcttctcagtatcaagtcaggaaatggaagggttctgttcaaagaggtggagaaattaactagagtacatctaatgggtccttccttatgtcataaacctgttagaaatatttcgttttaacttactcatgccaaactaggtacgaaatactctgtattgttctaatgacattaaacggtgttatactgttacttattttccctcccaaataattcatgggtgaagatcctcacctagaaaatttgtattacacaatcgtaacgtccaagtaaatagctaagattggcataccgagggtagaatgcatgaggggaacttcatagcaagcaagacaaatatgatgctatattgtggttacttcagagcaagcaaaacaaacaaggtaaaatagggcagtctgcttgcgcgtttgagatattgtactattgacacagataaaaacacccatagcgaaggcaggcaagcattagcacgttggtaaaacagagcgtcgaggccgggcatttcgtcaaacagaacaaggggagcaaaagagagaagctaaaaacgac

SEQ ID NO: 35554 - DNA, 3606 bp, Zea Mays
aaacaaatatgatttaacgttatcacttacccattacgttacaaacatttgaaccaaacggcaccaagattcatttgatcatatatacaattattacatctaagcactagagtggagcacgtctcgcgggagtgcatgccgtagcgcgcgtgcgcacagggcggacgacgggatctcaggcggacgttgaggagcggctgatgttggagccgtcaacactcaacaaaaagcacacgttcataccctagctagcatcacgagagaaactgcctataaaatccaagctatgtgaaacagaaacaagaggtcgatcggccagagcaactgagcgtgagagaccccccataccttctagtctagcatggctgaacctcaccacacaagcagcaacggagctgctcacggtgatgctgatgatgcgtcggagaaaatgccgcccaagaggctacagagatatgattcactgcacatggaggctggaatgttccctgctggtggatcgacgcatgcagccaaggttggctgggcgaccacactgcacctagcattccagagcataggtgtggtctacggagacatggggacttctccgctctatgttttctccagcaccttcacaaacgggatcaacaacacagatgacctcctcggagtcatgtctctcattatctacactgtgattctccttccgttgataaaatattgttttattgtcctgcgagctaatgataacggtgatggaggaacgtttgcactttattcattgatatcacggtatgctagggttagcttgatacctaatcagcaggctgaagatgcgatggtatctcactacaagttagagtctcccacatatcccatgaagagggctcattggatcaagaagaagatggaaagcagtccaaaatttaaggtcttgctttttctagtgacagtcctggcaacatccatggtgattggtgatggtgtactaactccatctatgtcaggtgagttcagtctccttcctcatctcttgtaaaaaatgttgtatacagggtatagttaaaatacacatggattattaaaataaataaggcagtgtatcacttttatgcactcttttgatgcacatgctaaaaatctactctcagttcaaatatgaaagacgtaaagataaaagtgccacttgcaataattaagagagagctattatcctgccatgcgatgcatatcctctggccactagaatatacctacaagattgattttttaaaatggaaactcataggtattcttttgcagtacttagcgctgtcggggggatccaacaaagagcaacgaacctgactcaaggacaaattgttggcatctcaatagccattttgatcgtcctctttcttgttcagtgctttggcacagacaaagttggttacacatttgcacctataatcttggcatggttcctcctgattgcgggtattggagtttataatttgatcaaacatgatgttagtgtcctgaaagcattcaatccaaaatatatcgtggactatttcaaaaggaatggaaagcagggctggatttctcttggaggagttattttatgcatcacaggaactgaggcaatgtttgcggaccttggtcacttcaatgtgagagctattcagattggcttttcagtagttcttttcccttcggtactgctggcatacattggacaagctgcatatcttcgtgtctacccagaaaatgttgcaaatacattctacaaatcaattccaggtccattgtactggccaacatttgtggtggctgtagctgctgctataattgcaagccaagctatgatatctggtgcctttgcaattattgctcagtcccaagttctaggttgctttccacgagttcgtgtcacccacacatcaacgaagtttgaaggacaggtctacatcccagagatcaactatgtcttgatggttttgtgtgtagctgttacagctattttccaaactacagaaaagattggcaatgcatatggtattgctgttgtctttgtgatgtttataacaacacttctagtcactttagtaatggttatgatatggaagacaagcctgctgtggattgcactctttctagtaataattggtggagcagagctcgtatacttatcttccgcattctacaagttcactcaaggtggctacttgccattagcttttgcaggaattttgatgtttataatggccacatggcattatgtccatgttcatcgatacaactatgagctccagaacaaagtatcaagtaactatgtggcagaattgtccgcaaggagaaatctggccaggttgccaggaataggctttttgtactctgagcttgtacaaggcatcccacccatacttcctcacttgatagaaagggtaccttccatccattcagttctcgtgattatctcaataaagtacttaccgatcagcaaaatagaaacaagcgagaggttcctcttccggtatgtggagccaagagattacaggctattccgatgtgtggtgcgctatggatacaatgataaagtggaagacccaagagaatttgagggcttagttattgaacatctgaaacaatttatccatcaagaatcattttacagccaaggagataattcaacagaagaagtagaagatgcaaatgagccttccgtcagagttcaaggggcaacattgtccgatagttcttcagatagaagcactgctgctccatcaaatggatgcatctatgagatccaaacaatacaaagagagatggaggatggtgttgtccatatgctaggagaagctaatgtggtggcagaaccaaatgcagatttcttcaagaagataatagttgactacgcttacaatttcatgaggaagaacttcagacaaccagagaagataacatgtgtccctcataacagactgctccgggttggaatgacatatgagatctagggcgatgctgaactttgtggagcacagcaatttaatcaaagcaggcaggtggttagctacttgacaatggagtcggtcttctcagtatcaagtcaggaaatggaagggttctgttcaaagaggtggagaaattaactagagtacatctaatgggtccttccttatgtcataaacctgttagaaatatttcgttttaacttactcatgccaaactaggtacgaaatactctgtattgttctaatgacattaaacggtgttatactgttacttattttccctcccaaataattcatgggtgaagatcctcacctagaaaatttgtattacacaatcgtaacgtccaagtaaatagctaagattggcataccgagggtagaatgcatgaggggaacttcatagcaagcaagacaaatatgatgctatattgtggttacttcagagcaagcaaaacaaacaaggtaaaatagggcagtctgcttgcgcgtttgagatattgtactattgacacagataaaaacacccatagcgaaggcaggcaagcattagcacgttggtaaaacagagcgtcgaggccgggcatttcgtcaaacagaacaaggggagcaaaagagagaagctaaaaacgac

SEQ ID NO: 35555 - DNA, 778 bp, Zea Mays
gttggaaagattcctggcggaccaacacatgcagccgaggagaagaggactgggaagaggattgagactagagtcagacgtaatgggttgtggtacatcagccaagaagatacagctctggcaatagaggaaggtgtgaagatattttgttgcaccatcgcagactgggacacccatcttttgatagtgaccaaatgcagatttattgaagaagataatagttggctacgcttgcagtttcatgaggaagaacttcagtcaaccagagaagataacatgcatccctcataacaggatgctacgagtgggaatgacatatgagatctagggcaatattagacttggtacaggagcagaggaccacaatgtgatcagagcacccagacagccaaaaagtagggtttttcattatcaatcatgccaggaaaggcaaacgcaaggattggggtactgtcaaataaccagcctaccagagtcaactgaaaaagtacgggatcaaatattctatgtttagatatggagaaactaggggaaagcaaccattagctgagcccctgatacaacctatcaactatctgcttttgaaagtctgaaactcatactgttcagcatgttaagctaaatattgtagtagcatattggcacaaggtaaaatgaagaggaacttgttttcttttttaatttccttctaattttaaattatttgtaacaaactacatattaagcactgccctacagattgtaagtggtgtcatgttatattcttatgacatcgttg

SEQ ID NO: 35556 - DNA, 433 bp, Zea Mays
ccgcgttgcggcatccttccttccttctcacgaaaaggcaggcaagggaaaggcaaaggacaacccatcccctgcctcctccgttgctctgctgctccccctccttatctaatcctctggttcctggacaccggcctgcaagctccagcagcagcggcgccggcgacgaaaggaggaggattgctaccatcctatatcatatcatacatatacacaaggaggaggagaaggtgtgtagcgaggttgaggtccggaggatgccttccagtgccatgagttccgggctggagccggtgctctgcgcgcctcggccgcgcagggtccagcagctgcacccctgcagcgccgacctcatccttggcgcaccgcccttcccgcgcaacgccaacagcaaggagaagaggactgggaagaggattgagactagagtcag

SEQ ID NO: 35557 - DNA, 350 bp, Zea Mays
tagggtttgtggcggcgggcggcggctgtagctggagccggcgacgcatcctcctcgtccggccagccgcacattgtgatctaatacaatggctagcgatggtgatgcttcacctccacggaagcgtatgttgttggagttgccttgtgatgaagaaggtgcaaatgtgagtcaaaatgttggtgtgtccgcatcatcagccacacctgccgctgctagagattctcaagaacaaggtgaaatttatgatgaacttgttatattgtgtacttgtgttctttgtgatcaacttatcatattatgaacttgtgatctatgttatcaatttgtaatattgtgaacttgtgata

SEQ ID NO: 35558 - DNA, 1441 bp, Zea Mays
atgccacagcacgacagctctgctactccacccgttgagtaccacgacagctctgctacgttcgaaacgaaaaaagggacaggaaaagacagcggaaaaatcctggacggtaggtgtccaactccagcgcaccattatccgcttgcttttttgtctcttggccgcaacgtgaagtgcagcagcagccagcagcgggggctggagcactcaccagtcaccactcagcagcgatcgcagcaccgcggcgagataatgagcagcctgtcctccggcatctctgcctcgccatctgcagcgcccagcaccgctcggcgccgccatgacgcagcgccgcagcagctgagggtgaaggcggcggcgcggccacagctgctgcacgccggccgccggcgttcgagtgtcgggaggaggccgggcggcggcgcggtggtggtgagggccgggcctgggccgctgtcggagatcgagccggacctggaggaggacgccatcgacgtgtaccgcaccaacggcatcagcccggtccgtcgtcgtcgtccctcgtttccttccttttcttctcttctcttctcggttgtcgttccgcgcttagttagttagactaggaacacgcaggaaagcagtgaaccttgacgtaggttgtgctatgaacgagagctctgaagaacggagtacgtttcgttcgttcgttcgtggatgacactggagaggatctgtcttgtcttgtcttgtcttgcaggaggacttcgagtacgggaagtatgacggacaccacacctatttcgaaggccaagacaagaagggcttctgggaggatgtctccgagtggtaccaagaagctgagcctcctcagggctttcaagcactcatctcctgggcatttcctcctgcgatcatcctcggcatggctttcaatgtgccgggggagtacctgtacatcggggcggccgtcttcatcgtggtgttctgcgtcatcgagatgggcaagcccgacaagccgcacaacttcgagccggagatctacatgatggagaggtcggcccgcgacaagctcatcgccgactacaactccatggacatctgggacttcaacgagaagtacggcgagctctgggacttcaccgtcaacaccagggacgacatcgtcaagtcgacctagatgcattgcgtacaccgctcgctgcccttcagattgttgcctcacagcaaaaaaaaccctgtgaaaggaagctgtagctgctaggaaaatctcttgaataaaaaggaaagccatccttcctgtaagactggagagcctgaaaatctgttctatcctcgtgccatataatacacgacatgttctgcagactgttgcttcaactttctgcatgaattgcctttgttttcatgttttctccaatactttgaagggaagagaaaaaaaaacacatgcaagactgat

SEQ ID NO: 35559 - DNA, 1529 bp, Zea Mays
atgccacagcacgacagctctgctactccacccgttgagtaccacgacagctctgctacgttcgaaacgaaaaaagggacaggaaaagacagcggaaaaatcctggacggtaggtgtccaactccagcgcaccattatccgcttgcttttttgtctcttggccgcaacgtgaagtgcagcagcagccagcagcgggggctggagcactcaccagtcaccactcagcagcgatcgcagcaccgcggcgagataatgagcagcctgtcctccggcatctctgcctcgccatctgcagcgcccagcaccgctcggcgccgccatgacgcagcgccgcagcagctgagggtgaaggcggcggcgcggccacagctgctgcacgccggccgccggcgttcgagtgtcgggaggaggccgggcggcggcgcggtggtggtgagggccgggcctgggccgctgtcggagatcgagccggacctggaggaggacgccatcgacgtgtaccgcaccaacggcatcagcccggaggacttcgagtacgggaagtatgacggacaccacacctatttcgaaggccaagacaagaagggcttctgggaggatgtctccgagtggtaccaagaagctgagcctcctcagggctttcaaggtactaccactactgtgtagctctttcagatctttatgcttctgccttgctcatttgttgcactgcatcaatggcggcgatctcttgcagcactcatctcctgggcatttcctcctgcgatcatcctcggcatggctttcaatgtgccggtaaggatccagcacttcctcctcccagtacctagtcccctgtttggaacacgaagtttcctggtcggaagtgaattgtgctttctgtcgggaaagtgaattgtttcctgtgaaattcctgcgctccaagcatttgtgccccaaaaaaaaaaaaaaaaaaactcgtcacctgcatctactgatcggatcggagacgcgtctgcttgtgtcgccagggggagtacctgtacatcggggcggccgtcttcatcgtggtgttctgcgtcatcgagatgggcaagcccgacaagccgcacaacttcgagccggagatctacatgatggagaggtcggcccgcgacaagctcatcgccgactacaactccatggacatctgggacttcaacgagaagtacggcgagctctgggacttcaccgtcaacaccagggacgacatcgtcaagtcgacctagatgcattgcgtacaccgctcgctgcccttcagattgttgcctcacagcaaaaaaaaccctgtgaaaggaagctgtagctgctaggaaaatctcttgaataaaaaggaaagccatccttcctgtaagactggagagcctgaaaatctgttctatcctcgtgccatataatacacgacatgttctgcagactgttgcttcaactttctgcatgaattgcctttgttttcatgttttctccaatactttgaagggaagagaaaaaaaaacacatgcaagactgat

SEQ ID NO: 35560 - DNA, 1715 bp, Zea Mays
ctcttattggttttgtacatatgggagggtcttgttgaaatcagggaagagtatgatgaggatacagagacaaagacaacaagatcagaggcttcaattgctactggggttatgtttgataatgatagggaacatgctcaaatcatggcaaggttagttgaactcgaaagggaagaaaaggaagctggaaatacttgtgaagatgatgatgatgatggcgacgatgatggagatgctggtacaagtgaggatggtgaggaaaataaggaacccggaaatgctttaagtgatggcaatgaggaccacagttctggttctggtgctttattttttggaaatggtggcaatgataggagtaatgggaatatcaagctgaagagtgcactgaagaagcctggaggagatgaaatgctgaaagacatttctcatacaccatcagccgatacatctcatccagtatttggtggccaaacttctataacaaatcctgatgtccgagttcacactaaagaatcatgtaccatattgctgatttatgtgtgagcccacacgttctacttgcagctgtttcttttgaagacgacaaatttgtggttagttcgtcaaagtctcctaccttgctagtgggttcaatacagtctgatcctgggctcaagagttcttcagaccccactccatcatgtgaccgaaagataatatcgagtgggcgaaaggccttcacaggatctatcgtcgagcacgacgatgacgatctttcaaccattcaaccttctgcgggcaattcgttggcaaaacctggtacttctgcgtcttcaaggcccatgtcaaaattcaagatgcagaaaggagggcgtgcaccttcaccagtgagactgtttggcggggatacatgggatgttcagttagattcagtttaattagtggctggtggtgcagtatctctttcagaaacctatatatatatgccgccatgccgtttgtaaatctttcggcaacaaaagaaagaaagaaagtgtcgaaagattatattctctggatttaattggaaaaccatgctgcttaagactgatgacaacacaatctacggagactaaatagtgacgagggaacccatgggaaatggagcaaagaaggaaatcgtgagggtgatttggttggttggtccaacgtccaagcatcgcatcatcggttagccagccatcagtgatcggagttggtaaaacccccccaaagaacatgtcggccaataagtggagttaattacagatctagtggtgctagctagcttgcaatgctgttcctacttgtgctgtaacacagtgtcatgacatggtcagtagcagctgacgagcgccgccgcgcagtcaggtggtcgtcggctggtgtctcttcttctactccttccctaggcgccgccgccgccgccgtggagcaccagattgtctcccacacgtctctcaccagcagaaagggaggaaggacctgccctctgcatgtcagctccacctgctgccattatgcattattccattcagttggtaataatcgtcacaatcagcttgtaaagatggcgcaaaatgccagatctcgataatctgatatacaccagtacgaattaagcagaactatatgtatgcatcattaaattttctaaacacgtacatacgtacgtatgttattaaactcgtaacgaactactaatggtcaggtttttc

SEQ ID NO: 35561 - DNA, 1876 bp, Zea Mays
gaaaactgaagtcccctttggtggtgctgcatttttcccagggcgtttaatacacacaaatgaactcttggtgcttctgggtgaggggtactatgccgagaggtctgctaagcagacgactgatatattgcacaggagggggcaggaattggaagctcaggtcgaagcaatgaaggcaactatcactgatcttgaagctgaggcgaatttttttgagtccactgccaccgaggcttcagagggtcttgttgaaatcagggaagagtatgatgaggatacagagacaaagacaacaagatcagaggcttcaattgctactggggttatgtttgataatgatagggaacatgctcaaatcatggcaaggttagttgaactcgaaagggaagaaaaggaagctggaaatacttgtgaagatgatgatgatgatggcgacgatgatggagatgctggtacaagtgaggatggtgaggaaaataaggaacccggaaatgctttaagtgatggcaatgaggaccacagttctggttctggtgctttattttttggaaatggtggcaatgataggagtaatgggaatatcaagctgaagagtgcactgaagaagcctggaggagatgaaatgctgaaagacatttctcatacaccatcagccgatacatctcatccagtatttggtggccaaacttctataacaaatcctgatgtccgagttcacactaaagctgtttcttttgaagacgacaaatttgtggttagttcgtcaaagtctcctaccttgctagtgggttcaatacagtctgatcctgggctcaagagttcttcagaccccactccatcatgtgaccgaaagataatatcgagtgggcgaaaggccttcacaggatctatcgtcgagcacgacgatgacgatctttcaaccattcaaccttctgcgggcaattcgttggcaaaacctggtacttctgcgtcttcaaggcccatgtcaaaattcaagatgcagaaaggagggcgtgcaccttcaccagtgagactgtttggcggggatacatgggatgttcagttagattcagtttaattagtggctggtggtgcagtatctctttcagaaacctatatatatatgccgccatgccgtttgtaaatctttcggcaacaaaagaaagaaagaaagtgtcgaaagattatattctctggatttaattggaaaaccatgctgcttaagactgatgacaacacaatctacggagactaaatagtgacgagggaacccatgggaaatggagcaaagaaggaaatcgtgagggtgatttggttggttggtccaacgtccaagcatcgcatcatcggttagccagccatcagtgatcggagttggtaaaacccccccaaagaacatgtcggccaataagtggagttaattacagatctagtggtgctagctagcttgcaatgctgttcctacttgtgctgtaacacagtgtcatgacatggtcagtagcagctgacgagcgccgccgcgcagtcaggtggtcgtcggctggtgtctcttcttctactccttccctaggcgccgccgccgccgccgtggagcaccagattgtctcccacacgtctctcaccagcagaaagggaggaaggacctgccctctgcatgtcagctccacctgctgccattatgcattattccattcagttggtaataatcgtcacaatcagcttgtaaagatggcgcaaaatgccagatctcgataatctgatatacaccagtacgaattaagcagaactatatgtatgcatcattaaattttctaaacacgtacatacgtacgtatgttattaaactcgtaacgaactactaatggtcaggtttttc

SEQ ID NO: 35562 - DNA, 2185 bp, Zea Mays
agcaaatctctcagtttggtagcacgaaaactgaagtcccctttggtggtgctgcatttttcccagggcgtttaatacacacaaatgaactcttggtgcttctgggtgaggggtactatgccgagaggtctgctaagcagacgactgatatattgcacaggagggggcaggaattggaagctcaggtcgaagcaatgaaggcaactatcactgatcttgaagctgaggcgaatttttttgagtccactgccaccgaggcttcagagggtcttgttgaaatcagggaagagtatgatgaggatacagagacaaagacaacaagatcagaggcttcaattgctactggggttatgtttgataatgatagggaacatgctcaaatcatggcaaggttagttgaactcgaaagggaagaaaaggaagctggaaatacttgtgaagatgatgatgatgatggcgacgatgatggagatgctggtacaagtgaggatggtgaggaaaataaggaacccggaaatgctttaagtgatggcaatgaggaccacagttctggttctggtgctttattttttggaaatggtggcaatgataggagtaatgggaatatcaagctgaagagtgcactgaagaagcctggaggagatgaaatgctgaaagacatttctcatacaccatcagccgatacatctcatccagtatttggtggccaaacttctataacaaatcctgatgtccgagttcacactaaaggttagttcggcctaggggtggtaacggatcacgattcaaatgttcttcatgattcgtttgagctcttaattaattttagttttaaaaaatagagcccaatccaaatacgatctgatccttaaattttatagtgtaaaatttagagtccattatcacccctagttcagcccttggttggaggcaacttattcgtagcatagtagaattgacacctttgtgtattgttgctggagatggaactgaacctgaattttgtttttcacttggtgcttcatctgctttctctgtttcttttgaagacgacaaatttgtggttagttcgtcaaagtctcctaccttgctagtgggttcaatacagtctgatcctgggctcaagagttcttcagaccccactccatcatgtgaccgaaagataatatcgagtgggcgaaaggccttcacaggatctatcgtcgagcacgacgatgacgatctttcaaccattcaaccttctgcgggcaattcgttggcaaaacctggtacttctgcgtcttcaaggcccatgtcaaaattcaagatgcagaaaggagggcgtgcaccttcaccagtgagactgtttggcggggatacatgggatgttcagttagattcagtttaattagtggctggtggtgcagtatctctttcagaaacctatatatatatgccgccatgccgtttgtaaatctttcggcaacaaaagaaagaaagaaagtgtcgaaagattatattctctggatttaattggaaaaccatgctgcttaagactgatgacaacacaatctacggagactaaatagtgacgagggaacccatgggaaatggagcaaagaaggaaatcgtgagggtgatttggttggttggtccaacgtccaagcatcgcatcatcggttagccagccatcagtgatcggagttggtaaaacccccccaaagaacatgtcggccaataagtggagttaattacagatctagtggtgctagctagcttgcaatgctgttcctacttgtgctgtaacacagtgtcatgacatggtcagtagcagctgacgagcgccgccgcgcagtcaggtggtcgtcggctggtgtctcttcttctactccttccctaggcgccgccgccgccgccgtggagcaccagattgtctcccacacgtctctcaccagcagaaagggaggaaggacctgccctctgcatgtcagctccacctgctgccattatgcattattccattcagttggtaataatcgtcacaatcagcttgtaaagatggcgcaaaatgccagatctcgataatctgatatacaccagtacgaattaagcagaactatatgtatgcatcattaaattttctaaacacgtacatacgtacgtatgttattaaactcgtaacgaactactaatggtcaggtttttc

SEQ ID NO: 35563 - DNA, 1871 bp, Zea Mays
ctcaagtcccctttggtggtgctgcatttttcccagggcgtttaatacacacaaatgaactcttggtgcttctgggtgaggggtactatgccgagaggtctgctaagcagacgactgatatattgcacaggagggggcaggaattggaagctcaggtcgaagcaatgaaggcaactatcactgatcttgaagctgaggcgaatttttttgagtccactgccaccgaggcttcagagggtcttgttgaaatcagggaagagtatgatgaggatacagagacaaagacaacaagatcagaggcttcaattgctactggggttatgtttgataatgatagggaacatgctcaaatcatggcaaggttagttgaactcgaaagggaagaaaaggaagctggaaatacttgtgaagatgatgatgatgatggcgacgatgatggagatgctggtacaagtgaggatggtgaggaaaataaggaacccggaaatgctttaagtgatggcaatgaggaccacagttctggttctggtgctttattttttggaaatggtggcaatgataggagtaatgggaatatcaagctgaagagtgcactgaagaagcctggaggagatgaaatgctgaaagacatttctcatacaccatcagccgatacatctcatccagtatttggtggccaaacttctataacaaatcctgatgtccgagttcacactaaagctgtttcttttgaagacgacaaatttgtggttagttcgtcaaagtctcctaccttgctagtgggttcaatacagtctgatcctgggctcaagagttcttcagaccccactccatcatgtgaccgaaagataatatcgagtgggcgaaaggccttcacaggatctatcgtcgagcacgacgatgacgatctttcaaccattcaaccttctgcgggcaattcgttggcaaaacctggtacttctgcgtcttcaaggcccatgtcaaaattcaagatgcagaaaggagggcgtgcaccttcaccagtgagactgtttggcggggatacatgggatgttcagttagattcagtttaattagtggctggtggtgcagtatctctttcagaaacctatatatatatgccgccatgccgtttgtaaatctttcggcaacaaaagaaagaaagaaagtgtcgaaagattatattctctggatttaattggaaaaccatgctgcttaagactgatgacaacacaatctacggagactaaatagtgacgagggaacccatgggaaatggagcaaagaaggaaatcgtgagggtgatttggttggttggtccaacgtccaagcatcgcatcatcggttagccagccatcagtgatcggagttggtaaaacccccccaaagaacatgtcggccaataagtggagttaattacagatctagtggtgctagctagcttgcaatgctgttcctacttgtgctgtaacacagtgtcatgacatggtcagtagcagctgacgagcgccgccgcgcagtcaggtggtcgtcggctggtgtctcttcttctactccttccctaggcgccgccgccgccgccgtggagcaccagattgtctcccacacgtctctcaccagcagaaagggaggaaggacctgccctctgcatgtcagctccacctgctgccattatgcattattccattcagttggtaataatcgtcacaatcagcttgtaaagatggcgcaaaatgccagatctcgataatctgatatacaccagtacgaattaagcagaactatatgtatgcatcattaaattttctaaacacgtacatacgtacgtatgttattaaactcgtaacgaactactaatggtcaggtttttc

SEQ ID NO: 35564 - DNA, 2093 bp, Zea Mays
cttaccttctatacctcaagtcccctttggtggtgctgcatttttcccagggcgtttaatacacacaaatgaactcttggtgcttctgggtgaggggtactatgccgagaggtctgctaagcagacgactgatatattgcacaggagggggcaggaattggaagctcaggtcgaagcaatgaaggcaactatcactgatcttgaagctgaggcgaatttttttgagtccactgccaccgaggcttcagagggtcttgttgaaatcagggaagagtatgatgaggatacagagacaaagacaacaagatcagaggcttcaattgctactggggttatgtttgataatgatagggaacatgctcaaatcatggcaaggttagttgaactcgaaagggaagaaaaggaagctggaaatacttgtgaagatgatgatgatgatggcgacgatgatggagatgctggtacaagtgaggatggtgaggaaaataaggaacccggaaatgctttaagtgatggcaatgaggaccacagttctggttctggtgctttattttttggaaatggtggcaatgataggagtaatgggaatatcaagctgaagagtgcactgaagaagcctggaggagatgaaatgctgaaagacatttctcatacaccatcagccgatacatctcatccagtatttggtggccaaacttctataacaaatcctgatgtccgagttcacactaaagaatcatgtaccatattgctgatttatgtgtgagcccacacgttctacttgcagctgtttcttttgaagacgacaaatttgtggttagttcgtcaaagtctcctaccttgctagtgggttcaatacagtctgatcctgggctcaagagttcttcagaccccactccatcatgtgaccgaaagataatatcgagtgggcgaaaggccttcacaggatctatcgtcgagcacgacgatgacgatctttcaaccattcaaccttctgcgggcaattcgttggcaaaacctggtacttctgcgtcttcaaggcccatgtcaaaattcaagatgcagaaaggagggcggtaagtctcgataccacggggcgatgtatcttcggtggttgattagatgcatctggaacaatcatgttaagtggtagttttgtgcgagctgagcacctggaagctagacattttgttgtggagcgattgccctcttggggcctgttgttgtggagtgcaccttcaccagtgagactgtttggcggggatacatgggatgttcagttagattcagtttaattagtggctggtggtgcagtatctctttcagaaacctatatatatatgccgccatgccgtttgtaaatctttcggcaacaaaagaaagaaagaaagtgtcgaaagattatattctctggatttaattggaaaaccatgctgcttaagactgatgacaacacaatctacggagactaaatagtgacgagggaacccatgggaaatggagcaaagaaggaaatcgtgagggtgatttggttggttggtccaacgtccaagcatcgcatcatcggttagccagccatcagtgatcggagttggtaaaacccccccaaagaacatgtcggccaataagtggagttaattacagatctagtggtgctagctagcttgcaatgctgttcctacttgtgctgtaacacagtgtcatgacatggtcagtagcagctgacgagcgccgccgcgcagtcaggtggtcgtcggctggtgtctcttcttctactccttccctaggcgccgccgccgccgccgtggagcaccagattgtctcccacacgtctctcaccagcagaaagggaggaaggacctgccctctgcatgtcagctccacctgctgccattatgcattattccattcagttggtaataatcgtcacaatcagcttgtaaagatggcgcaaaatgccagatctcgataatctgatatacaccagtacgaattaagcagaactatatgtatgcatcattaaattttctaaacacgtacatacgtacgtatgttattaaactcgtaacgaactactaatggtcaggtttttc

SEQ ID NO: 35565 - DNA, 2433 bp, Zea Mays
tccttaccttctatacctcaagtcccctttggtggtgctgcatttttcccagggcgtttaatacacacaaatgaactcttggtgcttctgggtgaggggtactatgccgagaggtctgctaagcagacgactgatatattgcacaggagggggcaggaattggaagctcaggtcgaagcaatgaaggcaactatcactgatcttgaagctgaggcgaatttttttgagtccactgccaccgaggcttcagagggtcttgttgaaatcagggaagagtatgatgaggatacagagacaaagacaacaagatcaggaaagattaatcaaagaaagagattgagtcttgcctccctgctgttctcaaccccattgctgcgcctgaaccctaggtcaggcgtcaccacggcaatctctcacacctcttcctccaaccctctaaccattagccactcatataacctccgcagccggagtaattctaacaacctggtatcggatatgccaggatctgctgaagctgaaactgcagcttcagcccagccgtcggagttggcagcaatcaccaccgcccttgctgaagtccagcgccaactggggctcttcgccacgcagatggcctccatgtcctcccgcattgccgcggtggaatccacctcaggaacatcggccatggcgccaccaccagactgcccctacgacatgcctggatatgatgggctgtggctagcctacagttccaaccaaggtttccaggccacagtagcaaatggtgacaagattcactgccgacagattgctaacagtattgaggcttcaattgctactggggttatgtttgataatgatagggaacatgctcaaatcatggcaaggttagttgaactcgaaagggaagaaaaggaagctggaaatacttgtgaagatgatgatgatgatggcgacgatgatggagatgctggtacaagtgaggatggtgaggaaaataaggaacccggaaatgctttaagtgatggcaatgaggaccacagttctggttctggtgctttattttttggaaatggtggcaatgataggagtaatgggaatatcaagctgaagagtgcactgaagaagcctggaggagatgaaatgctgaaagacatttctcatacaccatcagccgatacatctcatccagtatttggtggccaaacttctataacaaatcctgatgtccgagttcacactaaagatggaactgaacctgaattttgtttttcacttggtgcttcatctgctttctctgtttcttttgaagacgacaaatttgtggttagttcgtcaaagtctcctaccttgctagtgggttcaatacagtctgatcctgggctcaagagttcttcagaccccactccatcatgtgaccgaaagataatatcgagtgggcgaaaggccttcacaggatctatcgtcgagcacgacgatgacgatctttcaaccattcaaccttctgcgggcaattcgttggcaaaacctggtacttctgcgtcttcaaggcccatgtcaaaattcaagatgcagaaaggagggcgtgcaccttcaccagtgagactgtttggcggggatacatgggatgttcagttagattcagtttaattagtggctggtggtgcagtatctctttcagaaacctatatatatatgccgccatgccgtttgtaaatctttcggcaacaaaagaaagaaagaaagtgtcgaaagattatattctctggatttaattggaaaaccatgctgcttaagactgatgacaacacaatctacggagactaaatagtgacgagggaacccatgggaaatggagcaaagaaggaaatcgtgagggtgatttggttggttggtccaacgtccaagcatcgcatcatcggttagccagccatcagtgatcggagttggtaaaacccccccaaagaacatgtcggccaataagtggagttaattacagatctagtggtgctagctagcttgcaatgctgttcctacttgtgctgtaacacagtgtcatgacatggtcagtagcagctgacgagcgccgccgcgcagtcaggtggtcgtcggctggtgtctcttcttctactccttccctaggcgccgccgccgccgccgtggagcaccagattgtctcccacacgtctctcaccagcagaaagggaggaaggacctgccctctgcatgtcagctccacctgctgccattatgcattattccattcagttggtaataatcgtcacaatcagcttgtaaagatggcgcaaaatgccagatctcgataatctgatatacaccagtacgaattaagcagaactatatgtatgcatcattaaattttctaaacacgtacatacgtacgtatgttattaaactcgtaacgaactactaatggtcaggtttttc

SEQ ID NO: 35566 - DNA, 2320 bp, Zea Mays
cgccaccgccgcctcccgtttgttctcaagattctctcccgccaccgctccgagtcccaacctccatcgacggggaggcgtcctccatccgggccggttagattcatcgctttgtagctggtcctcgtcgtttccctctgctgtggtgggagaagcgactcgcgcgcgcgatcggccaacaaattaagcacggggcagggccgtacgcaggaggcgagctctagggctctccggggagaaggttgccaggcacgccaggtgaacgccgtactgagtttgcagtccgggacgtagcgcgttctctggtcgggaggtggggaagcggagagcgatggctgcgccgaggaaggggacggcgacgccactgggcgccgtattctcgccagaggagacgaagagggccgtggcgagggtggccgagtccatcgctggccgccgcgccgagctcgggcacctactgggcttcgtcgccgacaacgcggccctcgtctccctcgtcaacaggctcccagtcgaactctcccacgaaatcatggtgcttctgggtgaggggtactatgccgagaggtctgctaagcagacgactgatatattgcacaggagggggcaggaattggaagctcaggtcgaagcaatgaaggcaactatcactgatcttgaagctgaggcgaatttttttgagtccactgccaccgaggcttcagagggtcttgttgaaatcagggaagagtatgatgaggatacagagacaaagacaacaagatcagaggcttcaattgctactggggttatgtttgataatgatagggaacatgctcaaatcatggcaaggttagttgaactcgaaagggaagaaaaggaagctggaaatacttgtgaagatgatgatgatgatggcgacgatgatggagatgctggtacaagtgaggatggtgaggaaaataaggaacccggaaatgctttaagtgatggcaatgaggaccacagttctggttctggtgctttattttttggaaatggtggcaatgataggagtaatgggaatatcaagcctggaggagatgaaatgctgaaagacatttctcatacaccatcagccgatacatctcatccagtatttggtggccaaacttctataacaaatcctgatgtccgagttcacactaaagctgtttcttttgaagacgacaaatttgtggttagttcgtcaaagtctcctaccttgctagtgggttcaatacagtctgatcctgggctcaagagttcttcagaccccactccatcatgtgaccgaaagataatatcgagtgggcgaaaggccttcacaggatctatcgtcgagcacgacgatgacgatctttcaaccattcaaccttctgcgggcaattcgttggcaaaacctggtacttctgcgtcttcaaggcccatgtcaaaattcaagatgcagaaaggagggcgtgcaccttcaccagtgagactgtttggcggggatacatgggatgttcagttagattcagtttaattagtggctggtggtgcagtatctctttcagaaacctatatatatatgccgccatgccgtttgtaaatctttcggcaacaaaagaaagaaagaaagtgtcgaaagattatattctctggatttaattggaaaaccatgctgcttaagactgatgacaacacaatctacggagactaaatagtgacgagggaacccatgggaaatggagcaaagaaggaaatcgtgagggtgatttggttggttggtccaacgtccaagcatcgcatcatcggttagccagccatcagtgatcggagttggtaaaacccccccaaagaacatgtcggccaataagtggagttaattacagatctagtggtgctagctagcttgcaatgctgttcctacttgtgctgtaacacagtgtcatgacatggtcagtagcagctgacgagcgccgccgcgcagtcaggtggtcgtcggctggtgtctcttcttctactccttccctaggcgccgccgccgccgccgtggagcaccagattgtctcccacacgtctctcaccagcagaaagggaggaaggacctgccctctgcatgtcagctccacctgctgccattatgcattattccattcagttggtaataatcgtcacaatcagcttgtaaagatggcgcaaaatgccagatctcgataatctgatatacaccagtacgaattaagcagaactatatgtatgcatcattaaattttctaaacacgtacatacgtacgtatgttattaaactcgtaacgaactactaatggtcaggtttttc

SEQ ID NO: 35567 - DNA, 2836 bp, Zea Mays
cgccaccgccgcctcccgtttgttctcaagattctctcccgccaccgctccgagtcccaacctccatcgacggggaggcgtcctccatccgggccggttagattcatcgctttgtagctggtcctcgtcgtttccctctgctgtggtgggagaagcgactcgcgcgcgcgatcggccaacaaattaagcacggggcagggccgtacgcaggaggcgagctctagggctctccggggagaaggttgccaggcacgccaggtgaacgccgtactgagtttgcagtccgggacgtagcgcgttctctggtcgggaggtggggaagcggagagcgatggctgcgccgaggaaggggacggcgacgccactgggcgccgtattctcgccagaggagacgaagagggccgtggcgagggtggccgagtccatcgctggccgccgcgccgagctcgggcacctactgggcttcgtcgccgacaacgcggccctcgtctccctcgtcaacaggctcccagtcgaactctcccacgaaatcatggtgcttctgggtgaggggtactatgccgagaggtctgctaagcagacgactgatatattgcacaggagggggcaggaattggaagctcaggtcgaagcaatgaaggcaactatcactgatcttgaagctgaggcgaatttttttgagtccactgccaccgaggcttcagagggtcttgttgaaatcagggaagagtatgatgaggatacagagacaaagacaacaagatcaggaaagattaatcaaagaaagagattgagtcttgcctccctgctgttctcaaccccattgctgcgcctgaaccctaggtcaggcgtcaccacggcaatctctcacacctcttcctccaaccctctaaccattagccactcatataacctccgcagccggagtaattctaacaacctggtatcggatatgccaggatctgctgaagctgaaactgcagcttcagcccagccgtcggagttggcagcaatcaccaccgcccttgctgaagtccagcgccaactggggctcttcgccacgcagatggcctccatgtcctcccgcattgccgcggtggaatccacctcaggaacatcggccatggcgccaccaccagactgcccctacgacatgcctggatatgatgggctgtggctagcctacagttccaaccaaggtttccaggccacagtagcaaatggtgacaagattcactgccgacagattgctaacagtattgaggcttcaattgctactggggttatgtttgataatgatagggaacatgctcaaatcatggcaaggttagttgaactcgaaagggaagaaaaggaagctggaaatacttgtgaagatgatgatgatgatggcgacgatgatggagatgctggtacaagtgaggatggtgaggaaaataaggaacccggaaatgctttaagtgatggcaatgaggaccacagttctggttctggtgctttattttttggaaatggtggcaatgataggagtaatgggaatatcaagctgaagagtgcactgaagaagcctggaggagatgaaatgctgaaagacatttctcatacaccatcagccgatacatctcatccagtatttggtggccaaacttctataacaaatcctgatgtccgagttcacactaaagctgtttcttttgaagacgacaaatttgtggttagttcgtcaaagtctcctaccttgctagtgggttcaatacagtctgatcctgggctcaagagttcttcagaccccactccatcatgtgaccgaaagataatatcgagtgggcgaaaggccttcacaggatctatcgtcgagcacgacgatgacgatctttcaaccattcaaccttctgcgggcaattcgttggcaaaacctggtacttctgcgtcttcaaggcccatgtcaaaattcaagatgcagaaaggagggcgtgcaccttcaccagtgagactgtttggcggggatacatgggatgttcagttagattcagtttaattagtggctggtggtgcagtatctctttcagaaacctatatatatatgccgccatgccgtttgtaaatctttcggcaacaaaagaaagaaagaaagtgtcgaaagattatattctctggatttaattggaaaaccatgctgcttaagactgatgacaacacaatctacggagactaaatagtgacgagggaacccatgggaaatggagcaaagaaggaaatcgtgagggtgatttggttggttggtccaacgtccaagcatcgcatcatcggttagccagccatcagtgatcggagttggtaaaacccccccaaagaacatgtcggccaataagtggagttaattacagatctagtggtgctagctagcttgcaatgctgttcctacttgtgctgtaacacagtgtcatgacatggtcagtagcagctgacgagcgccgccgcgcagtcaggtggtcgtcggctggtgtctcttcttctactccttccctaggcgccgccgccgccgccgtggagcaccagattgtctcccacacgtctctcaccagcagaaagggaggaaggacctgccctctgcatgtcagctccacctgctgccattatgcattattccattcagttggtaataatcgtcacaatcagcttgtaaagatggcgcaaaatgccagatctcgataatctgatatacaccagtacgaattaagcagaactatatgtatgcatcattaaattttctaaacacgtacatacgtacgtatgttattaaactcgtaacgaactactaatggtcaggtttttc

SEQ ID NO: 35568 - DNA, 2896 bp, Zea Mays
cgccaccgccgcctcccgtttgttctcaagattctctcccgccaccgctccgagtcccaacctccatcgacggggaggcgtcctccatccgggccggttagattcatcgctttgtagctggtcctcgtcgtttccctctgctgtggtgggagaagcgactcgcgcgcgcgatcggccaacaaattaagcacggggcagggccgtacgcaggaggcgagctctagggctctccggggagaaggttgccaggcacgccaggtgaacgccgtactgagtttgcagtccgggacgtagcgcgttctctggtcgggaggtggggaagcggagagcgatggctgcgccgaggaaggggacggcgacgccactgggcgccgtattctcgccagaggagacgaagagggccgtggcgagggtggccgagtccatcgctggccgccgcgccgagctcgggcacctactgggcttcgtcgccgacaacgcggccctcgtctccctcgtcaacaggctcccagtcgaactctcccacgaaatcatggtcccctttggtggtgctgcatttttcccagggcgtttaatacacacaaatgaactcttggtgcttctgggtgaggggtactatgccgagaggtctgctaagcagacgactgatatattgcacaggagggggcaggaattggaagctcaggtcgaagcaatgaaggcaactatcactgatcttgaagctgaggcgaatttttttgagtccactgccaccgaggcttcagagggtcttgttgaaatcagggaagagtatgatgaggatacagagacaaagacaacaagatcaggaaagattaatcaaagaaagagattgagtcttgcctccctgctgttctcaaccccattgctgcgcctgaaccctaggtcaggcgtcaccacggcaatctctcacacctcttcctccaaccctctaaccattagccactcatataacctccgcagccggagtaattctaacaacctggtatcggatatgccaggatctgctgaagctgaaactgcagcttcagcccagccgtcggagttggcagcaatcaccaccgcccttgctgaagtccagcgccaactggggctcttcgccacgcagatggcctccatgtcctcccgcattgccgcggtggaatccacctcaggaacatcggccatggcgccaccaccagactgcccctacgacatgcctggatatgatgggctgtggctagcctacagttccaaccaaggtttccaggccacagtagcaaatggtgacaagattcactgccgacagattgctaacagtattgaggcttcaattgctactggggttatgtttgataatgatagggaacatgctcaaatcatggcaaggttagttgaactcgaaagggaagaaaaggaagctggaaatacttgtgaagatgatgatgatgatggcgacgatgatggagatgctggtacaagtgaggatggtgaggaaaataaggaacccggaaatgctttaagtgatggcaatgaggaccacagttctggttctggtgctttattttttggaaatggtggcaatgataggagtaatgggaatatcaagctgaagagtgcactgaagaagcctggaggagatgaaatgctgaaagacatttctcatacaccatcagccgatacatctcatccagtatttggtggccaaacttctataacaaatcctgatgtccgagttcacactaaagctgtttcttttgaagacgacaaatttgtggttagttcgtcaaagtctcctaccttgctagtgggttcaatacagtctgatcctgggctcaagagttcttcagaccccactccatcatgtgaccgaaagataatatcgagtgggcgaaaggccttcacaggatctatcgtcgagcacgacgatgacgatctttcaaccattcaaccttctgcgggcaattcgttggcaaaacctggtacttctgcgtcttcaaggcccatgtcaaaattcaagatgcagaaaggagggcgtgcaccttcaccagtgagactgtttggcggggatacatgggatgttcagttagattcagtttaattagtggctggtggtgcagtatctctttcagaaacctatatatatatgccgccatgccgtttgtaaatctttcggcaacaaaagaaagaaagaaagtgtcgaaagattatattctctggatttaattggaaaaccatgctgcttaagactgatgacaacacaatctacggagactaaatagtgacgagggaacccatgggaaatggagcaaagaaggaaatcgtgagggtgatttggttggttggtccaacgtccaagcatcgcatcatcggttagccagccatcagtgatcggagttggtaaaacccccccaaagaacatgtcggccaataagtggagttaattacagatctagtggtgctagctagcttgcaatgctgttcctacttgtgctgtaacacagtgtcatgacatggtcagtagcagctgacgagcgccgccgcgcagtcaggtggtcgtcggctggtgtctcttcttctactccttccctaggcgccgccgccgccgccgtggagcaccagattgtctcccacacgtctctcaccagcagaaagggaggaaggacctgccctctgcatgtcagctccacctgctgccattatgcattattccattcagttggtaataatcgtcacaatcagcttgtaaagatggcgcaaaatgccagatctcgataatctgatatacaccagtacgaattaagcagaactatatgtatgcatcattaaattttctaaacacgtacatacgtacgtatgttattaaactcgtaacgaactactaatggtcaggtttttc

SEQ ID NO: 35569 - DNA, 2344 bp, Zea Mays
ctccgccaccgccgcctcccgtttgttctcaagattctctcccgccaccgctccgagtcccaacctccatcgacggggaggcgtcctccatccgggccggttagattcatcgctttgtagctggtcctcgtcgtttccctctgctgtggtgggagaagcgactcgcgcgcgcgatcggccaacaaattaagcacggggcagggccgtacgcaggaggcgagctctagggctctccggggagaaggttgccaggcacgccaggtgaacgccgtactgagtttgcagtccgggacgtagcgcgttctctggtcgggaggtggggaagcggagagcgatggctgcgccgaggaaggggacggcgacgccactgggcgccgtattctcgccagaggagacgaagagggccgtggcgagggtggccgagtccatcgctggccgccgcgccgagctcgggcacctactgggcttcgtcgccgacaacgcggccctcgtctccctcgtcaacaggctcccagtcgaactctcccacgaaatcatggtgcttctgggtgaggggtactatgccgagaggtctgctaagcagacgactgatatattgcacaggagggggcaggaattggaagctcaggtcgaagcaatgaaggcaactatcactgatcttgaagctgaggcgaatttttttgagtccactgccaccgaggcttcagagggtcttgttgaaatcagggaagagtatgatgaggatacagagacaaagacaacaagatcagaggcttcaattgctactggggttatgtttgataatgatagggaacatgctcaaatcatggcaaggttagttgaactcgaaagggaagaaaaggaagctggaaatacttgtgaagatgatgatgatgatggcgacgatgatggagatgctggtacaagtgaggatggtgaggaaaataaggaacccggaaatgctttaagtgatggcaatgaggaccacagttctggttctggtgctttattttttggaaatggtggcaatgataggagtaatgggaatatcaagctgaagagtgcactgaagaagcctggaggagatgaaatgctgaaagacatttctcatacaccatcagccgatacatctcatccagtatttggtggccaaacttctataacaaatcctgatgtccgagttcacactaaagctgtttcttttgaagacgacaaatttgtggttagttcgtcaaagtctcctaccttgctagtgggttcaatacagtctgatcctgggctcaagagttcttcagaccccactccatcatgtgaccgaaagataatatcgagtgggcgaaaggccttcacaggatctatcgtcgagcacgacgatgacgatctttcaaccattcaaccttctgcgggcaattcgttggcaaaacctggtacttctgcgtcttcaaggcccatgtcaaaattcaagatgcagaaaggagggcgtgcaccttcaccagtgagactgtttggcggggatacatgggatgttcagttagattcagtttaattagtggctggtggtgcagtatctctttcagaaacctatatatatatgccgccatgccgtttgtaaatctttcggcaacaaaagaaagaaagaaagtgtcgaaagattatattctctggatttaattggaaaaccatgctgcttaagactgatgacaacacaatctacggagactaaatagtgacgagggaacccatgggaaatggagcaaagaaggaaatcgtgagggtgatttggttggttggtccaacgtccaagcatcgcatcatcggttagccagccatcagtgatcggagttggtaaaacccccccaaagaacatgtcggccaataagtggagttaattacagatctagtggtgctagctagcttgcaatgctgttcctacttgtgctgtaacacagtgtcatgacatggtcagtagcagctgacgagcgccgccgcgcagtcaggtggtcgtcggctggtgtctcttcttctactccttccctaggcgccgccgccgccgccgtggagcaccagattgtctcccacacgtctctcaccagcagaaagggaggaaggacctgccctctgcatgtcagctccacctgctgccattatgcattattccattcagttggtaataatcgtcacaatcagcttgtaaagatggcgcaaaatgccagatctcgataatctgatatacaccagtacgaattaagcagaactatatgtatgcatcattaaattttctaaacacgtacatacgtacgtatgttattaaactcgtaacgaactactaatggtcaggtttttc

SEQ ID NO: 35570 - DNA, 2404 bp, Zea Mays
ctccgccaccgccgcctcccgtttgttctcaagattctctcccgccaccgctccgagtcccaacctccatcgacggggaggcgtcctccatccgggccggttagattcatcgctttgtagctggtcctcgtcgtttccctctgctgtggtgggagaagcgactcgcgcgcgcgatcggccaacaaattaagcacggggcagggccgtacgcaggaggcgagctctagggctctccggggagaaggttgccaggcacgccaggtgaacgccgtactgagtttgcagtccgggacgtagcgcgttctctggtcgggaggtggggaagcggagagcgatggctgcgccgaggaaggggacggcgacgccactgggcgccgtattctcgccagaggagacgaagagggccgtggcgagggtggccgagtccatcgctggccgccgcgccgagctcgggcacctactgggcttcgtcgccgacaacgcggccctcgtctccctcgtcaacaggctcccagtcgaactctcccacgaaatcatggtcccctttggtggtgctgcatttttcccagggcgtttaatacacacaaatgaactcttggtgcttctgggtgaggggtactatgccgagaggtctgctaagcagacgactgatatattgcacaggagggggcaggaattggaagctcaggtcgaagcaatgaaggcaactatcactgatcttgaagctgaggcgaatttttttgagtccactgccaccgaggcttcagagggtcttgttgaaatcagggaagagtatgatgaggatacagagacaaagacaacaagatcagaggcttcaattgctactggggttatgtttgataatgatagggaacatgctcaaatcatggcaaggttagttgaactcgaaagggaagaaaaggaagctggaaatacttgtgaagatgatgatgatgatggcgacgatgatggagatgctggtacaagtgaggatggtgaggaaaataaggaacccggaaatgctttaagtgatggcaatgaggaccacagttctggttctggtgctttattttttggaaatggtggcaatgataggagtaatgggaatatcaagctgaagagtgcactgaagaagcctggaggagatgaaatgctgaaagacatttctcatacaccatcagccgatacatctcatccagtatttggtggccaaacttctataacaaatcctgatgtccgagttcacactaaagctgtttcttttgaagacgacaaatttgtggttagttcgtcaaagtctcctaccttgctagtgggttcaatacagtctgatcctgggctcaagagttcttcagaccccactccatcatgtgaccgaaagataatatcgagtgggcgaaaggccttcacaggatctatcgtcgagcacgacgatgacgatctttcaaccattcaaccttctgcgggcaattcgttggcaaaacctggtacttctgcgtcttcaaggcccatgtcaaaattcaagatgcagaaaggagggcgtgcaccttcaccagtgagactgtttggcggggatacatgggatgttcagttagattcagtttaattagtggctggtggtgcagtatctctttcagaaacctatatatatatgccgccatgccgtttgtaaatctttcggcaacaaaagaaagaaagaaagtgtcgaaagattatattctctggatttaattggaaaaccatgctgcttaagactgatgacaacacaatctacggagactaaatagtgacgagggaacccatgggaaatggagcaaagaaggaaatcgtgagggtgatttggttggttggtccaacgtccaagcatcgcatcatcggttagccagccatcagtgatcggagttggtaaaacccccccaaagaacatgtcggccaataagtggagttaattacagatctagtggtgctagctagcttgcaatgctgttcctacttgtgctgtaacacagtgtcatgacatggtcagtagcagctgacgagcgccgccgcgcagtcaggtggtcgtcggctggtgtctcttcttctactccttccctaggcgccgccgccgccgccgtggagcaccagattgtctcccacacgtctctcaccagcagaaagggaggaaggacctgccctctgcatgtcagctccacctgctgccattatgcattattccattcagttggtaataatcgtcacaatcagcttgtaaagatggcgcaaaatgccagatctcgataatctgatatacaccagtacgaattaagcagaactatatgtatgcatcattaaattttctaaacacgtacatacgtacgtatgttattaaactcgtaacgaactactaatggtcaggtttttc

SEQ ID NO: 35571 - DNA, 3618 bp, Zea Mays
caccacaccccgtctcgcttttgctgccgctgcaggccggtcagaccagacaggcagcaggcagccagccagccgcacacacgcaagcaccggcccgggcccacacgcctttcccagcccgcgcatcggaccggaccggaccggaccatactggaccggaccgcgcgaaccggtggtccaagccaacgcggccgtgtcaccaccggctttctttctgtccggacgccaccgctgcgtcacgctgtctactccctacaaagagaccacaccgaatctcccctctcgtctaccctcctctccttcctcgccgcacacacagacacacgcaaaaacatttctcccccctcccgactgctactgccgctgcctcctccccctttccgcccgccttcgctccctcccaacccccttcctcctccgtctagggtttcccgccgccgcctgatccgagtcagatgccgcccgcaacagccatggcgccgccgtcccagcccccgtctaactcaggggatccgctgtacccggagctctggcgcgcctgcgccggcccgctcgtcaccgtcccccgcgtcggcgacctcgtcttctacttcccccaggggcacatcgagcaggtggaggcgtccatgaaccaggtcgccgggaaccagatgcgcctctacgatctgccccccaagctgctctgccgcgtgctcaacgtcgagctcaaggcggagacggacaccgacgaggtctacgcgcagatcatgctcatgccggagcccgagcaaaccgatgtgccggctgagaagccgagttctgcacctgctgcgtcgccgaggccagcagtcaggtccttctgcaagacgctcaccgcctcggacaccagcacacacggtggcttctctgtgctgcgccgacacgctgacgagtgcctccctcccctggatatgacccagtcgcctcccacacaggagctggtggcgaaggatctgcatggcatggagtggcgcttccgccacatctttagagggcagccaaggaggcatctccttcagagtggttggagtgtttttgttagttctaaaaggcttgttgctggtgatgccttcattttcctcagaggagaaaatggtgaacttcgagttggtgttaggcgggcaatgaggcaattgtctaatgtaccttcttcagtcatatctagccaaagcatgcacctcggagtccttgcgactgcatggcacgccattaacacgaagtccatgttcactgtctactacaagcctaggacgagcccttcagagttcatcataccgtacgatcaatatatggagtcggtaaaaaataattattctattggcatgagattcaggatgaggtttgaaggagaagaggcgccagagcagaggtttactggtacaatagttggttgtgaaaatcttgacccactatggcctgattccagttggagatacttgaaggtgcgttgggatgagccttctactatcccgcggccagatagggtctctccttggaagatagagcctgcttcatcgcctcctgttaatccactcgtgcattcttctagagcaaaaagacctagacaaaacgttcctccaccttcacttgaatcatctgttctcacaaaagaaggtgcaaccaaggtcgaaatcgattcagctcaaacacaacaccaaaattcggtcttgcaaggtcaggagcagatgaccttgaggaacaacctgactgaaagcgctgattctgattccactgttcagaagccgatgatgtggtccccatcactcaatgggaaagcccacactcattttcagcagagacctgctatggataattggatgccattgggaaggcgtgaaaatgacttcaaggacacccgttctgccttcaaggatgcccgcaccgcctctcaatcatttggagatacacagggtttttttgtgcaagcttatgatgacaatcatcaccgtctctctttcaaaaatcagggttcaactcatcgcttcgcagatccgtacttctatatgcctcaacaatcgtcagtgacggttgaatcaagcacaaggacacaaacagcaaacaatgacttgtgtttctggggtgaccagaatgctatgtacggcaatccaagtgaccaacaacagggtttcaactttggacaaaacccatcaagttggttgaaccagccatttccccaggttgaacagccacgagtggtcaggcctcatgcaacggttgctccatttgatctggagaagactagagaaggaagtggcttcaagatttttgggttccaagttgatacaaccagtccatctcctgtccaattgagctctccattgcccgctatccaggagcatgtgttacaaactcgaccatcggcaccggtgaatgaattgcaacctgtgcaaattgagtgcttgcctgagggatctgtaagcacagctggaactgcaacggagaacattcagcaagccccgcagagttcaaaagatatccaaagcaagtcccagggtgcttcaacaaggagctgtacaaaggttcataagcaaggagtcgcacttggcaggtcggtggacctctctaaattcaccgactacggcgaactccaagcagagctggacaagatgtttgacttcgagggtgaattggtatctggcagccaaaactggcagatcgtctataccgacgacgagggcgatatgatgcttgtgggagacgacccgtgggaagagttctgcagcatagtgcgcaagatctacatctacacgaaggaggaggtccagaagatgaactcgaaatcagctgcgccaaggaaggaggaatctccggcagcgggcggcggaggaggttgcgccgccgccacaaacgagtagtatggtggtttgctcttggtggcaagttgaggccaaggttttactactgctattgttattgctgatttgctctccccgccttccggtgtaaatatctgtgtgtacccagtcccggccttgtgctagtaagtagcaagcagtgttaccttttggtattttaaccagcagctaagttcgcggcattttagtccctgtaagcggtaagcagctctgtagcgtgagatagatggccaagcgccggtacgtacgtgtagtgtctggtcttctcactgagtgtactataaagagttaatataggagctgaccctgtgaacccgcgtgatggatgcatatgcttagtgcaaacctgcattttgtctctatttgaccatctgtacacgcatgatcgccttgcttgcctggtgtctggtctgctgatggcagcgcaaagcgaaaggcaaatgcattgaagggaaggcaagtggaggttggagttgatgctgcggggtgcgggcgcgatttgctgtccctttccggtaggccgaaacgtggcggcgaggttcgctgcatgctgatccgatgcctccctcgctcattgggtcgtcgcaggacgggaagtggaacgtgccatgtgcctgacaatcctacagctacagggtcgtcgtcgtcacccactgtctgcgccctcgtggctgtcgtggtagcaacagcggcctggctagcacacacagatggtactgtgcgccgcacccaggacaagctttga

SEQ ID NO: 35572 - DNA, 1159 bp, Zea Mays
gctatgtcagtagatttttagagggtttgcttcagtcattgtagtggtgggtttttagtttacttgcacagttgcaccccttgagaggaagaagaagtatactgattgtttcgaacaaaacggatcttcttttctgtacaagtacacggataagagtgatgtgtacgcccttggcatgatcctgggcgtgctgctcactgggagagacccgacagactctttcttctcgggagagagtaccgggcagggcggcctcccaagatggctccggcacacgcagcagtccgcggacccgaaagaaacgctggatagcagcatcctgggggacgagggagaagaggaggagatgctgatggccattcgggttgccattgtctgcctctcggactcgccaaccgaccggccatccagcgacgagctcgtcgccatgctaacgcagctccacagcttatgattaatcaccatatatcgcaaatttcttgagcggctgccgctgcgcatggccttaaaaccatgggggggcgatcatgttggatcagtgcttcctgtttcacagctagcacgggggagtgtgcagcagatctcattgtgtggtgcttgtgagtcacaagcgctgaaatggtcgacaagggaactgacagttcaaggccatataggacaggcgcagtcgctgtgttccctgtacgattcatcagtgatgtagtagctaggtacaatacaagatggtggttgagcttcctgggttgttttgcgcgtgggctgtgaatatgtcttggtagaaaaaaagctctgtgccgtggatctgatctgttggtgttagctgtagcctgtgtatagcctgtagaaagacgtgcttgtgctgtgcactgagacccatcatgtacacccccccggctccactccaatttgcctgagagcagagagactatgatgccgagtatttaacaggctgctggggccaacggtttccatatcatttctctgcgtctcatgagctctcccacatgtttgcgaggagaggtcagaagagaactgccgcggtcatgcatcaactgctggcccactgtgctcgcttgattgcctccatgtgcagcctgttcttgtagactctttgactctgtcagacgctggaaataacaagaatcccatgtgagcccgg

SEQ ID NO: 35573 - DNA, 2356 bp, Zea Mays
agaaagagattcgaaacagtgtgggcaattgctgtgcacgggcatcaaggcatctctgctccgtcttgggctcctcctctctcgcccatcggccatcgccctccgctacggccacgcgccgcgctgcacccctgggccccgcgggtaaatatcacgagcaccatgctcgagttcttgtagctccgcagcttcctcgcttcttgcatcctttgcaacttgtctcctgttgttttcctctgatttccatggaggaaagatgctgggtgtgccagtgatgtgggcgtggagcaggcaacaattggctcgtcctggacattgatcgattctcccctattctcgtccaaggaattttattcgtttctcctagcaagtcgtgtatgcttgtttcgtggaggtaggagctaggatgacgagcaggaaccctaccaaaaccctgtcggtcctgaccactctcctgctgctgcttgagttcctcgcgctgtgcgcgcccgcctccgcccagccgctccactcggagcccatggctacgcagtccccgccgccgccgctgccgccggggtccacgattccccgggcgcaggccggcggcgccgcacgcctccgccgcattgcgctcggggtcctcttcggctccctctccggtttcctcctcgcgctcgccttcctctacgccatccgcctcgccatcctccacgccaagagcacgcccgcgatcgccaagggccccgtctccttcgccccgcaaatctccgccaagaacctcctggccgcgctccccgccgcgcagccgctcgcccatgggccccatggcaagtactacaagctggcactcgacaacgacctcaccgtcgccgtcaagcgcctcgaggcggccagccgccccgaggcctcgccgtccatgtccccgagcgcgtccaagtcggacatgaggagggtgcagaggcagcttgaggcacttgctcgggtcaggcaccagaatgtgttgtcgttgaaggcatacgttcgcgaggcggaccgcctctcgctcgtgtacgacttcgtccatgggggcagcctcgaggatctgatgaagagggtaaggtcgcagcaagtcagcctcggttgggatgcgaggagcaggattgctgttgggattgccaagggactgaggcacttgcattttgagtgcaatccgaggatagtccactgcaacctcaagccgtccaatgtgatgctagacgaaggtttggagccattattggcagattgtggtgttgcaaggctgattgcagcaggttcaggtgatccagaattgtgcactggcctctacgctgctccagaatgctatcaaagcagcaggtacacggataagagtgatgtgtacgcccttggcatgatcctgggcgtgctgctcactgggagagacccgacagactctttcttctcgggagagagtaccgggcagggcggcctcccaagatggctccggcacacgcagcagtccgcggacccgaaagaaacgctggatagcagcatcctgggggacgagggagaagaggaggagatgctgatggccattcgggttgccattgtctgcctctcggactcgccaaccgaccggccatccagcgacgagctcgtcgccatgctaacgcagctccacagcttatgattaatcaccatatatcgcaaatttcttgagcggctgccgctgcgcatggccttaaaaccatgggggggcgatcatgttggatcagtgcttcctgtttcacagctagcacgggggagtgtgcagcagatctcattgtgtggtgcttgtgagtcacaagcgctgaaatggtcgacaagggaactgacagttcaaggccatataggacaggcgcagtcgctgtgttccctgtacgattcatcagtgatgtagtagctaggtacaatacaagatggtggttgagcttcctgggttgttttgcgcgtgggctgtgaatatgtcttggtagaaaaaaagctctgtgccgtggatctgatctgttggtgttagctgtagcctgtgtatagcctgtagaaagacgtgcttgtgctgtgcactgagacccatcatgtacacccccccggctccactccaatttgcctgagagcagagagactatgatgccgagtatttaacaggctgctggggccaacggtttccatatcatttctctgcgtctcatgagctctcccacatgtttgcgaggagaggtcagaagagaactgccgcggtcatgcatcaactgctggcccactgtgctcgcttgattgcctccatgtgcagcctgttcttgtagactctttgactctgtcagacgctggaaataacaagaatcccatgtgagcccgg

SEQ ID NO: 35574 - DNA, 1998 bp, Zea Mays
ggttcttcagtctctcccgtgatggcgcacggagaaagaggtttgcggcgtctcgctcctccttctcgagcaccatcgctttctctgcacgcctcacacactcacgtgagggccctggttgaccctctcttcctccctccctccccctcctcctccccctcttgcctcaccttgcctcacgcttctccctcagcaccatccgcctgcccaccgtgcccctgctcgcccttcccgtcgcggtgctcgtccgccctgccgcgccctgcccgccgcgtcgtgaggggatgtgtctagggttattgggagagcaccccttcctatggcgtccacgacaagcactagggcgtcgccatagacgcctcgcggatgccatacacccagttggcaaggcgtggactgtggcgttcggcctggagcaccgcttaagagacactgtacggacgccataacaattaacaagcatggctctagtgcaggtgcgatttactcgtgcagaagctccgacaactatttccgaattacccgggctggtttgtgatgacatctctggagggcaagaaaatattcctattcctgctactaacttggttgatgatccacctgttcctccatctggtttcaagtacttgaaatctctacaaattccaaaggacatcaagattccgtctagtattattggctgtgattgtgaaggaggttgtgctagcaacaaaaaatgtttgtgtgctcagcgcaatggttctgatctgccttatgtatcatataagaacattggcaggttggtggagccgaaagcagttgtatttgaatgtggggctaactgcagctgcaaccatgattgtgtaaacagaacatctcaacaaggtttgcagtaccgcttagaggtatttaagacagcttcaaaaggatggggagtcaggacttgggacactatcctccctggggctcccatctgtgagtacacaggggtgttgaggaggaccgaagatttggatggttcacagaacaactattgttttgacattgactgtcttcaaaccatgaagggtttggatggaagggagaaaagggctggatccgaaatgcacctgcctaatcttcatcctgagaatgattcagatgcacaacctgcacctgagtactgcatagacgctcactctattggcaactttgcaagatttataaatcacagctgccaacctaaccttttcgtccagtgcgtcttgagctcacacaatgatgttaaactggcgaaagtgatgcttttcgctgctgacaccatacttcctcttcaggagctatcctatgactacggttatcgattggacagtgttgttgggcctgatggaaaaattgtgaagctggcctgccactgtggtgctcctgattgccggaagcgcctctactaacctgcagtgtgtttatttctatttggatttttgaggaaacagcttatattgtaggaaaaacagtcatggtacctatgtagttgacatgctcttgatcatatatagcaaaagaggagcaatttatggggtgttcggtttaagaatgaaattagagatttagaggacatggtggtcatggtagcatattttgccgacaatcttcgattaactgatatatctggacatctggtcctgcaacacttatcctctggataaatatatatacgttacatgtttcctcaatgagtcaatggcttggatctgtgttttttctatcatttgccgtctcgcgcgtgcgtgtctgtgcttaatcgataaatacacggactactcaggtacctttttcaaattgtgatggcaactgaattgtcaaatagcgacaaatacgacacaacaatatcgatttatgtagcattttctctaacaatgacttaaatttcgaatttcccatgtctcggtactgtcaatagctgcaaaggcttcgggtgttgctgttgccgcaggtttcatgtcttctcattcatatgatttcatcatgacaccaatttag

SEQ ID NO: 35575 - DNA, 2423 bp, Zea Mays
cgacgcttcactctgcccctccctcctcccttcgtcttccaccattcactatagcggagcgcaggctggtggacgccgaaggtgaattcggtggcgccggtgccgaacccgatattcatggacgcctctcccctgaacccgccgccgctggtggaggaggagcttgtgctgcgccgcagtgctcgttgcctcaataggccaacccggcccagctacgcggaacaggagcctcctaaaaaacccggcggccggggccggagcaagcggaagagggacgaggagaaaccggagctggcaccggcgcagcagggtgccaagagtccggacaggaaggactccaaggatgaggcgggtgagaagaagccgacgcccatgattgcggcgctgccggtctcttgcgctggcgttgctgctgaagacgatgcgacggggaccgggaagagcgccaagctgagggtgaaggagacactgagggcgttcaatagccactacctccactttgtgcaggaggagcagaagagagctcaggctgcgctacaggagaaacgcccatcaaagcggcctgacctgaaagcaatcaccaagatgcaagaaatgaatgccgtgctttatccagagaaaacgattggacatctaccagggatcgatgttggagatcatttctattctcgcgctgaaatggtagtgttgggcatacacagccattggctcaatggcattgacttcatggggctgaaataccaaggaaaggagtattcaaacttaactttcccactggccacctgtatcgtaatgtcgggggtatatgaagatgatctagacaaagctgatgaaattatttatactggtcaaggaggaaatgatttgcttggtaaccatcgccaaattggctctcaacagttgaaacgtgggaatttagcgttgaagaatagcagggagaatggtaatcctgtccgagttgttcgaggacatttgtcaaagaatagctacactggaaagatctacacctatgatgggctttacaaggttgtagatgactgggtgcagaagggagtgcaaggccatgttgttttcaaatttaagttgaagcggcttgagggtcagccatcattgacaacctctgaggtgcgatttactcgtgcagaagctccgacaactatttccgaattacccgggctggtttgtgatgacatctctggagggcaagaaaatattcctattcctgctactaacttggttgatgatccacctgttcctccatctggtttcaagtacttgaaatctctacaaattccaaaggacatcaagattccgtctagtattattggctgtgattgtgaaggaggttgtgctagcaacaaaaaatgtttgtgtgctcagcgcaatggttctgatctgccttatgtatcatataagaacattggcaggttggtggagccgaaagcagttgtatttgaatgtggggctaactgcagctgcaaccatgattgtgtaaacagaacatctcaacaaggtttgcagtaccgcttagaggtatttaagacagcttcaaaaggatggggagtcaggacttgggacactatcctccctggggctcccatctgtgagtacacaggggtgttgaggaggaccgaagatttggatggttcacagaacaactattgttttgacattgactgtcttcaaaccatgaagggtttggatggaagggagaaaagggctggatccgaaatgcacctgcctaatcttcatcctgagaatgattcagatgcacaacctgcacctgagtactgcatagacgctcactctattggcaactttgcaagatttataaatcacagctgccaacctaaccttttcgtccagtgcgtcttgagctcacacaatgatgttaaactggcgaaagtgatgcttttcgctgctgacaccatacttcctcttcaggagctatcctatgactacggttatcgattggacagtgttgttgggcctgatggaaaaattgtgaagctggcctgccactgtggtgctcctgattgccggaagcgcctctactaacctgcagtgtgtttatttctatttggatttttgaggaaacagcttatattgtaggaaaaacagtcatggtacctatgtagttgacatgctcttgatcatatatagcaaaagaggagcaatttatggggtgttcggtttaagaatgagttagtatatcatcttctcatttactatttttgcttggtttatgtaataaaatgagtcgatctatcaccaccttattcctcatagttagttagttagcactaacattagaaatgaagtcatcttatcaaatttaaggaatgagcttatgatgtaccaccttaatttggatgaagtgattcatcaaacaaacaccctattgatataatatagcattcttg

SEQ ID NO: 35576 - DNA, 2471 bp, Zea Mays
cgacgcttcactctgcccctccctcctcccttcgtcttccaccattcactatagcggagcgcaggctggtggacgccgaaggtgaattcggtggcgccggtgccgaacccgatattcatggacgcctctcccctgaacccgccgccgctggtggaggaggagcttgtgctgcgccgcagtgctcgttgcctcaataggccaacccggcccagctacgcggaacaggagcctcctaaaaaacccggcggccggggccggagcaagcggaagagggacgaggagaaaccggagctggcaccggcgcagcagggtgccaagagtccggacaggaaggactccaaggatgaggcgggtgagaagaagccgacgcccatgattgcggcgctgccggtctcttgcgctggcgttgctgctgaagacgatgcgacggggaccgggaagagcgccaagctgagggtgaaggagacactgagggcgttcaatagccactacctccactttgtgcaggaggagcagaagagagctcaggctgcgctacaggagattaacgctaagagtggcctcaaacgtcagaccaaggggggtgaaaagaaacgcccatcaaagcggcctgacctgaaagcaatcaccaagatgcaagaaatgaatgccgtgctttatccagagaaaacgattggacatctaccagggatcgatgttggagatcatttctattctcgcgctgaaatggtagtgttgggcatacacagccattggctcaatggcattgacttcatggggctgaaataccaaggaaaggagtattcaaacttaactttcccactggccacctgtatcgtaatgtcgggggtatatgaagatgatctagacaaagctgatgaaattatttatactggtcaaggaggaaatgatttgcttggtaaccatcgccaaattggctctcaacagttgaaacgtgggaatttagcgttgaagaatagcagggagaatggtaatcctgtccgagttgttcgaggacatttgtcaaagaatagctacactggaaagatctacacctatgatgggctttacaaggttgtagatgactgggtgcagaagggagtgcaaggccatgttgttttcaaatttaagttgaagcggcttgagggtcagccatcattgacaacctctgaggtgcgatttactcgtgcagaagctccgacaactatttccgaattacccgggctggtttgtgatgacatctctggagggcaagaaaatattcctattcctgctactaacttggttgatgatccacctgttcctccatctggtttcaagtacttgaaatctctacaaattccaaaggacatcaagattccgtctagtattattggctgtgattgtgaaggaggttgtgctagcaacaaaaaatgtttgtgtgctcagcgcaatggttctgatctgccttatgtatcatataagaacattggcaggttggtggagccgaaagcagttgtatttgaatgtggggctaactgcagctgcaaccatgattgtgtaaacagaacatctcaacaaggtttgcagtaccgcttagaggtatttaagacagcttcaaaaggatggggagtcaggacttgggacactatcctccctggggctcccatctgtgagtacacaggggtgttgaggaggaccgaagatttggatggttcacagaacaactattgttttgacattgactgtcttcaaaccatgaagggtttggatggaagggagaaaagggctggatccgaaatgcacctgcctaatcttcatcctgagaatgattcagatgcacaacctgcacctgagtactgcatagacgctcactctattggcaactttgcaagatttataaatcacagctgccaacctaaccttttcgtccagtgcgtcttgagctcacacaatgatgttaaactggcgaaagtgatgcttttcgctgctgacaccatacttcctcttcaggagctatcctatgactacggttatcgattggacagtgttgttgggcctgatggaaaaattgtgaagctggcctgccactgtggtgctcctgattgccggaagcgcctctactaacctgcagtgtgtttatttctatttggatttttgaggaaacagcttatattgtaggaaaaacagtcatggtacctatgtagttgacatgctcttgatcatatatagcaaaagaggagcaatttatggggtgttcggtttaagaatgagttagtatatcatcttctcatttactatttttgcttggtttatgtaataaaatgagtcgatctatcaccaccttattcctcatagttagttagttagcactaacattagaaatgaagtcatcttatcaaatttaaggaatgagcttatgatgtaccaccttaatttggatgaagtgattcatcaaacaaacaccctattgatataatatagcattcttg

SEQ ID NO: 35577 - DNA, 2372 bp, Zea Mays
atgccgtacgaaagctggtggacgccgaaggtgaattcggtggcgccggtgccgaacccgatattcatggacgcctctcccctgaacccgccgccgctggtggaggaggagcttgtgctgcgccgcagtgctcgttgcctcaataggccaacccggcccagctacgcggaacaggagcctcctaaaaaacccggcggccggggccggagcaagcggaagagggacgaggagaaaccggagctggcaccggcgcagcagggtgccaagagtccggacaggaaggactccaaggatgaggcgggtgagaagaagccgacgcccatgattgcggcgctgccggtctcttgcgctggcgttgctgctgaagacgatgcgacggggaccgggaagagcgccaagctgagggtgaaggagacactgagggcgttcaatagccactacctccactttgtgcaggaggagcagaagagagctcaggctgcgctacaggagaaacgcccatcaaagcggcctgacctgaaagcaatcaccaagatgcaagaaatgaatgccgtgctttatccagagaaaacgattggacatctaccagggatcgatgttggagatcatttctattctcgcgctgaaatggtagtgttgggcatacacagccattggctcaatggcattgacttcatggggctgaaataccaaggaaaggagtattcaaacttaactttcccactggccacctgtatcgtaatgtcgggggtatatgaagatgatctagacaaagctgatgaaattatttatactggtcaaggaggaaatgatttgcttggtaaccatcgccaaattggctctcaacagttgaaacgtgggaatttagcgttgaagaatagcagggagaatggtaatcctgtccgagttgttcgaggacatttgtcaaagaatagctacactggaaagatctacacctatgatgggctttacaaggttgtagatgactgggtgcagaagggagtgcaaggccatgttgttttcaaatttaagttgaagcggcttgagggtcagccatcattgacaacctctgaggtgcgatttactcgtgcagaagctccgacaactatttccgaattacccgggctggtttgtgatgacatctctggagggcaagaaaatattcctattcctgctactaacttggttgatgatccacctgttcctccatctggtttcaagtacttgaaatctctacaaattccaaaggacatcaagattccgtctagtattattggctgtgattgtgaaggaggttgtgctagcaacaaaaaatgtttgtgtgctcagcgcaatggttctgatctgccttatgtatcatataagaacattggcaggttggtggagccgaaagcagttgtatttgaatgtggggctaactgcagctgcaaccatgattgtgtaaacagaacatctcaacaaggtttgcagtaccgcttagaggtatttaagacagcttcaaaaggatggggagtcaggacttgggacactatcctccctggggctcccatctgtgagtacacaggggtgttgaggaggaccgaagatttggatggttcacagaacaactattgttttgacattgactgtcttcaaaccatgaagggtttggatggaagggagaaaagggctggatccgaaatgcacctgcctaatcttcatcctgagaatgattcagatgcacaacctgcacctgagtactgcatagacgctcactctattggcaactttgcaagatttataaatcacagctgccaacctaaccttttcgtccagtgcgtcttgagctcacacaatgatgttaaactggcgaaagtgatgcttttcgctgctgacaccatacttcctcttcaggagctatcctatgactacggttatcgattggacagtgttgttgggcctgatggaaaaattgtgaagctggcctgccactgtggtgctcctgattgccggaagcgcctctactaacctgcagtgtgtttatttctatttggatttttgaggaaacagcttatattgtaggaaaaacagtcatggtacctatgtagttgacatgctcttgatcatatatagcaaaagaggagcaatttatggggtgttcggtttaagaatgagttagtatatcatcttctcatttactatttttgcttggtttatgtaataaaatgagtcgatctatcaccaccttattcctcatagttagttagttagcactaacattagaaatgaagtcatcttatcaaatttaaggaatgagcttatgatgtaccaccttaatttggatgaagtgattcatcaaacaaacaccctattgatataatatagcattcttg

SEQ ID NO: 35578 - DNA, 2415 bp, Zea Mays
atgccgtacgaaagctggtggacgccgaaggtgaattcggtggcgccggtgccgaacccgatattcatggacgcctctcccctgaacccgccgccgctggtggaggaggagcttgtgctgcgccgcagtgctcgttgcctcaataggccaacccggcccagctacgcggaacaggagcctcctaaaaaacccggcggccggggccggagcaagcggaagagggacgaggagaaaccggagctggcaccggcgcagcagggtgccaagagtccggacaggaaggactccaaggatgaggcgggtgagaagaagccgacgcccatgattgcggcgctgccggtctcttgcgctggcgttgctgctgaagacgatgcgacggggaccgggaagagcgccaagctgagggtgaaggagacactgagggcgttcaatagccactacctccactttgtgcaggaggagcagaagagagctcaggctgcgctacaggagattaacgctaagagtggcctcaaacgtcagaccaaggggggtgaaaagaaacgcccatcaaagcggcctgacctgaaagcaatcaccaagatgcaagaaatgaatgccgtgctttatccagagaaaacgattggacatctaccagggatcgatgttggagatcatttctattctcgcgctgaaatggtagtgttgggcatacacagccattggctcaatggcattgacttcatggggctgaaataccaaggaaaggagtattcaaacttaactttcccactggccacctgtatcgtaatgtcgggggtatatgaagatgatctagacaaagctgatgaaattatttatactggtcaaggaggaaatgatttgcttggtaaccatcgccaaattggctctcaacagttgaaacgtgggaatttagcgttgaagcagggagaatggtaatcctgtccgagttgttcgaggacatttgtcaaagaatagctacactggaaagatctacacctatgatgggctttacaaggttgtagatgactgggtgcagaagggagtgcaaggccatgttgttttcaaatttaagttgaagcggcttgagggtcagccatcattgacaacctctgaggtgcgatttactcgtgcagaagctccgacaactatttccgaattacccgggctggtttgtgatgacatctctggagggcaagaaaatattcctattcctgctactaacttggttgatgatccacctgttcctccatctggtttcaagtacttgaaatctctacaaattccaaaggacatcaagattccgtctagtattattggctgtgattgtgaaggaggttgtgctagcaacaaaaaatgtttgtgtgctcagcgcaatggttctgatctgccttatgtatcatataagaacattggcaggttggtggagccgaaagcagttgtatttgaatgtggggctaactgcagctgcaaccatgattgtgtaaacagaacatctcaacaaggtttgcagtaccgcttagaggtatttaagacagcttcaaaaggatggggagtcaggacttgggacactatcctccctggggctcccatctgtgagtacacaggggtgttgaggaggaccgaagatttggatggttcacagaacaactattgttttgacattgactgtcttcaaaccatgaagggtttggatggaagggagaaaagggctggatccgaaatgcacctgcctaatcttcatcctgagaatgattcagatgcacaacctgcacctgagtactgcatagacgctcactctattggcaactttgcaagatttataaatcacagctgccaacctaaccttttcgtccagtgcgtcttgagctcacacaatgatgttaaactggcgaaagtgatgcttttcgctgctgacaccatacttcctcttcaggagctatcctatgactacggttatcgattggacagtgttgttgggcctgatggaaaaattgtgaagctggcctgccactgtggtgctcctgattgccggaagcgcctctactaacctgcagtgtgtttatttctatttggatttttgaggaaacagcttatattgtaggaaaaacagtcatggtacctatgtagttgacatgctcttgatcatatatagcaaaagaggagcaatttatggggtgttcggtttaagaatgagttagtatatcatcttctcatttactatttttgcttggtttatgtaataaaatgagtcgatctatcaccaccttattcctcatagttagttagttagcactaacattagaaatgaagtcatcttatcaaatttaaggaatgagcttatgatgtaccaccttaatttggatgaagtgattcatcaaacaaacaccctattgatataatatagcattcttg

SEQ ID NO: 35579 - DNA, 2420 bp, Zea Mays
atgccgtacgaaagctggtggacgccgaaggtgaattcggtggcgccggtgccgaacccgatattcatggacgcctctcccctgaacccgccgccgctggtggaggaggagcttgtgctgcgccgcagtgctcgttgcctcaataggccaacccggcccagctacgcggaacaggagcctcctaaaaaacccggcggccggggccggagcaagcggaagagggacgaggagaaaccggagctggcaccggcgcagcagggtgccaagagtccggacaggaaggactccaaggatgaggcgggtgagaagaagccgacgcccatgattgcggcgctgccggtctcttgcgctggcgttgctgctgaagacgatgcgacggggaccgggaagagcgccaagctgagggtgaaggagacactgagggcgttcaatagccactacctccactttgtgcaggaggagcagaagagagctcaggctgcgctacaggagattaacgctaagagtggcctcaaacgtcagaccaaggggggtgaaaagaaacgcccatcaaagcggcctgacctgaaagcaatcaccaagatgcaagaaatgaatgccgtgctttatccagagaaaacgattggacatctaccagggatcgatgttggagatcatttctattctcgcgctgaaatggtagtgttgggcatacacagccattggctcaatggcattgacttcatggggctgaaataccaaggaaaggagtattcaaacttaactttcccactggccacctgtatcgtaatgtcgggggtatatgaagatgatctagacaaagctgatgaaattatttatactggtcaaggaggaaatgatttgcttggtaaccatcgccaaattggctctcaacagttgaaacgtgggaatttagcgttgaagaatagcagggagaatggtaatcctgtccgagttgttcgaggacatttgtcaaagaatagctacactggaaagatctacacctatgatgggctttacaaggttgtagatgactgggtgcagaagggagtgcaaggccatgttgttttcaaatttaagttgaagcggcttgagggtcagccatcattgacaacctctgaggtgcgatttactcgtgcagaagctccgacaactatttccgaattacccgggctggtttgtgatgacatctctggagggcaagaaaatattcctattcctgctactaacttggttgatgatccacctgttcctccatctggtttcaagtacttgaaatctctacaaattccaaaggacatcaagattccgtctagtattattggctgtgattgtgaaggaggttgtgctagcaacaaaaaatgtttgtgtgctcagcgcaatggttctgatctgccttatgtatcatataagaacattggcaggttggtggagccgaaagcagttgtatttgaatgtggggctaactgcagctgcaaccatgattgtgtaaacagaacatctcaacaaggtttgcagtaccgcttagaggtatttaagacagcttcaaaaggatggggagtcaggacttgggacactatcctccctggggctcccatctgtgagtacacaggggtgttgaggaggaccgaagatttggatggttcacagaacaactattgttttgacattgactgtcttcaaaccatgaagggtttggatggaagggagaaaagggctggatccgaaatgcacctgcctaatcttcatcctgagaatgattcagatgcacaacctgcacctgagtactgcatagacgctcactctattggcaactttgcaagatttataaatcacagctgccaacctaaccttttcgtccagtgcgtcttgagctcacacaatgatgttaaactggcgaaagtgatgcttttcgctgctgacaccatacttcctcttcaggagctatcctatgactacggttatcgattggacagtgttgttgggcctgatggaaaaattgtgaagctggcctgccactgtggtgctcctgattgccggaagcgcctctactaacctgcagtgtgtttatttctatttggatttttgaggaaacagcttatattgtaggaaaaacagtcatggtacctatgtagttgacatgctcttgatcatatatagcaaaagaggagcaatttatggggtgttcggtttaagaatgagttagtatatcatcttctcatttactatttttgcttggtttatgtaataaaatgagtcgatctatcaccaccttattcctcatagttagttagttagcactaacattagaaatgaagtcatcttatcaaatttaaggaatgagcttatgatgtaccaccttaatttggatgaagtgattcatcaaacaaacaccctattgatataatatagcattcttg

SEQ ID NO: 35580 - DNA, 1400 bp, Zea Mays
atgccgtacgaaagctggtggacgccgaaggtgaattcggtggcgccggtgccgaacccgatattcatggacgcctctcccctgaacccgccgccgctggtggaggaggagcttgtgctgcgccgcagtgctcgttgcctcaataggccaacccggcccagctacgcggaacaggagcctcctaaaaaacccggcggccggggccggagcaagcggaagagggacgaggagaaaccggagctggcaccggcgcagcagggtgccaagagtccggacaggaaggactccaaggatgaggcgggtgagaagaagccgacgcccatgattgcggcgctgccggtctcttgcgctggcgttgctgctgaagacgatgcgacggggaccgggaagagcgccaagctgagggtgaaggagacactgagggcgttcaatagccactacctccactttgtgcaggaggagcagaagagagctcaggctgcgctacaggagattaacgctaagagtggcctcaaacgtcagaccaaggggggtgaaaagaaacgcccatcaaagcggcctgacctgaaagcaatcaccaagatgcaagaaatgaatgccgtgctttatccagagaaaacgattggacatctaccagggatcgatgttggagatcatttctattctcgcgctgaaatggtagtgttgggcatacacagccattggctcaatggcattgacttcatggggctgaaataccaaggaaaggagtattcaaacttaactttcccactggccacctgtatcgtaatgtcgggggtatatgaagatgatctagacaaagctgatgaaattatttatactggtcaaggaggaaatgatttgcttggtaaccatcgccaaattggctctcaacagttgaaacgtgggaatttagcgttgaagggagaatggtaatcctgtccgagttgttcgaggacatttgtcaaagaatagctacactggaaagatctacacctatgatgggctttacaaggttgtagatgactgggtgcagaagggagtgcaaggccatgttgttttcaaatttaagttgaagcggcttgagggtcagccatcattgacaacctctgaggtatacttgaacaaatacaacaaactgagttgttgtattgatagtgcccaccgtcttcttatgatttggatgggtggacttcgcgtgaaaataatatgacacatctcatatttgctatcaattgtcaaaacatttctagttctagtcatggttgttatggcgctaaggtgacctacgagtgatctaggtcctttttatattttaaatgtctaagagtttgtttagaagcactcagttttttaaaaactggtttatgaaaattaatgcggttccaaacgtactagtt

SEQ ID NO: 35581 - DNA, 1408 bp, Zea Mays
atgccgtacgaaagctggtggacgccgaaggtgaattcggtggcgccggtgccgaacccgatattcatggacgcctctcccctgaacccgccgccgctggtggaggaggagcttgtgctgcgccgcagtgctcgttgcctcaataggccaacccggcccagctacgcggaacaggagcctcctaaaaaacccggcggccggggccggagcaagcggaagagggacgaggagaaaccggagctggcaccggcgcagcagggtgccaagagtccggacaggaaggactccaaggatgaggcgggtgagaagaagccgacgcccatgattgcggcgctgccggtctcttgcgctggcgttgctgctgaagacgatgcgacggggaccgggaagagcgccaagctgagggtgaaggagacactgagggcgttcaatagccactacctccactttgtgcaggaggagcagaagagagctcaggctgcgctacaggagattaacgctaagagtggcctcaaacgtcagaccaaggggggtgaaaagaaacgcccatcaaagcggcctgacctgaaagcaatcaccaagatgcaagaaatgaatgccgtgctttatccagagaaaacgattggacatctaccagggatcgatgttggagatcatttctattctcgcgctgaaatggtagtgttgggcatacacagccattggctcaatggcattgacttcatggggctgaaataccaaggaaaggagtattcaaacttaactttcccactggccacctgtatcgtaatgtcgggggtatatgaagatgatctagacaaagctgatgaaattatttatactggtcaaggaggaaatgatttgcttggtaaccatcgccaaattggctctcaacagttgaaacgtgggaatttagcgttgaagaatagcagggagaatggtaatcctgtccgagttgttcgaggacatttgtcaaagaatagctacactggaaagatctacacctatgatgggctttacaaggttgtagatgactgggtgcagaagggagtgcaaggccatgttgttttcaaatttaagttgaagcggcttgagggtcagccatcattgacaacctctgaggtatacttgaacaaatacaacaaactgagttgttgtattgatagtgcccaccgtcttcttatgatttggatgggtggacttcgcgtgaaaataatatgacacatctcatatttgctatcaattgtcaaaacatttctagttctagtcatggttgttatggcgctaaggtgacctacgagtgatctaggtcctttttatattttaaatgtctaagagtttgtttagaagcactcagttttttaaaaactggtttatgaaaattaatgcggttccaaacgtactagtt

SEQ ID NO: 35582 - DNA, 1110 bp, Zea Mays
ccacgctcttgtattgttttgtaaccacaagaagttccgatcctccacaccagcacccgccgccgccgcctcttcccttgcgcacctgctgctgtgcggatcggtgaggcggaggagtaggatggcgagcgcggccggaggcggagcggcgggggaaggggagtggcttaaggtatcccagctcaggcccatggtggaagcgcaggaccccaacgccaaggcagtggacaacctgacgctgcgtcggttcctgcgcgcgcgcgaccacgacgtggacaaggcctccgccatgttcctcaagttcctcaagtggcggagggaggcggcgcccggcggctccgtgccggaggagcaggtgaggagggagctgtcgcaggacaagctgtgcatgggcggcgtcgacagggccggccgccccatcctcgtcgccttcgcggccaggcacttctccgccggccgtgacatggcagagttcaagagttttgttgtctacttcttcgacaagatctgtgccagaatccccagagggcaggagaaattcctctgcatcgttgatctcaagggctgggggtactcaaactgtgacgtccgggcatacattgccgctatagagatcttgcagaactactacccggagcggctcggcaaggcgctgatgatccacgtgccctacatcttcatgaaggcgtggaagatgatctaccccttcatcgacaccaacaccagggacaagttcgtgttcgtggaggacaagagcctgcaggagacgctgcggcgggagatcgacgaggggcagctcccggagttcctcggcggcaagatggacgtgatcccactcaaggactatggcgtgcagcagcagcctcaggccgtgtaatagccatgccatgcgtagcatacacgagttgtggctaggagcatagcatggcaataactgtgtagctgctgtgaaagtgaaaatgaaacgttgcgctgtttagccgggtcaattgaccagcccaactgcagatctctgggctaccactatgaacagcaagaactgtttcccttatccttttcagccaaactaatcaaaccagaaaatgtttcttgtatgactgctaattaaaa

SEQ ID NO: 35583 - DNA, 1406 bp, Zea Mays
gtcgtcgcttgatccgtccgtgcatcgagttggttgcgcgttggacgaaaaatcgtgaacggagaaggcgcgacgtggcctgcgttccttccttccgccccgggcgggcctcagcgagtaaggtgagagtgtggggcggcggcggtgcggtgcgggtggtcgtcgcgcagtcgtagtgcggtgctggcagtggcacggcatgcacggcaccgcgcagtccaggccccgtgcttgcggagggacgcgacggggaaacaagacgacgacgacgacgtcgtcgtcgtctcggcacaaggggccaatgcaaggaagaggaagaggaagaaaaaacgggcgcgtacggtggactagtagtagtagctagctatgaccgagagtactggactactggtactggtagagcattattggtgcacaatgtcgtcaggcaggctgtcagccttgctcgtccgatcccgcaggtgaacagacagatggactgattgggtagctgttggcaagctagttacccattattcttccactccacctcgcccgtggcccgtacccgtcgtcgtcgtccacacagccacaagctgctgctgctgctgcgcgtgcttcctcttcagttcagctgaggtagcggcgcctcacccatcccccccgctacatacacatatctccttcttcgaagaactcggtcctttgggagcgagcaggagcaggagcaggacaggaccaggaagatcattatcaggagaagctaggcggggatatggcgaacgctggcggcggggcggccgaggaaggggagtggctcaaggtcgcccagctcagggccctcgtccaggaggaccaccgcgccaaggaggtggacaacctgacgctgcgtcggttcctgcgcgcgcgcggccacaacgtggacaaggcggccgccatgctgctcaagttcctcaggtggcgggcggaggcggcgcccggcggcggcaccgtgcgggaggagcaggtgcgcggggagctggagcaggacaagatctacatgggcggcgtcgacaggaccggccgccccatcatcgtcggcttgctcgccaagcactactccgccaaccgcgacatggcggagttcaagagttttgtggtctacttcttcgacaagatctgtgccaggatccccagagggcaggagaagttcctcgccatcatggatctcaagggctggggctacgcaaactgcgacgtccgggcctacatcgcggccattgagatcatgcagaactactacccggagcggctgggcaaggcgctgatgatcaacgtgccctacatcttcctcaaggtgtggaagacgatgatctaccccttcatcgacgccaacaccagggacaagatcgaatcaataaggttgcatagggagaagcggtgtctct

SEQ ID NO: 35584 - DNA, 745 bp, Zea Mays
tggcccttctttcttcatcaatcaaaatgcgtgtgatccccagagggcaggagaagttcctcgccatcatggatctcaagggctggggctacgcaaactgcgacgtccgggcctacatcgcggccattgagatcatgcagaactactacccggagcggctgggcaaggcgctgatgatcaacgtgccctacatcttcctcaaggtgtggaagacgatgatctaccccttcatcgacgccaacaccagggacaagttcgtgttcgtggatgacaagagcctgcgggagacgctgcggcgggagatcgacgagagccagctcccggagttccttggcgggaagatgcctctcgtctccctcaaggactacgcccagcagcctcagcccgtttgcgagtgagtctgtcgtagcgatggtggccggccggtgacgtgagcgacccaaagccgaaagctgattcgatctagactaagctaatacagcctacaagagggaggaagagaggccctacccgtggaattaagtcattagtttgtggtccaattcaataagaaagtaaatgtggtgtgtgaagatggtatggcattatcagtctttaatcccatattatacatttagatagaagaaaatcaacttatatgtggtagtgttccctactttttatatgagataaataaagggatacggagaatgctgcacgcacgctctcgctcacgtttcatgtttttcgcgttatttaccgtgtg

SEQ ID NO: 35585 - DNA, 1081 bp, Zea Mays
cttcttgttcgcgccgtgcgcccgaggtggacaacctgacgctgcgtcggttcctgcgcgcgcgcggccacaacgtggacaaggcggccgccatgctgctcaagttcctcaggtggcgggcggaggcggcgcccggcggcggcaccgtgcgggaggagcaggtgcgcggggagctggagcaggacaagatctacatgggcggcgtcgacaggaccggccgccccatcatcgtcggcttgctcgccaagcactactccgccaaccgcgacatggcggagttcaagagtacgtcgacgacgtggcccttctttcttcatcaatcaaaatgcgtgtgttttgtggtctacttcttcgacaagatctgtgccaggatccccagagggcaggagaagttcctcgccatcatggatctcaagggctggggctacgcaaactgcgacgtccgggcctacatcgcggccattgagatcatgcagaactactacccggagcggctgggcaaggcgctgatgatcaacgtgccctacatcttcctcaaggtgtggaagacgatgatctaccccttcatcgacgccaacaccagggacaagttcgtgttcgtggatgacaagagcctgcgggagacgctgcggcgggagatcgacgagagccagctcccggagttccttggcgggaagatgcctctcgtctccctcaaggactacgcccagcagcctcagcccgtttgcgagtgagtctgtcgtagcgatggtggccggccggtgacgtgagcgacccaaagccgaaagctgattcgatctagactaagctaatacagcctacaagagggaggaagagaggccctacccgtggaattaagtcattagtttgtggtccaattcaataagaaagtaaatgtggtgtgtgaagatggtatggcattatcagtctttaatcccatattatacatttagatagaagaaaatcaacttatatgtggtagtgttccctactttttatatgagataaataaagggatacggagaatgctgcacgcacgctctcgctcacgtttcatgtttttcgcgttatttaccgtgtg

SEQ ID NO: 35586 - DNA, 1643 bp, Zea Mays
caggcaggctgtcagccttgctcgtccgatcccgcaggtgaacagacagatggactgattgggtagctgttggcaagctagttacccattattcttccactccacctcgcccgtggcccgtacccgtcgtcgtcgtccacacagccacaagctgctgctgctgctgcgcgtgcttcctcttcagttcagctgaggtagcggcgcctcacccatcccccccgctacatacacatatctccttcttcgaagaactcggtcctttgggagcgagcaggagcaggagcaggacaggaccaggaagatcattatcaggagaagctaggcggggatatggcgaacgctggcggcggggcggccgaggaaggggagtggctcaaggtcgcccagctcagggccctcgtccaggaggaccaccgcgccaagtcgtcgtcagtgctcgacgttcaatgtgaagtcgggagtctcagcattcgtggcctgcgacgtcccaacaaccacgtaaataaattcacgagctcaccgagatggaagacttgaaattaccaaagatcatggaaacgctggcacaacctctgacaccggcagtagctgacggtggcaaccgaaaccagcccaagaactatgagcagacaggaggtggacaacctgacgctgcgtcggttcctgcgcgcgcgcggccacaacgtggacaaggcggccgccatgctgctcaagttcctcaggtggcgggcggaggcggcgcccggcggcggcaccgtgcgggaggagcaggtgcgcggggagctggagcaggacaagatctacatgggcggcgtcgacaggaccggccgccccatcatcgtcggcttgctcgccaagcactactccgccaaccgcgacatggcggagttcaagagttttgtggtctacttcttcgacaagatctgtgccaggatccccagagggcaggagaagttcctcgccatcatggatctcaagggctggggctacgcaaactgcgacgtccgggcctacatcgcggccattgagatcatgcagaactactacccggagcggctgggcaaggcgctgatgatcaacgtgccctacatcttcctcaaggtgtggaagacgatgatctaccccttcatcgacgccaacaccagggacaagttcgtgttcgtggatgacaagagcctgcgggagacgctgcggcgggagatcgacgagagccagctcccggagttccttggcgggaagatgcctctcgtctccctcaaggactacgcccagcagcctcagcccgtttgcgagtgagtctgtcgtagcgatggtggccggccggtgacgtgagcgacccaaagccgaaagctgattcgatctagactaagctaatacagcctacaagagggaggaagagaggccctacccgtggaattaagtcattagtttgtggtccaattcaataagaaagtaaatgtggtgtgtgaagatggtatggcattatcagtctttaatcccatattatacatttagatagaagaaaatcaacttatatgtggtagtgttccctactttttatatgagataaataaagggatacggagaatgctgcacgcacgctctcgctcacgtttcatgtttttcgcgttatttaccgtgtg

SEQ ID NO: 35587 - DNA, 1431 bp, Zea Mays
atgtcgtcaggcaggctgtcagccttgctcgtccgatcccgcaggtgaacagacagatggactgattgggtagctgttggcaagctagttacccattattcttccactccacctcgcccgtggcccgtacccgtcgtcgtcgtccacacagccacaagctgctgctgctgctgcgcgtgcttcctcttcagttcagctgaggtagcggcgcctcacccatcccccccgctacatacacatatctccttcttcgaagaactcggtcctttgggagcgagcaggagcaggagcaggacaggaccaggaagatcattatcaggagaagctaggcggggatatggcgaacgctggcggcggggcggccgaggaaggggagtggctcaaggtcgcccagctcagggccctcgtccaggaggaccaccgcgccaaggaggtggacaacctgacgctgcgtcggttcctgcgcgcgcgcggccacaacgtggacaaggcggccgccatgctgctcaagttcctcaggtggcgggcggaggcggcgcccggcggcggcaccgtgcgggaggagcaggtgcgcggggagctggagcaggacaagatctacatgggcggcgtcgacaggaccggccgccccatcatcgtcggcttgctcgccaagcactactccgccaaccgcgacatggcggagttcaagagttttgtggtctacttcttcgacaagatctgtgccagagggcaggagaagttcctcgccatcatggatctcaagggctggggctacgcaaactgcgacgtccgggcctacatcgcggccattgagatcatgcagaactactacccggagcggctgggcaaggcgctgatgatcaacgtgccctacatcttcctcaaggtgtggaagacgatgatctaccccttcatcgacgccaacaccagggacaagttcgtgttcgtggatgacaagagcctgcgggagacgctgcggcgggagatcgacgagagccagctcccggagttccttggcgggaagatgcctctcgtctccctcaaggactacgcccagcagcctcagcccgtttgcgagtgagtctgtcgtagcgatggtggccggccggtgacgtgagcgacccaaagccgaaagctgattcgatctagactaagctaatacagcctacaagagggaggaagagaggccctacccgtggaattaagtcattagtttgtggtccaattcaataagaaagtaaatgtggtgtgtgaagatggtatggcattatcagtctttaatcccatattatacatttagatagaagaaaatcaacttatatgtggtagtgttccctactttttatatgagataaataaagggatacggagaatgctgcacgcacgctctcgctcacgtttcatgtttttcgcgttatttaccgtgtg

SEQ ID NO: 35588 - DNA, 1468 bp, Zea Mays
agtagtagctagctatgaccgagagtactggactactggtactggtagagcattattggtgcacaatgtcgtcaggcaggctgtcagccttgctcgtccgatcccgcaggtgaacagacagatggactgattgggtagctgttggcaagctagttacccattattcttccactccacctcgcccgtggcccgtacccgtcgtcgtcgtccacacagccacaagctgctgctgctgctgcgcgtgcttcctcttcagttcagctgaggtagcggcgcctcacccatcccccccgctacatacacatatctccttcttcgaagaactcggtcctttgggagcgagcaggagcaggagcaggacaggaccaggaagatcattatcaggagaagctaggcggggatatggcgaacgctggcggcggggcggccgaggaaggggagtggctcaaggtcgcccagctcagggccctcgtccaggaggaccaccgcgccaaggaggtggacaacctgacgctgcgtcggttcctgcgcgcgcgcggccacaacgtggacaaggcggccgccatgctgctcaagttcctcaggtggcgggcggaggcggcgcccggcggcggcaccgtgcgggaggagcaggtgcgcggggagctggagcaggacaagatctacatgggcggcgtcgacaggaccggccgccccatcatcgtcggcttgctcgccaagcactactccgccaaccgcgacatggcggagttcaagagatccccagagggcaggagaagttcctcgccatcatggatctcaagggctggggctacgcaaactgcgacgtccgggcctacatcgcggccattgagatcatgcagaactactacccggagcggctgggcaaggcgctgatgatcaacgtgccctacatcttcctcaaggtgtggaagacgatgatctaccccttcatcgacgccaacaccagggacaagttcgtgttcgtggatgacaagagcctgcgggagacgctgcggcgggagatcgacgagagccagctcccggagttccttggcgggaagatgcctctcgtctccctcaaggactacgcccagcagcctcagcccgtttgcgagtgagtctgtcgtagcgatggtggccggccggtgacgtgagcgacccaaagccgaaagctgattcgatctagactaagctaatacagcctacaagagggaggaagagaggccctacccgtggaattaagtcattagtttgtggtccaattcaataagaaagtaaatgtggtgtgtgaagatggtatggcattatcagtctttaatcccatattatacatttagatagaagaaaatcaacttatatgtggtagtgttccctactttttatatgagataaataaagggatacggagaatgctgcacgcacgctctcgctcacgtttcatgtttttcgcgttatttaccgtgtg

SEQ ID NO: 35589 - DNA, 1582 bp, Zea Mays
gaaaaaacgggcgcgtacggtggactagtagtagtagctagctatgaccgagagtactggactactggtactggtagagcattattggtgcacaatgtcgtcaggcaggctgtcagccttgctcgtccgatcccgcaggtgaacagacagatggactgattgggtagctgttggcaagctagttacccattattcttccactccacctcgcccgtggcccgtacccgtcgtcgtcgtccacacagccacaagctgctgctgctgctgcgcgtgcttcctcttcagttcagctgaggtagcggcgcctcacccatcccccccgctacatacacatatctccttcttcgaagaactcggtcctttgggagcgagcaggagcaggagcaggacaggaccaggaagatcattatcaggagaagctaggcggggatatggcgaacgctggcggcggggcggccgaggaaggggagtggctcaaggtcgcccagctcagggccctcgtccaggaggaccaccgcgccaaggaggtggacaacctgacgctgcgtcggttcctgcgcgcgcgcggccacaacgtggacaaggcggccgccatgctgctcaagttcctcaggtggcgggcggaggcggcgcccggcggcggcaccgtgcgggaggagcaggtgcgcggggagctggagcaggacaagatctacatgggcggcgtcgacaggaccggccgccccatcatcgtcggcttgctcgccaagcactactccgccaaccgcgacatggcggagttcaagagtacgtcgacgacgtggcccttctttcttcatcaatcaaaatgcgtgtgttttgtggtctacttcttcgacaagatctgtgccaggatccccagagggcaggagaagttcctcgccatcatggatctcaagggctggggctacgcaaactgcgacgtccgggcctacatcgcggccattgagatcatgcagaactactacccggagcggctgggcaaggcgctgatgatcaacgtgccctacatcttcctcaaggtgtggaagacgatgatctaccccttcatcgacgccaacaccagggacaagttcgtgttcgtggatgacaagagcctgcgggagacgctgcggcgggagatcgacgagagccagctcccggagttccttggcgggaagatgcctctcgtctccctcaaggactacgcccagcagcctcagcccgtttgcgagtgagtctgtcgtagcgatggtggccggccggtgacgtgagcgacccaaagccgaaagctgattcgatctagactaagctaatacagcctacaagagggaggaagagaggccctacccgtggaattaagtcattagtttgtggtccaattcaataagaaagtaaatgtggtgtgtgaagatggtatggcattatcagtctttaatcccatattatacatttagatagaagaaaatcaacttatatgtggtagtgttccctactttttatatgagataaataaagggatacggagaatgctgcacgcacgctctcgctcacgtttcatgtttttcgcgttatttaccgtgtg

SEQ ID NO: 35590 - DNA, 1588 bp, Zea Mays
ctcggcacaaggggccaatgcaaggaagaggaagaggaagaaaaaacgggcgcgtacggtggactagtagtagtagctagctatgaccgagagtactggactactggtactggtagagcattattggtgcacaatgtcgtcaggcaggctgtcagccttgctcgtccgatcccgcaggtgaacagacagatggactgattgggtagctgttggcaagctagttacccattattcttccactccacctcgcccgtggcccgtacccgtcgtcgtcgtccacacagccacaagctgctgctgctgctgcgcgtgcttcctcttcagttcagctgaggtagcggcgcctcacccatcccccccgctacatacacatatctccttcttcgaagaactcggtcctttgggagcgagcaggagcaggagcaggacaggaccaggaagatcattatcaggagaagctaggcggggatatggcgaacgctggcggcggggcggccgaggaaggggagtggctcaaggtcgcccagctcagggccctcgtccaggaggaccaccgcgccaaggaggtggacaacctgacgctgcgtcggttcctgcgcgcgcgcggccacaacgtggacaaggcggccgccatgctgctcaagttcctcaggtggcgggcggaggcggcgcccggcggcggcaccgtgcgggaggagcaggtgcgcggggagctggagcaggacaagatctacatgggcggcgtcgacaggaccggccgccccatcatcgtcggcttgctcgccaagcactactccgccaaccgcgacatggcggagttcaagagtacgtcgacgacgtggcccttctttcttcatcaatcaaaatgcgtgtgtacgatccccagagggcaggagaagttcctcgccatcatggatctcaagggctggggctacgcaaactgcgacgtccgggcctacatcgcggccattgagatcatgcagaactactacccggagcggctgggcaaggcgctgatgatcaacgtgccctacatcttcctcaaggtgtggaagacgatgatctaccccttcatcgacgccaacaccagggacaagttcgtgttcgtggatgacaagagcctgcgggagacgctgcggcgggagatcgacgagagccagctcccggagttccttggcgggaagatgcctctcgtctccctcaaggactacgcccagcagcctcagcccgtttgcgagtgagtctgtcgtagcgatggtggccggccggtgacgtgagcgacccaaagccgaaagctgattcgatctagactaagctaatacagcctacaagagggaggaagagaggccctacccgtggaattaagtcattagtttgtggtccaattcaataagaaagtaaatgtggtgtgtgaagatggtatggcattatcagtctttaatcccatattatacatttagatagaagaaaatcaacttatatgtggtagtgttccctactttttatatgagataaataaagggatacggagaatgctgcacgcacgctctcgctcacgtttcatgtttttcgcgttatttaccgtgtg

SEQ ID NO: 35591 - DNA, 1690 bp, Zea Mays
cgcgcaccaaccctccgatgtcccatcccctccctagcctccgctccgccgctccccccaactccaccaggctcagtgtctccgcttctcgccgctttcccctcctccgcctgggcgcgccgcccgcccgcccctcccgatcccgtggacgtcctcgcaggcggcgtgttgcacgagaggtgagctccaccacgcgccccctctctcacctccctatcgctgtcagtcggtgcccagttcctcagccaaccagccgcgatctgtcggcgctgctcgccttccctggccctcgctcctgtcgacgccgctttataggggggctgcgtactgccgcgattgccttgcgatgggagtggggctcctctcgacgcctgtcagcgcaagatgcagatcggccgaggatgcagctgtgctatgctcgcagatgccagttgctccgagcaagcgcttcgcgccactcctagcacttttagttcactcgacagacgcttagggaatgttttaccagtattgttcatggtaaactcagagtttctatcaactgcccgggaaagtgaacttgtttccactccatctttagtgtcaaaaccaatttcttctacaggggcaacggaactacttcgaagtgaattatgggtgggttctgctgctgcctcagtgctgaagaatttgatgaatatgtctatccaaacaaccctatctataggcaatgcgtatccttgaggcatcttttccacagcatttttggcgggtatactgcaacattccagaggcttgagtctaggccaaacaacccagctcaaggggttgctccactgggatccactaatccaagtgtcaacataaatgacaattcactcaatcttgtttctagaccacctccatatgataccgatcctagatatgcccgtgttcaaagagagggattagtctccaggcgtgagaaatccataaatcttgcacaagaagagtcactggcccttagacgaaatgccagcagctctggtattgaacatttagctgctcagaagaaacgcaacagcactgaaaatgagggtgaatataaggtccatcgttctgaatcaactaagagtttgtctgcaaaagcttatagtagcagctatgctgttgtcgcttcagaagatgaggatgtctgccctacttgcctggaagaatacacgccagacaatccaaaaataataaccaagtgctgtcaccattttcatcttggttgtatttatgaatggatggagagaagtgatacatgcccaatttgtggaaatggagttttgcgagagcccatgatagcctttcggtttacatgatctcacatgaagtctgagctgcaggaaatggggttctgtgagaaccaatgatagcctttcgatttacatgatctcagatgggagcaagggaaacattctacagagtacaacagaatgctggagaattgtaaataatagttccttatgcatgcgatgtccaaatagatctctttctcgagatcagtttcttacatgtactgagatggttatctgtcttactaaattcatgctagaatttgcttggccagtttttgttatatttgcaaatggtagctcatagatggaagcacaactcatggatgaaagaatatattaacctgatcatgtgactgtctggcggtggatgtaccctatgaccgtatctc

SEQ ID NO: 35592 - DNA, 207 bp, Zea Mays
atggacggatcgagccactcataccagcgggccttgcactgcttggcggacttgcggacgagcagcgacgagatgcgcgcccactggttcttgccgtacttcatcacggccgccttgaggatctcgtcctccgtgttcttccacacgcctcccttgatcatgatcctcatcgtgccccactctgacctgattcgcctcctccgctag

SEQ ID NO: 35593 - DNA, 593 bp, Zea Mays
cacaagtggactttttattggaaaacagctggttagaaatttcgtacaccaatgtttccataaagcattgtggaccatactaaatgaacaaagagcatgtcacgcttacttggctgctattcagccagaggcacaatgaggcagttctgcatgagtacataagccgtcgatcctttagaaaaatggtaaacagttgttctgattcattgttcaagggaatacaacaaagggaaggatatgcaaatttagctcacaaccaattgtagcttcgcttgcgatattatagtgcactaaaaatataaccaaataggaaatactcagtccggacctgctgtgcaacaacaacatcgtgaagatcgccaggtgcgggagaagaaagcggagcttgaagggaaaggagcgccgtcttcaaggcaagggctgggcttcactgatctcttgaactgatacttcatcattacccccttcagtgtctggtgctggtgggacagggcctacaactccaccctctccattcccgctgtccacgtccatctgatcctcggtggttcctttgcttcctgcaggttcttcatcggtagccgtacttgtct

SEQ ID NO: 35594 - DNA, 1091 bp, Zea Mays
gttcaattgatagagtccagcttacgccaccgccgctacccctataaaacggcggagccgacggccccttcttttcctctcctccataaccacgagccaagcgcgacggatcccaatccatcttctcctcatccccaccacgaccaaaaaaaaatccggtcgccgatgccgtctgctgcctgacatcggtcagccagggtagatcgcgcaggcaggcagccccacacacatacgaaacccaatcctgcttcgatcccgtcggccggcgatggagggccggcggccgggcgcgcccgtggcgggcctgcccatcggcttccgcttccgccccaccgacgaggagctgctgctgcactacctccgccgcaaggcgctggcctgcccgctccccgccggcgtcatccccgacgccgacctcgcgcgcctccacccgtgggacctcctccccgccgccgcaccaggtgagctcccacggcggcgacgcggcggccgactgggtggtctgccgcattttcaggagggccaggccggcccaccgcgcccgccttggtggtggcgccagggaggaactagaagaggagcacgcggcggaggagagcccgtcgtcctgcgtcaccgacgcctccgagaccctcgaccaggaagaggatgacggcgacgaagggagcagcagcagcaccgtcgcctcctctaactgagactgagtagaagagttggctaccccatgtcgatcagatcgcgggcgccatgttctaattgccgtagaagcctcatcatcagtacctagttgcaatcaatagagagacaagaagatcggcctccaacaaaccaacaaaaaaaaagctaagcgctttggtggtatgttgctgttggagctcgtcgcgaatccagattgttaattagcgagaaattaatccgttcccccctccggcaattattaattaatcaccgttccctggttctcccacaatgtgttgctcattcgtcgaagcaaaacaatgccattcgcccaacgtctctgctgtgctgtgatgcattttgttccgattccgattccttgctgctgttgtgagacgataccgtcactaaac

SEQ ID NO: 35595 - DNA, 834 bp, Zea Mays
tttctgctggcatgtctgaagcgtcatgggacgggtgcattgtttgtccatcaacagacagcacatttgaccttcgcaccggggagataaaagaatggtatccgaaaaaccctgtcctacgggctcttacgccagccttgaggaaactattcacctaccgcgtgaaaacagacgaagaaaacatatacatcagcttcagcggagccgacggtgcggggtcagcggagattatattcagcgggaaagctcagcctggtgtgactgcatcggatgtcaatgtggaagagagaagtgagaagctcgtttcactgaacttgtgcacccaacttatatcccccttctacgttttcaggtgaggatggtcgtcgacgaggatgtcggaggcttcggcttcaccagtgacaacgagctgatcaacggaaaagccgccataatcggcttcctcctgctgatcgatttcgagcttctaactggcaagggccttctcaaggggacggggttcttggacttcatctacgcagtttcgggagctttcaactgagagtcatatgtgtgtttgttgttcgttccttggtatcaagaatgccatcgaggtgtacttgactacccttagaagcctaggttttgtcagcgtgcgattcagtcagctgtgcttgtatttgaacatcaccatgcttgtctgtgaagtgaggaagggacacgagaaagtcacatttgcggtgcttcttatacacctgtccgtagcagctgcatgccttccacagagcttccatagaatcctaatgaaactggagaagtaataacaaatttgcagccacgtatagtagtatttcg

SEQ ID NO: 35596 - DNA, 780 bp, Zea Mays
tctgaacttagtttctgctggcatgtctgaagcgtcatgggacgggtgcattgtttgtccatcaacagacagcacatttgaccttcgcaccggggagataaaagaatggtatccgaaaaaccctgtcctacgggctcttacgccagccttgaggaaactattcacctaccgcgtgaaaacagacgaagaaaacatatacatcagcttcagcggagccgacggtgcggggtcagcggagattatattcagcgggaaagctcagcctggtgtgactgcatcggatgtcaatgtggaagaggtgaggatggtcgtcgacgaggatgtcggaggcttcggcttcaccagtgacaacgagctgatcaacggaaaagccgccataatcggcttcctcctgctgatcgatttcgagcttctaactggcaagggccttctcaaggggacggggttcttggacttcatctacgcagtttcgggagctttcaactgagagtcatatgtgtgtttgttgttcgttccttggtatcaagaatgccatcgaggtgtacttgactacccttagaagcctaggttttgtcagcgtgcgattcagtcagctgtgcttgtatttgaacatcaccatgcttgtctgtgaagtgaggaagggacacgagaaagtcacatttgcggtgcttcttatacacctgtccgtagcagctgcatgccttccacagagcttccatagaatcctaatgaaactggagaagtaataacaaatttgcagccacgtatagtagtatttcg

SEQ ID NO: 35597 - DNA, 1625 bp, Zea Mays
aaactagctctaaaataatgaccgagctcgagtgccgagtggcagcttgcgggaggacaatgatggatggcatgtttcgtcctgctgtgcatttgcagatttcaaaggagttcactggacgggaacctataaatgtgtccgcttctcttccccacgcccggtcttgtcgctttatcgccaacctgtggccatggacgttccagcacgcaccaccaccacggcaccaccaccctgcccccctcctcctgctcaaacccaccccctctcgctcgcctccccgccactcccctcccgtccctatggcggccgttaccacagccactgccgccgcgtcctcctcctccttcctccaccgccgaagccccgcctgcctgcgcgccacgctccgcgccgcgccgcggcactgccgcaactccagctccaggctcgcctgccgcgccgccgaggtgtccggggccgagtcgtcctcggccgcggcggagggcgcgggaggaggcgggggcgcgtcgtgggtgcccgtggtgccgctcgccgcgctgccgcgcggagagcgccgcgtgatcgtgcaggacggggaggagatcctgctgctctggtacaagaaccaggtcttcgccatcgagaaccggtcgccagcggagggcgcctacaccgagggcctcctcaacgccaagctcacgcaggacgggtgcattgtttgtccatcaacagacagcacatttgaccttcgcaccggggagataaaagaatggtatccgaaaaaccctgtcctacgggctcttacgccagccttgaggaaactattcacctaccgcgtgaaaacagacgaagaaaacatatacatcagcttcagcggagccgacggtgcggggtcagcggagattatattcagcgggaaagctcagcctggtgtgactgcatcggatgtcaatgtggaagaggtatcatttttttaaatttttttgctgttcgatacgattcctgcttcacacacacacacacatgttctctctcctctgttccatacgatatacatccctgcagctcttctcattagcttcatactctacatttccagagaagtgagaagctcgtttcactgaacttgtgcacccaacttatatcccccttctacgttttcaggtgaggatggtcgtcgacgaggatgtcggaggcttcggcttcaccagtgacaacgagctgatcaacggaaaagccgccataatcggcttcctcctgctgatcgatttcgagcttctaactggcaagggccttctcaaggggacggggttcttggacttcatctacgcagtttcgggagctttcaactgagagtcatatgtgtgtttgttgttcgttccttggtatcaagaatgccatcgaggtgtacttgactacccttagaagcctaggttttgtcagcgtgcgattcagtcagctgtgcttgtatttgaacatcaccatgcttgtctgtgaagtgaggaagggacacgagaaagtcacatttgcggtgcttcttatacacctgtccgtagcagctgcatgccttccacagagcttccatagaatcctaatgaaactggagaagtaataacaaatttgcagccacgtatagtagtatttcg

SEQ ID NO: 35598 - DNA, 14432 bp, Zea Mays
gtatttttctgtgcatatggaaaccatgattgtacacctcaatggaggtcagagggtcataaatagaaataaatcaactcacttaccaatttgtttctaatgtcctttaaccttctgaaaaagtcatctttgaggctttgtgcctgagtatcaaatattttacggtcttcccatatgtcaatctgtaacattgagaaaaaaaattgagatgtgtcatgtggggccgcacctatgcgcaccaacaacgggcccgcgatgccaggagagctgaggcgcgggcatccacggtgggcgcgaacagcagtgcacataaggaaggcacgactaaggaaagtggctagattgatgtctaaattgataggccttaatggtagggggattggttaccaaataagtaattgcctaattagttgttgccaagttggtcaggcaggtagcctaattatagtggaaccgtgagacatgaggaataagaaaagtattatctctaatctcctatctccctaagcctgcggccacctcatcaccaaccccagccgctgttgcaacgtgcgatccagccatgagtagtgccaacgacttcaaggcccacgctgaggccctcaagtcgctacagaagtccgtcgcagccaatgcccaggccatcgccaacctcacagtcgacggcacgtcctcccccggcatcaagatcggctccggcgagcaccataatgaccggccaccaaggttccagaagctggactttccccagtacgatgataagaccgatccccttggtttcatcaaccgctgcgaatcatactttcatcagcagcgcatcatggagaaggtctggatggcctcctacaacttggatggcggggcgtagatgtggtacatccaagtccagtcggacgagggtactctatcgtggtgccggttcaaggagtggctcaacctgcgctacggcccccctctccgcgccacgcccctcttcaagctagctgattgccgtcgcacgggctccgtcgcggactatcaggaccgcttccaggcgctcctcccccgtgcaggacccctcgaggaggcgcaacgggtctagctcttcacatggggtctccttcctccgctcagcctcgacgtccaggtccacaacccgcagtccatcgcggctgccatgagcctggcgcgccagctggagctccgggagcattatacacaaacatctcccaaggtcgcgtcacgtggcctactagtagccccggcaccgcgagtcgccctacctgctccaccagtcgacagggcagccgcgcccgcgatcatggcggatgggcgcaagcgcctgtccatgtaggagcaagaggagcgccgccgacaaggccttagcttcaactgcaacgagtgttacatgcaggggcacaaccgtgtctgtaagcggatcttctacatccatggcgtcgagttggaccttgccgacgatgccaccactacggatgatcagaacacgtagtcgccggtgttcttcctacacgccgtcgccgaggtggccgtctgcaacactgtacaactgcaagtggccgccgctactttcgccgcgctcattgacacgggctcgactcacagcttcattggggaggggctgcacggcgctcgggcctcaccatcgagctgcgaccacgactcatggcaatggtggccaatgatgagcgtgtggactgcccggaagtccgtcgggcccaggtcgacataagtggcttggtgttctgcgtcgacctcttcgtaatgcccctagccgggtacaacgtcgtcctcggcacgcaatggatggccacactcgggcctattgcctaggacttcaacgctcggaccatggtgttccagtgggagggacgcgacgttcgatggagtggcgtagaccctccatccgcgccgattctcctcgccgcaacagcggatgacaccctcgtcgacggggtgttgaacaccttcaccgacattttcgccgagctgatcggcctacctccgacgcggagctgcgaccacaacatcgtcctcaagcctggctcattcccggtggtggtacgaccgtacaggtaccctgcagctcacaaggacgaacttgagcgacagtgtacctccatgattgtgcagggcatcgtccgccacagcgactcggcattctcatctccagtcatcctcgtcaagaagccggacgagtcgtggcgcttctacgtcgactaacgcgcgttgaacgcgctcacggtcaaggatgcatttccgatcccggtcgtcgacgagctccttggggcgcgcctcttcaccaaactggacctacggtcggggtatcaccaagtacggatgcggccggaggacgtccaaaaaaaggcgttccgtacccacgacggcctctacaagttcctggtgatgtcgttcgggctgtgcaacgccccagcaaaattctaggctctaatgaacgacgtattgcgcccctaccttcaccagtttgtgcttgccttctttgacaacattttgatagataataactcttgggcgaaccacctgaggcatctccgcgccgtcctcgacaccctgcgccagcaccgcctctttgtgaagaggtactagtgctcatttggcgtcgactccgtcgcctacctgggccacgtcatctcggcggagggcgtcgctatggaccctgcaaaggtccaggccatccacgactggcctcaaccacggtcagcacagaccgtgcgtggattcctcggtttggcgggctactaccgtaagttcgtccacaactatggcgccactacagcacccctcacggccctcctcaaggaggggttcgcatggtccgacgacgcgacctccgctttcagcgccctcaaaggggctgtgacgtccccaccaatgctaacattactggacttcaccaagtctttcgtcgtcgagtgcgacgcgtcgacccatggcttcggggtcgtactcatacaggaggctcatccgattgccttcttaagccgaccgatggcaccccgccatcgctctttagcggcatatgagcgggaactcatcgggcttgtgcttgtcgtgcggcattagaggtcgtacctgtggggggcgcctcttcgtcgtcaagacggaccactacagcctcaagtgcctcctcaaccagcgcctagccaccatccctcagcatcattgggtgggcaaacttctcggtttcgacttctccgtcgaatacaagtcgggagcaacgaacacgatggtcgacgccctctcgcgccgcgacaccgaaaaggacgacacggggctctacaggcgatcttggcgccccgcttcgacttcatcagccggctccgccacgcctaggccattgaccccgccctggccgccctccacgacgaaatcaacacaggcacacacgctgctccatgggcagtggccgacaacatggtcctctacgacaggcgtctgtacatcccaccgtcctcgccccttctgcaggaggttgtggcaactgtccatgaagatggacatgagggcgtccagtgcaccctacaacggctccgacgcgacttccattttcccaacatgtgtcgtgttgtgcaggactttgtgcgggcatgtcccacttgccagcggtacaaatctgagcaccttcacccggcaggtctcctcgtgcccctaccaatccccaccatcgtctgggcagacattggcctcaacttcgttgaagcacttccccgtgtcaacgggaagtcggtgatcctctctgtcgtcgaccacttcagcaagtactgccacttcatcgccctcgaccacccatacaccgcttagtcagtggcgcaggccttcttcaccaacattgtgcgcctccatggcattgccatagtccatggtgtccgaccacaacccggtgttcacctcggcgttctggcgtgagctcattcgactcatgggcactaagctgcacatgtcatccgccttccatccccagtcagacgggcagacagaagcgaccaaccacgtcatcattatgtacctccgctgcttcaccggcgaccgtcctcgacaatggcttcgctggctcccatgggccgaatatgtgtacaacacggcataccaatcctcgctccgggagacaccgttccgggtggtgtacggtcgtgacccaccctccatccgctcgtatgagcctgggaagacaagggttgatgcggtcgcacgcgacatggaggagcgtgagggcttcctcgcagatgtgcgctatcgcctcgagtaggcacaggcagtgcagaaacaccgctatgacaagcaacacaagccagtgacctacgcggtcggtgactgggcgctccttcgtctacgccaacgcgccccgtccttgccgccccaacagacaatgggcaagttgaagccccgcttcctggggccataccacgtcactgagctcatcaacgacgtcaccgttcgcctggagctgctcccacagggccgcattcatggtgtattccacgtgggcaccttgaagaagtatgtgggcacaccgccatcagccccaccacccctgcccgacatccatcatggggcggttgttccggagccggctcaggtcaaccacgctcgcttggcgcgtggtgttcaacaggtgctggtccattggcggggcgaaccggcgacttcggcaatctaggaggacctcgacaagtttcgcgccacgtacccagattttcagctcgaggacgagctagacctcgaggggggagaggtcatgtgggggccgcacctatgcgcgccaacagcaggcccacaacgccaggagagctgaggcgcgggcatccacggtgggcgcgaacagcagtgcgcataaggaatgcacgactaaggaaagtggctagattgatggctaaattgataggccttaatggtagggggattggttaccaaataagtaagtgcctaattagttgttgcctagttggtcaagcaggtggcctatttatagtggaaccgtgagacatgaggaataagaaaagtattatctctaatctcctatctccttgcattctctaagcctgcggctaaggaacccctcgccagagaagactgatagcggctacaaactacgtagtcgcgtccagccgctcgagggctcaatgcccttgacaagatgaaacaaaaaaatgttaggaagcaagtataaatccacaggttatcatcacaagtgattgagtactatggagctaaaacttacatgagtatgcaaccactttctgatttttgcacaaggtttccccagggcaagtacaagaaaaaataatgcagaaagtaggatagatgctaaagtgcaggacaataatgcagatagtaggatgggtgctaacatgccagctaattgatacttggtcggagttcggacggattattgataataacttgcacaattgcacctatatctaagagggatcgcaaaatgatgtgcaaaggaacggtttcgatctttttttagtggtgcaacagagcacagcggctgccctagatcagtgatgacgagatcaggctgatgttgcggtgtgactttagtaaccaggtttccggatcgatggggtcaaggaacgggaacgtggtacgcggtacgctacaaaaactaggatttaacactactggaacgagattgttcccacatccccgaaacggaacgaacgttccaggaacgaggaacgtggtcaagttcccggttcccggttactaagggtgtgaggctctcacagcggcaaagtagggcaagaaaatggtgccaatagtcctccatcgacccaaagcatttgagcacatgggtgtcccgaggcataggttcacgcatttgacgaaacacagccaagacatgatcctaaaaatcatgttccatctagtagtatcattcacccattgtatcatcgggaggtgaagagacacaccttttcatcctccagggttcggtgaccccgaaagaagttgccattagccacagatgttgagccaaggcaagcgatcagacttctcatcacaacgaggaaatttgagctccaaatggcacggatggcgaccatggctcacagtagtagtggtgtccgccgaaagttggtgccgtcactgacgccatgaccatagttgctgccctgagagagacatcgtggggacgctaatggaaacttatcggcaacacctcatagtatggaagcaactcctcattagtagccttccctagtattatatgcgatgtaggagcagtagaacaagaaggacatggtagatcaccagtgaggaactcccaaaggtgcaaaccacgcatgtgcatacgcatgcatggtacctcatcatggtaattagtgcaattaaaaagcaccaggcgaagaggtcaaagaaggggccatagtagcagttgacgccgggagtgcaaagtggagcagctacggacgacgacaagagcgcaaaagaaaagtgggccaaactgcaatttttactgaaacctaacgaaaactgttagaaccagatctgatcaaaaccagatctaggagagcgactatacacacaagcgaaacacagcagagcatcgagcgtccttgcgtgagactgtaacacgtgcaaatgcaacatgtgagaaaaatcataaagaaggaaaaaatcctaaccctaaaaattggctctgaataccatgttacgaattgcattatattcaatatatgagggtactaggcccaaatatatacactgatacaggatagagaccgtgtagaaggactctatatatgagaacgaatacaacaaggacacatgcataaacatctaacacatttggcgtgattccctccaatacgaaaaccctggtacaagtagattgtttgtttatgttttttgttgcttatgtttagaacggaaggcaaaactatcaatatacacacaccttgtcaagattatttggaatactttttctatggcaagttcataacctttggacgccttataataaaaaactgaaatgtatattatcataatgagaaaaaaatctatagataaacagataaatgcaagcttgcttgagaaaaaaacaaggaacataagttcaaattatcgttcaagcttcagacgagcagaccgtctcaggcggcccaaggacagatccagccggggggagagcggagacaggaagggccaataatagaggcgatcctagcccaagcaattccagcggcccagtcaccaaaggttggggcgaaattatcctggggggatcagcaacccgtgtgaaccactcccattgtcatcggggtccacttctagggaaatgttcgtcttcctcctggggtcccggcaaactgcatcgaaaagtcgtggcctctctcaggatctcctcagcagcttgtcccgcgcccttcaagatgaatgaatgtcccggcggtgccaccaagggaacagggggcaacgcgtccgacaccccagtggcacgcgagactcctcccctcccatgtggcggttgtggtcctaaccggagatggatcgaccgccgcctatcagggggatcgcccgaacaccgaggatgagaatcccgccaattccctcttctcatgatcatcataattcctgggctggtgattgttcgccggagggaagggaggcaacatccccaaggcagcgtccgtagtattagtaaggattgcattgccactgatattgtatgttagacaactcctttcattaccctgcagccctttctcaataatacgtagcgtcattttccgttgtaatttctctagatcaaaacaccatgacgatggccttggagaacactaatgtgacctcacctaagatcatcctgccgttgtcgcccacggcctcccccacggagcgttcatgttcttcttgatgcatgccattttttgcatgtgtggccccatcagccagttgaatacctaaactaagtagaattgattgctagggattgtgttctcaagtatggctttagcatcgatacataacaacccatcaaatgatacaagtcttggataagaatctacaatgcacaggtcgtttctgttgtgtctcttcttcggttctggcctattggccttgtttactctgtacattcatcttctattaatataatgatatgtagctctcctgggtattcgagagagagaacaatgcacaggtcgagttttttttagaatctacaatgcactagaacaccattattgacgattctttactacgacaggaaaaaaacctagtgtgacacataagctacaccatcacagtctatccgatatagatggtgctttcctggtcttggattaaacttcagctctcctaatttccactaggtggttcaatctcataagtgtagcttaagtacatcgattcaatcctatttgaaactactactcatcataggttaaatgatttgaatttgttggctttagggagccatcatctagattaggcaaatacaagctagattggtttacttcgacgatattctttcttttccaagcaagaaagtgtaagtgtttctatttttcagaagaaaaccttgacctcgatcagggaggtgaaagaaaagatgaaattctagaatctattcgctgctcttgttaatcctcactttatttcattttctttcggtcggcaccaatagaaaatgaaaaatgagtcaatccaatttcttcttgggttaagcaaaataagttaattatctaatctagcgaaagagaaaatataaagactaccattaaagcaacccaagcgtgacttattattaggggtgagcgttcgggttacccgaaaatttcgggccggataattcgggtatttaaaatttcggtttttgagaatcaatacccgaaattacaacgggttttacaatacccgaaaattcgggtacctggaatttcgggttcgggtattcacgaactacccgaacggttgtgtcaacttcatataaacacatgcaccctattaaattagtataaaaatacagtttgaataatgatatacatggacataaaaaacacaagcaatctacaatcacaagtcatgcacacttacacataattatagatgcacaaattaataattaagaatgacatgagtacatgacacatgaaagttcgggtatttcgggtacccgattatgatacccgaattacccaaaataaattctggttttgcaacttgctactcgaaattcccgaacgaaattcgggtttcgggtatttcgggttcgggtattccgggttcgggttacgggttttttgcccagccctacttattatatccatgtaaatcatgtgagctctcgaagtagaaaagtaccaaaccagaagataaggcgggcgtgcgcgcgagcgtgtgcatgtgcgtgtgtgtccaattaaccaatacattaatttgtgttatcccttgagggtcatgtcgtctccaacgtttctgtacccgattgggtctgcatggattacgtcatgcggaaatggatcatcaacaccatctccgaagggctcgctgatgtcctttctgtagagcctagcattgctaggtacgaggaatcctcacttctattacttctgctagatacaagttatcctttttgcttcctcggttttcgttctagctttagcaattagcatttagtcatttttgttggccagtgaaatgtggcatacacagacatcaacaaatcaatgaattcaaactaacttttcaattatcaagaaaagaaataagtgtcactagttttcgatcaataagaggtagagatctagctcccaagcaaaaaaacgagggacgagtgctttgttgctaaagcgcatatgttttcttgctccttttcgtacggaattctccactgaactcattgacctaggtaccgagtctgttatgtgtacgccttttcgaactccttattcatagacaaagtagattctgagttgtctttccttccaaggataacttgtatccatgaggtttagattattaacctagagttcgccatcaacagtatagccaaccccaccctatcacgtcaatcacacaagcctcttatacattcccgactcccgttcgatcatggcgagggagtaagtcaaaatagaaaaactcacggtttagggataatcaggctcgaattgatgacttccaccaagtcaaggtgacactcaaccgctaagttctaccccctcctcgttccatcgagaaagagaattaacgaatcctaaggcaaaggggcgagaaacacaaggccaagccattgttcctccgggctttctttccacactattatggacaatcaaataatgggaaaaattggatttaattgtcaacttgtcctatcgaaaataggattgactatggattcgagccacagcacatagtttcaaaaaaatcaatacgattttcctctaaaccatgggcttccatgaagatattgtttagcatgttctatttgatactgataaaagaagaacacgactagatattcttaaagaaaaagagggcaagcagaagcaagtcaagatgatatggatagtcccttcttgcaccaaagatcttaccacttttaaagggcccaattctctggtcatgcactctgtagttgtacctccaattgttgtacaaacacatgagatgcacataattttgctatttcaaagagcgaacaaaattgtttggattgggcaattcaaatgctttgattggttttcagataagaggtaaaaatattcttcattctttttaaatgaaaaacattaaaacccattctttctcataacttgagaatgtcattctcagctaatagaagtcaaactatctatctagatcagggttgaatacagcaaatggaaaagccaaagaaaacataaacccattgcgattagaaaccgatgactctgcagccaaggctcgatggcgatgtaagatagaaagaatggtgagttagggattcggtttcttctgtggccggtttcaattccaaaacatttgccgacgtccgaagtcacttctctaacccttctcgacagaagggatcatagcaaggagtaggagggatcatagcaaggagcgactactacagtatgcacctcctggccccatagggtggggaaaagctagtacttactaaaagcaaaggatccataacatgaaccttatattttggagcaactttgtctttatcaccacgtgaaagtattcttgtttcatgtagttcccaatgtttggcacgtcccatacttcgtgggtgcaacatcaacaaattcgctctggcccgccgaggcttgagtgagcttagcgatcattcccccatcaacaacatggtaatatttgggcttgggcttgggattggcatggcttgtttttcctcggtgaaacaagaatctatcatgatacaatagatttcattactttaaacgccataaaaggatgagcacaaaagtcgttgcacttccgtgcatgcgcataatcttgatctgtcacatgttagtacaataacacatagtcgggccttgcaccagttgcaagtttgcaggtagtgcctcctgaactagaggctcagcgactaccccgacccctaaagggttaagacacttgaaccaataagtgtctcgccctcgccccatcgcatgtcaacaaatctatgaacatatgttcagcttccatgctcatgtgttggtttcaagcaacccgagagcatgttaacctaataggatctgtcggtaccctggattaggggtaccccttactacggtataaaggcatgatgcatgcgcagctacccttaaccatgcagagaacaaccccaggggtatctcgtgagcagttggcgttctcagaggcaacgtcgtcggacccagaaggcacgggacccctgtacgcacaacccggacccccgaagtaaagcagcccggagccattggatagggttcggaccccaccaagagagctccggaccacccgtaacaaggacccgggaggggaagtaccgtgacctaggcatgggtccggtattgacgcgtgtccaggctctatccggagcacctccgctccccactcggccaggggtctaatactgccacatggcttattgtccgtgacgtaggccagcgggcggtgcatgacgtgagggctctgggccgcgcgatctccgcatttattgcggagaggacgcgcggcctgtccgcccttctaacaggcgatgtgcccccacgacatttattacgtcctgtccattccactggcagacggcgccagggccaccctgcagacgatgcacctgtccagtccgttgtcgaaacagtacgctcgtgctgcgcggtgcactgtactcatcccttgtgcgagaagcttcccctgcacgccgagactatacaagatctcgggtgtcagggcgcaagaagattgctccagcaggagatatcagtagctacatccgctatgttcctgggcccacatgtcggggctcagcactcttgtacatgtccccctttagctataaaaggggaggcatgcgacgttacaagataagctcaatctggaggcttagactcccaagtttccacagcaatccaacacacagtggagtagggtattacgctccggcggcccgaaccactctaaatcctcgtgtgttcttgtgttcttcccattttccaactaacaggcaaaacgcttaagctccttcctcatcttaggatttagggcgggtgcactccgccacccggccggagaattccctctccgacagttaagtaggcaaagcatacatcaatgaaggctttctaatggttgagaacgattgcttgcggaccaaagcaaacagttaagttggtaatttggcccacaaaacaattgtaactacttcacatgagccacaaacgtgagattgtggggcaggtgtagcgggttccggtaattacccgcaccgcctgcaagcctatcaaacaaattaaccaccaatcaaaatagaagttgtggatcattcatgaagaaagttcttgtcaaaaaaaaaggagcaaccgcaataaacactctttcatctcctttgcttttcaacaaaaaacttgcaatctagcctttgcatgtccaacagacaagacatccaagcaacacttgatttattgggctcagcactaactaatcattgatgtgtgatgtcagcactaagaaccgagatctcacacccacatatagataagaggatatcatgccattattgccaacccttcttccaacgagcgtgccacccccaaccatgtgccacctagagacatgcaagcgctccaacataatcaaagttgtccacctaattgggatctagagtatgaacctagctctgtcatggcaacatttaagatgtcatcgcagctatcgttccaaacatcaacccacaccattcaagttatggagacattgaacctagggcattgaacaacaggacacaatgggtttgtctgtgagccccctgataggccagtgttaagcgagttccatggtgcaatgtcattcgccccttctacctcggttgtctcatcctagcgttagcatatgtgccacgtcgaggcttgcttcctatgaccatctcttcaacaacatataccaacagagtgagggattgggagcgaggaaggggggggagagagttatgttgcccttttctcgccccccccccctcctcctcccgacccccaccccaaaaatcccaccaaccatcgtcagccttgctcatatcattagcaccatgctctgtcaaagtatcttggcatgagtcccaaacacaatgacaaccatgacaatggatatgccaacttttgaatcaaggacattccaacgaagttaaggcgaatagtatgcttcatgttctccatacttcacaccacctttcttcatcaccagcatgtgacacaagcaccgaattccccaaccccaattgctttaacaccccgtttggatgtagatattgaagtctagaattgggaattggaaccaggattcctaagttctgttgtttggttgtctaatgaatttagagttggaattaaagctcaattgctcggtattaaactataactagaagtcgtctttcacaattcagagcctagaccctctgtattagctagaattacaattccagatatatccaaacaacaaatttgtattgcaacccattttcaatactagacatatttggtattggatctaattcaattctaatatctccaatatctacatccaaacaaaccctaagagaaaaaagtgattgagaggagtgaagttggaacatgattgtttttttcacacattcttagatgctaaaaatactattcatggacacatgtatgttctatatatcttgtacccaaagagtatcaccattctaataaccttgcccctaaagtaagcgcatagatatggacatgaag

SEQ ID NO: 35599 - DNA, 810 bp, Zea Mays
gacaatttgagttgttcaatggagtttctgagaatgttgtgttgttcctgcaccccctgcataaattccgattgattgctgctacctgccaacatgcaacagaaaattcaagctacaccaaaaagacaatcggtctagttatattaccttgcaacctcattgaaattagctggatctaagcaggttggactgacgttgggataacaattgggttgtgtcgagcccaagcccacctatgaggctatgaatcaatttcccatagcacaccgtgtggcatatgatattcaatttcacttgtttaggctttatctagcgtgtgccctcaaaagccatgggaaccattcattgttgtcacaaagcgaagcttgaagttgtttgtcataacccttataaaccaacagtgagtatgaaagggccgtcaaaagcataggtcattttgcttgctgcccaaatttcagaggaaagaacatgacaccaacccctgaatctagttaaggctgaagaaactacgtagtggaagaatccaatttctgtatctgttatgaagcaactcaaggtagaaattgcggagaagtcccattgacaatgccatcagggcatagggctgaaacacaataaatctagtcactggacatcctcttgctaaagatggaaatgagggtttttaacgtacagtgcatctctttatacaaaccatctaggctcaaggatgtctcagttgcaacacaggtgtgatgcaaaccatttgcacattagctacatcaacctagatacaacaaacccatgcacagttttttttttgagaacgcg

SEQ ID NO: 35600 - DNA, 8759 bp, Zea Mays
agccatcactccatattttgatctatcttttttataagtttaagttcatatcacttattttagaaacttgaactcacaaactttctcttatttggtctctgtatggtggaattatgtcattttataatctttgtccgttcagtcagtcgttgtgaactctcttctaatctctcacttcattggctgcgttgtaccaagacatattggatggagtaaacaataacatcagttagcaaaatcaaaaaatattatacgaagagcggagacaatcaataaaaaatcttgaattttttatggatagtttatattggtattattgtaaaccgtcacaacgcacgaacaaccgacttgtttttaactaaacacaacaaataaaaagaatgatgagagtattaaatacagatatagtttatgtacagaaaaaaattctactccctataattagaaatattaattaacaatattacttctcgcgagttattttatgaaaaacacttggataaggtttaagaccgaccaagagtcgtatataaggagcgctatttgtcacctaagtaataaatacattcaatcgagttagtcaccgtatttaaattttgcaaaatccacccaactagatcactcccatatttataatatatactatatttactaaacaaattgtacttagacttttcacaccatcaaaattaacagttcagatcataggatcattcattctcacttaagactcaaatccaataaataatttggatatctctcatccttcccctctcacccgcgatcctaccgctccccctcccacgcgtccccaccgccgtcgacggtggcaaccggcaacccctcaaattgtgtcgccgccgttcattgctcccatcctttccattttaagtttgaacctacaaaataaattttctctggcaccaatctaatgatgtaatgttctgaatgtcgtcggatcacatttgtaccgtgtgtaacttatcccatttcatcttttttacacttataatagacgtacgcctatttaaattgagtcaatctgatatcatatgtatccatataattcatactccttccctccgttctaatttatagttctaatttataatccgtttaactttttaacatcaagtttaagtttcttcttattttaaaaaattataattattattaacttttactgtaataacatttaacatgtaatatactttaggtatatggctttgaattttttgtttgttcaaaaaaatgaataagacgaaccgattaaggttggcacaaaaaagttaaacaaattataaattaataccgaggaagtatttgattaactttttattatcctagcatttattatgagtcttatttatttgatttaaatatggcaaagtttaattaaatccaaaaaatatagtttattattttatttatcggtcaaatctaagcgccaactatccgttttctctgttccgttctgtgtctcccgtctgtttcaaatcccaattttattttctgattttgatacaagatttttcatggtgacttccgtttccgtcattattttactcgggttctcattttttcaccgggccattattcacgttctactaacaaatagtaaatattaaaaactaaacaatattgtgggttttaacccttaaccttttctatgagaaacaaagatttctatcactaaaattaattgtcggtgttttgaagctccgctctgataagtaaatttctatgcgcgcgtcctagactccagatgatgtgctcggtgggtgcaaggtttatactggttccggtaaaagtcccaacattcaatcttcggtggctcgccctaccagcacctttgttagttgatgcttgtagtaggggttacaagtaggttataagcgggcgagagggggaagaagagctcccaagtctcttatgtgcgggtggacctaaaagtcgtcctatactaagccttggctctgacttgcaggtcttcggatctcgtgtgtgtcatcgccttctgtcgagcgtcgtggttctgagagtcgaatcccttgggtcccacccccttgtcttatgactaacctcctccttatataggtcaaggtggggggtcaaccgtcagtggctgcctcgagaaggagccactatatcatggtaaaaccaagtgttttatcctggtgaggtcgtgttgtctgtatacgtcttggtcgcctggtcgtctctgctcgtgctcattatggcagacgacatggggcccttctggggatagatatcccccgggccaccacaacccgaagacgtttcgtgggccatccgaaaggcccttggtgggcctcggtcgaacgtgagtcgttggagtccgaggaaggtgtaggtgcacgtatgtgagaaaccagtcgcgtcttgtaagtgcagcgcgcggaaatcggtggacggctcatttgactgtagcccaatgcgacgagaggcaaaacaagcacaacgtgtagatcgtggactcgtagtagtttctctttaaccccaattcagtcagcaataaggctgaaggggggagcctacgaaatcgagatagacacccataaacctcatcttcttcctctagacttcccctatacttcagagagaactcaaccgcacacagacagaaaccacaagacgcagggtactacgccaccgagtggccaacctgagcaatcgcttgtgtctccgacgtgctcttcacgtaccatcgagttgcgatcgtcatcgcctttcacagaaaagcgctacgcggccaactccgtagcgtgttgtcagtattaaaaccgacaaccatggcaccatcattactacctctacgccacgtcgacccctggcctctatagcctaggtatcggtgtggctcgtcatgttgcggaccccgtagatggcctgtgcgctcaagcctagtctcgattggccatgagtgcgtcgctgcccgaggggctcgtaggtcatgagtgcactgcaggccgagggcctttcacatgtcatgagtgggaggcagactaacccgctactgtggttcggtgacatgcgtagttaatgcgatcggtctcttatggcgggtcagttttgtactaggtaaggaatccactcgagtggcttcccttcggttcgctcacccccccctccgtctagctctgccacgctcgattcgaggctcagtgcctcagggtttatccgggggtgtgcgcttctaggggagatagttcccttattgccccactgatcggtggtccccagtagtctagaggtccttatcctgtgcactatttctggttcagatgttatttgctctcatgcgctttgacttttgtgctttagggtgcgtttgatccaagttcagttggtaggattcgtgagactttccattagccttcgggtggccagtcagtcgctataggtaaagtgtccttccactctctttcgttattggcatcgtgtgtcatctttttgtcttcctagaaacggcaacctatcggaaggctgcaccgcttgaaccctttggggatcccttgtttgaccatggaccatggcgagcgtcctgcctcggagtgtccccattagggacgacccaagagtcgcccaacgcagaagggtaggcgcgttcctaggagcttttttaatctttttcattgttttttgggaaacagatggtgtcttccttgtgtcctttttcgatcagcgcacttcttggcgcatcagatccattgcccattgtattaacgcaaacttccatagttcacgcattaggtgttgaaccgtcgcttcatcctatatgtggcatcgacaatcatgtcgctttattgtgccctaagtctttttataaacagttcctccaggtggccttgccatacctagatctgccctctttgtcgaaacaggagcagtcacttcctgtctatccatggatccaggcgaatattcaaaagaggaccgtcccctggtgctaagaccccttgtgcacggatgattgatttggggtatgggttttccttttttgctacagaatcctcaggatcctgattctacttttacacttttcacgcctcgcgcaactaggtgattttgatgggctagaggaaggatttcaggacgcctttttacctaggcggggttcccattctctcgatgcagaccccatcggatctgtgggggagtctggccgccgcccatattgcccttgaggctgtcgatggtgaggtgttcagtcttcgcgcccacttagaagaggcagactgtcgtgttgcgggttagtggcgtattttccccttatggagatttctcttgagtattctgaccacccttgtttccttagtttctcccaaagctagagctagaggtgtcgggtcttcgtgagggcgaggatagggttattgcccttgttcatgcctaaagcgccatcttgacgtctcgaaccaagttcgccaagctgttcgatgtggcgcttgtcgcaatgctgtcggtgcactggctttcgttcaattccggtcgagcttcgagcttggcatcggtgacctatcaaaggatgtggctagcgacgctctagaggacatggaggatgattttggtgtggctaccaaggtcgtggtcaacctccttccacaggaggatgttatcaatggttccccttagtcatagcatgaccataggtcactgctatcgcaagatcacttggacatgtcctcagccttgagccttgtaatgcatgaattccttttgtcacttatattggccgcggagtggggacaccttttcttttcttgttccttttctagcgcgcttgaggctaacacaaaaatgggctttgatgtatgtgctttggagccctgtttgtaatttcaacgatcttctgatcacactccatttggtggcatcgagggcgactgtactgggctacgtttgtatgtgtgcctttagaagcagtgagaacgttgcattgggaggaagtggggaacttggtcgtggtgttgcggggttgtgtttctgcctagggttcgtcgtgtcgttgttcgcgtggaggtgacctcctgggttgtttggtccccttttttggtatgcgaagcatgcacccgagccccctgttcgttatagtggatatatcctaggggcgtgcccatattatctactaccccttcccatgcattccgttcatcggaaggggaaggatgagttgtaccatgcttcccttcgacgatcgagatcatagcacttcagcgagcttcaaacggcgatccaagtgaggccctttttacggagcgagcccctgagtcccctgttcgttatagcagatccgtttagggggacatgcctcgtattttttactacacattcccacgcatctcgttcaccggaaggggaagggcgagttgtaccatgcttccctcaatcgtcgagatcatggcgctcgacgagcttcaaacgggtgatccaagtgaggccccgactcctttcacatgatttaggcgcagggtctgctatgaatcgtcctcatactcttaggtgccaactcatatagttgtcatccctgttcgattggatttgatagctcgctgcatctcttcgcgacagaccatgagtcaaacgttccctaggactcaaacacaatttagaattgcccttggagcttgtgagctagggtcttggtcgttgggtgctcacttattaatcacccctcgctctttggttttgggagcggccacgaacacttggtgggatggccttcaaactctaagttttcaacccaagtcaggcctcctcgcagcgggtggtcagcatgggctcaccgattacttccctgcaggaggagatagtattatgaattgaaaagataggacaagccatcttacccaagaatggtcgcgtggtggtcaggccttagcgtcgtacggtcgttgcctagcacatgggccagatctaggtgtcatctaattttgggggaggcgttctgttcgactcgagcctgttcaccaaggtcagcaacatgttagttttgacacttattgcttatcgggggtgtgcctttgatccgacgatcgcatcttggtgggtcgtccactctcaattttgggatgaggtgctgcttggctttgactccctgtttgttttctagggttccacgtgcacccctcgttccattgtagggctgggcaaaaaaacctataacctgtaacccgaacccagaatacccgaacccaaacccaaaatacccgaaacccaaattttgttcggaaatttcgggtagcaacttgcaaaacccgaatttatttcgggtaattcgggtatcacaatcgggtacccgaaatacccgaattacccaaactttcatgtgtcatgtactcatgtcatgcttaattattaatttgtacatctataattatatgtaagtgtgcataacttgtgattgtagattgcttgtgttttatatgtccatgtatatcattattcaaactatatttttatacaaatttaatagggtgtatgtgtttttattaagccaacacaatagtttgggtagttcgggaatacccgaacccgaacccgaaattccgggtacccaaattttcggtattgtaaaacccattgtaatttcgagtatcgattctcaaaacccgaaatttaaaatacccgaattactcgacctgaaatttttgggtaacccgaacgcccacccttattccattgcccccctcaccttgagttcctgtcgccgccatccatcctcgggtgatcatagaattctggagacgctccttcgtcgatcaaggccgcctggacgcacttatttctagtgggctccttcatgagggagactacctgctccacggctccgaagaggttccagaaccgccgacaggcttcgtggtttcattcgtgcatttccatgagcggggcttcgcgatgccccctcaccctttcttagtggggctccttcactactacaagatccaggtgcaccacctcaaccctaatgggattcaacatatgactgccttcgtggctttgtgtgatgggtacctcgagacatctccccatttttgcctctggtgccactttttctcaactgaactgcttcacatgcggtcgacgtcggatgccccggtggaggcaacgcaaatcggctacacatctatccatctccgaggggctcaatctagagggtttattctgttgtgactgtgttcctccaacaagggctagcacgactagtggttctatctatgcaaccacgggtcctcgcttgttgccggttgtggtcttcctccattctcgcgtggagcaccccctaaggctcctcatagctggatgtggggtgtcctgacaaccatggcaccatcattacaacctctgcgctaagccgaactctagccttcgtagtctaggtctcggcgtggctcgtcacgttgcgggacctgtacatggcctgcacgctcaggccatgtctcgataggccatgagtacgtcgtagcccgaggggctcgtaggtcatgagtgcgctataggcccgggggcttcgcaagtcatgagtgggaggcagacagaccctctactatggctcggccaggcatagttaatgcggtcgaccacttatggcgggtcagttttgggccaggcgaggaatccaatcaagtggcttccctttggtttgtccgacccccctttctagctctgccacgttcgaccttaggctcggtgccttggggtttgtccgggggcagatgcttctagcggagacagttaccttattcccccgttgaccggtggtcctcagtagtctagaggtccttatcccgtgcgctctctcttaccagtgggccctaggggcctggggatcttttcccaacattgatgcatttacagttttaattacgatcaaaagttgtcatatattagatttcaattaaacctatggtcaaactaatgaaatggtgaactaagatcttgacttctagctaatgaaatggtcaaactaatgaaatggaatttaaaaataaaggctaagagcatctccatgtgactagccaaataacttgacaaactaaattttggctactcaacagcaaaataactctccaacagattagatatctaactcgccaagctatccggtgctctaaattaattctctcactagctaaatttggttagccaaactagataaatagtcggtctgagtgagatgttacatatatagtgtaatctttataaaaaggtaaatagagagtcaaataaagattaaaaaataaggagtcttttggagatgctctaagctttgtttgacaccttacctcataactcttattaggtaaagagagtacaacagtaagactttatattaattcacgtccgaatttttagatgattttagacaacagcggtgtctaaccaaatcatacaagtaaattactatattttataatttatctttgtataataataaatcaaaatcttgtgtttgtctaattataaaaaattataaattataaactatttttgtgccaactaagattatattttgtcgaatttgtaattttgtctaaagagttcttttattctcgtaactaaaaaaatatattttatacctatataagttgtaacgtgttgaatctataaatatagtataaaatatatgcaataagtgtcgtttgaataaaaaactaaaattcagatatctgagttttaggaaatctcgtactaattacctcttgagttgaaggaccaagacaagagctggtgcg

SEQ ID NO: 35601 - DNA, 857 bp, Zea Mays
tatgagttcatgtgacttattttagaaacttgagcttacaaagtttctcttatttggtctctgtatgatggaattatgtcattttttaatctatgttcgttcagtcggtcgttgtgaactctcttctaatcgcccacttcattggtcgtattgtaccaatacatattggatggagtaaacaataacatcagttagccaaatcaaaaaatattatacggagagcgaagacaatcaataaaaatttttgaaattttttttgtggatagtttacataggtattgttgtaagtcgtcgcaatgcacggacaaccgactagtatacttaaagcactagtttcaacgatcgtctcgcgtcatctttttacaaataacccctcacagctagttcaaattaacccacacgcctatagatggccaaacggcggcccggcacgggccagacgcccgcgggccacaactctggcccaggcacgtcatgttggcctgctgccgggcaagcccgttagcccatttgtttaaattagcgtaaaatgttaaagaacagtgcaacaggtggggtttgaacccatgtccggatggaagagaggcggtagacactgggtaaagctttctaaccagtagaacatcatgctcaaatatttttaatattaaatataaattatatatgtatatacgttttttgtaaaaaaatataatcgtgtcgggccagaccagcactacgagccgaggctacagcccaaacacaacacgacgttcttggctcttgcaagcattaggtcgtttctgagaccacattggcgcaatagactccatggtgtttgaggttgctgaattggatggagcaataatgatttgttg

SEQ ID NO: 35602 - DNA, 630 bp, Zea Mays
gagatgatggtctatagtttagtagtcctcactttcttaggtttggtcccgtgaatttgttctggagcacccgatttgacaaagccatgacatggtttcttacttgcctgcaagagtttgctgagtttgccataagtttggataagcagaacaatgttccccctgaaaaatcactgaagcttccctacaagattgatggtgacaaagtagggagccacacgatcgtccttagtttcaataagaatgaaaactggaccaaggctctaaagtacatgctgtgcaatctgaagtgggttctctactggtttattggcaatacaagttttgcaccaccctctgtatcactgcacacacaatctctgaagaacaagagttgatgctgttctctctctgcaacaactgtacatagtttgtgtactcgaccctattcgttggatatagccgcagtgacaataatgacacgtttgatgtgcatttgtttattgcttgaaatctgccatgatgtgtttattgtacaatctaaatctcaggaactacattttcacccttaggtaacgcctccaacattacgttttgaaaaaacaatgcaaaaacagtgttttaggtgacatgagtgaaatgctggacacg

SEQ ID NO: 35603 - DNA, 1124 bp, Zea Mays
cctattgaaatatgtgtggcttgacgactgattagttattgagattgaggaagaggaaaagaaacttaaagctgctattgaagaagctgaaaaacaatattcagaagttagatctgagatggaaaatcttgaaataaagtctaaacaatttgaggaattggaagagcggtattggcatgaattcaacagttttcagtttcagttgacatctcaccaggaagaaagagatgcagtttttgccaagatagaagtttctcaggttcatttggaactgttgaagcgtactaatgttctcaatgatgcattctatatatcacatgatggagtaatcggaacaataaataactttcgcctaggacgtctttctaatgtagaggttgagtgggatgagataaatgctgcatggggtcaggctgcactgctgttgcataccatggctcagtatttcaccccaaaattccaataccggatcaagattcaccctatgggaagctatccaagagtcacagacatccagaataacacatatgaactgtttggtcccgtgaatttgttctggagcacccgatttgacaaagccatgacatggtttcttacttgcctgcaagagtttgctgagtttgccataagtttggataagcagaacaatgttccccctgaaaaatcactgaagcttccctacaagattgatggtgacaaagtagggagccacacgatcgtccttagtttcaataagaatgaaaactggaccaaggctctaaagtacatgctgtgcaatctgaagtgggttctctactggtttattggcaatacaagttttgcaccaccctctgtatcactgcacacacaatctctgaagaacaagagttgatgctgttctctctctgcaacaactgtacatagtttgtgtactcgaccctattcgttggatatagccgcagtgacaataatgacacgtttgatgtgcatttgtttattgcttgaaatctgccatgatgtgtttattgtacaatctaaatctcaggaactacattttcacccttaggtaacgcctccaacattacgttttgaaaaaacaatgcaaaaacagtgttttaggtgacatgagtgaaatgctggacacg

SEQ ID NO: 35604 - DNA, 1629 bp, Zea Mays
agagggagtactgttgtaaccgtaatcatgcatcttctgttcagggcagtgttatgggtgcaagcaagatggacaactcttatgttgtgctatctagacagaacaaatctcagggtcctagaattcctccacgcccaccaagtgcagcagcggcacatgctgatcccagccaatcaacaagagcgatagaggggtcatatatagtgcttccacctcctgccgcttccatatacaggacatctgcctctgaaggtggtgcacagctcacaccatcaggtgtaatctccagtagcccctcgctgggaaacaattctgggtttcactctagtgttactgtgctgaaaagggcctttgagattgctagctcgcaaactcaggttgaacagccactttgtctggaatgtatgagggttctttctgataagatggataaggagattgaagatgttaatgctgatattaaagcttatgaggcttgtcttcaacgtttggagcaggaaccttacaacatcctcagtgaaacagattttcaaaaggagaaacaaaagattgaggaagaggaaaagaaacttaaagctgctattgaagaagctgaaaaacaatattcagaagttagatctgagatggaaaatcttgaaataaagtctaaacaatttgaggaattggaagagcggtattggcatgaattcaacagttttcagtttcagttgacatctcaccaggaagaaagagatgcagtttttgccaagatagaagtttctcaggttcatttggaactgttgaagcgtactaatgttctcaatgatgcattctatatatcacatgatggagtaatcggaacaataaataactttcgcctaggacgtctttctaatgtagaggttgagtgggatgagataaatgctgcatggggtcaggctgcactgctgttgcataccatggctcagtatttcaccccaaaattccaataccggatcaagattcaccctatgggaagctatccaagagtcacagacatccagaataacacatatgaactgtttggtcccgtgaatttgttctggagcacccgatttgacaaagccatgacatggtttcttacttgcctgcaagagtttgctgagtttgccataagtttggataagcagaacaatgttccccctgaaaaatcactgaagcttccctacaagattgatggtgacaaagtagggagccacacgatcgtccttagtttcaataagaatgaaaactggaccaaggctctaaagtacatgctgtgcaatctgaagtgggttctctactggtttattggcaatacaagttttgcaccaccctctgtatcactgcacacacaatctctgaagaacaagagttgatgctgttctctctctgcaacaactgtacatagtttgtgtactcgaccctattcgttggatatagccgcagtgacaataatgacacgtttgatgtgcatttgtttattgcttgaaatctgccatgatgtgtttattgtacaatctaaatctcaggaactacattttcacccttaggtaacgcctccaacattacgttttgaaaaaacaatgcaaaaacagtgttttaggtgacatgagtgaaatgctggacacg

SEQ ID NO: 35605 - DNA, 1991 bp, Zea Mays
ctattctctttctctctctccttcccccgccccctcgcctcccctctcccacccccaccaagcaccgccggtcactatccctccttggtcttctccctcctcagagcagggaggggaagcggaagagggaggcgagagcacgggaaacctgatctgatttgcttttggtcgccacaagagaagggagttggtgcagtttgtaggcgtgcctctgtgtctccgtgtgtgtggagatggaccccaagttccccacacccctagcgctaaacaaaacggagcccaccaccgcgacgaccaccaccacctcgaccgcgcagcatcatcagctggatcctaaggactaccagcagcagacggcgcagcaccaggagcagcagcagcaccaccatcacccccacctgcaaatccaaatccaccagccgccgccgccgccgcaggacgggggcggcggagtgaaggagcagcagcagctgctgcaggtggtggcgcagcccggggatcggaggcagcaggcgctcgcccccaagcggagctccaacaaggaccgccacaccaaggtcgacggcaggggccgccggatccggatgccggcgctctgcgccgcgcggatcttccagctcacgcgggagctcggccacaagtccgacggcgagactgtgcagtggctgctgcagcaggccgagccggccatcgtcgccgccaccggcacgggcaccataccggcgtccgcgctcgcctccgtcgcgccctcgctcccgtcgcctacctccgggctcgccaggccgcaccaccaccacccgcaccacatgtgggcgccgtccgccggcttctcctcgccctccttcctgaattccgcgggcgcgggcgacggcaccggtatcggcggcatcatgcagcggatgggggtccccgcgggcctggagctgccgggaggcggcgccgccggcggccacatcggctttgcgcccatgttcgctggacacgccgcggccatgccggggctcgagctcggcctctcgcaggacggtcacatcggcgtgctcgccgcgcagtcgatcagccagttctaccaccaggtgggtgccgctgccggcggcagtggccagatgcagcacccgcacgggcaccagcatcaccatcatcagcagcaggaggacggggaggacgaccgcgaggacggcgagtctgatgacgagtctgggcagtagtgtagtcgttcaaccttgcgttttctgggtcttccctcaagtggaggaggagagaaaagtgtatgcgtgcagccacggaatgcttctgctactcctggattcttgttggtcgatggatttttatgttttttttttctctcgtgtggtatccaaactcggcggaggcctctcttgctgtgaagacttgcgggctcaagatcatcctcacttcttcctacaatctcatggggtggatgatcgccacagccttctctccgacttccaggtgtataatagctgaaaacttgatggattggaccaatcacccttgatgcttgctgtggatcttttcgctttaaacaacatgctgaagacaacatcgagatcaagccgactttaagcatggacagcggcatgttgggtaaagttgctgagagtgcacagaagatgactttttttttctatgtgggtatcatgattgtgttggcaagtgtatgtgttctactccctcgggaccaaattataagttgctttgatttgttttttttacatccattttactatacatctagatatatagtacattatttgtctagatagacacatagcgaattgcatgtaaaaaaaagtcaaaacgatttataatttagaacaaaggagtactagtttgtggcgagcttgcttatcgcaactgcaagtgccactctgaatagaatctcatgctgtctgcatttcgttggttctttgcgtgtatttcgttcatgtccacacatgttttttttggggtccttgccacatccattt

SEQ ID NO: 35606 - DNA, 2953 bp, Zea Mays
cttctctctcttctcttctattctctttctctctctccttcccccgccccctcgcctcccctctcccacccccaccaagcaccgccggtcactatccctccttggtcttctccctcctcagagcagggaggggaagcggaagagggaggcgagagcacgggaaacctgatctgatttgcttttggtcgccacaagagaagggagttggtgcagtttgtaggcgtgcctctgtgtctccgtgtgtgtggagatggaccccaagttccccacacccctagcgctaaacaaaacggagcccaccaccgcgacgaccaccaccacctcgaccgcgcagcatcatcagctggatcctaaggactaccagcagcagacggcgcagcaccaggagcagcagcagcaccaccatcacccccacctgcaaatccaaatccaccagccgccgccgccgccgcaggacgggggcggcggagtgaaggagcagcagcagctgctgcaggtggtggcgcagcccggggatcggaggcagcaggcgctcgcccccaagcggagctccaacaaggaccgccacaccaaggtcgacggcaggggccgccggatccggatgccggcgctctgcgccgcgcggatcttccagctcacgcgggagctcggccacaagtccgacggcgagactgtgcagtggctgctgcagcaggccgagccggccatcgtcgccgccaccggcacgggcaccataccggcgtccgcgctcgcctccgtcgcgccctcgctcccgtcgcctacctccgggctcgccaggccgcaccaccaccacccgcaccacatgtgggcgccgtccgccggcttctcctcgccctccttcctgaattccgcgggcgcgggcgacggcaccggtatcggcggcatcatgcagcggatgggggtccccgcgggcctggagctgccgggaggcggcgccgccggcggccacatcggctttgcgcccatgttcgctggacacgccgcggccatgccggggctcgagctcggcctctcgcaggacggtcacatcggcgtgctcgccgcgcagtcgatcagccagttctaccaccaggtgggtgccgctgccggcggcagtggccagatgcagcacccgcacgggcaccagcatcaccatcatcagcagcaggaggacggggaggacgaccgcgaggacggcgagtctgatgacgagtctgggcagtagtgtagtcgttcaaccttgcgttttctgggtcttccctcaagtggaggaggagagaaaagtgtatgcgtgcagccacggaatgcttctgctactcctggattcttgttggtcgatggatttttatgttttttttttctctcgtgtggtatccaaactcggcggaggcctctcttgctgtgaagacttgcgggctcaagatcatcctcacttcttcctacaatctcatggggtggatgatcgccacagccttctctccgacttccaggtgtataatagctgaaaacttgatggattggaccaatcacccttgagtgagtgccttatttgttatattgcaaagtgtgtagatattcaggtaattttgcagttagagaggtgttctttttattggagtaaacatccacgttttaaaacaatcaaggtattcgccggcaattcgaccatcctccacaggctgtctatgcatcataaacatgatacgtatacaattctagtccatgatcactcagacctcctttttcctcctctgatacgtctggtctgtttctgacgagatttcttcttcttttgtgtgatgaaacatgcacgtcctagttgtttgcttgaatcatcagttattgtttcagtatatttgtttacctaggagagttgtttgctactacattttactagggaaaggttcagtaggttttattggtaaccatagatggtgacacacacagctatatatgcttgtgcagaaacagagcacaatagaaggctgcatgacacctgattcagaaacaagaatataaggattagacttggtccagcatagaaactagtgcttcattgccagcgaatattttctggacagtttgcattcttgagttcgattttctggacacttttgggatgttttgccgtgataagatgtgttctctaactgaaaatcacaaagattatactaccccaactacagtcaccttgctgcttgcatggtgttttataaacaactaatgctaactataaacctcccagttacattcttcagttcggggggatgtcaatgataaaccctgcacatcttctactacaagctgtataattttatttcctgatctttttgtcttggtgaatgactacccgtctatttctacggttacaaaaaaaagtggttatgacattgtgggttatgagatagtagctattttaaacgtgtagcatcagggatatgtctgttttttaaggaacatccataatcatcatctgaacagtgcttgctgtggatcttttcgctttaaacaacatgctgaagacaacatcgagatcaagccgactttaagcatggacagcggcatgttgggtaaagttgctgagagtgcacagaagatgactttttttttctatgtgggtatcatgattgtgttggcaagtgtatgtgttctactccctcgggaccaaattataagttgctttgatttgttttttttacatccattttactatacatctagatatatagtacattatttgtctagatagacacatagcgaattgcatgtaaaaaaaagtcaaaacgatttataatttagaacaaaggagtactagtttgtggcgagcttgcttatcgcaactgcaagtgccactctgaatagaatctcatgctgtctgcatttcgttggttctttgcgtgtatttcgttcatgtccacacatgttttttttggggtccttgccacatccattt

SEQ ID NO: 35607 - DNA, 1015 bp, Zea Mays
agggctcgcgcctcctctcctccgacccctataagcacccaaccctagcgcaaaaccccgcctccgctggacaccccgctccgcctccactcctcgcgccgctgccgcatctcctctacaggtaagaaggagagaaagagggcgaaatggtgaagcacaacaacgtcatccccaacgggcacttcaagaagcactggcagaactatgtcaagacatggttcaaccagcccgcccgcaagcagaggcgccgcatcgcacgtcaaaagaaggctgtgaagatattcccacgaccaactgctggccctcttcgtcccattgttcaatgccagactctcaagtacaacatgaagtcaagggctgggagaggctttacccttgaggagttgaaggctgcgggcattccaaaaaggcttgctccaaccattggcatttctgtggatcaccgccgcaagaacaaatcccttgaggggctgcaggccaatgtccagaggcttaagacatacaaggccaagctggttatcttcccaaggcgtgctcgcaaggtcaaggctggtgactctactctggaggagcttaccactgctacccaggtacagggtgactacatgccaattactcgcggtgagaagcgctctgtagaggttgtgaaggtcacagatgagatgaaggcgtttgcggcctatggcaagctccgccttgagcggatgaacaagaagcacctcggtgcccgccagaagaaggcagctgaggcagagaaggaagacaagaagtgaagcagccaaactttgtagcctgttttgttctgttcagtcatagcgagatgctacttccatcaagtgcttgttccaagttttttttgggtgctggaaatagagaccagtcaaatattttggtgtcctactgtttgataccttgtatttgtttgcgaactcagctatctaatgggttaatgaattcttggcgacgcacgattctgccttacaaaaaaaaaaaaaaaaaaaaaaaaaaagcagca

SEQ ID NO: 35608 - DNA, 1029 bp, Zea Mays
agggctcgcgcctcctctcctccgacccctataagcacccaaccctagcgcaaaaccccgcctccgctggacaccccgctccgcctccactcctcgcgccgctgccgcatctcctctacagaaggagagaaagagggcgaaatggtgaagcacaacaacgtcatccccaacgggcacttcaagaagcactggcagaactatgtcaagacatggttcaaccagcccgcccgcaagcagaggcgccgcatcgcacgtcaaaagaaggctgtgaagatattcccacgaccaactgctggccctcttcgtcccattgttcaatgccagactctcaagtacaacatgaagtcaagggctgggagaggctttacccttgaggagttgaaggctgcgggcattccaaaaaggcttgctccaaccattggcatttctgtggatcaccgccgcaagaacaaatcccttgaggggctgcaggccaatgtccagaggcttaagacatacaaggccaagctggttatcttcccaaggcgtgctcgcaaggtcaaggctggtgactctactctggaggagcttaccactgctacccaggtacagggtgactacatgccaattactcgcggtgagaagcgctctgtagaggttgtgaaggtcacagatgagatgaaggcgtttgcggcctatggcaagctccgccttgagcggatgaacaagaagcacctcggtgcccgccagaagaaggcagctgaggcagagaaggaagacaagaagtgaagcagccaaactttgtagcctgttttgttctgttcagtcatagcgagatgctacttccatcaagtgcttgttccaagttttttttgggtgctggaaatagagaccagtcaaatattttggtgtcctactgtttgataccttgtatttgtttgcgaactcagctatctaatgggttaatgaattcttggcgacgcacgattctgccttaatgttttgaatttatatagcaaaaaaaaaaaaaaaaaaaaaaaaaaagcagca

SEQ ID NO: 35609 - DNA, 1681 bp, Zea Mays
cgacaacatgaataaatcatgcattcagtcaagtgattctgtcaaaattattgacatgacactttcatacttctgtatgtatttttgtccaaaacaatgcttcgaatggtggtatttacctgacttcgaacatggttcaatcaaggatgattattgtgggggaagctcaggatacaactcggaattactgaagatcatggaaactaaccaatctcccccttgcaagcgaccgcggagagatcgaaaccgtgaaaaggcaccctcctcaaacaaaattgaagtcatggaacaagagatatggagagatttccctgaagatcttttcgaaactgtcatagcaaggcttcctgttgctgcaatttttcgattccgcactgtctgccgaaggtggtcttcccttttgggctcagacagtttctctcgtcagtactctgaagctccacatggactgccatggttctatacaatcactcatgagaattcaaacaacaatgttgcgatgtatgatcctttgctgaagaaatggcaccaccaatctgttcctctcaatcatacgaagatagttattccagtggcatccgtgggtggccttgtatgtttattggatctgagccacaggaatttttacatctgcaaccctcttacgcaatcactgaaggagatcccaccaagatcagtccatggttggtcaagagtcgttgtagggatggtgttgaatggaagaagttctagtgatggctacaaagtaatgtggttagatattgatgggacttgcgaagtttatgactctacaaagaacgtgtggtcttgccctggaacttttcctccaagcatcaaacttccacttgctctaaatttgaggtcacaaccagtggcggttggcagcatgatatacttcatgtgcgcagaaccagatggtgttttgtcatatgatgtaagcaccgggatttggaggcaatttgccatcccactgccactgcatctgactgatcacacacttgccgagttccagggaagggttatgctggtgggtctgctgtgcaaaaatgcagcgacctgcatctgcatatgggagttgcagaagatgactctcctctggaaggaggtggacagaatgccaaatctctggtgcttagagttctacggtaagcacatgaagatgaaatgcctgggcaacagtggtttgctcatgctctccttgaaggcgaagcatatgaaccgccttgttacatacaaccttttgaaaagggagtggcagaaggttcctgattgcatgctaccatggagtcgaaaaaggcaatggataacatgtggcacagcatttgatccggtcccctgcgccttggtctgacatggaattttaccttctttgtctgagcactataatattttagtcctttcatatcattggcctatctttagatctttctatgttgttgtgacaagttctgcgaaaacgcattactgtggtttgctttgtataacgccgccgaaacaatcgaacggtttcctttatcacctgctgttctgttaagcttgtaatctttctgaacgtgcagttacctgcccagagctgagttcattatacaataaataccgggatgttaatgtttggactctggtgcatggagatgcagtggtgcttgttattaccatgaaaataatgtttttaattattgtg

SEQ ID NO: 35610 - DNA, 1599 bp, Zea Mays
cgagaccagggcagcctccaccctaggtggtatttacctgacttcgaacatggttcaatcaaggatgattattgtgggggaagctcaggatacaactcggaattactgaagatcatggaaactaaccaatctcccccttgcaagcgaccgcggagagatcgaaaccgtgaaaaggcaccctcctcaaacaaaattgaagtcatggaacaagagatatggagagatttccctgaagatcttttcgaaactgtcatagcaaggcttcctgttgctgcaatttttcgattccgcactgtctgccgaaggtggtcttcccttttgggctcagacagtttctctcgtcagtactctgaagctccacatggactgccatggttctatacaatcactcatgagaattcaaacaacaatgttgcgatgtatgatcctttgctgaagaaatggcaccaccaatctgttcctctcaatcatacgaagatagttattccagtggcatccgtgggtggccttgtatgtttattggatctgagccacaggaatttttacatctgcaaccctcttacgcaatcactgaaggagatcccaccaagatcagtccatggttggtcaagagtcgttgtagggatggtgttgaatggaagaagttctagtgatggctacaaagtaatgtggttagatattgatgggacttgcgaagtttatgactctacaaagaacgtgtggtcttgccctggaacttttcctccaagcatcaaacttccacttgctctaaatttgaggtcacaaccagtggcggttggcagcatgatatacttcatgtgcgcagaaccagatggtgttttgtcatatgatgtaagcaccgggatttggaggcaatttgccatcccactgccactgcatctgactgatcacacacttgccgagttccagggaagggttatgctggtgggtctgctgtgcaaaaatgcagcgacctgcatctgcatatgggagttgcagaagatgactctcctctggaaggaggtggacagaatgccaaatctctggtgcttagagttctacggtaagcacatgaagatgaaatgcctgggcaacagtggtttgctcatgctctccttgaaggcgaagcatatgaaccgccttgttacatacaaccttttgaaaagggagtggcagaaggttcctgattgcatgctaccatggagtcgaaaaaggcaatggataacatgtggcacagcatttgatccggtcccctgcgccttggtctgacatggaattttaccttctttgtctgagcactataatattttagtcctttcatatcattggcctatctttagatctttctatgttgttgtgacaagttctgcgaaaacgcattactgtggtttgctttgtataacgccgccgaaacaatcgaacggtttcctttatcacctgctgttctgttaagcttgtaatctttctgaacgtgcagttacctgcccagagctgagttcattatacaataaataccgggatgttaatgtttggactctggtgcatggagatgcagtggtgcttgttattaccatgaaaataatgtttttaattattgtg

SEQ ID NO: 35611 - DNA, 1376 bp, Zea Mays
cacacccctacctcctccgcgctagatttggcactgttgaacggaggaacagggcgcgcgccgtagaaatgtggtatttacctgacttcgaacatggttcaatcaaggatgattattgtgggggaagctcaggatacaactcggaattactgaagatcatggaaactaaccaatctcccccttgcaagcgaccgcggagagatcgaaaccgtgaaaaggcaccctcctcaaacaaaattgaagtcatggaacaagagatatggagagatttccctgaagatcttttcgaaactgtcatagcaaggcttcctgttgctgcaatttttcgattccgcactgtctgccgaaggtggtcttcccttttgggctcagacagtttctctcgtcagtactctgaagctccacatggactgccatggttctatacaatcactcatgagaattcaaacaacaatgttgcgatgtatgatcctttgctgaagaaatggcaccaccaatctgttcctctcaatcatacgaagatagttattccagtggcatccgtgggtggccttgtatgtttattggatctgagccacaggaatttttacatctgcaaccctcttacgcaatcactgaaggagatcccaccaagatcagtccatggttggtcaagagtcgttgtagggatggtgttgaatggaagaagttctagtgatggctacaaagtaatgtggttagatattgatgggacttgcgaagtttatgactctacaaagaacgtgtggtcttgccctggaacttttcctccaagcatcaaacttccacttgctctaaatttgaggtcacaaccagtggcggttggcagcatgaagatgaaatgcctgggcaacagtggtttgctcatgctctccttgaaggcgaagcatatgaaccgccttgttacatacaaccttttgaaaagggagtggcagaaggttcctgattgcatgctaccatggagtcgaaaaaggcaatggataacatgtggcacagcatttgatccggtcccctgcgccttggtctgacatggaattttaccttctttgtctgagcactataatattttagtcctttcatatcattggcctatctttagatctttctatgttgttgtgacaagttctgcgaaaacgcattactgtggtttgctttgtataacgccgccgaaacaatcgaacggtttcctttatcacctgctgttctgttaagcttgtaatctttctgaacgtgcagttacctgcccagagctgagttcattatacaataaataccgggatgttaatgtttggactctggtgcatggagatgcagtggtgcttgttattaccatgaaaataatgtttttaattattgtg

SEQ ID NO: 35612 - DNA, 1737 bp, Zea Mays
aggccggatctttggggtgcttgtctgtgcgccacaggatttcgatccactgttttcggcccctcgaattggtgttacctgcgtccactccccccacacccctacctcctccgcgctagatttggcactgttgaacggaggaacagggcgcgcgccgtagaaatgtggtatttacctgacttcgaacatggttcaatcaaggatgattattgtgggggaagctcaggatacaactcggaattactgaagatcatggaaactaaccaatctcccccttgcaagcgaccgcggagagatcgaaaccgtgaaaaggcaccctcctcaaacaaaattgaagtcatggaacaagagatatggagagatttccctgaagatcttttcgaaactgtcatagcaaggcttcctgttgctgcaatttttcgattccgcactgtctgccgaaggtggtcttcccttttgggctcagacagtttctctcgtcagtactctgaagctccacatggactgccatggttctatacaatcactcatgagaattcaaacaacaatgttgcgatgtatgatcctttgctgaagaaatggcaccaccaatctgttcctctcaatcatacgaagatagttattccagtggcatccgtgggtggccttgtatgtttattggatctgagccacaggaatttttacatctgcaaccctcttacgcaatcactgaaggagatcccaccaagatcagtccatggttggtcaagagtcgttgtagggatggtgttgaatggaagaagttctagtgatggctacaaagtaatgtggttagatattgatgggacttgcgaagtttatgactctacaaagaacgtgtggtcttgccctggaacttttcctccaagcatcaaacttccacttgctctaaatttgaggtcacaaccagtggcggttggcagcatgatatacttcatgtgcgcagaaccagatggtgttttgtcatatgatgtaagcaccgggatttggaggcaatttgccatcccactgccactgcatctgactgatcacacacttgccgagttccagggaagggttatgctggtgggtctgctgtgcaaaaatgcagcgacctgcatctgcatatgggagttgcagaagatgactctcctctggaaggaggtggacagaatgccaaatctctggtgcttagagttctacggtaagcacatgaagatgaaatgcctgggcaacagtggtttgctcatgctctccttgaaggcgaagcatatgaaccgccttgttacatacaaccttttgaaaagggagtggcagaaggttcctgattgcatgctaccatggagtcgaaaaaggcaatggataacatgtggcacagcatttgatccggtcccctgcgccttggtctgacatggaattttaccttctttgtctgagcactataatattttagtcctttcatatcattggcctatctttagatctttctatgttgttgtgacaagttctgcgaaaacgcattactgtggtttgctttgtataacgccgccgaaacaatcgaacggtttcctttatcacctgctgttctgttaagcttgtaatctttctgaacgtgcagttacctgcccagagctgagttcattatacaataaataccgggatgttaatgtttggactctggtgcatggagatgcagtggtgcttgttattaccatgaaaataatgtttttaattattgtg

SEQ ID NO: 35613 - DNA, 3288 bp, Zea Mays
gcgcgtcattgccagcggaggcgcgtcgctatcgcctgggaacaataagagtttgcgcgtctcgcgactgatcggtggcgactgccactcggcggcgacttggactcgacttccgggcaacagggcgaggagtcggccggccagtccactgggttcaaatcggcctcggcaccgcggcgcccccccgcgagttcttgctggattcgctcggagcacggcgcgggcttgtcggcacggcgccatgcagcagcagcagcaaggttgataatgtggatgcactgaattgctactatgctcgtggagacaaaaatccaacatttcagaggcggatatattggatgcttgatccggcttatgaacacattgtccttgtccactatagggatgttctagagggcagcatttcagtatctgcacgaaatgattcttcaacattgaatcagaatggcagtgctagcagagctgaagtacatagttcacctggttggacaagcgagttaattgcacattgtactaattcgtgcagtccgggatctgctgaagaagtcagttcccaaattagtgcaagtgaatctgatttgattcaacataaggcagccttgcggaagcttaaaatgcagctgagtctggaagacaaagaagattgtgatgttaatgccgaggatgttccagcagataatgagcctattattttacctgtgattcagaatgaggagccaggcacttctagaaatcatgatgatatctttgatgtgctggactttagtgaagatcatatcaacggaactggaacccatccatgtcacagtgctattgacgtgctaaaaaattcagacacatggttagaggatgatcaacttgaggcaattctgcatccagcgtgtatgacattgactgaaaatcaatggttcaggatacatgaggtttctccagaatcagcgttttcttatgaaagtacaaaggttatcattgtaggagacttcctttgcaatccccctcacagttcatggcaagtgctgtttggtgatgttaaggtatgtgtggaaattatccagcaaggtgtcatccgttgccatactccatgccttgatgctggaaaagtgagaatgtgcttgcttgatgggaatgggaagtcctgcagtgaagcacgagaatttgaattccttgaaaagcctaccaaatgcatgattgatggaaacacgaacccctgcaatgaagcacaagatgtcaaactgcatcagatacctaccaaaagtagtgaggagctgtcactgttactacattatgtgcatacactttttgatggtcatgctagtgggctattttcaaattttagcttgccactccaaaatcttggctgtggaatccaaagcaatcaaatggatgttatgaagaaggcgtataagcagctggaccctgagaatgtggtaagtagtgtcatggaagtattgcttaatgacaagtttaagcaatggttgtcatccaaatgtgaacagaatattgatggagaccatttgcttcctaagcaataccgcaatattatacatacggttgcagccttgggatatgatttggctttgaagccactgcttagttcaggagtgcctataaactaccgtgatgcaaatggatggactgctctacattgggctgcaaggtttggcagagaagatatggtggtggctcttcttactgctggtgctgcagctggtgcactttcacatccgacatcagaggatcctgctgccaaaacacctgcttcaatagctttagcatatggtttcaagggcctatccgcgttcctttcagaagcacaattaacaactcatcttgattctatcgagtcaaaagaaaatggaaaacttgattctagggaagaggggatatgtcgtgctgtggacagaatatcagacaaaagcagccacgtgcatggtggaactgatgatcagcttgcgcttaaggattccctgggagctgtccggaatgcagttcaggctgcagggcgcatacaagctgcattccgaattttttcctttaagaagaagaaagagatggctcttgggaacagaaatagctgctgcttgtccattagtgaggcaggagcagtttcacatgatatgctggagaaagctgtattatctatccagaagaacttcaggtgctggaaaaaacgtaaagaattcctgaagatgcgaaataatgttgtcaggatacaggcccgggtgcgagctcatcaagaaagaaacaagtacaaggaattgatttcaagtgtcggaatccttgagaaggtgatgatacggtggtaccataaaggtgttggtctgcgtggattcaattctggggcaatgacaatcgatgaagaggtggacgaagacgttgccaaggtcttccggaagctcagagtggaaacagccatcgatgaagctgtttcaagggtatcatgtatcattggtagccctaaagcaatgcatcagtaccgaaggatgctcaataggtaccaacaaacaaaggatgatcaggagaagtaatgcttgtgttaaaccaacagtgatggagcaaacagcaaagcacaagccacccactatttatttatctcccttactgaagcacaagccttggtgactgaatggacagtggatcccgagtaaaactgaaaatttcttgggtgaactagaaccagctccaattcatgctggacgctgtttgagtgtacacagcaacgtcatgtgcaatagctgacttctggctgaaagttggtaaaggcgatgacttagtggtatatgcagaagcttccaaaagcctgatgagcaaggtagatgaggtctgagaaacactgcattcgatatatatatgccttatgtactaccttcatgcagtaggtttgtagtaaatttgtgcgtaactcttcttctgcgtattccagaaaaaaagtttgtagtaaatttgtactatatggtagtaaataggggtcaactattgtaatttgtagcacaatgaatcttgtaagaaatctcagtttagaaatactccatcttttacacatgggatgatgacgaccgatgatcaattttgccagttaatacgttcgccgcagtcctctattggcagtgacattccaacagttgaacgccagctgtttcatgcctttggcatcagctttcaaatggagcagcgatcaaagaaagcctcgtagcattaaacttctctctcggtagtctcgtgatcagaattcagatggctcaagcaactgccaacagaataaacaatcaggcagggtgcgagccactg

SEQ ID NO: 35614 - DNA, 3354 bp, Zea Mays
gcgcgtcattgccagcggaggcgcgtcgctatcgcctgggaacaataagagtttgcgcgtctcgcgactgatcggtggcgactgccactcggcggcgacttggactcgacttccgggcaacagggcgaggagtcggccggccagtccactgggttcaaatcggcctcggcaccgcggcgcccccccgcgagttcttgctggattcgctcggagcacggcgcgggcttgtcggcacggcgccatgcagcagcagcagcaaggcttagacataggcaagctacaagaggtagtgaagacccgctggctaaagcctcaagaagttctcaagatactgcagaatcatgagctgttcacgatttcgcataagccccctcagaagccacagagtggttcttggtttcttttcaaccgtagagtactccggtacttccgaaatgatggatttgaatggcaaaagaagagaaatgggaagaccattaatgaagcccatgagcgccttaaggttgataatgtggatgcactgaattgctactatgctcgtggagacaaaaatccaacatttcagaggcggatatattggatgcttgatccggcttatgaacacattgtccttgtccactatagggatgttctagagggcagcatttcagtatctgcacgaaatgattcttcaacattgaatcagaatggcagtgctagcagagctgaagtacatagttcacctggttggacaagcgagttaattgcacattgtactaattcgtgcagtccgggatctgctgaagaagtcagttcccaaattagtgcaagtgaatctgatttgattcaacataaggcagccttgcggaagcttaaaatgcagctgagtctggaagacaaagaagattgtgatgttaatgccgaggatgttccagcagataatgagcctattattttacctgtgattcagaatgaggagccaggcacttctagaaatcatgatgatatctttgatgtgctggactttagtgaagatcatatcaacggaactggaacccatccatgtcacagtgctattgacgtgctaaaaaattcagacacatggttagaggatgatcaacttgaggcaattctgcatccagcgtgtatgacattgactgaaaatcaatggttcaggatacatgaggtttctccagaatcagcgttttcttatgaaagtacaaaggttatcattgtaggagacttcctttgcaatccccctcacagttcatggcaagtgctgtttggtgatgttaagtgaagcacgagaatttgaattccttgaaaagcctaccaaatgcatgattgatggaaacacgaacccctgcaatgaagcacaagatgtcaaactgcatcagatacctaccaaaagtagtgaggagctgtcactgttactacattatgtgcatacactttttgatggtcatgctagtgggctattttcaaattttagcttgccactccaaaatcttggctgtggaatccaaagcaatcaaatggatgttatgaagaaggcgtataagcagctggaccctgagaatgtgaatattgatggagaccatttgcttcctaagcaataccgcaatattatacatacggttgcagccttgggatatgatttggctttgaagccactgcttagttcaggagtgcctataaactaccgtgatgcaaatggatggactgctctacattgggctgcaaggtttggcagagaagatatggtggtggctcttcttactgctggtgctgcagctggtgcactttcacatccgacatcagaggatcctgctgccaaaacacctgcttcaatagctttagcatatggtttcaagggcctatccgcgttcctttcagaagcacaattaacaactcatcttgattctatcgagtcaaaagaaaatggaaaacttgattctagggaagaggggatatgtcgtgctgtggacagaatatcagacaaaagcagccacgtgcatggtggaactgatgatcagcttgcgcttaaggattccctgggagctgtccggaatgcagttcaggctgcagggcgcatacaagctgcattccgaattttttcctttaagaagaagaaagagatggctcttgggaacagaaatagctgctgcttgtccattagtgaggcaggagcagtttcacatgatatgctggagaaagctgtattatctatccagaagaacttcaggtgctggaaaaaacgtaaagaattcctgaagatgcgaaataatgttgtcaggatacaggcccgggtgcgagctcatcaagaaagaaacaagtacaaggaattgatttcaagtgtcggaatccttgagaaggtgatgatacggtggtaccataaaggtgttggtctgcgtggattcaattctggggcaatgacaatcgatgaagaggtggacgaagacgttgccaaggtcttccggaagctcagagtggaaacagccatcgatgaagctgtttcaagggtatcatgtatcattggtagccctaaagcaatgcatcagtaccgaaggatgctcaataggtaccaacaaacaaaggatgatcaggagaagtaatgcttgtgttaaaccaacagtgatggagcaaacagcaaagcacaagccacccactatttatttatctcccttactgaagcacaagccttggtgactgaatggacagtggatcccgagtaaaactgaaaatttcttgggtgaactagaaccagctccaattcatgctggacgctgtttgagtgtacacagcaacgtcatgtgcaatagctgacttctggctgaaagttggtaaaggcgatgacttagtggtatatgcagaagcttccaaaagcctgatgagcaaggtagatgaggtctgagaaacactgcattcgatatatatatgccttatgtactaccttcatgcagtaggtttgtagtaaatttgtgcgtaactcttcttctgcgtattccagaaaaaaagtttgtagtaaatttgtactatatggtagtaaataggggtcaactattgtaatttgtagcacaatgaatcttgtaagaaatctcagtttagaaatactccatcttttacacatgggatgatgacgaccgatgatcaattttgccagttaatacgttcgccgcagtcctctattggcagtgacattccaacagttgaacgccagctgtttcatgcctttggcatcagctttcaaatggagcagcgatcaaagaaagcctcgtagcattaaacttctctctcggtagtctcgtgatcagaattcagatggctcaagcaactgccaacagaataaacaatcaggcagggtgcgagccactg

SEQ ID NO: 35615 - DNA, 3362 bp, Zea Mays
gcgcgtcattgccagcggaggcgcgtcgctatcgcctgggaacaataagagtttgcgcgtctcgcgactgatcggtggcgactgccactcggcggcgacttggactcgacttccgggcaacagggcgaggagtcggccggccagtccactgggttcaaatcggcctcggcaccgcggcgcccccccgcgagttcttgctggattcgctcggagcacggcgcgggcttgtcggcacggcgccatgcagcagcagcagcaaggcttagacataggcaagctacaagaggtagtgaagacccgctggctaaagcctcaagaagttctcaagatactgcagaatcatgagctgttcacgatttcgcataagccccctcagaagccacagagtggttcttggtttcttttcaaccgtagagtactccggtacttccgaaatgatggatttgaatggcaaaagaagagaaatgggaagaccattaatgaagcccatgagcgccttaaggttgataatgtggatgcactgaattgctactatgctcgtggagacaaaaatccaacatttcagaggcggatatattggatgcttgatccggcttatgaacacattgtccttgtccactatagggatgttctagagggcagcatttcagtatctgcacgaaatgattcttcaacattgaatcagaatggcagtgctagcagagctgaagtacatagttcacctggttggacaagcgagttaattgcacattgtactaattcgtgcagtccgggatctgctgaagaagtcagttcccaaattagtgcaagtgaatctgatttgattcaacataaggcagccttgcggaagcttaaaatgcagctgagtctggaagacaaagaagattgtgatgttaatgccgaggatgttccagcagataatgagcctattattttacctgtgattcagaatgaggagccaggcacttctagaaatcatgatgatatctttgatgtgctggactttagtgaagatcatatcaacggaactggaacccatccatgtcacagtgctattgacgtgctaaaaaattcagacacatggttagaggatgatcaacttgaggcaattctgcatccagcgtgtatgacattgactgaaaatcaatggttcaggatacatgaggtttctccagaatcagcgttttcttatgaaagtacaaaggttatcattgtaggagacttcctttgcaatccccctcacagttcatggcaagtgctgtttggtgatgttaagtcctgcagtgaagcacgagaatttgaattccttgaaaagcctaccaaatgcatgattgatggaaacacgaacccctgcaatgaagcacaagatgtcaaactgcatcagatacctaccaaaagtagtgaggagctgtcactgttactacattatgtgcatacactttttgatggtcatgctagtgggctattttcaaattttagcttgccactccaaaatcttggctgtggaatccaaagcaatcaaatggatgttatgaagaaggcgtataagcagctggaccctgagaatgtgaatattgatggagaccatttgcttcctaagcaataccgcaatattatacatacggttgcagccttgggatatgatttggctttgaagccactgcttagttcaggagtgcctataaactaccgtgatgcaaatggatggactgctctacattgggctgcaaggtttggcagagaagatatggtggtggctcttcttactgctggtgctgcagctggtgcactttcacatccgacatcagaggatcctgctgccaaaacacctgcttcaatagctttagcatatggtttcaagggcctatccgcgttcctttcagaagcacaattaacaactcatcttgattctatcgagtcaaaagaaaatggaaaacttgattctagggaagaggggatatgtcgtgctgtggacagaatatcagacaaaagcagccacgtgcatggtggaactgatgatcagcttgcgcttaaggattccctgggagctgtccggaatgcagttcaggctgcagggcgcatacaagctgcattccgaattttttcctttaagaagaagaaagagatggctcttgggaacagaaatagctgctgcttgtccattagtgaggcaggagcagtttcacatgatatgctggagaaagctgtattatctatccagaagaacttcaggtgctggaaaaaacgtaaagaattcctgaagatgcgaaataatgttgtcaggatacaggcccgggtgcgagctcatcaagaaagaaacaagtacaaggaattgatttcaagtgtcggaatccttgagaaggtgatgatacggtggtaccataaaggtgttggtctgcgtggattcaattctggggcaatgacaatcgatgaagaggtggacgaagacgttgccaaggtcttccggaagctcagagtggaaacagccatcgatgaagctgtttcaagggtatcatgtatcattggtagccctaaagcaatgcatcagtaccgaaggatgctcaataggtaccaacaaacaaaggatgatcaggagaagtaatgcttgtgttaaaccaacagtgatggagcaaacagcaaagcacaagccacccactatttatttatctcccttactgaagcacaagccttggtgactgaatggacagtggatcccgagtaaaactgaaaatttcttgggtgaactagaaccagctccaattcatgctggacgctgtttgagtgtacacagcaacgtcatgtgcaatagctgacttctggctgaaagttggtaaaggcgatgacttagtggtatatgcagaagcttccaaaagcctgatgagcaaggtagatgaggtctgagaaacactgcattcgatatatatatgccttatgtactaccttcatgcagtaggtttgtagtaaatttgtgcgtaactcttcttctgcgtattccagaaaaaaagtttgtagtaaatttgtactatatggtagtaaataggggtcaactattgtaatttgtagcacaatgaatcttgtaagaaatctcagtttagaaatactccatcttttacacatgggatgatgacgaccgatgatcaattttgccagttaatacgttcgccgcagtcctctattggcagtgacattccaacagttgaacgccagctgtttcatgcctttggcatcagctttcaaatggagcagcgatcaaagaaagcctcgtagcattaaacttctctctcggtagtctcgtgatcagaattcagatggctcaagcaactgccaacagaataaacaatcaggcagggtgcgagccactg

SEQ ID NO: 35616 - DNA, 3630 bp, Zea Mays
ccgcgctggaatctgtcgcgcactttccccgctttcctccgccctgctctcacgtgttcatcgttggttctcactccccttctcgcccccttcaacactccgcgcttctgcgcgtcattgccagcggaggcgcgtcgctatcgcctgggaacaataagagtttgcgcgtctcgcgactgatcggtggcgactgccactcggcggcgacttggactcgacttccgggcaacagggcgaggagtcggccggccagtccactgggttcaaatcggcctcggcaccgcggcgcccccccgcgagttcttgctggattcgctcggagcacggcgcgggcttgtcggcacggcgccatgcagcagcagcagcaaggcttagacataggcaagctacaagaggtagtgaagacccgctggctaaagcctcaagaagttctcaagatactgcagaatcatgagctgttcacgatttcgcataagccccctcagaagccacagagtggttcttggtttcttttcaaccgtagagtactccggtacttccgaaatgatggatttgaatggcaaaagaagagaaatgggaagaccattaatgaagcccatgagcgccttaaggttgataatgtggatgcactgaattgctactatgctcgtggagacaaaaatccaacatttcagaggcggatatattggatgcttgatccggcttatgaacacattgtccttgtccactatagggatgttctagagggcagcatttcagtatctgcacgaaatgattcttcaacattgaatcagaatggcagtgctagcagagctgaagtacatagttcacctggttggacaagcgagttaattgcacattgtactaattcgtgcagtccgggatctgctgaagaagtcagttcccaaattagtgcaagtgaatctgatttgattcaacataaggcagccttgcggaagcttaaaatgcagctgagtctggaagacaaagaagattgtgatgttaatgccgaggatgttccagcagataatgagcctattattttacctgtgattcagaatgaggagccaggcacttctagaaatcatgatgatatctttgatgtgctggactttagtgaagatcatatcaacggaactggaacccatccatgtcacagtgctattgacgtgctaaaaaattcagacacatggttagaggatgatcaacttgaggcaattctgcatccagcgtgtatgacattgactgaaaatcaatggttcaggatacatgaggtttctccagaatcagcgttttcttatgaaagtacaaaggttatcattgtaggagacttcctttgcaatccccctcacagttcatggcaagtgctgtttggtgatgttaaggtatgtgtggaaattatccagcaaggtgtcatccgttgccatactccatgccttgatgctggaaaagtgagaatgtgcttgcttgatgggaatgggaagtcctgcagtgaagcacgagaatttgaattccttgaaaagcctaccaaatgcatgattgatggaaacacgaacccctgcaatgaagcacaagatgtcaaactgcatcagatacctaccaaaagtagtgaggagctgtcactgttactacattatgtgcatacactttttgatggtcatgctagtgggctattttcaaattttagcttgccactccaaaatcttggctgtggaatccaaagcaatcaaatggatgttatgaagaaggcgtataagcagctggaccctgagaatgtggtaagtagtgtcatggaagtattgcttaatgacaagtttaagcaatggttgtcatccaaatgtgaacagaatattgatggagaccatttgcttcctaagcaataccgcaatattatacatacggttgcagccttgggatatgatttggctttgaagccactgcttagttcaggagtgcctataaactaccgtgatgcaaatggatggactgctctacattgggctgcaaggtttggcagagaagatatggtggtggctcttcttactgctggtgctgcagctggtgcactttcacatccgacatcagaggatcctgctgccaaaacacctgcttcaatagctttagcatatggtttcaagggcctatccgcgttcctttcagaagcacaattaacaactcatcttgattctatcgagtcaaaagaaaatggaaaacttgattctagggaagaggggatatgtcgtgctgtggacagaatatcagacaaaagcagccacgtgcatggtggaactgatgatcagcttgcgcttaaggattccctgggagctgtccggaatgcagttcaggctgcagggcgcatacaagctgcattccgaattttttcctttaagaagaagaaagagatggctcttgggaacagaaatagctgctgcttgtccattagtgaggcaggagcagtttcacatgatatgctggagaaagctgtattatctatccagaagaacttcaggtgctggaaaaaacgtaaagaattcctgaagatgcgaaataatgttgtcaggatacaggcccgggtgcgagctcatcaagaaagaaacaagtacaaggaattgatttcaagtgtcggaatccttgagaaggtgatgatacggtggtaccataaaggtgttggtctgcgtggattcaattctggggcaatgacaatcgatgaagaggtggacgaagacgttgccaaggtcttccggaagctcagagtggaaacagccatcgatgaagctgtttcaagggtatcatgtatcattggtagccctaaagcaatgcatcagtaccgaaggatgctcaataggtaccaacaaacaaaggagaagtaatgcttgtgttaaaccaacagtgatggagcaaacagcaaagcacaagccacccactatttatttatctcccttactgaagcacaagccttggtgactgaatggacagtggatcccgagtaaaactgaaaatttcttgggtgaactagaaccagctccaattcatgctggacgctgtttgagtgtacacagcaacgtcatgtgcaatagctgacttctggctgaaagttggtaaaggcgatgacttagtggtatatgcagaagcttccaaaagcctgatgagcaaggtagatgaggtctgagaaacactgcattcgatatatatatgccttatgtactaccttcatgcagtaggtttgtagtaaatttgtgcgtaactcttcttctgcgtattccagaaaaaaagtttgtagtaaatttgtactatatggtagtaaataggggtcaactattgtaatttgtagcacaatgaatcttgtaagaaatctcagtttagaaatactccatcttttacacatgggatgatgacgaccgatgatcaattttgccagttaatacgttcgccgcagtcctctattggcagtgacattccaacagttgaacgccagctgtttcatgcctttggcatcagctttcaaatggagcagcgatcaaagaaagcctcgtagcattaaacttctctctcggtagtctcgtgatcagaattcagatggctcaagcaactgccaacagaataaacaatcaggcagggtgcgagccactg

SEQ ID NO: 35617 - DNA, 2057 bp, Zea Mays
ctctcgtggttagcaaccgccgcgctggaatctgtcgcgcactttccccgctttcctccgccctgctctcacgtgttcatcgttggttctcactccccttctcgcccccttcaacactccgcgcttctgcgcgtcattgccagcggaggcgcgtcgctatcgcctgggaacaataagagtttgcgcgtctcgcgactgatcggtggcgactgccactcggcggcgacttggactcgacttccgggcaacagggcgaggagtcggccggccagtccactgggttcaaatcggcctcggcaccgcggcgcccccccgcgagttcttgctggattcgctcggagcacggcgcgggcttgtcggcacggcgccatgcagcagcagcagcaaggcttagacataggcaagctacaagaggtagtgaagacccgctggctaaagcctcaagaagttctcaagatactgcagaatcatgagctgttcacgatttcgcataagccccctcagaagccacagagtggttcttggtttcttttcaaccgtagagtactccggtacttccgaaatgatggatttgaatggcaaaagaagagaaatgggaagaccattaatgaagcccatgagcgccttaaggttgataatgtggatgcactgaattgctactatgctcgtggagacaaaaatccaacatttcagaggcggatatattggatgcttgatccggcttatgaacacattgtccttgtccactatagggatgttctagagggcagcatttcagtatctgcacgaaatgattcttcaacattgaatcagaatggcagtgctagcagagctgaagtacatagttcacctggttggacaagcgagttaattgcacattgtactaattcgtgcagtccgggatctgctgaagaagtcagttcccaaattagtgcaagtgaatctgatttgattcaacataaggcagccttgcggaagcttaaaatgcagctgagtctggaagacaaagaagattgtgatgttaatgccgaggatgttccagcagataatgagcctattattttacctgtgattcagaatgaggagccaggcacttctagaaatcatgatgatatctttgatgtgctggactttagtgaagatcatatcaacggaactggaacccatccatgtcacagtgctattgacgtgctaaaaaattcagacacatggttagaggatgatcaacttgaggcaattctgcatccagcgtgtatgacattgactgaaaatcaatggttcaggatacatgaggtttctccagaatcagcgttttcttatgaaagtacaaaggttatcattgtaggagacttcctttgcaatccccctcacagttcatggcaagtgctgtttggtgatgttaaggtatgtgtggaaattatccagcaaggtgtcatccgttgccatactccatgccttgatgctggaaaagtgagaatgtgcttgcttgatgggaatgggaagtcctgcagtgaagcacgagaatttgaattccttgaaaagcctaccaaatgcatgattgatggaaacacgaacccctgcaatgaagcacaagatgtcaaactgcatcagatacctaccaaaagtagtgaggagctgtcactgttactacattatgtgcatacactttttgatggtcatgctagtgggctattttcaaattttagcttgccactccaaaatcttggctgtggaatccaaagcaatcaaatggatgttatgaagaaggcgtataagcagctggaccctgagaatgtggtaagtagtgtcatggaagtattgcttaatgacaagtttaagcaatggttgtcatccaaatgtgaacagaatattgatggagaccatttgcttcctaagcaataccgcaatattatacatacggttgcagccttgggatatgatttggctttgaagccactgcttagttcaggagtgcctataaactaccgtgatgcaaatggatggactgctctacattgggctgcaaggtttggcagtattttctatttaaaaaacag

SEQ ID NO: 35618 - DNA, 2189 bp, Zea Mays
acgggacgggggcatccgaacaccaccacccagcacccaccagctcggcgaaaaaaaagaaggaaaattttagataccctgccgcacgccgcgaccttcggccccgtctccggtctccgccttcccccacctattggggagcgctcctgattcgcgggagccagcgggcgagacaaagagaatcccccgctcctgcgccgccgcggatcagcgccgtcgccgatcggaggctctcgcttcccccggcgggcggcgcgcgccgggagatggacggcggcgcgggcgcgggcgccggccggaggaacgtctcatcgtcctccggatccaggaggagggtcctgcccgccgagaacgggcacggccatgacgccccgccgccctccaggcggtcctccgtctccctctcccgcggccactccacgtcactgaccggcgagaggaccgtgaaaaggctgaggctgtccaaggcgctgacgataccggatcacacaaccgtgcacgaggcttgtcggaggatggcgtcacgcagggttgacgccgtgctgctgactgactccaacgctttgctctgtgggatcctcaccgacaaggacataaccacaagggtgattgctcgtgagttgaagatggaagagacaccggtctccaaggtaagttcaggcatctgcctgtcgtggagaatggcgaggtcattgcaattctggacatagccaagtgcctatatgatgctattgcacggatggaaagggcggcggagaaaggaaaagcaattgccgctgccgtcgagggcgttgaaaagcattggggagcagctgtgcctggtcctaacaattttattgagacgcttcgagaacggatgtttaggccatcgctgtctactattatctctgagaatccaaagtagagttgtcactgttgcaccatcagacatggtgttgacagcatcaaagaagatgctggaattaaaagtgagttcagcagttgtagcaattgaaaacaaacctggaggaattctgacatctagagatatattgatgcgtgttatcgcccaaaatcttcctcctgagtccaccacggtcgagaaggtcatgactcagagtcctgaatgtgccacagtggacaccccaattcttgatgctcttcacacaatgcatgatgggaaatttttacatttgcctgtcctggacagggatggaaatgttgtgactgttgttgatgttcttcacataactcatgctgcaattgctacggttggaaacagcggggcagctggatccgaggcaacatctgccatgatgcagaggttctgggattcagcaatgtccattggacctattgatgatgacgatgactcgagaagtgaagggtcgactagagtggtatctgaggcaacagatataggaagaccagccttctttccagcttctggcttatcaaacacttttgggttcaagattcaggataagcaagggaggatgcacagatttaactgtgaaacaagcggcctggcagagctgataaccagcattcttcagagggtcggcgacgacattgacagaaaacacctgccgcaaattttgtacgaagacgaggaccgtgataaggtcgtgctttcgtcggacagtgaccttatagccgctgtggaccatgcgagaaagatcggttggaagagcataaggttgcatctggattacgccggcgttggccggcggaagggagggggtggaccttcggacttggagtacgctggcaaggacgcagcatgggcttctgcgtacagcgccgtcgcggcaggggcggctctggttgctgggctcggtgtgatggcctacttgaaacggtcggggtaaaagcttggaggcggagagcacgacggcagagggagcacacgcttctcatcggatctgtgtgatacaaatgatactgcgtcggaacgagcagaatggctgtgtaagtaattcttgtgaaaaagagagagagagagggagattttaataatactagtgtcaaggcagtgaatggccgcctgcatacgagggagtacacggaactggtcgagcctttttggtgggttcagagtctccacgactaatttaccacggctgttagcgtcgtcacgattgtatttgtatcataaatcacacgatcattatacaagaagagtcttgttgagcctcaccctgtctcgt

SEQ ID NO: 35619 - DNA, 2515 bp, Zea Mays
ccatgcgtctaaacagtcgtgtcgacgcgggattgcgcgggtcggccgcccgacgggtggcgtgggccgcgtcgacacggttggatttcgatcggaggcccggagctgctctctctgcagtctgctatggtccccacatccgcatcgcacgcctcgcggcattatccagccccagccgtcagccactcagccgcctctcgtcgacacgaatgcgcaaagcaaacaccacgcgggccaggccaggcgcgcacgcacgggacgggggcatccgaacaccaccacccagcacccaccagctcggcgaaaaaaaagaaggaaaattttagataccctgccgcacgccgcgaccttcggccccgtctccggtctccgccttcccccacctattggggagcgctcctgattcgcgggagccagcgggcgagacaaagagaatcccccgctcctgcgccgccgcggatcagcgccgtcgccgatcggaggctctcgcttcccccggcgggcggcgcgcgccgggagatggacggcggcgcgggcgcgggcgccggccggaggaacgtctcatcgtcctccggatccaggaggagggtcctgcccgccgagaacgggcacggccatgacgccccgccgccctccaggcggtcctccgtctccctctcccgcggccactccacgtcactgaccggcgagaggaccgtgaaaaggctgaggctgtccaaggcgctgacgataccggatcacacaaccgtgcacgaggcttgtcggaggatggcgtcacgcagggttgacgccgtgctgctgactgactccaacgctttgctctgtgggatcctcaccgacaaggacataaccacaagggtgattgctcgtgagttgaagatggaagagacaccggtctccaaggtcatgacccgaaaccctgtatttgttctcgcggacacgcttgcagtcgaggcgttgcaaaagatggtgcaaggtaagttcaggcatctgcctgtcgtggagaatggcgaggtcattgcaattctggacatagccaagtgcctatatgatgctattgcacggatggaaagggcggcggagaaaggaaaagcaattgccgctgccgtcgagggcgttgaaaagcattggggagcagctgtgcctggtcctaacaattttattgagacgcttcgagaacggatgtttaggccatcgctgtctactattatctctgagaatccaaagtagagttgtcactgttgcaccatcagacatggtgttgacagcatcaaagaagatgctggaattaaaagtgagttcagcagttgtagcaattgaaaacaaacctggaggaattctgacatctagagatatattgatgcgtgttatcgcccaaaatcttcctcctgagtccaccacggtcgagaaggtcatgactcagagtcctgaatgtgccacagtggacaccccaattcttgatgctcttcacacaatgcatgatgggaaatttttacatttgcctgtcctggacagggatggaaatgttgtgactgttgttgatgttcttcacataactcatgctgcaattgctacggttggaaacagcggggcagctggatccgaggcaacatctgccatgatgcagaggttctgggattcagcaatgtccattggacctattgatgatgacgatgactcgagaagtgaagggtcgactagagtggtatctgaggcaacagatataggaagaccagccttctttccagcttctggcttatcaaacacttttgggttcaagattcaggataagcaagggaggatgcacagatttaactgtgaaacaagcggcctggcagagctgataaccagcattcttcagagggtcggcgacgacattgacagaaaacacctgccgcaaattttgtacgaagacgaggaccgtgataaggtcgtgctttcgtcggacagtgaccttatagccgctgtggaccatgcgagaaagatcggttggaagagcataaggttgcatctggattacgccggcgttggccggcggaagggagggggtggaccttcggacttggagtacgctggcaaggacgcagcatgggcttctgcgtacagcgccgtcgcggcaggggcggctctggttgctgggctcggtgtgatggcctacttgaaacggtcggggtaaaagcttggaggcggagagcacgacggcagagggagcacacgcttctcatcggatctgtgtgatacaaatgatactgcgtcggaacgagcagaatggctgtgtaagtaattcttgtgaaaaagagagagagagagggagattttaataatactagtgtcaaggcagtgaatggccgcctgcatacgagggagtacacggaactggtcgagcctttttggtgggttcagagtctccacgactaatttaccacggctgttagcgtcgtcacgattgtatttgtatcataaatcacacgatcattatacaagaagagtcttgttgagcctcaccctgtctcgt

SEQ ID NO: 35620 - DNA, 1256 bp, Zea Mays
gcagagcgacgagcgacgagctaaaccccgaccgagtcgctgcttgggtgcccaagatagccctaccgcctcgcctctctcgttccccctcatcgccacgccagtcgcctccactcccagtcatctcccatcaccgacgacgtgtcgaggcgagagaagagggcgagtccaagtctagggttcccgccgcatcgacacgggcatcgcaccgcaccgcgaggggcgggcacggaggaagatggcaccgcgcgggcgcgtggagctgcggcggatcgaggacaaggcgagccggcaggtgcgcttctccaagcgccgcgcggggctgttcaagaaggccttcgagctggccctgctctgcgacgccgaggtcgcgctcctcgtcttttcccccggcggcaagctctatgagtactcctcctccagaaccgggatgtagctgcttcagatttacagtcgagacttaaggagatcgcaacatggtctaaacaaaacaacgctgaggagtcggatgccaatgaacttgagaaacttgaggaactcctgacaaatgctttgaggaatacgaaagccaaaaagatgttggcaaaagaaaacaatggtggtgccggtgcaagtacaagcagccagatgttgctttactcggcagagcgtgcaaccgacaaatgaaactgtgccgctccttgccgaacttaagccccgttacgttgtcgcacaaagtttatttcctagcactgtgcttgctgcttatgtttgtttggatgtgccaacctgcagtgaccctcgtggagcctgggtctcacgctcctcttacctagtgtgatgtgcagaaaaagtgtgatgctgtaaaattatgtgattgcctagcagatgtcaaattttcaatcagtagctaactccttttaatggtacaggcttgcatgatttcatctgcaaaaaagagagggcgggttgggtgtcaaatctagccggatgttttcgcaagtttgtgataaaaattgtgctgtacacttgtgtttatgcagttgccctaggcgtcagtgggctgaaaggtaatatctgtgaattatatactgtgtgctgaaagcagttgtcataataatgatacgaaaacaaaatcttatgtcgttaacctatataattttttttaaaaaaaattgccgatcaaatcgaaatatttgatataataaaacataatactactagatggaggaaagttagactgaccgagtatggaggaagtatctaagggggtgttt

SEQ ID NO: 35621 - DNA, 1329 bp, Zea Mays
gcagagcgacgagcgacgagctaaaccccgaccgagtcgctgcttgggtgcccaagatagccctaccgcctcgcctctctcgttccccctcatcgccacgccagtcgcctccactcccagtcatctcccatcaccgacgacgtgtcgaggcgagagaagagggcgagtccaagtctagggttcccgccgcatcgacacgggcatcgcaccgcaccgcgaggggcgggcacggaggaagatggcaccgcgcgggcgcgtggagctgcggcggatcgaggacaaggcgagccggcaggtgcgcttctccaagcgccgcgcggggctgttcaagaaggccttcgagctggccctgctctgcgacgccgaggtcgcgctcctcgtcttttcccccggcggcaagctctatgagtactcctcctccagcatagaagatacatatgaccgctatcatcaatttgcgggagcaggaagaaaagtgaacggacataacaacgataaccgggatgtagctgcttcagatttacagtcgagacttaaggagatcgcaacatggtctaaacaaaacaacgctgaggagtcggatgccaatgaacttgagaaacttgaggaactcctgacaaatgctttgaggaatacgaaagccaaaaagatgttggcaaaagaaaacaatggtggtgccggtgcaagtacaagcagccagatgttgctttactcggcagagcgtgcaaccgacaaatgaaactgtgccgctccttgccgaacttaagccccgttacgttgtcgcacaaagtttatttcctagcactgtgcttgctgcttatgtttgtttggatgtgccaacctgcagtgaccctcgtggagcctgggtctcacgctcctcttacctagtgtgatgtgcagaaaaagtgtgatgctgtaaaattatgtgattgcctagcagatgtcaaattttcaatcagtagctaactccttttaatggtacaggcttgcatgatttcatctgcaaaaaagagagggcgggttgggtgtcaaatctagccggatgttttcgcaagtttgtgataaaaattgtgctgtacacttgtgtttatgcagttgccctaggcgtcagtgggctgaaaggtaatatctgtgaattatatactgtgtgctgaaagcagttgtcataataatgatacgaaaacaaaatcttatgtcgttaacctatataattttttttaaaaaaaattgccgatcaaatcgaaatatttgatataataaaacataatactactagatggaggaaagttagactgaccgagtatggaggaagtatctaagggggtgttt

SEQ ID NO: 35622 - DNA, 1228 bp, Zea Mays
tgccttggctcccgtccttgtcagtggcaggctcactcactcacccggacaacaatttgctctgttctccggtgtgcgtgcgtgcgtccctgtcgtcgttgtggtttcatctgctcggggagttcgatgaggtgaagcggagctgcaggaagcgcctcgatggacacaaccgccgccgccggaagccgcagccggaccctctcaaccccgccggcttgtttggcaatcaccacggagtgacaagattcacgtcttacccgcagctcttcgcggcgtccatggaacagcctaaatggtcggtggtcaagacggaggccgacgtgttccaagaccagtactacccggccgtccacctcaatggcgctggcggcggcgccatcggctcccacttccacggcaaggagcagaagcacttcccgttcctgaccagccacagcaacggcggcggcggcggcgacgtggcgaccgccgcggccctgggctgccagccattcaccatcaccaccacggcgtcctcagagagcgacagcaagcagagcaacggcaactgtgctctctctcttctgtcagacaacccgacatcagcacagacggccatgatccctactaccgcgcagtccctcgccgcggcgatgcagtacggcggcagactccctggcagcgtcagcgtcagcggcggcggcggcggcgacgtctccctcaccgggatgtcgtacatgagggtgggagacagcaggcaggcgtccattctgacggcgtcgtcacccggccacgctgcggtcgcttcccctgtcccggccaccaccgcagccgcaacgccgccgccgccgccgcagctgctgcagtaccaccatggctatggctactaccatgtgagcggcggcgagcagggcaacaaccccgacggcgccgccgttcacgcccttcccttctcgtcgtggtagacgagctctcctgatggaatcatgtgcgctaggcaagcagttgctctcctgtggttcaccaaacgtatcggttgtaatagtaggctcgatcatactggaaaccgtgacaagttgtccattttccaacttatcctgataggtctaatttatggaaattcttcctaagttattatgattcggaaccgtgtaaagattccaatcctgttttgtttgagttggcaatccgcttgctcattagagcatctccaacagaatgggtaaaagctccccaaaaccatttttag

SEQ ID NO: 35623 - DNA, 2904 bp, Zea Mays
acttttgtacttttcccccccctgccctccacctccactccacccccgctacaaaaggtgagagggaggaggagcctctgcacttaagttttattagtccttctcatcagccatcagagcccctctatctccgggtttctgttaacgagtattgtattttaattaggagggagtggttcagctggtgcgcgcagtggtagctctcctcatctttgccgccttgcccatttgctggcgcagtgactgagcttccttgcaaccccacttgagaagaaaccaatcctcaagcgcaaggaggcaaggcaaagcctactcataggggctgccgagctgaaggagcaaaccggaggaaaaggcagtagtagctagctagcagcaaccaccaaagaagggagaatcctccaccttgctcttggtggatgttcttcactgcattgccttcagccactccgtcctccgcttgcttcttgttcgagagtggtacctgctgctgcttcttcttcttccctttttatctctgaaatcttttgccacacatccatctgcttgctgctgtgtgtctgtctgtctgtctgattccttatttccttctccttctccctctcccacctaccctccccaaccacacatcacacccacacactgtatgtttactgccattggtaagaaaataaagaaggggggagtcgagtgagcagtgggaggtgcccccagctcgcctctcgggtctcggcaattattgccacctttggagtttggagtcctccaataggagtctcctccgtcgtcgtcctgttcctgtgctgtctgcaaccactggcactgccccgcccccttccctcctcttccttgccttccctcgcctcgtccgcctttttctcggaggagaggaggtgcttgcttccatccatccatccgtgtcctccgctcgctttaaagcttaacccaccgctctgcccggcgggcggccgagcacccaagaacccagccccttgtctcgtcccttcctttcttgccgctcccgcccgctgctcttggattctttaattgcatgctgttgctgttgctgccgccgccgccgccgccgctgtgatctctctctctctttcccgtcctccaaagctttttggttgccatcaactttgcttttgctctctgggcgagcagtacacagctgttgttccgtctccaacggcctgcgcacgcagcagcagccagcagagcagaaaggcctcccaaaatccaccatttcggagccggccgccaccagcgacggaggtgcctgcctgcttgggttgagtcccgaggagagagctgctactccctgtgcaaggatcccgacaacaggcaggcacgtacacgcgcgtcggcctggggacgggctgtcgccatggactgggacgccaagatgcttcctgcctgggacctcggcacggtggtcgggcccagcagcagcgggggcggcgcgctggacctgaagctgggcgcgccgacgagctcgagggcggtgctcacggccgccgccggtgccgcgcccgcgctgccgtcagcgaaccctcctccgcccccgcctccgccgtcgtcgtccgcgccggcgaagcggccgcgcccggggctcgcgcggcaggcggtgcccgcgtgctccgtgcagggctgcgacgccgacctgtcccggtgccgcgactaccaccgccgccacaaggtctgcgaggcgcactccaagacgcccgtcgtcaccgtcgccggccagcagcagcgcttctgccagcagtgcagcaggtttcatctgctcggggagttcgatgaggtgaagcggagctgcaggaagcgcctcgatggacacaaccgccgccgccggaagccgcagccggaccctctcaaccccgccggcttgtttggcaatcaccacggagtgacaagattcacgtcttacccgcagctcttcgcggcgtccatggaacagcctaaatggtcggtggtcaagacggaggccgacgtgttccaagaccagtactacccggccgtccacctcaatggcgctggcggcggcgccatcggctcccacttccacggcaaggagcagaagcacttcccgttcctgaccagccacagcaacggcggcggcggcggcgacgtggcgaccgccgcggccctgggctgccagccattcaccatcaccaccacggcgtcctcagagagcgacagcaagcagagcaacggcaactgtgctctctctcttctgtcagacaacccgacatcagcacagacggccatgatccctactaccgcgcagtccctcgccgcggcgatgcagtacggcggcagactccctggcagcgtcagcgtcagcggcggcggcggcggcgacgtctccctcaccgggatgtcgtacatgagggtgggagacagcaggcaggcgtccattctgacggcgtcgtcacccggccacgctgcggtcgcttcccctgtcccggccaccaccgcagccgcaacgccgccgccgccgccgcagctgctgcagtaccaccatggctatggctactaccatgtgagcggcggcgagcagggcaacaaccccgacggcgccgccgttcacgcccttcccttctcgtcgtggtagacgagctctcctgatggaatcatgtgcgctaggcaagcagttgctctcctgtggttcaccaaacgtatcggttgtaatagtaggctcgatcatactggaaaccgtgacaagttgtccattttccaacttatcctgataggtctaatttatggaaattcttcctaagttattatgattcggaaccgtgtaaagattccaatcctgttttgtttgagttggcaatccgcttgctcattagagcatctccaacagaatgggtaaaagctccccaaaaccatttttag

SEQ ID NO: 35624 - DNA, 3386 bp, Zea Mays
acttttgtacttttcccccccctgccctccacctccactccacccccgctacaaaaggtgagagggaggaggagcctctgcacttaagttttattagtccttctcatcagccatcagagcccctctatctccgggtttctgttaacgagtattgtattttaattaggagggagtggttcagctggtgcgcgcagtggtagctctcctcatctttgccgccttgcccatttgctggcgcagtgactgagcttccttgcaaccccacttgagaagaaaccaatcctcaagcgcaaggaggcaaggcaaagcctactcataggggctgccgagctgaaggagcaaaccggaggaaaaggcagtagtagctagctagcagcaaccaccaaagaagggagaatcctccaccttgctcttggtggatgttcttcactgcattgccttcagccactccgtcctccgcttgcttcttgttcgagagtggtacctgctgctgcttcttcttcttccctttttatctctgaaatcttttgccacacatccatctgcttgctgctgtgtgtctgtctgtctgtctgattccttatttccttctccttctccctctcccacctaccctccccaaccacacatcacacccacacactgtatgtttactgccattggtaagaaaataaagaaggggggagtcgagtgagcagtgggaggtgcccccagctcgcctctcgggtctcggcaattattgccacctttggagtttggagtcctccaataggagtctcctccgtcgtcgtcctgttcctgtgctgtctgcaaccactggcactgccccgcccccttccctcctcttccttgccttccctcgcctcgtccgcctttttctcggaggagaggaggtgcttgcttccatccatccatccgtgtcctccgctcgctttaaagcttaacccaccgctctgcccggcgggcggccgagcacccaagaacccagccccttgtctcgtcccttcctttcttgccgctcccgcccgctgctcttggattctttaattgcatgctgttgctgttgctgccgccgccgccgccgccgctgtgatctctctctctctttcccgtcctccaaagctttttggttgccatcaactttgcttttgctctctgggcgagcagtacacagctgttgttccgtctccaacggcctgcgcacgcagcagcagccagcagagcagaaaggcctcccaaaatccaccatttcggagccggccgccaccagcgacggaggtgcctgcctgcttgggttgagtcccgaggagagagctgctactccctgtgcaaggatcccgacaacaggcaggcacgtacacgcgcgtcggcctggggacgggctgtcgccatggactgggacgccaagatgcttcctgcctgggacctcggcacggtggtcgggcccagcagcagcgggggcggcgcgctggacctgaagctgggcgcgccgacgagctcgagggcggtgctcacggccgccgccggtgccgcgcccgcgctgccgtcagcgaaccctcctccgcccccgcctccgccgtcgtcgtccgcgccggcgaagcggccgcgcccggggctcgcgcggcaggcggtgcccgcgtgctccgtgcagggctgcgacgccgacctgtcccggtgccgcgactaccaccgccgccacaaggtctgcgaggcgcactccaagacgcccgtcgtcaccgtcgccggccagcagcagcgcttctgccagcagtgcagcagcgtcaagccgtctgctagcagccggtgcatgcgctgcgcacccgtgctttcgggggcgtgtccctacaatgcaacaaggcaggtgcaatggaactggacttccgttcagttcaggtccatgccttggctcccgtccttgtcagtggcaggctcactcactcacccggacaacaatttgctctgttctccggtgtgcgtgcgtgcgtccctgtcgtcgttgtggtgcgtggcttgcccatgctttccacatcccatatgtttttttccaactcaaaaggcttcaatcaaatgcatctcgatcgtgttgtagaagacgatgatttctttgtcgttatcttcgctcagattccagattcatcagtcaggtcccaaaatatcccagagagagcgtgtcgtgaaggttgcgtggtttattttagtttctgaagaagaaaagaagtggtctccttaaggtcaacagtggcatgttcttgcttgaattggtttcatctgctcggggagttcgatgaggtgaagcggagctgcaggaagcgcctcgatggacacaaccgccgccgccggaagccgcagccggaccctctcaaccccgccggcttgtttggcaatcaccacggagtgacaagattcacgtcttacccgcagctcttcgcggcgtccatggaacagcctaaatggtcggtggtcaagacggaggccgacgtgttccaagaccagtactacccggccgtccacctcaatggcgctggcggcggcgccatcggctcccacttccacggcaaggagcagaagcacttcccgttcctgaccagccacagcaacggcggcggcggcggcgacgtggcgaccgccgcggccctgggctgccagccattcaccatcaccaccacggcgtcctcagagagcgacagcaagcagagcaacggcaactgtgctctctctcttctgtcagacaacccgacatcagcacagacggccatgatccctactaccgcgcagtccctcgccgcggcgatgcagtacggcggcagactccctggcagcgtcagcgtcagcggcggcggcggcggcgacgtctccctcaccgggatgtcgtacatgagggtgggagacagcaggcaggcgtccattctgacggcgtcgtcacccggccacgctgcggtcgcttcccctgtcccggccaccaccgcagccgcaacgccgccgccgccgccgcagctgctgcagtaccaccatggctatggctactaccatgtgagcggcggcgagcagggcaacaaccccgacggcgccgccgttcacgcccttcccttctcgtcgtggtagacgagctctcctgatggaatcatgtgcgctaggcaagcagttgctctcctgtggttcaccaaacgtatcggttgtaatagtaggctcgatcatactggaaaccgtgacaagttgtccattttccaacttatcctgataggtctaatttatggaaattcttcctaagttattatgattcggaaccgtgtaaagattccaatcctgttttgtttgagttggcaatccgcttgctcattagagcatctccaacagaatgggtaaaagctccccaaaaccatttttag

SEQ ID NO: 35625 - DNA, 2188 bp, Zea Mays
atttggagcggcaaaaaggcagcgcgcactcatcatcttgggggcgtcttttgctagccctagacctagccgagagccactgaaatccgcgtcacttttgcagtcaccgccaccgctcccaacagcatgagcagccagagagaaagctccaagcctcgcagcgcccgagacggaaaaggcttttgccacacagcacgcaccccaaccgattgtaccgccgcgggtaacccacacacacccactcgcggtcgcggcgcccgaaccgaacagccgtttggccgtacctgcacagcatccatccaaaacaccagcacacaaggcgacagaaacccccatggaaaacctcagctccaaagctccattacaaaacggcttggaaattggaattctacgatttctagcttggaaatgccagaacattacaagaaaataaaggagaggcgcggctgctggatctccactgctctttggctctttgcttccctggtactacctagtagaaaatgcgcatctgaacggcaggcagcgccagcgatatacacctcattcaattcatcagcaggtgaaaaagaggcaaaaagaaagagaaaacagccgaaacgccttcccctccctgcgccgctttccgctacgcccggtccacgcagcggagccgtgggcctgtaggggactcggtgctggtacgtcatgtcagccgccgagccgtttcctcgctcactgctggtgctgctgcgcctcgacgccgccgccaacggcaacgccggcgaggagccaccggtccatgggcacgcactgcgccttgtgcgcgcgcttccagtccagcgcctggcacgcgcgggagcagtagttggccgcgccgcacacggagcaccgccggaactcgtgccgccgcgtctcgcgccgcccgcaccgcacgtgggagcaaagacggagctccgcgccgtctccgtcgccgtccacgccgctgccgtcgccgtccttcttcccgcccgcctgggcggcgcagcgggaggcccaccagtccaccatgaactggttcgccgcgtggggctccgcctcggggaggctccacccgaagtcggacaggagggggcaccccccgccgccgccgacgacgccggcggccgcggcgaagggcagcgcggcgacggcgtggcgcgaggcggccgcggagagcgcgagcgtgagctcgcgggcgttcgccgcgaccagcaggcgccggccctcggcggggtcccgccgcacgccgtagccgtcctggaggcagtgcccgagctcgcggagcgcgtcgacgtggcccagcgaggccgcgcgcgcgcacagggcagcccccgcgcgcaggtcgcggtccgacttggccccgccgctgccgttgaactggatgaccgccagcgagtagagcgccgccgcgtgcccgccgacggccgccctcgccagcagcgccgcgccgccgctgcggctgcccaggcagtagaagcggatctgcagaagttgtagcaggcctcgaggttgccggcgtcggcgcagcgcttgaggaacctctgcgccggctcggaccacgccgccgccttgaccgccagcgacgccggcgaggccttggcgaacaccatgtcatggctgccgagctcgttcagcctcttgcacctgcaaacgcgaaagacgtcagcgcacgatccttggcctctccctccagcttatgtttccgaaaacagcacaactgccgtcgctcccccccacgcatttcgattactccatagcgcgagggagacggtgcgctcgccgtgcgaggaaacacgaggagttgatgacaaaacgcaaaggatgctcgggcaggcaggcagacgtacgtgaggtggaccgagagcaggtcggacggcgccgaggaggcggcggcgagcttggacaggatggagaggacaaggtcatcgggaagcgcgtccaggtagtccggctcgccggcaggccgcttcctgcgcccgccgcagtcgcactctccggcgacggccgacggcgacctcttcctcttctgacccaccaaggcaaccacctcgccgccgttggaataccgggacccgctcctcgtcctcatctctctgtacctccgcaggagtcgtcgctgccggggggaaagcgggacggggcgagcggtgggagaaaaaaggttaaacgaccgcgcgcgcgggcgggc

SEQ ID NO: 35626 - DNA, 824 bp, Zea Mays
gtttgtgttatttttggtagcttccttttctgtatcatgtgctttgctcttattcagtgttcttttgattcatcagtgtcatgggtattggctagaaaaatcctgatagcatattgaaactgtaactggaatttatttgtgttggcagacctctcatggattcttcactccagacaatgcaatagctaatgagttctttacaaaggcaaccggatgtttccagaaggctgttgatgtggaacctgcaaatgagctgtacaggaagtctctagacttgtcaatgaaggcacctgaactgcatttggagatccagaggcaaatggtttctcaagcggcaacacaagcatcctcagcctcaaatccaaggcaatcaaggaagaagaaggacaatgacttctggtacgatgtttgtggatgggtgatccttggcgccggcattgttgcttgggttggattggcaagagcaagcatgcctcccccgacgccaccagccaggtgagaactgatcgagtgccaagaacgctttgcaaatgatggcatgcctatattaaggtgtcccagaaccttctaggtgctagtgttgtatggagaggagagaggtgtttccatacggtttgctcaaattttcatgcttgttcttttcgagcctcatgtgctgctggatagttttgtactttgcttaccttgataccgttttgaggcaaaaaacatacagtgttgcgactttttgcgttctctatgaatactgaatgttctcaaatggtgccatacataaagtggacatgctgttcaacaccgcaaataaatgtatgctttgttttttt

SEQ ID NO: 35627 - DNA, 607 bp, Zea Mays
aactcccaggctgtgtttccatacataactcagatgtattattggaaggcatgttcatatcaactatgcagcctgaagacccgtgcaaattttgatgatgctagttccaagtccccttccaaatttcttggcactatacagggaacttgaccttcaaacatcttttgaaggtctgaagatggaaatataatcttctcctgaactgacagaaactttgtgaattgcaaagcaacccgaattgaatggtttagcttgtcattcttgatcctgtcacagcgagtggtgacgtcattgaggcttgcccatggaattatgacaactgcatctgccatgagctgtgtaattgcaattcttacattttacctgtcttttgtcaatggtaacatctcgtgactcttgtttgactaaaatggaatttcggtccctggaatttttatgtacaatcctaccaggagttatgttcacatttaccttgttgcatccttttttatagtgtgttgcagccttctgttatattcattcgttgatgatagacaaagcgcatagttgatgcgacatgctgttggtcccgtttccttgtcaacctctaatgaaaaattgcattttc

SEQ ID NO: 35628 - DNA, 1837 bp, Zea Mays
gcagaagcggagcactaaccacacgagcgcgagagtggaggcgcagagagccgtcgccatcgtccatcgcaaattcgctagcggacacaaatccacccagccagccgttcatcgcaaccaccacaaccaccaaccaacgggcgtgcccaccacgcggcgccgttggggttggcgggcgccatgggggcgccgagcagccgcgcgctggcgctgggcgcggccttcctgctgctcctcgtcgcgctgccctccgccttcctctacctcacctcctccgcggccacccgcgccaccctcctcgacctcaagcccttctccgccaggtgcgcgcccgcagtcgcgccgctccgcgtcttcatgtacgacctgcctgcgcgcttccacgtcgccatgatgggggccgccgccggcgcggggttccccgcgtggccgccgtccgcgggcgggatcaggcgccagcacagcgtggagtactggatgatggcgtcgctccaggatgggggcgcgggaccggagcggggaagggaggccgtcagggtgcgggatcctgacgccgccgacgccttcttcgtgcccttcttctcctcgctcagcttcaacgtgcacggtcgcaacatgaccgaccctgacaccgaggccgaccgcctcctgcagattcctgcgagcaatggtgaatgcatctattcttatagtttcagactttgggagatacacaaaggaactggcttccctgaggaaagatgttgtggcaccatatgtgcatgttgtgggttccttccttgatgacgatccacctgatccatttgaggctcgccatacactgcttttctttcgaggccgtactgtcaggaaagatgaagggaaaatccggtcaaaacttgagaagatattaaaaggcaaggaaggggtgcgctttgaggatagcattgccacgggcgacggcattaacatatctacagaaggtatgcggtcatcaaagttttgtctccaccctgctggggacactccttcctcatgccgcctgtttgatgccatagtcagtcattgtgttcctgtgatagtcagcagtcgaatcgagctcccttttgaagatgagattgattacagtgagttctcccttttcttctccgttgaagaggctctaagacctgattacttgctgaacgagctcagacaggtccccaaaaggaagtgggttgatatgtggttgaagcttaagaatgtctcccatcattatgaattccagtatccccccaggaagggcgacgcggtgaacatgatatggaggcaggtgaggcacaagatccccgcagttaaccttgctattcacaggaacagaagactgaaaattccagactggtggggataatgattggtggtgaatcgtgtacatattaccatatccactgttagtcctggttattttcggtgcgttatgatggaaacattgctcaccgtcctttgtgaaccaaagtgttcatcttaagatccaaggaccgagtccacaactatttgctgacaggaactgagattatcacctcttttttggtcgatttttgtgacggcttcctatttccccccctgatgctacaaaatagaggggacaaataaacttacagtaacattatagaggagtcatgcctgacaaataggatctgtagcttctttgtgctcccacactggaagtttaaatatataattcatatatgtctggtgctggactgccggtagatacggtttttctctgtgtttgctactttgaaatctgttgactcgattaacgtaggtttcaatatgtttggtgtgtactaaaccatatcggtatgtgctgtcagct

SEQ ID NO: 35629 - DNA, 1795 bp, Zea Mays
ctcatctgtcatctcgcagcagacagaggaatttcccttctgggagaatcacaaactgttctccctctgcactgttggatctcttgcgtggtcgccgtccaagcagaagcggagcactaaccacacgagcgcgagagtggaggcgcagagagccgtcgccatcgtccatcgcaaattcgctagcggacacaaatccacccagccagccgttcatcgcaaccaccacaaccaccaaccaacgggcgtgcccaccacgcggcgccgttggggttggcgggcgccatgggggcgccgagcagccgcgcgctggcgctgggcgcggccttcctgctgctcctcgtcgcgctgccctccgccttcctctacctcacctcctccgcggccacccgcgccaccctcctcgacctcaagcccttctccgccaggtgcgcgcccgcagtcgcgccgctccgcgtcttcatgtacgacctgcctgcgcgcttccacgtcgccatgatgggggccgccgccggcgcggggttccccgcgtggccgccgtccgcgggcgggatcaggcgccagcacagcgtggagtactggatgatggcgtcgctccaggatgggggcgcgggaccggagcggggaagggaggccgtcagggtgcgggatcctgacgccgccgacgccttcttcgtgcccttcttctcctcgctcagcttcaacgtgcacggtcgcaacatgaccgaccctgacaccgaggccgaccgcctcctgcaggttgaacttgtggatattctctggaagtctaaatattggcaacgttctgcgggccgtgaccatgtcattcctatgcatcaccctaatgctttcagattcctgcgagcaatggtgaatgcatctattcttatagtttcagactttgggagatacacaaaggaactggcttccctgaggaaagatgttgtggcaccatatgtgcatgttgtgggttccttccttgatgacgatccacctgatccatttgaggctcgccatacactgcttttctttcgaggccgtactgtcaggaaagatgaagggaaaatccggtcaaaacttgagaagatattaaaaggcaaggaaggggtgcgctttgaggatagcattgccacgggcgacggcattaacatatctacagaagtcagcagtcgaatcgagctcccttttgaagatgagattgattacatatccccccaggaagggcgacgcggtgaacatgatatggaggcaggtgaggcacaagatccccgcagttaaccttgctattcacaggaacagaagactgaaaattccagactggtggggataatgattggtggtgaatcgtgtacatattaccatatccactgttagtcctggttattttcggtgcgttatgatggaaacattgctcaccgtcctttgtgaaccaaagtgttcatcttaagatccaaggaccgagtccacaactatttgctgacaggaactgagattatcacctcttttttggtcgatttttgtgacggcttcctatttccccccctgatgctacaaaatagaggggacaaataaacttacagtaacattatagaggagtcatgcctgacaaataggatctgtagcttctttgtgctcccacactggaagtttaaatatataattcatatatgtctggtgctggactgccggtagatacggtttttctctgtgtttgctactttgaaatctgttgactcgattaacgtaggtttcaatatgtttggtgtgtactaaaccatatcggtatgtgctgtcagct

SEQ ID NO: 35630 - DNA, 2274 bp, Zea Mays
ctcatctgtcatctcgcagcagacagaggaatttcccttctgggagaatcacaaactgttctccctctgcactgttggatctcttgcgtggtcgccgtccaagcagaagcggagcactaaccacacgagcgcgagagtggaggcgcagagagccgtcgccatcgtccatcgcaaattcgctagcggacacaaatccacccagccagccgttcatcgcaaccaccacaaccaccaaccaacgggcgtgcccaccacgcggcgccgttggggttggcgggcgccatgggggcgccgagcagccgcgcgctggcgctgggcgcggccttcctgctgctcctcgtcgcgctgccctccgccttcctctacctcacctcctccgcggccacccgcgccaccctcctcgacctcaagcccttctccgccaggtgcgcgcccgcagtcgcgccgctccgcgtcttcatgtacgacctgcctgcgcgcttccacgtcgccatgatgggggccgccgccggcgcggggttccccgcgtggccgccgtccgcgggcgggatcaggcgccagcacagcgtggagtactggatgatggcgtcgctccaggatgggggcgcgggaccggagcggggaagggaggccgtcagggtgcgggatcctgacgccgccgacgccttcttcgtgcccttcttctcctcgctcagcttcaacgtgcacggtcgcaacatgaccgaccctgacaccgaggccgaccgcctcctgcaggttgaacttgtggatattctctggaagtctaaatattggcaacgttctgcgggccgtgaccatgtcattcctatgcatcaccctaatgctttcagattcctgcgagcaatggtgaatgcatctattcttatagtttcagactttgggagatacacaaaggaactggcttccctgaggaaagatgttgtggcaccatatgtgcatgttgtgggttccttccttgatgacgatccacctgatccatttgaggctcgccatacactgcttttctttcgaggccgtactgtcaggaaagatgaagggaaaatccggtcaaaacttgagaagatattaaaaggcaaggaaggggtgcgctttgaggatagcattgccacgggcgacggcattaacatagtaagtcatttttcccatttatactctttttcttagtgatattaacatttttctgttaagttttttttatagaagggtagacccgatgcagtggtgagaattatctcatggagtcattaggccatggtttgaagcagccagacctcactcatgtgggagcctccggcattgggtctgcccttttattaaggcttctttacaatagagcatgaaatttacaaatctggttgatcctaacagtctacagaaggtatgcggtcatcaaagttttgtctccaccctgctggggacactccttcctcatgccgcctgtttgatgccatagtcagtcattgtgttcctgtgatagtcagcagtcgaatcgagctcccttttgaagatgagattgattacagtgagttctcccttttcttctccgttgaagaggctctaagacctgattacttgctgaacgagctcagacaggtccccaaaaggaagtgggttgatatgtggttgaagcttaagaatgtctcccatcattatgaattccagtatccccccaggaagggcgacgcggtgaacatgatatggaggcaggtgaggcacaagatccccgcagttaaccttgctattcacaggaacagaagactgaaaattccagactggtggggataatgattggtggtgaatcgtgtacatattaccatatccactgttagtcctggttattttcggtgcgttatgatggaaacattgctcaccgtcctttgtgaaccaaagtgttcatcttaagatccaaggaccgagtccacaactatttgctgacaggaactgagattatcacctcttttttggtcgatttttgtgacggcttcctatttccccccctgatgctacaaaatagaggggacaaataaacttacagtaacattatagaggagtcatgcctgacaaataggatctgtagcttctttgtgctcccacactggaagtttaaatatataattcatatatgtctggtgctggactgccggtagatacggtttttctctgtgtttgctactttgaaatctgttgactcgattaacgtaggtttcaatatgtttggtgtgtactaaaccatatcggtatgtgctgtcagct

SEQ ID NO: 35631 - DNA, 2301 bp, Zea Mays
cacgacctcatctgtcatctcgcagcagacagaggaatttcccttctgggagaatcacaaactgttctccctctgcactgttggatctcttgcgtggtcgccgtccaagcagaagcggagcactaaccacacgagcgcgagagtggaggcgcagagagccgtcgccatcgtccatcgcaaattcgctagcggacacaaatccacccagccagccgttcatcgcaaccaccacaaccaccaaccaacgggcgtgcccaccacgcggcgccgttggggttggcgggcgccatgggggcgccgagcagccgcgcgctggcgctgggcgcggccttcctgctgctcctcgtcgcgctgccctccgccttcctctacctcacctcctccgcggccacccgcgccaccctcctcgacctcaagcccttctccgccaggtgcgcgcccgcagtcgcgccgctccgcgtcttcatgtacgacctgcctgcgcgcttccacgtcgccatgatgggggccgccgccggcgcggggttccccgcgtggccgccgtccgcgggcgggatcaggcgccagcacagcgtggagtactggatgatggcgtcgctccaggatgggggcgcgggaccggagcggggaagggaggccgtcagggtgcgggatcctgacgccgccgacgccttcttcgtgcccttcttctcctcgctcagcttcaacgtgcacggtcgcaacatgaccgaccctgacaccgaggccgaccgcctcctgcaggttgaacttgtggatattctctggaagtctaaatattggcaacgttctgcgggccgtgaccatgtcattcctatgcatcaccctaatgctttcagattcctgcgagcaatggtgaatgcatctattcttatagtttcagactttgggagatacacaaaggaactggcttccctgaggaaagatgttgtggcaccatatgtgcatgttgtgggttccttccttgatgacgatccacctgatccatttgaggctcgccatacactgcttttctttcgaggccgtactgtcaggaaagatgtatggaactgatttatgattgaagggaaaatccggtcaaaacttgagaagatattaaaaggcaaggaaggggtgcgctttgaggatagcattgccacgggcgacggcattaacatagtaagtcatttttcccatttatactctttttcttagtgatattaacatttttctgttaagttttttttatagaagggtagacccgatgcagtggtgagaattatctcatggagtcattaggccatggtttgaagcagccagacctcactcatgtgggagcctccggcattgggtctgcccttttattaaggcttctttacaatagagcatgaaatttacaaatctggttgatcctaacagtctacagaaggtatgcggtcatcaaagttttgtctccaccctgctggggacactccttcctcatgccgcctgtttgatgccatagtcagtcattgtgttcctgtgatagtcagcagtcgaatcgagctcccttttgaagatgagattgattacagtgagttctcccttttcttctccgttgaagaggctctaagacctgattacttgctgaacgagctcagacaggtccccaaaaggaagtgggttgatatgtggttgaagcttaagaatgtctcccatcattatgaattccagtatccccccaggaagggcgacgcggtgaacatgatatggaggcaggtgaggcacaagatccccgcagttaaccttgctattcacaggaacagaagactgaaaattccagactggtggggataatgattggtggtgaatcgtgtacatattaccatatccactgttagtcctggttattttcggtgcgttatgatggaaacattgctcaccgtcctttgtgaaccaaagtgttcatcttaagatccaaggaccgagtccacaactatttgctgacaggaactgagattatcacctcttttttggtcgatttttgtgacggcttcctatttccccccctgatgctacaaaatagaggggacaaataaacttacagtaacattatagaggagtcatgcctgacaaataggatctgtagcttctttgtgctcccacactggaagtttaaatatataattcatatatgtctggtgctggactgccggtagatacggtttttctctgtgtttgctactttgaaatctgttgactcgattaacgtaggtttcaatatgtttggtgtgtactaaaccatatcggtatgtgctgtcagct

SEQ ID NO: 35632 - DNA, 2063 bp, Zea Mays
agaagtcaaaacctgttccgtgcgcacgacctcatctgtcatctcgcagcagacagaggaatttcccttctgggagaatcacaaactgttctccctctgcactgttggatctcttgcgtggtcgccgtccaagcagaagcggagcactaaccacacgagcgcgagagtggaggcgcagagagccgtcgccatcgtccatcgcaaattcgctagcggacacaaatccacccagccagccgttcatcgcaaccaccacaaccaccaaccaacgggcgtgcccaccacgcggcgccgttggggttggcgggcgccatgggggcgccgagcagccgcgcgctggcgctgggcgcggccttcctgctgctcctcgtcgcgctgccctccgccttcctctacctcacctcctccgcggccacccgcgccaccctcctcgacctcaagcccttctccgccaggtgcgcgcccgcagtcgcgccgctccgcgtcttcatgtacgacctgcctgcgcgcttccacgtcgccatgatgggggccgccgccggcgcggggttccccgcgtggccgccgtccgcgggcgggatcaggcgccagcacagcgtggagtactggatgatggcgtcgctccaggatgggggcgcgggaccggagcggggaagggaggccgtcagggtgcgggatcctgacgccgccgacgccttcttcgtgcccttcttctcctcgctcagcttcaacgtgcacggtcgcaacatgaccgaccctgacaccgaggccgaccgcctcctgcaggttgaacttgtggatattctctggaagtctaaatattggcaacgttctgcgggccgtgaccatgtcattcctatgcatcaccctaatgctttcagattcctgcgagcaatggtgaatgcatctattcttatagtttcagactttgggagatacacaaaggaactggcttccctgaggaaagatgttgtggcaccatatgtgcatgttgtgggttccttccttgatgacgatccacctgatccatttgaggctcgccatacactgcttttctttcgaggccgtactgtcaggaaagatgaagggaaaatccggtcaaaacttgagaagatattaaaaggcaaggaaggggtgcgctttgaggatagcattgccacgggcgacggcattaacattctacagaaggtatgcggtcatcaaagttttgtctccaccctgctggggacactccttcctcatgccgcctgtttgatgccatagtcagtcattgtgttcctgtgatagtcagcagtcgaatcgagctcccttttgaagatgagattgattacagtgagttctcccttttcttctccgttgaagaggctctaagacctgattacttgctgaacgagctcagacaggtccccaaaaggaagtgggttgatatgtggttgaagcttaagaatgtctcccatcattatgaattccagtatccccccaggaagggcgacgcggtgaacatgatatggaggcaggtgaggcacaagatccccgcagttaaccttgctattcacaggaacagaagactgaaaattccagactggtggggataatgattggtggtgaatcgtgtacatattaccatatccactgttagtcctggttattttcggtgcgttatgatggaaacattgctcaccgtcctttgtgaaccaaagtgttcatcttaagatccaaggaccgagtccacaactatttgctgacaggaactgagattatcacctcttttttggtcgatttttgtgacggcttcctatttccccccctgatgctacaaaatagaggggacaaataaacttacagtaacattatagaggagtcatgcctgacaaataggatctgtagcttctttgtgctcccacactggaagtttaaatatataattcatatatgtctggtgctggactgccggtagatacggtttttctctgtgtttgctactttgaaatctgttgactcgattaacgtaggtttcaatatgtttggtgtgtactaaaccatatcggtatgtgctgtcagct

SEQ ID NO: 35633 - DNA, 2283 bp, Zea Mays
agaggatgttgttggagagaaaagagatataaatgatgtaatcttttagaggagacggtaaagtacggatacagaggatgaatatagaaaacgttgctggagacagctggcgtgccaccgacactgcacgtccacgccatcgtggctgcaagttggcagtacctgcaattaagaacgtgccgatacaaatgctgctcaagaagtcaaaacctgttccgtgcgcacgacctcatctgtcatctcgcagcagacagaggaatttcccttctgggagaatcacaaactgttctccctctgcactgttggatctcttgcgtggtcgccgtccaagcagaagcggagcactaaccacacgagcgcgagagtggaggcgcagagagccgtcgccatcgtccatcgcaaattcgctagcggacacaaatccacccagccagccgttcatcgcaaccaccacaaccaccaaccaacgggcgtgcccaccacgcggcgccgttggggttggcgggcgccatgggggcgccgagcagccgcgcgctggcgctgggcgcggccttcctgctgctcctcgtcgcgctgccctccgccttcctctacctcacctcctccgcggccacccgcgccaccctcctcgacctcaagcccttctccgccaggtgcgcgcccgcagtcgcgccgctccgcgtcttcatgtacgacctgcctgcgcgcttccacgtcgccatgatgggggccgccgccggcgcggggttccccgcgtggccgccgtccgcgggcgggatcaggcgccagcacagcgtggagtactggatgatggcgtcgctccaggatgggggcgcgggaccggagcggggaagggaggccgtcagggtgcgggatcctgacgccgccgacgccttcttcgtgcccttcttctcctcgctcagcttcaacgtgcacggtcgcaacatgaccgaccctgacaccgaggccgaccgcctcctgcaggttgaacttgtggatattctctggaagtctaaatattggcaacgttctgcgggccgtgaccatgtcattcctatgcatcaccctaatgctttcagattcctgcgagcaatggtgaatgcatctattcttatagtttcagactttgggagatacacaaaggaactggcttccctgaggaaagatgttgtggcaccatatgtgcatgttgtgggttccttccttgatgacgatccacctgatccatttgaggctcgccatacactgcttttctttcgaggccgtactgtcaggaaagatgtatggaactgatttatgattgaagggaaaatccggtcaaaacttgagaagatattaaaaggcaaggaaggggtgcgctttgaggatagcattgccacgggcgacggcattaacatatctacagaaggtatgcggtcatcaaagttttgtctccaccctgctggggacactccttcctcatgccgcctgtttgatgccatagtcagtcattgtgttcctgtgatagtcagcagtcgaatcgagctcccttttgaagatgagattgattacagtgagttctcccttttcttctccgttgaagaggctctaagacctgattacttgctgaacgagctcagacaggtccccaaaaggaagtgggttgatatgtggttgaagcttaagaatgtctcccatcattatgaattccagtatccccccaggaagggcgacgcggtgaacatgatatggaggcaggtgaggcacaagatccccgcagttaaccttgctattcacaggaacagaagactgaaaattccagactggtggggataatgattggtggtgaatcgtgtacatattaccatatccactgttagtcctggttattttcggtgcgttatgatggaaacattgctcaccgtcctttgtgaaccaaagtgttcatcttaagatccaaggaccgagtccacaactatttgctgacaggaactgagattatcacctcttttttggtcgatttttgtgacggcttcctatttccccccctgatgctacaaaatagaggggacaaataaacttacagtaacattatagaggagtcatgcctgacaaataggatctgtagcttctttgtgctcccacactggaagtttaaatatataattcatatatgtctggtgctggactgccggtagatacggtttttctctgtgtttgctactttgaaatctgttgactcgattaacgtaggtttcaatatgtttggtgtgtactaaaccatatcggtatgtgctgtcagct

SEQ ID NO: 35634 - DNA, 1179 bp, Zea Mays
tggcactttgtttgcaacacatggttatcaactttgattgtgaggttatttttgtaggttcgaatgagatggtttgatgtgaaagacaacaataatatgagacgagagttcttgcgaggaacattacaagcccctcagctgcagttagtaccccatgttggctatgtcagcctcttcccattcatgatggggactattccacctattatggccttcgatcactttctagaacaagttcaatatatatgaagcgtaatacagagcatgaccccccttattggagaggtgccatttggataaacatgaactacatggttctttcggcactacatcactatgcacataaggatggtccatatagcggcagggcaaaggaattgtatgacaagctaagatcaaaccttatccggaatatagtgcagaattacgatgcaacaggtttcttctgggaaaactatgaccagaaggacaaaggaaagggaaagggtgcacggtcatttactggatggacttcactcattgttctgatcatggcggagtcctacccaacattgcacaggtgagatatagatcgcgaacaaccacagcagaagatagctatggcaattggaatggaggggctggcagctggcgcttgtttagcccggtttgcaaccagaacactgggatagtttgattcgtagcatctgctgccttaatcatgaaaattttgacaacacctcctggtcaatctgttcagcatcatttatagagtgttagtggtcatccctgttcactctcatactgtaaactagctcctcgaagaactgattttggggggccaaaaccaccccaggaaagcatgagcatatggaaaacatgttcttgaaagctgacactacgtggagctgttacttgctattgagtgtaatctactgctactcttactatgcttggccatttgcacccccaatgatccccgaagaaacctgctggtccgagcatgtgacctatacctttgcatttacttgctagagaatcagttcaacacaatgcaagttgcaaggcacgtgttttgaaatggaaagcgggccatgtctatgctgtgaccgtctctacttcgcttgctgtgttactttgcgctccagcagtttatacatcttcgtacctattttaaactttactatgaaaatagtgcag

SEQ ID NO: 35635 - DNA, 1802 bp, Zea Mays
agcagcgacgcgaaaaggagcagagtacgtatggaaacccgtccagtctcccaagaccccaagtgagacggacgactcgacccagtcacaatccggtccctagtagaaacggcgagatcgtcagcgagaattttccgatgaccggcggcggcagcagcacccgccgtccggccgccgtggccaggagccgcgggaggccctctgaggcttctgaaccagatcccggcgctcgacgagccgcggccgcagcggcgcagcgccgtggccgcggcaaccctggccccttgcgcctgatggacgtgaggccccgaaccctcgcgtacttcgtggttgcttccttcgccctcgtgtcagtcacattcgtggtgtatactggtgggtggtgggaggaggtggaaggagagggcgcggcgacgctgcgaaaggtcatgcgctccgtaacgccgctgccggcgcccaggatgatggatctgcctcagtttcaaaataaccacaaggaaagtttgtattggggcacttatagaccaaatgtgtacctcggaattcgtgcaagaacccctctgtctctaattgctggattaatgtggattggcttgaaaaatggtcaatattttcttcgtcatgtttgccaagattctgatgagctgagaacatttgggtggacagctcacaatggtagggattatgggcgtcaagtgctggttgatcatggtcttttcctaactactagttttctgaaagagaaaggagagagcagtggttatggtggagactgggccgttcgattggatgctaacaatgagaggtcaggtttaagtgatgctgaagaaagcaccacacatctttttttctatattgctgatgaaactggaaatccgatcactatgggttcatatgaaccttcatcaagaggctctgttcttttggcatctgggttgcatgaggagattggtggttgggaattgtacttgagatctgagacattactgaagattcttcaaatataatggtctatcaggtttccataaagtctcctgctcaaatagacatagtatttttgtcagggtccgcctcaaagtctccagtgattgaagagcggattagcaagctaacaggtcccatgctgagtgaccgtcttgaaacaaaacaaaaggaatttgaagagagatatgatcaaatctttaatgtgaacaataaggtacaggttgattccaaagagttatctgttggtagagctgccttatcaagtcttctgggtggtgttggctacttctatgggcagtccaaaattgcactcccgaaaggttttacacaaaaaaatggggataagtacatttcatattggcctgctgcattatatacagctgtccccagccgctctttcttcccaaggggatttctgtgggatgagggcttccatcagttagtcatttggcgttgggatgtgcatatatctatggatatcattggacattggttagatctgcttaattcagatggatggattcctagggagcaaatcttaggagctgaagctttaagtaaagttcccgaggagtttgttctgcagtatccttccaatggaaatcctcctactttatttcttgcgatacgtgatttagcaagtggaatacatgcacagcagttttcagatgaggaagcggaaaagatttcaagttttcttgaaagggcttatatacggctaaatgcttggtttcagtggttcaacagtacacaatcaggtaagtatgaaggcaccttctattggcatgaaaacgaatcaagctgattcatcaacgtag

SEQ ID NO: 35636 - DNA, 1909 bp, Zea Mays
agcagcgacgcgaaaaggagcagagtacgtatggaaacccgtccagtctcccaagaccccaagtgagacggacgactcgacccagtcacaatccggtccctagtagaaacggcgagatcgtcagcgagaattttccgatgaccggcggcggcagcagcacccgccgtccggccgccgtggccaggagccgcgggaggccctctgaggcttctgaaccagatcccggcgctcgacgagccgcggccgcagcggcgcagcgccgtggccgcggcaaccctggccccttgcgcctgatggacgtgaggccccgaaccctcgcgtacttcgtggttgcttccttcgccctcgtgtcagtcacattcgtggtgtatactggtgggtggtgggaggaggtggaaggagagggcgcggcgacgctgcgaaaggtcatgcgctccgtaacgccgctgccggcgcccaggatgatggatctgcctcagtttcaaaataaccacaaggaaagtttgtattggggcacttatagaccaaatgtgtacctcggaattcgtgcaagaacccctctgtctctaattgctggattaatgtggattggcttgaaaaatggtcaatattttcttcgtcatgtttgccaagattctgatgagctgagaacatttgggtggacagctcacaatggtagggattatgggcgtcaagtgctggttgatcatggtcttttcctaactactagttttctgaaagagaaaggagagagcagtggttatggtggagactgggccgttcgattggatgctaacaatgagaggtttaagtgatgctgaagaaagcaccacacatctttttttctatattgctgatgaaactggaaatccgatcactatgggttcatatgaaccttcatcaagaggctctgttcttttggcatctgggttgcatgaggagattggtggttgggaattgtacttgagatctgaggacaatttggaaattcacagagctggattcaaatcaatgagtatgcataatctgagcgacttagtgcaacaagccgttgctactaatgcaatgcaatctggaaaccttaacctaccagacattactgaagattcttcaaatataatggtctatcaggtttccataaagtctcctgctcaaatagacatagtatttttgtcagggtccgcctcaaagtctccagtgattgaagagcggattagcaagctaacaggtcccatgctgagtgaccgtcttgaaacaaaacaaaaggaatttgaagagagatatgatcaaatctttaatgtgaacaataaggttgattccaaagagttatctgttggtagagctgccttatcaagtcttctgggtggtgttggctacttctatgggcagtccaaaattgcactcccgaaaggttttacacaaaaaaatggggataagtacatttcatattggcctgctgcattatatacagctgtccccagccgctctttcttcccaaggggatttctgtgggatgagggcttccatcagttagtcatttggcgttgggatgtgcatatatctatggatatcattggacattggttagatctgcttaattcagatggatggattcctagggagcaaatcttaggagctgaagctttaagtaaagttcccgaggagtttgttctgcagtatccttccaatggaaatcctcctactttatttcttgcgatacgtgatttagcaagtggaatacatgcacagcagttttcagatgaggaagcggaaaagatttcaagttttcttgaaagggcttatatacggctaaatgcttggtttcagtggttcaacagtacacaatcaggtaagtatgaaggcaccttctattggcatgaaaacgaatcaagctgattcatcaacgtag

SEQ ID NO: 35637 - DNA, 1902 bp, Zea Mays
agcagcgacgcgaaaaggagcagagtacgtatggaaacccgtccagtctcccaagaccccaagtgagacggacgactcgacccagtcacaatccggtccctagtagaaacggcgagatcgtcagcgagaattttccgatgaccggcggcggcagcagcacccgccgtccggccgccgtggccaggagccgcgggaggccctctgaggcttctgaaccagatcccggcgctcgacgagccgcggccgcagcggcgcagcgccgtggccgcggcaaccctggccccttgcgcctgatggacgtgaggccccgaaccctcgcgtacttcgtggttgcttccttcgccctcgtgtcagtcacattcgtggtgtatactggtgggtggtgggaggaggtggaaggagagggcgcggcgacgctgcgaaaggtcatgcgctccgtaacgccgctgccggcgcccaggatgatggatctgcctcagtttcaaaataaccacaaggaaagtttgtattggggcacttatagaccaaatgtgtacctcggaattcgtgcaagaacccctctgtctctaattgctggattaatgtggattggcttgaaaaatggtcaatattttcttcgtcatgtttgccaagattctgatgagctgagaacatttgggtggacagctcacaatggtagggattatgggcgtcaagtgctggttgatcatggtcttttcctaactactagttttctgaaagagaaaggagagagcagtggttatggtggagactgggccgttcgattggatgctaacaatgagaggtcaggtttaagtgatgctgaagaaagcaccacacatctttttttctatattgctgatgaaactggaaatccgatcactatgggttcatatgaaccttcatcaagaggctctgttcttttggcatctgggttgcatgaggagattggtggttgggaattgtacttgagatctgaggacaatttggaaattcacagagctggattcaaatcaatgagtatgcataatctgagcgacttagtgcaacaagccgttgctactaatgcaatgcaatctggaaaccttaacctaccagacattactgaagattcttcaaatataatggtctatcaggtttccataaagtctcctgctcaaatagacatagtatttttgtcagggtccgcctcaaagtctccagtgattgaagagcggattagcaagctaacaggtcccatgctgagtgaccgtcttgaaacaaaacaaaaggaatttgaagagagatatgatcaaatctttaatgtgaacaataaggttgattccaaagagttatctgttggtagagctgccttatcaagtcttctgggtggtgttggctacttctatgggcagtccaaaattgcactcccgaaaggttttacacaaaaaaatggggataagtacatttcatattggcctgctgcattatatacagctgtccccagccgctctttcttcccaaggggatttctgtgggatgagggcttccatcagcgttgggatgtgcatatatctatggatatcattggacattggttagatctgcttaattcagatggatggattcctagggagcaaatcttaggagctgaagctttaagtaaagttcccgaggagtttgttctgcagtatccttccaatggaaatcctcctactttatttcttgcgatacgtgatttagcaagtggaatacatgcacagcagttttcagatgaggaagcggaaaagatttcaagttttcttgaaagggcttatatacggctaaatgcttggtttcagtggttcaacagtacacaatcaggtaagtatgaaggcaccttctattggcatgaaaacgaatcaagctgattcatcaacgtag

SEQ ID NO: 35638 - DNA, 1848 bp, Zea Mays
agcagcgacgcgaaaaggagcagagtacgtatggaaacccgtccagtctcccaagaccccaagtgagacggacgactcgacccagtcacaatccggtccctagtagaaacggcgagatcgtcagcgagaattttccgatgaccggcggcggcagcagcacccgccgtccggccgccgtggccaggagccgcgggaggccctctgaggcttctgaaccagatcccggcgctcgacgagccgcggccgcagcggcgcagcgccgtggccgcggcaaccctggccccttgcgcctgatggacgtgaggccccgaaccctcgcgtacttcgtggttgcttccttcgccctcgtgtcagtcacattcgtggtgtatactggtgggtggtgggaggaggtggaaggagagggcgcggcgacgctgcgaaaggtcatgcgctccgtaacgccgctgccggcgcccaggatgatggatctgcctcagtttcaaaataaccacaaggaaagtttgtattggggcacttatagaccaaatgtgtacctcggaattcgtgcaagaacccctctgtctctaattgctggattaatgtggattggcttgaaaaatggtcaatattttcttcgtcatgtttgccaagattctgatgagctgagaacatttgggtggacagctcacaatgagaaaggagagagcagtggttatggtggagactgggccgttcgattggatgctaacaatgagaggtcaggtttaagtgatgctgaagaaagcaccacacatctttttttctatattgctgatgaaactggaaatccgatcactatgggttcatatgaaccttcatcaagaggctctgttcttttggcatctgggttgcatgaggagattggtggttgggaattgtacttgagatctgaggacaatttggaaattcacagagctggattcaaatcaatgagtatgcataatctgagcgacttagtgcaacaagccgttgctactaatgcaatgcaatctggaaaccttaacctaccagacattactgaagattcttcaaatataatggtctatcaggtttccataaagtctcctgctcaaatagacatagtatttttgtcagggtccgcctcaaagtctccagtgattgaagagcggattagcaagctaacaggtcccatgctgagtgaccgtcttgaaacaaaacaaaaggaatttgaagagagatatgatcaaatctttaatgtgaacaataaggttgattccaaagagttatctgttggtagagctgccttatcaagtcttctgggtggtgttggctacttctatgggcagtccaaaattgcactcccgaaaggttttacacaaaaaaatggggataagtacatttcatattggcctgctgcattatatacagctgtccccagccgctctttcttcccaaggggatttctgtgggatgagggcttccatcagttagtcatttggcgttgggatgtgcatatatctatggatatcattggacattggttagatctgcttaattcagatggatggattcctagggagcaaatcttaggagctgaagctttaagtaaagttcccgaggagtttgttctgcagtatccttccaatggaaatcctcctactttatttcttgcgatacgtgatttagcaagtggaatacatgcacagcagttttcagatgaggaagcggaaaagatttcaagttttcttgaaagggcttatatacggctaaatgcttggtttcagtggttcaacagtacacaatcaggtaagtatgaaggcaccttctattggcatgaaaacgaatcaagctgattcatcaacgtag

SEQ ID NO: 35639 - DNA, 1915 bp, Zea Mays
agcagcgacgcgaaaaggagcagagtacgtatggaaacccgtccagtctcccaagaccccaagtgagacggacgactcgacccagtcacaatccggtccctagtagaaacggcgagatcgtcagcgagaattttccgatgaccggcggcggcagcagcacccgccgtccggccgccgtggccaggagccgcgggaggccctctgaggcttctgaaccagatcccggcgctcgacgagccgcggccgcagcggcgcagcgccgtggccgcggcaaccctggccccttgcgcctgatggacgtgaggccccgaaccctcgcgtacttcgtggttgcttccttcgccctcgtgtcagtcacattcgtggtgtatactggtgggtggtgggaggaggtggaaggagagggcgcggcgacgctgcgaaaggtcatgcgctccgtaacgccgctgccggcgcccaggatgatggatctgcctcagtttcaaaataaccacaaggaaagtttgtattggggcacttatagaccaaatgtgtacctcggaattcgtgcaagaacccctctgtctctaattgctggattaatgtggattggcttgaaaaatggtcaatattttcttcgtcatgtttgccaagattctgatgagctgagaacatttgggtggacagctcacaatggtagggattatgggcgtcaagtgctggttgatcatggtcttttcctaactactagttttctgaaagagaaaggagagagcagtggttatggtggagactgggccgttcgattggatgctaacaatgagaggtttaagtgatgctgaagaaagcaccacacatctttttttctatattgctgatgaaactggaaatccgatcactatgggttcatatgaaccttcatcaagaggctctgttcttttggcatctgggttgcatgaggagattggtggttgggaattgtacttgagatctgaggacaatttggaaattcacagagctggattcaaatcaatgagtatgcataatctgagcgacttagtgcaacaagccgttgctactaatgcaatgcaatctggaaaccttaacctaccagacattactgaagattcttcaaatataatggtctatcaggtttccataaagtctcctgctcaaatagacatagtatttttgtcagggtccgcctcaaagtctccagtgattgaagagcggattagcaagctaacaggtcccatgctgagtgaccgtcttgaaacaaaacaaaaggaatttgaagagagatatgatcaaatctttaatgtgaacaataaggtacaggttgattccaaagagttatctgttggtagagctgccttatcaagtcttctgggtggtgttggctacttctatgggcagtccaaaattgcactcccgaaaggttttacacaaaaaaatggggataagtacatttcatattggcctgctgcattatatacagctgtccccagccgctctttcttcccaaggggatttctgtgggatgagggcttccatcagttagtcatttggcgttgggatgtgcatatatctatggatatcattggacattggttagatctgcttaattcagatggatggattcctagggagcaaatcttaggagctgaagctttaagtaaagttcccgaggagtttgttctgcagtatccttccaatggaaatcctcctactttatttcttgcgatacgtgatttagcaagtggaatacatgcacagcagttttcagatgaggaagcggaaaagatttcaagttttcttgaaagggcttatatacggctaaatgcttggtttcagtggttcaacagtacacaatcaggtaagtatgaaggcaccttctattggcatgaaaacgaatcaagctgattcatcaacgtag

SEQ ID NO: 35640 - DNA, 1874 bp, Zea Mays
agcagcgacgcgaaaaggagcagagtacgtatggaaacccgtccagtctcccaagaccccaagtgagacggacgactcgacccagtcacaatccggtccctagtagaaacggcgagatcgtcagcgagaattttccgatgaccggcggcggcagcagcacccgccgtccggccgccgtggccaggagccgcgggaggccctctgaggcttctgaaccagatcccggcgctcgacgagccgcggccgcagcggcgcagcgccgtggccgcggcaaccctggccccttgcgcctgatggacgtgaggccccgaaccctcgcgtacttcgtggttgcttccttcgccctcgtgtcagtcacattcgtggtgtatactggtgggtggtgggaggaggtggaaggagagggcgcggcgacgctgcgaaaggtcatgcgctccgtaacgccgctgccggcgcccaggatgatggatctgcctcagtttcaaaataaccacaaggaaagtttgtattggggcacttatagaccaaatgtgtacctcggaattcgtgcaagaacccctctgtctctaattgctggattaatgtggattggcttgaaaaatggtcaatattttcttcgtcatgtttgccaagattctgatgagctgagaacatttgggtggacagctcacaatggtagggattatgggcgtcaagtgctggttgatcatggtcttttcctaactactagttttctgaaagagaaaggagagagcagtggttatggtggagactgggccgttcgattggatgctaacaatgagaggtcaggtttaagtgatgctgaagaaagcaccacacatctttttttctatattgctgatgaaactggaaatccgatcactatgggttcatatgaaccttcatcaagaggctctgttcttttggcatctgggttgcatgaggagattggtggttgggaattgtacttgagatctgaggacaatttggaaattcacagagctggattcaaatcaatgagtatgcataatctgagcgacttagtgcaacaagccgttgctactaatgcaatgcaatctggaaaccttaacctaccagacattactgaagattcttcaaatataatggtctatcagggtccgcctcaaagtctccagtgattgaagagcggattagcaagctaacaggtcccatgctgagtgaccgtcttgaaacaaaacaaaaggaatttgaagagagatatgatcaaatctttaatgtgaacaataaggtacaggttgattccaaagagttatctgttggtagagctgccttatcaagtcttctgggtggtgttggctacttctatgggcagtccaaaattgcactcccgaaaggttttacacaaaaaaatggggataagtacatttcatattggcctgctgcattatatacagctgtccccagccgctctttcttcccaaggggatttctgtgggatgagggcttccatcagttagtcatttggcgttgggatgtgcatatatctatggatatcattggacattggttagatctgcttaattcagatggatggattcctagggagcaaatcttaggagctgaagctttaagtaaagttcccgaggagtttgttctgcagtatccttccaatggaaatcctcctactttatttcttgcgatacgtgatttagcaagtggaatacatgcacagcagttttcagatgaggaagcggaaaagatttcaagttttcttgaaagggcttatatacggctaaatgcttggtttcagtggttcaacagtacacaatcaggtaagtatgaaggcaccttctattggcatgaaaacgaatcaagctgattcatcaacgtag

SEQ ID NO: 35641 - DNA, 1807 bp, Zea Mays
agcagcgacgcgaaaaggagcagagtacgtatggaaacccgtccagtctcccaagaccccaagtgagacggacgactcgacccagtcacaatccggtccctagtagaaacggcgagatcgtcagcgagaattttccgatgaccggcggcggcagcagcacccgccgtccggccgccgtggccaggagccgcgggaggccctctgaggcttctgaaccagatcccggcgctcgacgagccgcggccgcagcggcgcagcgccgtggccgcggcaaccctggccccttgcgcctgatggacgtgaggccccgaaccctcgcgtacttcgtggttgcttccttcgccctcgtgtcagtcacattcgtggtgtatactggtgggtggtgggaggaggtggaaggagagggcgcggcgacgctgcgaaaggtcatgcgctccgtaacgccgctgccggcgcccaggatgatggatctgcctcagtttcaaaataaccacaaggaaagtttgtattggggcacttatagaccaaatgtgtacctcggaattcgtgcaagctcacaatggtagggattatgggcgtcaagtgctggttgatcatggtcttttcctaactactagttttctgaaagagaaaggagagagcagtggttatggtggagactgggccgttcgattggatgctaacaatgagaggtcaggtttaagtgatgctgaagaaagcaccacacatctttttttctatattgctgatgaaactggaaatccgatcactatgggttcatatgaaccttcatcaagaggctctgttcttttggcatctgggttgcatgaggagattggtggttgggaattgtacttgagatctgaggacaatttggaaattcacagagctggattcaaatcaatgagtatgcataatctgagcgacttagtgcaacaagccgttgctactaatgcaatgcaatctggaaaccttaacctaccagacattactgaagattcttcaaatataatggtctatcaggtttccataaagtctcctgctcaaatagacatagtatttttgtcagggtccgcctcaaagtctccagtgattgaagagcggattagcaagctaacaggtcccatgctgagtgaccgtcttgaaacaaaacaaaaggaatttgaagagagatatgatcaaatctttaatgtgaacaataaggtacaggttgattccaaagagttatctgttggtagagctgccttatcaagtcttctgggtggtgttggctacttctatgggcagtccaaaattgcactcccgaaaggttttacacaaaaaaatggggataagtacatttcatattggcctgctgcattatatacagctgtccccagccgctctttcttcccaaggggatttctgtgggatgagggcttccatcagttagtcatttggcgttgggatgtgcatatatctatggatatcattggacattggttagatctgcttaattcagatggatggattcctagggagcaaatcttaggagctgaagctttaagtaaagttcccgaggagtttgttctgcagtatccttccaatggaaatcctcctactttatttcttgcgatacgtgatttagcaagtggaatacatgcacagcagttttcagatgaggaagcggaaaagatttcaagttttcttgaaagggcttatatacggctaaatgcttggtttcagtggttcaacagtacacaatcaggtaagtatgaaggcaccttctattggcatgaaaacgaatcaagctgattcatcaacgtag

SEQ ID NO: 35642 - DNA, 1815 bp, Zea Mays
agcagcgacgcgaaaaggagcagagtacgtatggaaacccgtccagtctcccaagaccccaagtgagacggacgactcgacccagtcacaatccggtccctagtagaaacggcgagatcgtcagcgagaattttccgatgaccggcggcggcagcagcacccgccgtccggccgccgtggccaggagccgcgggaggccctctgaggcttctgaaccagatcccggcgctcgacgagccgcggccgcagcggcgcagcgccgtggccgcggcaaccctggccccttgcgcctgatggacgtgaggccccgaaccctcgcgtacttcgtggttgcttccttcgccctcgtgtcagtcacattcgtggtgtatactggtgggtggtgggaggaggtggaaggagagggcgcggcgacgctgcgaaaggtcatgcgctccgtaacgccgctgccggcgcccaggatgatggatctgcctcagtttcaaaataaccacaaggaaagtttgtattggggcacttatagaccaaatgtgtacctcggaattcgtgcaagaacccctctgtctctaattgctggattaatgtggattggcttgaaaaatggtcaatattttcttcgtcatgtttgccaagattctgatgagctgagaacatttgggtggacagctcacaatggtagggattatgggcgtcaagtgctggttgatcatggtcttttcctaactactagttttctgaaagagaaaggagagagcagtggttatggtggagactgggccgttcgattggatgctaacaatgagagaggctctgttcttttggcatctgggttgcatgaggagattggtggttgggaattgtacttgagatctgaggacaatttggaaattcacagagctggattcaaatcaatgagtatgcataatctgagcgacttagtgcaacaagccgttgctactaatgcaatgcaatctggaaaccttaacctaccagacattactgaagattcttcaaatataatggtctatcaggtttccataaagtctcctgctcaaatagacatagtatttttgtcagggtccgcctcaaagtctccagtgattgaagagcggattagcaagctaacaggtcccatgctgagtgaccgtcttgaaacaaaacaaaaggaatttgaagagagatatgatcaaatctttaatgtgaacaataaggtacaggttgattccaaagagttatctgttggtagagctgccttatcaagtcttctgggtggtgttggctacttctatgggcagtccaaaattgcactcccgaaaggttttacacaaaaaaatggggataagtacatttcatattggcctgctgcattatatacagctgtccccagccgctctttcttcccaaggggatttctgtgggatgagggcttccatcagttagtcatttggcgttgggatgtgcatatatctatggatatcattggacattggttagatctgcttaattcagatggatggattcctagggagcaaatcttaggagctgaagctttaagtaaagttcccgaggagtttgttctgcagtatccttccaatggaaatcctcctactttatttcttgcgatacgtgatttagcaagtggaatacatgcacagcagttttcagatgaggaagcggaaaagatttcaagttttcttgaaagggcttatatacggctaaatgcttggtttcagtggttcaacagtacacaatcaggtaagtatgaaggcaccttctattggcatgaaaacgaatcaagctgattcatcaacgtag

SEQ ID NO: 35643 - DNA, 2507 bp, Zea Mays
agcagcgacgcgaaaaggagcagagtacgtatggaaacccgtccagtctcccaagaccccaagtgagacggacgactcgacccagtcacaatccggtccctagtagaaacggcgagatcgtcagcgagaattttccgatgaccggcggcggcagcagcacccgccgtccggccgccgtggccaggagccgcgggaggccctctgaggcttctgaaccagatcccggcgctcgacgagccgcggccgcagcggcgcagcgccgtggccgcggcaaccctggccccttgcgcctgatggacgtgaggccccgaaccctcgcgtacttcgtggttgcttccttcgccctcgtgtcagtcacattcgtggtgtatactggtgggtggtgggaggaggtggaaggagagggcgcggcgacgctgcgaaaggtcatgcgctccgtaacgccgctgccggcgcccaggatgatggatctgcctcagtttcaaaataaccacaaggaaagtttgtattggggcacttatagaccaaatgtgtacctcggaattcgtgcaagaacccctctgtctctaattgctggattaatgtggattggcttgaaaaatggtcaatattttcttcgtcatgtttgccaagattctgatgagctgagaacatttgggtggacagctcacaatggtagggattatgggcgtcaagtgctggttgatcatggtcttttcctaactactagttttctgaaagagaaaggagagagcagtggttatggtggagactgggccgttcgattggatgctaacaatgagaggtcaggtttaagtgatgctgaagaaagcaccacacatctttttttctatattgctgatgaaactggaaatccgatcactatgggttcatatgaaccttcatcaagaggctctgttcttttggcatctgggttgcatgaggagattggtggttgggaattgtacttgagatctgaggacaatttggaaattcacagagctggattcaaatcaatgagtatgcataatctgagcgacttagtgcaacaagccgttgctactaatgcaatgcaatctggaaaccttaacctaccagacattactgaagattcttcaaatataatggtctatcaggtttccataaagtctcctgctcaaatagacatagtatttttgtcagggtccgcctcaaagtctccagtgattgaagagcggattagcaagctaacaggtcccatgctgagtgaccgtcttgaaacaaaacaaaaggaatttgaagagagatatgatcaaatctttaatgtgaacaataaggtacaggttgattccaaagagttatctgttggtagagctgccttatcaagtcttctgggtggtgttggctacttctatgggcagtccaaaattgcactcccgaaaggttttacacaaaaaaatggggataagtacatttcatattggcctgctgcattatatacagctgtccccagccgctctttcttcccaaggggatttctgtgggatgagggcttccatcagttagtcatttggcgttgggatgtgcatatatctatggatatcattggacattggttagatctgcttaattcagatggatggattcctagggagcaaatcttaggagctgaagctttaagtaaagttcccgaggagtttgttctgcagtatccttccaatggaaatcctcctactttatttcttgcgatacgtgatttagcaagtggaatacatgcacagcagttttcagatgaggaagcggaaaagatttcaagttttcttgaaagggcttatatacggctaaatgcttggtttcagtggttcaacagtacacaatcaggttagctttccttttccattttcattttctgtattcgcactgactagtgttggactttaatgctattgccatgcttattttctgaaacacacaaacatgataaacctgcgagctgttgtatggtgtattgtatggagatgatagttgaaagcctaacaataggcactagcttggttgtctattattaggttctagctgtgcttgtatggtacccaaaaaatcagaatatgagatactgatgggcctttgaagtcctcacagggtgctattaatttttagaatatatttcgactgcagaatttcactttcagttactgctggtttcaattcgctaatgatacacatctgatttgcagaagtgatctccggttgctccatattttatactctccctcaagtcggtgaaaaaaagtatatttggttctaaacttttcttttgtaggtgtggttctcagctagtttagtagctgctacatcttaaatccattgtcccaagaaagaaatgtgacccaactgcttgagtctttagaacttaaattcttgtatattttctggtccaactattggacctgatctgccttttcaaagcaggaagcattcaatttggtagggaatggttttgtgttttgattattcctctaagagat

SEQ ID NO: 35644 - DNA, 1407 bp, Zea Mays
ctcaagttcagtctcatatcccttgttcacttgaaaacccatttcacctctcctctccgacttcatctttcgcagacaaggtcatgggactccagaaggcctatctccgtcgtatcgccttctttgtcttcgagatgtggcttgcaaccgtctttgccctgctcatcttgtttgcgctcgccagcatcggcaggtcctcgcgcatgctggagaagagctattacactgagactgaagtagcttctcgtggagatagtgtcacatctcaagatcctgccgagtctgaatttgcagatttggcccggctgctgcccaaggtggccaccgacgacaggacagtgatcatcacgtcggtgaacgaagcgttcgcgcgtcccgactcgctgctgggcctcttccgcgagagtttccaggccggtgaagggatcggccacctcctgaacaacgtcctcgtcgtcgccgtcgacgccaaggcgttcagccactgcagggccgtgcacccacactgctacctcctggaggtgaagaccatagacctcagctccgccaacaactacatgagcgaggcctacattgaactcgtctggaccaagctctccctgctgcagcgcatcctggagctcggctacaacttcctcttcacggacgtggacatcgtgtggttccgcaacccgttccggcacatcagcgtgttcgcggacatgacgacgtcgagcgacgtgttctacggagacgccgacggactggacaactggcccaacacggggttcttctacgtgaaggcgacgagccggacggtggagatgctgcggcggtggcgcgcagcgcgggcgcggttcccggcgaaccacgagcaggccatcttcaacgacatcaagcacgagctcgcccgcgacctgggcgcgcgtgtccagttcctcgacacggcgcgcttcggcagcttctgccggatcttccacatcgacatggccgcggcgtgcaccatgcacgccaactgctgcgtggggctcgggaacaagctgcacgatctaagggacgtgctgcgtcaatggaagaattacacgggcctgacgccgcaggcgaagaagagccagaagttcatatggaaggatccggccaagtgcgggactccggacaaaagaaaaaggacacatgaatctgagaaatgcactacatcagcatcaattgtgtgaggcggtactatccagctctttttttgcagaagtcctctcgtagtcaaaagaaattctaaccaggtcctaaatttcgcagaatagaccctagggaattcataaatggtgtctgcagtccaatccggatcacaaatttaataaattaaaatcagaaaatgaattttatataaactaaaccctaaaacttcataaattcataacttctttattttaa

SEQ ID NO: 35645 - DNA, 1064 bp, Zea Mays
ggctgtttcagaattaatagcccccaagatttttttattccacgcccgtttctaaaaagggagagtatggccgccccagcgtcgccgtactgttcccagatctcttgctaggagtagcctgccccgtgtgcgcgctcgcacggacatgcttgtttccgcgtcttgaaaggcgagaaaaagtggagatgggcgcttgcgcttcggtacacaaggacccggggcaccccaagaagcagtttcttgactctcccaccaaggcgaaggccgccaacgggaagggtggcgggggcggcggtgttgctccggttggtgatggcttcggtgatctcaagtccaaggtcgacgctgaggctgagcagctgcgggcagagtttaaccccaagaacccggattctggtagcaaggatgaagtgttcttcgaatctcgagcctggttagattccgactgcgaggatgacttctacagcgtgaatggagatttcactccgtctcgtggcagcacacccgtctaccagcccagagcgcagacggtgatgagcagcatctttcagccagacacgcgcagttccaaatcaccggagccttctccgaccggacggaggaagctcgctgagctgctgcaggaggcaatgcaagacggtcccgaagaaagcgccgacgaggaggagcagcagcagcagtcgctatctgctgccgctgatgggaagccgccggtgtctgagtccacgtccagctccgcttgcagcaccgtgccgactccggtcgcagtcgccaagagccggaaggagaaggcgtggtacaccggacgctgttgcctgccgagctttgttcatagcctgaccttagacgagagtgagagggggcagaagatgagctctaggccatgtgctgtttgactgtggggctccagtgccctcctgagtcctgccctgagctgtatttagcgcgatatgttatctgaatgcccgattgggacgctgaagctactgtattgagagtactatatagtaatcaagtggataataggcactcgttaaatcctgtggagaccatgtgtaaaaaga

SEQ ID NO: 35646 - DNA, 1147 bp, Zea Mays
cttaaatagcccccacctctttctcgcctctttccccattcccaatctcgtcttgtgttgttcggagcgggcagcagcacacagccccatcccaatcctagtcgatcttcttcccctcctcaaggaagaaaagaagctgaaccatggggaagagaaagtcagctgctaagccacctcctaagaagcggatggacaagcttgacactgtcttttcctgcccattctgcaaccacgggagtagtgttgagtgccgaattgacatgaagaatctgattggcgaagcatcttgtagaatctgtcaggaaaacttcagcacaactgttaatgcactcactgagcctattgatatatatagtgaatggattgatgagtgtgagcgtgtcaacactgttgaaggcgacgatgatgcgtgagcttgccccatgcgatgaaactgttacctacaatcgtaatgtaatgtgctggtattctcgaatgccatagcccatagtcagccatggcttggaataacgtagtggctgactgatatgccagtaggcacctgtctagtacttacagaactacaaaaagtttgtactatacatatatggacaaccttataagtggctatgtgtgtacctatcctaacgcttatcccagatggtgtatcagcgtttttctgtgagattgttttcaagcaaggggttgttcattcattgggtcttctcgggaaaaagagaattatgctgcagtcaaccagatggccgctgttgtgccgacaatacaggttcattcaacgctgaaagcggtttcggtctggaggctgagctttggatcattggatggcactatgcagctttggcacctggagtaccgctcattagtttttcataaagtcccgttcatttcttgtgcacattgctggagattgagagatcgagatcaagactgtacgcatcataaaccgatcagtctattctttgctgtgtacacctgggttgtctttgtgcctgtggtctctgccaggagggtgttcttcgaagtttgaagtacatgtggtttgtgtcttaatgcagttcggtttcatggacgggttgtcaagtgttttaccaggaacagttgtcggtgcagcagtatgcttaatcatgaataaatgatttttgtattt

SEQ ID NO: 35647 - DNA, 1067 bp, Zea Mays
aaaaaccctaagaactcgtttcccacattttacatcgagatacatttaatacatacattcatcacgcccccatcccccgttcccaccggcctcggcaccacaactgccgctcccctcatcgtcatcctcgctcgctctcctattccctgagccacataggaactcctaggctcccagccccatggaaccgcgctcccccgtcaactggtccatcaacttcggcagccaccacagaggcagaggcggcgaccagcaagagtggcatgcgctcctcaggccagcctcttctcaaccaaccacagcttggggcatgaagctatataataaaaattaccttttgctttctacttacatgatatctattaaatacaagaatgtgtactacaatttcatgccaggacaagctcagctcctccaaacttggatgaacaaaaacgtaatcagattgttaccgcaggccatacacaaaacggggacagataaaagaaaaccacatttgcttttgattctgaattggaagcattacacaacttcggagatcaaggccaaggtagccacatttggatttggaggaccaactgaggtactcctggtggcaacgtacgccttcaagttgtatgcttctgcttgcttgaacatcaggcgtattggtctggtaaagaaaggcgaaaaggtagtcaaattgttgtgaagattgtaaaaaacaagcatgcccaacccttcaagacttcacaatttgagcttgaatttggaaaatggatatgccacagtccagagctttttgaacagaatttctggagcagttgttcctgtaaaacaatatcttgggtcctgaagccaccaccatttggatcgacatgacctgtggtattctggtgatctaattgtagcaaactttattttcttattgtgcttatacagtagaagtagcgggaagagaattcacattgtgtgaaatcatgctgatggctgagaagttgaagtaagccgggaagggtgaggtattgggatccgtagcatttaaacttcaataagcaacagtaaaatgtagtggcgtgggtgtgtat

SEQ ID NO: 35648 - DNA, 2923 bp, Zea Mays
caaaaatatccctccattaactctccaactcctcttcctcttcctcttcttctgcctcttcatttccaattccggcttcttcctcgcatcacaaaattccgattgcggcgcaatttcagattgcttgctccagggcgcaaatggtcatcatcagcggcagcaacttcccagcggattcgtgatccttccgcgatggtacggcgatcccttgttctcctctgttcttctcctcgccaaatcttccataccatttctcccgcgttctatcttgctctgatagactaatcgataagatttggatcgcgagatgagttttttttagtatgaggaaggcttaacagcctcccctaacttttctccgctcagtgtttccgctactggtttctcgcttctttctgtttgctcagttcagcagcgcgagaatcggaatttctgatcacgtgcggaattctctagtaagagctccctgccagaacccgctgcccgatcgcttttccagcactgatcagtcggacgaaatttttattccgtttgcttcttcagcatgttcgttcctccactgttgcatcactggtttggcaaaggaattcgctgaattccgttcaaagaatggttcttttacgatacccatgagaagaagaagaagaagaaaaaaaccgtgctttgtatcacctctcgatgcacgtatataattcgtccctggaattctccgtcggtttccccccgttgacagatttggtaggtatcacgagaagttctccaagagtccccatacaaatgttctggtacttgctgccttgtggaggtggaagttcaataagccatgatatttctgcatatgggggtgccgatgcctcacgttcaggttctaattctgtggttgcttcctcgtgtttgcaatcgccgtttttcaccgcgcggtgatcgcttgcgttttttccacttccatttcatgatttctaccccccccccccccccccccccacaaaaaaaaaacaaaaaaaacccatcgttgacagttacacgtgctttatcagttagtttgagtgcagttgtagaaactaattgccttcctttacaagtgacttccctattgttggtatacgtctgaaaaaggttttcctgtcacaacctgacatagtttgtttctacacattgaaaaaaaatatgtttttggcagatgagacctatgcagaactgatctgaacagtgaacacccctagttctctttgaaaactgttgagttaggcgcgcacggcgcgtaggcctttcggatgctttacccctctggtctctgaatacacctcgtgcggcatgctgtggagggttgctgagcctttaaccatcgtttctttgcgtagaggtcacacttgcagtagatttgaaggcgagttttagcatagcttaccttccagggctgggttttcggcttctccttctcctccctagacagatttcctccctccggcagggtcccgtcgccaacgatgcgtggcagaagcggttcttcagcgtcgcgccgccggccacgctggtcttcttcttcgtgctgatattcgtcgccggtgcaattgttacgcttgatcataaggagagcctggccatactgcagctgcagccaagaggagtgatcgcagcagagcagatgaggcctccagcgacgagcgagctgcgcgctgagccagcagcagaggaacccgacatctgtgagaataaatgtaggcctgcaggcagcgaggcgttgccgaggggcatcgtgcaggacaagtccaacttcgagatggagtcgctgggtggcaaccctgaacggaaggagaagaagggcaacggcaggcactcgaaaagcctcctcgccatccccgtcggcatcaagcagaaggcgatcgtcgacaagctcgtatccaagttcccggacaccaatttcatcgtgatgctgttccactacgacggcgaggtggacgggtggcgagacctggagtggtcgggccgcgcgatccacgtcggcgtacgcgaccagaccaagtggtggttcgccaagaggttcctgcacccggacctggtggcggagtacgactacgtcttcctctgggacgaggacatcgaggtggacagcttcgacccgctccggtacctgcgggtcgtgagggaggagcggctggagatctcgcagccggcgctcgaccggcggtcgcagatccaccaccggctcacggcgcgcgccgcgcggagcgggggcgtccaccggcggtactacaagacgagcgggcacggccggtgctacggcaacagcacgggaccgccgtgcgcggggtgggtggagatgatggtgcccgtgttctcgcgcgcggcgtggcggtgcgcgtggcacatgatccagaacgacctcatctacgcctggggcatggactacaagctcggctactgcgcgcagggcgaccggagccgcaacgtcggggtcgtcgacagccagtacgtgctccaccggggcatccctacgctcggcgacggcggcaaggcgacggcgacggctgccgcgtcggcattggggacggcagaccggttagcggtcaggcagcggtcctacaccgagctgcagctgttcaacaggaggtggaagaaggccgtggcggaggacgggtgctggaccgacccttacccgaacccggcgacgaccaccggctgaccgttggacggagcgaggcagcgcagggaagtacagtagttggtagctgtcagattgaccttgcctagaagatggtagtagatcatacactcgcattaatttacaggttcacagagagctatacatataatgtacagaactacagattgttttttttcctgtctcttgcctgtgatccatacaagggaataagcgtgcatgaataaaagaaattttgaaaatcataaatgaaattgccaa

SEQ ID NO: 35649 - DNA, 1043 bp, Zea Mays
ggccgcatcctctccccccgcggccgagctccacccccacccacccacacgcacacactttgccggcggcgagcaccaccaggacagcaggggctggtgagggggcttcacgtttcagcagtatccctgtctctcatagagagggttcaagcagcatgcctgtacaacacatccaggcttcgagtagtacaccaccggctactggtgagcctcgcattggtatgcgtagttgccccatcgatgtggaagccatcgatgatgatgccgttatctattcttcaagaccactgcctcgagcaagacagcagttgaccacgacagaaagtattactatcataatagatgatgattccgaaacaaacctagaaacagcaggcgatgctcttgacgagcatgtgaacttactgctatctctgggcatagaacgctcgcatgagcctacaagtgcaaccaacaccttccctggaataagcatggtggacacaccaaaagtaaacaccttcaaggtgcctcctgaacctgtgaaggaggttccgaaggaaccgaagctcagctgcccgatctgtatgaacgagataaccgaagcggcgtcgaccgtatgcggtcacattttctgccagccgtgcatcaaggctgccattaaggcccagaagaagtgccctacctgccggaggaagctcactccaagacagcaacaccgggtgtacctcccatcgccttagtagcccagtgcagagtcattttgctacaagttctgccgtgccgggggctgtatgttggaggcaactggggggggggggggggggagcatagaggtcctgtttggttcgttcatttagtgtcataatcagttaacagggtaatctattaccattgctttatgtttggttagactatactgtaaacgattgcagtgggatgcaataccagccaatacaaaattattgccgctgctttttgactgttagccaactccgatccgtctttttggatcccacgttgcaaccaaacatagactggtaaccgttcacagcaaaggatag

SEQ ID NO: 35650 - DNA, 846 bp, Zea Mays
ggccgcatcctctccccccgcggccgagctccacccccacccacccacacgcacacactttgccggcggcgagcaccaccaggacagcaggcaagacagcagttgaccacgacagaaagtattactatcataatagatgatgattccgaaacaaacctagaaacagcaggcgatgctcttgacgagcatgtgaacttactgctatctctgggcatagaacgctcgcatgagcctacaagtgcaaccaacaccttccctggaataagcatggtggacacaccaaaagtaaacaccttcaagtggatccaggtgcctcctgaacctgtgaaggaggttccgaaggaaccgaagctcagctgcccgatctgtatgaacgagataaccgaagcggcgtcgaccgtatgcggtcacattttctgccagccgtgcatcaaggctgccattaaggcccagaagaagtgccctacctgccggaggaagctcactccaagacagcaacaccgggtgtacctcccatcgccttagtagcccagtgcagagtcattttgctacaagttctgccgtgccgggggctgtatgttggaggcaactggggggggggggggggggagcatagaggtcctgtttggttcgttcatttagtgtcataatcagttaacagggtaatctattaccattgctttatgtttggttagactatactgtaaacgattgcagtgggatgcaataccagccaatacaaaattattgccgctgctttttgactgttagccaactccgatccgtctttttggatcccacgttgcaaccaaacatagactggtaaccgttcacagcaaaggatag

SEQ ID NO: 35651 - DNA, 837 bp, Zea Mays
ggccgcatcctctccccccgcggccgagctccacccccacccacccacacgcacacactttgccggcggcgagcaccaccaggacagcaggcaagacagcagttgaccacgacagaaagtattactatcataatagatgatgattccgaaacaaacctagaaacagcaggcgatgctcttgacgagcatgtgaacttactgctatctctgggcatagaacgctcgcatgagcctacaagtgcaaccaacaccttccctggaataagcatggtggacacaccaaaagtaaacaccttcaaggtgcctcctgaacctgtgaaggaggttccgaaggaaccgaagctcagctgcccgatctgtatgaacgagataaccgaagcggcgtcgaccgtatgcggtcacattttctgccagccgtgcatcaaggctgccattaaggcccagaagaagtgccctacctgccggaggaagctcactccaagacagcaacaccgggtgtacctcccatcgccttagtagcccagtgcagagtcattttgctacaagttctgccgtgccgggggctgtatgttggaggcaactggggggggggggggggggagcatagaggtcctgtttggttcgttcatttagtgtcataatcagttaacagggtaatctattaccattgctttatgtttggttagactatactgtaaacgattgcagtgggatgcaataccagccaatacaaaattattgccgctgctttttgactgttagccaactccgatccgtctttttggatcccacgttgcaaccaaacatagactggtaaccgttcacagcaaaggatag

SEQ ID NO: 35652 - DNA, 1728 bp, Zea Mays
ggccgcatcctctccccccgcggccgagctccacccccacccacccacacgcacacactttgccggcggcgagcaccaccaggacagcaggtgttccctcctcttggttttcccttcatgcggtgcgactgggtctaacccttctggaatcatctccgattcggggggttttagacgatatctgggcgggatacaaggtttttggatggaattccggggatctctgtcgacccatatgtttagtggttggggaattggggaaagcggtagaaaggtgtgatgttttagtcctttttggttgaagcggagcttgagtctttgagaagccatttgggcgtaattcttctttcgttgattggggtcggccttgtgtgcaggttacgcagatgtttctttttagagttattgcatctcctcagttgtagtttatctcggttgtgtatccacgagtgctgtgtacaccaattcctgtagaaaagatgggtgaacatgttttcattgttcaagaatgttgttatatgtttttaaatcatgtaagacatgttttagttttaccatggggtctcgagaacaatattgtttatttcctcattctgttttgaagccgtcggaattatgcttgtaatcattgctgaagtttttgtgaacatatattttttttcaatcgattttgctcgagccagtatcttttattgcaacaccatgaactcccatggtgctggttcgcattcacggcttttggacctcaactatccccctgctgaaggggctggtgagggggcttcacgtttcagcagtatccctgtctctcatagagagggttcaagcagcatgcctgtacaacacatccaggcttcgagtagtacaccaccggctactggtgagcctcgcattggtatgcgtagttgccccatcgatgtggaagccatcgatgatgatgccgttatctattcttcaagaccactgcctcgagcaagacagcagttgaccacgacagaaagtattactatcataatagatgatgattccgaaacaaacctagaaacagcaggcgatgctcttgacgagcatgtgaacttactgctatctctgggcatagaacgctcgcatgagcctacaagtgcaaccaacaccttccctggaataagcatggtggacacaccaaaagtaaacaccttcaagtggatccaggtgcctcctgaacctgtgaaggaggttccgaaggaaccgaagctcagctgcccgatctgtatgaacgagataaccgaagcggcgtcgaccgtatgcggtcacattttctgccagccgtgcatcaaggctgccattaaggcccagaagaagtgccctacctgccggaggaagctcactccaagacagcaacaccgggtgtacctcccatcgccttagtagcccagtgcagagtcattttgctacaagttctgccgtgccgggggctgtatgttggaggcaactggggggggggggggggggagcatagaggtcctgtttggttcgttcatttagtgtcataatcagttaacagggtaatctattaccattgctttatgtttggttagactatactgtaaacgattgcagtgggatgcaataccagccaatacaaaattattgccgctgctttttgactgttagccaactccgatccgtctttttggatcccacgttgcaaccaaacatagactggtaaccgttcacagcaaaggatag

SEQ ID NO: 35653 - DNA, 1135 bp, Zea Mays
ggccgcatcctctccccccgcggccgagctccacccccacccacccacacgcacacactttgccggcggcgagcaccaccaggacagcagtatcttttattgcaacaccatgaactcccatggtgctggttcgcattcacggcttttggacctcaactatccccctgctgaaggggctggtgagggggcttcacgtttcagcagtatccctgtctctcatagagagggttcaagcagcatgcctgtacaacacatccaggcttcgagtagtacaccaccggctactggtgagcctcgcattggtatgcgtagttgccccatcgatgtggaagccatcgatgatgatgccgttatctattcttcaagaccactgcctcgagcaagacagcagttgaccacgacagaaagtattactatcataatagatgatgattccgaaacaaacctagaaacagcaggcgatgctcttgacgagcatgtgaacttactgctatctctgggcatagaacgctcgcatgagcctacaagtgcaaccaacaccttccctggaataagcatggtggacacaccaaaagtaaacaccttcaagtggatccaggtgcctcctgaacctgtgaaggaggttccgaaggaaccgaagctcagctgcccgatctgtatgaacgagataaccgaagcggcgtcgaccgtatgcggtcacattttctgccagccgtgcatcaaggctgccattaaggcccagaagaagtgccctacctgccggaggaagctcactccaagacagcaacaccgggtgtacctcccatcgccttagtagcccagtgcagagtcattttgctacaagttctgccgtgccgggggctgtatgttggaggcaactggggggggggggggggggagcatagaggtcctgtttggttcgttcatttagtgtcataatcagttaacagggtaatctattaccattgctttatgtttggttagactatactgtaaacgattgcagtgggatgcaataccagccaatacaaaattattgccgctgctttttgactgttagccaactccgatccgtctttttggatcccacgttgcaaccaaacatagactggtaaccgttcacagcaaaggatag

SEQ ID NO: 35654 - DNA, 1024 bp, Zea Mays
ggccgcatcctctccccccgcggccgagctccacccccacccacccacacgcacacactttgccggcggcgagcaccaccaggacagcagcagtatccctgtctctcatagagagggttcaagcagcatgcctgtacaacacatccaggcttcgagtagtacaccaccggctactggtgagcctcgcattggtatgcgtagttgccccatcgatgtggaagccatcgatgatgatgccgttatctattcttcaagaccactgcctcgagcaagacagcagttgaccacgacagaaagtattactatcataatagatgatgattccgaaacaaacctagaaacagcaggcgatgctcttgacgagcatgtgaacttactgctatctctgggcatagaacgctcgcatgagcctacaagtgcaaccaacaccttccctggaataagcatggtggacacaccaaaagtaaacaccttcaagtggatccaggtgcctcctgaacctgtgaaggaggttccgaaggaaccgaagctcagctgcccgatctgtatgaacgagataaccgaagcggcgtcgaccgtatgcggtcacattttctgccagccgtgcatcaaggctgccattaaggcccagaagaagtgccctacctgccggaggaagctcactccaagacagcaacaccgggtgtacctcccatcgccttagtagcccagtgcagagtcattttgctacaagttctgccgtgccgggggctgtatgttggaggcaactggggggggggggggggggagcatagaggtcctgtttggttcgttcatttagtgtcataatcagttaacagggtaatctattaccattgctttatgtttggttagactatactgtaaacgattgcagtgggatgcaataccagccaatacaaaattattgccgctgctttttgactgttagccaactccgatccgtctttttggatcccacgttgcaaccaaacatagactggtaaccgttcacagcaaaggatag

SEQ ID NO: 35655 - DNA, 1021 bp, Zea Mays
ggccgcatcctctccccccgcggccgagctccacccccacccacccacacgcacacactttgccggcggcgagcaccaccaggacagcagtatccctgtctctcatagagagggttcaagcagcatgcctgtacaacacatccaggcttcgagtagtacaccaccggctactggtgagcctcgcattggtatgcgtagttgccccatcgatgtggaagccatcgatgatgatgccgttatctattcttcaagaccactgcctcgagcaagacagcagttgaccacgacagaaagtattactatcataatagatgatgattccgaaacaaacctagaaacagcaggcgatgctcttgacgagcatgtgaacttactgctatctctgggcatagaacgctcgcatgagcctacaagtgcaaccaacaccttccctggaataagcatggtggacacaccaaaagtaaacaccttcaagtggatccaggtgcctcctgaacctgtgaaggaggttccgaaggaaccgaagctcagctgcccgatctgtatgaacgagataaccgaagcggcgtcgaccgtatgcggtcacattttctgccagccgtgcatcaaggctgccattaaggcccagaagaagtgccctacctgccggaggaagctcactccaagacagcaacaccgggtgtacctcccatcgccttagtagcccagtgcagagtcattttgctacaagttctgccgtgccgggggctgtatgttggaggcaactggggggggggggggggggagcatagaggtcctgtttggttcgttcatttagtgtcataatcagttaacagggtaatctattaccattgctttatgtttggttagactatactgtaaacgattgcagtgggatgcaataccagccaatacaaaattattgccgctgctttttgactgttagccaactccgatccgtctttttggatcccacgttgcaaccaaacatagactggtaaccgttcacagcaaaggatag

SEQ ID NO: 35656 - DNA, 1052 bp, Zea Mays
ggccgcatcctctccccccgcggccgagctccacccccacccacccacacgcacacactttgccggcggcgagcaccaccaggacagcaggggctggtgagggggcttcacgtttcagcagtatccctgtctctcatagagagggttcaagcagcatgcctgtacaacacatccaggcttcgagtagtacaccaccggctactggtgagcctcgcattggtatgcgtagttgccccatcgatgtggaagccatcgatgatgatgccgttatctattcttcaagaccactgcctcgagcaagacagcagttgaccacgacagaaagtattactatcataatagatgatgattccgaaacaaacctagaaacagcaggcgatgctcttgacgagcatgtgaacttactgctatctctgggcatagaacgctcgcatgagcctacaagtgcaaccaacaccttccctggaataagcatggtggacacaccaaaagtaaacaccttcaagtggatccaggtgcctcctgaacctgtgaaggaggttccgaaggaaccgaagctcagctgcccgatctgtatgaacgagataaccgaagcggcgtcgaccgtatgcggtcacattttctgccagccgtgcatcaaggctgccattaaggcccagaagaagtgccctacctgccggaggaagctcactccaagacagcaacaccgggtgtacctcccatcgccttagtagcccagtgcagagtcattttgctacaagttctgccgtgccgggggctgtatgttggaggcaactggggggggggggggggggagcatagaggtcctgtttggttcgttcatttagtgtcataatcagttaacagggtaatctattaccattgctttatgtttggttagactatactgtaaacgattgcagtgggatgcaataccagccaatacaaaattattgccgctgctttttgactgttagccaactccgatccgtctttttggatcccacgttgcaaccaaacatagactggtaaccgttcacagcaaaggatag

SEQ ID NO: 35657 - DNA, 1130 bp, Zea Mays
cggcggccgcatcctctccccccgcggccgagctccacccccacccacccacacgcacacactttgccggcggcgagcaccaccaggacagcagtatcttttattgcaacaccatgaactcccatggtgctggttcgcattcacggcttttggacctcaactatccccctgctgaaggggctggtgagggggcttcacgtttcagcagtatccctgtctctcatagagagggttcaagcagcatgcctgtacaacacatccaggcttcgagtagtacaccaccggctactggtgagcctcgcattggtatgcgtagttgccccatcgatgtggaagccatcgatgatgatgccgttatctattcttcaagaccactgcctcgagcaagacagcagttgaccacgacagaaagtattactatcataatagatgatgattccgaaacaaacctagaaacagcaggcgatgctcttgacgagcatgtgaacttactgctatctctgggcatagaacgctcgcatgagcctacaagtgcaaccaacaccttccctggaataagcatggtggacacaccaaaagtaaacaccttcaaggtgcctcctgaacctgtgaaggaggttccgaaggaaccgaagctcagctgcccgatctgtatgaacgagataaccgaagcggcgtcgaccgtatgcggtcacattttctgccagccgtgcatcaaggctgccattaaggcccagaagaagtgccctacctgccggaggaagctcactccaagacagcaacaccgggtgtacctcccatcgccttagtagcccagtgcagagtcattttgctacaagttctgccgtgccgggggctgtatgttggaggcaactggggggggggggggggggagcatagaggtcctgtttggttcgttcatttagtgtcataatcagttaacagggtaatctattaccattgctttatgtttggttagactatactgtaaacgattgcagtgggatgcaataccagccaatacaaaattattgccgctgctttttgactgttagccaactccgatccgtctttttggatcccacgttgcaaccaaacatagactggtaaccgttcacagcaaaggatag

SEQ ID NO: 35658 - DNA, 2164 bp, Zea Mays
gcgaaatccttcgtccgcctctattcctttttacccctacctccctccgttcgcgtcgcccggcggccatccctccctccactgatgtccatgccacaatccttcctcctcctcccctcctttttacccccacctcccttagttcgcctcgcctcgcggccgccatcgtcgccatccctgaccgccctcagattccaccgcgtcgacgccaagctttccccgccactcctcgcggcatcccacagtcctcctggcggcttccgcggatactgtgattctggcggcagcgatggaggaagcggaggtgatggcgggcgaggaatggattctcctggccctggggacgggtggtggtgggagcggtggctccaggccctccacccggagttcttcctcctgttcctgctcctccagtccggcgccgcatccgcgctcgctgaggccctcagcacttccggtgatgacgcgggggacgtatgggaggtgaggggcggcaagcgcactcgcctcatgccggacccaacctggacctcctatctcattgctggggacgacggaacaaagcgggaggacggggatgaaaaggttggaagcatctctaaggacctggccgccctacggaggcagctggggcggtcgtggcggcggtacgccgaagttgctgttcatctgttactccctgacggataccctcatagtgtcagcagcgactaccttaactactcgctctggcgcggcgtacagggtgtggcgagccagatcagcggggtgctttccacacaggctctgctctatgcggttgggttagggaaaggagcgatacccactgctgctgcggtgaattgggtgctgaaagatggcctcgggtaccttagcaagatcatgttgtccaaattcggacgccattttgatgttaaccccaaagggtggcgactatttgctgattttctggagaatatggcttatgggctggagattctgactccagtgttccctcacctgtttgttccaattggggcggctgctggtgctggccgctcagcagcttctttgatacagtctgccaccagaagttgcttttacgctggatttgcagtacaaagaaactttgctgaggttattgcaaagggtgaagcgcaaggaatggcttggtgtttagtgaatatttgttaagtggacaagttccatcggtcaaagaagttaatgatgaagaacctcttttcttcaatttgtcacttggtgcttcacgtcaaagtaagattttgtcagcggaagcaaaagatgctgcagatagaatatgccggcggttacaaatgggttctaagcttagtgagataattgagagtaaagaagatgcttgtgcattgtttgatctttacaaaaatgagcaatatctgcttatggattacaaaggaaaattttgtattgtacttaaagagggatcttctcccgaagacatgctcaaatctttgttccatgttaactatctatattggttggaaaggtatatgggtttcaaaccaagtaatgttgcttcagaatgtagacctggtggaaggcttgaagtatccctggattatgcgcagagggaattcagccatgtcaaacatgatggttctgatggtggctgggttatggatggtctgattgcaaggcccttgcccgttagaatacgaataggagatggtacttcttaggtctttgctctattaactattctcagagctacatctacatccgttgtacagttttgcttattaagttgctgatgtggttcgacaccatattcgaaaggctctcgcctgcagtttttaccctgatattaggatggaagtggttacatctctggtatattttttatcttttgacttttgaagcctgtgatagtgcagtagtgctcacaagattaagggcactcgggctgttatagagattcgagacagcagagcagatgaaggatttctaggtttgtcaatgctcagtatgcgcaccttgtgtgctcgagatcaattttactggcaatacttgtctggttagcatcgtttcgataaaattagcattacataatgttaatgcaacatgtgcgagaatgtaaaacctgtaatttgctgagttacgttctactgtcttgaatcatggcccggcagctatatgactatacagt

SEQ ID NO: 35659 - DNA, 2367 bp, Zea Mays
cactgtttgaattcaacggacactgaagccggagcacggacatggtctagtttctcaaaaacaatttgacacactttcatattttgaatacgggacccctttgaatacacagggcgaaatccttcgtccgcctctattcctttttacccctacctccctccgttcgcgtcgcccggcggccatccctccctccactgatgtccatgccacaatccttcctcctcctcccctcctttttacccccacctcccttagttcgcctcgcctcgcggccgccatcgtcgccatccctgaccgccctcagattccaccgcgtcgacgccaagctttccccgccactcctcgcggcatcccacagtcctcctggcggcttccgcggatactgtgattctggcggcagcgatggaggaagcggaggtgatggcgggcgaggaatggattctcctggccctggggacgggtggtggtgggagcggtggctccaggccctccacccggagttcttcctcctgttcctgctcctccagtccggcgccgcatccgcgctcgctgaggccctcagcacttccggtgatgacgcgggggacgtatgggaggtgaggggcggcaagcgcactcgcctcatgccggacccaacctggacctcctatctcattgctggggacgacggaacaaagcgggaggacggggatgaaaaggttggaagcatctctaaggacctggccgccctacggaggcagctggggcggtcgtggcggcggtacgccgaagttgctgttcatctgttactccctgacggataccctcatagtgtcagcagcgactaccttaactactcgctctggcgcggcgtacagggtgtggcgagccagatcagcggggtgctttccacacaggctctgctctatgcggttgggttagggaaaggagcgatacccactgctgctgcggtgaattgggtgctgaaagatggcctcgggtaccttagcaagatcatgttgtccaaattcggacgccattttgatgttaaccccaaagggtggcgactatttgctgattttctggagaatatggcttatgggctggagattctgactccagtgttccctcacctgtttgttccaattggggcggctgctggtgctggccgctcagcagcttctttgatacagtctgccaccagaagttgcttttacgctggatttgcagtacaaagaaactttgctgaggttattgcaaagggtgaagcgcaaggaatgttcacatgtattgcaacctcaagtcatatcaatcgattcagctgagaacactgaatccttaccgcgcaattcctgttcttttttatgtaggcttggtgtttagtgaatatttgttaagtggacaagttccatcggtcaaagaagttaatgatgaagaacctcttttcttcaatttgtcacttggtgcttcacgtcaaagtaagattttgtcagcggaagcaaaagatgctgcagatagaatatgccggcggttacaaatgggttctaagcttagtgagataattgagagtaaagaagatgcttgtgcattgtttgatctttacaaaaatgagcaatatctgcttatggattacaaaggaaaattttgtattgtacttaaagagggatcttctcccgaagacatgctcaaatctttgttccatgttaactatctatattggttggaaaggtatatgggtttcaaaccaagtaatgttgcttcagaatgtagacctggtggaaggcttgaagtatccctggattatgcgcagagggaattcagccatgtcaaacatgatggttctgatggtggctgggttatggatggtctgattgcaaggcccttgcccgttagaatacgaataggagatggtacttcttaggtctttgctctattaactattctcagagctacatctacatccgttgtacagttttgcttattaagttgctgatgtggttcgacaccatattcgaaaggctctcgcctgcagtttttaccctgatattaggatggaagtggttacatctctggtatattttttatcttttgacttttgaagcctgtgatagtgcagtagtgctcacaagattaagggcactcgggctgttatagagattcgagacagcagagcagatgaaggatttctaggtttgtcaatgctcagtatgcgcaccttgtgtgctcgagatcaattttactggcaatacttgtctggttagcatcgtttcgataaaattagcattacataatgttaatgcaacatgtgcgagaatgtaaaacctgtaatttgctgagttacgttctactgtcttgaatcatggcccggcagctatatgactatacagt

SEQ ID NO: 35660 - DNA, 1297 bp, Zea Mays
gcggcgcgtcgtgattcgtgaagtctgccaccagaagttgcttttacgctggatttgcagtacaaagaaactttgctgaggttattgcaaagggtgaagcgcaaggaatggttagcaaatttgttggcatagggcttggcattgcattggctaatcacattggctcatctgtaccattagctcttatttcgtttgctggaattactgcagttcacatgtattgcaacctcaagtcatatcaatcgattcagctgagaacactgaatccttaccgcgcaagcttggtgtttagtgaatatttgttaagtggacaagttccatcggtcaaagaagttaatgatgaagaacctcttttcttcaatttgtcacttggtgcttcacgtcaaagtaagattttgtcagcggaagcaaaagatgctgcagatagaatatgccggcggttacaaatgggttctaagcttagtgagataattgagagtaaagaagatgcttgtgcattgtttgatctttacaaaaatgagcaatatctgcttatggattacaaaggaaaattttgtattgtacttaaagagggatcttctcccgaagacatgctcaaatctttgttccatgttaactatctatattggttggaaaggtatatgggtttcaaaccaagtaatgttgcttcagaatgtagacctggtggaaggcttgaagtatccctggattatgcgcagagggaattcagccatgtcaaacatgatggttctgatggtggctgggttatggatggtctgattgcaaggcccttgcccgttagaatacgaataggagatggtacttcttaggtctttgctctattaactattctcagagctacatctacatccgttgtacagttttgcttattaagttgctgatgtggttcgacaccatattcgaaaggctctcgcctgcagtttttaccctgatattaggatggaagtggttacatctctggtatattttttatcttttgacttttgaagcctgtgatagtgcagtagtgctcacaagattaagggcactcgggctgttatagagattcgagacagcagagcagatgaaggatttctaggtttgtcaatgctcagtatgcgcaccttgtgtgctcgagatcaattttactggcaatacttgtctggttagcatcgtttcgataaaattagcattacataatgttaatgcaacatgtgcgagaatgtaaaacctgtaatttgctgagttacgttctactgtcttgaatcatggcccggcagctatatgactatacagt

SEQ ID NO: 35661 - DNA, 4296 bp, Zea Mays
ttctcgcaaatgatgctgcaacgttgcatgcataagcagcatgtcatcaggactagaatgctttttcataccaatgctctgaaactagacaggttacaatttgaactgctggcaatggggcctcattgttccttcatcttgatcctactgctatgcttcacccccagctctgctttgactggacataatgatataaatacattgttcaaactgagggacatggtcactgaagggaagggatttctccgtgactggtttgattcagaaaaagccccttgcagttggtcaggtataacttgtgtggaacatgctgtagtggatatagacttgtcatctgtgccaatttatgccccgttcccgttatgtgtcgggtcattccaatcactggctcgtctcaacttcagtggttgtgggttttctggcgagcttccggatgccttggggagcttgcacaatcttgagtaccttgatttgagccataaccagcttacaggggcccttcctgtttcattgtatggactgaagtcattgaaagaagtagtgcttgacaataatttcttttctggtcaattgagccctgctattgcacagcttgagtacctcaagaagttttctgtatcctcaaattctatctctggtgccattcctccagagttgggcagtttgcagaatctggagttcctggaccttcacatgaacgcacttaacgggtcgataccatcagctttgggtaatctgtctcagctcttgcaccttgatgctagccagaataatatctgcggctcgatatttccaggaataactgcaatggcaaacctagttacagttgatctctcttcaaatgctttggtggggccactacctagggagattggtcagctacggaatgctcaactgataatattgggacataatggtttcaatggaagcattccagaagagatcggtgaactaaagctgctggaagagctcgatgtccctggatgcaagctcacaggcatcccttggacagttggtgatcttagaagtttgagaaagcttgatatttcagggaatgatttcaatactgaacttccggcatctattggcaagctgggaaatctgactcgtctatatgcaaggagtgctgggcttactgggaatattccgagagaacttggtaactgcaagaagcttgtctttgttgatctcaatggcaactccttttctggccctatacctggagaacttgcaggtttagaagccattgtcacattagatgtgcaagggaacaatctatctggtcccattccagagtggatccggaattggacgaaccttcgttcaatatatctggcgcagaacatgttcgatggacccctgccagtactgccattgcagcatctagttattttttctgcagaaaccaacatgctatcaggttctattcctgatgagatctgtcaggccaaatcactgcagtcactcttgttgcacaacaacaatctgactgggaatatcatggaggcatttaaagggtgcaagaaccttacggaacttaacctgcaaggaaaccatcttcatggtgagataccacattacttgtctgagctaccactagtaacagtggaattggcccaaaacaacttcacaggaaagctgccagagaaattgtgggaatcatcaactattctggagatcacactcagctacaatcagcttactggccctatacctgaaagcatcggtagactctccagtttgcagaggctacagatcgacagtaactacttagaagggcctattccgcggtcaatcggctctctaaggaatctgacaaatctctctctatggggcaataggctgtctgggaacattccacttgagctcttcaactgcagaaaccttgtcaccttggatctaagttctaacaatttgtctggccacatcccgagtgccatatcacacttgacatttctcaacagcttgaacttgtccaataaccagctgtccagtgctatacctgctgagatctgtgttggatttgggagtgcagctcaccctgactcagagtttatccagcatcatggtttgcttgatctttcatacaacagattgactggtcatataccagcagcgatcaagaattgtgttatggttacagtcctcaacctccaaggaaatatgctaagtggtgccattccaccagagctttcagaactgcctaatgttacatccatctatctttctcataacacattagttggccccatacttccttggtctgtaccgtcggttcaactgcagggcctttttctctctaataaccacttaagtggctccattcctgctgagataggtcaaatacttcccaaaatcgaaaagctagacttatccagtaatgcacttactggaacactacccgactctttactctgcatcaattacttaacctatctggatatcagcaataacagcctctctggacaaatcccattgtcttgtcctaaagaaaaagaggcatcgagctccctgatattgttcaatgggagcagtaaccatttctcagggaacctagatgagtctatttcaaacttcacacaactgtcttttcttgatatccacaacaacagcctcactggaagtttgcccttctcactttctgatctcagttatttaaactatcttgacctctcaagcaatgacttcaatggccccgccccttgtggtatctgcaatatagttggcctcacatttgccgacttctctggtaatcacattggcatgagcggcttagtggattgtgctgcagaaggcttttgtactggaaagggttttgatcggaaggcacttaattcatctgatagagttcgaagagcagcaatcatttgtgttagtatactcactgttgtcattgtcttagtttttctggtggtttatctgaaacggaggctattgagaagcagacccttggctcttgtacctgtcagcaaggccaaggctaccattgaaccaacctcaagtgatgagctcctagggaagaagtttcgagaacccttgagtatcaatcttgcaacatttgagcatgcacttctgagggtcaccgcagatgatatccagaaagccacggagaatttcagtaaggtgcacattattggggatggtgggtttggcactgtctacagggcagcacttcctgaaggtcggagagtagcgatcaaaaggcttcatggtggccatcagttccaaggtgatcgtgaattcctggccgaaatggagacaattggaaaggtgaaacatcctaaccttgttcctctacttggctactgtgtatgtggtgatgaaaggttcctgatatacgagtacatggaaaatgggagccttgagatgtggctcaggaaccgggctgatgccatcgaaacacttggatggccagaccgcctgaagatatgtattggttctgcccgcggtctttcgttcctgcatcacggttttgtgccccatatcatccaccgtgacatgaagtcaagcaacattctattggacgagaactttgagccaagggtctctgattttggccttgcaaggataatcagtgcatgcgagactcatgtcagcactgacattgctggtacatttggctacatacctccagagtatgccctgacaatgaagtcctctacaaaaggcgacgtctacagctttggcgttgtcatgcttgagctgctcactggacggccacctacagggcaagaggaaggggaagggggtggaaaccttgtaggctgggtgcgatggatgatggcacatggcaaggaaggtgagctgtttgatccttgtttgcctgtctcaagcgtgtggcgggtacagatggcccatgtgctcgccattgcccgagactgcactgtggacgagccatggaagaggccaactatgctggaggtggtgaagggcctcaagatggccgaaacgatagaatgtggacctctggttgtgacagtcaccaaggacatgtaatgctgacggcatcaacgctgatgtatggaactgggtgttcagggaatgttgttcttgtgtcgatataataatgtaggctccttgttgctgtagctgtactggtgactgtaatgagaaactaacgctgctcatgttcaggctgtagttattgatgtaaccttttcatctggacccaagcaagcacttatgatatggcagggatcgtttaagcacaaaagatgcagtgactaggtttagctcttgagattttgcattctactacattttctactttgttgttctactgctcatggtcctccc

SEQ ID NO: 35662 - DNA, 4401 bp, Zea Mays
ctactaagtactaatagtaccctagagccttagatttaattgatatggttcatctgttgtatttgtttggcaacctgtgagaacaggacgagaagaaccaatggttccgatggatctatattgttatacattgccgctttgattgctgatcttcttctgctgccactacttggatggagaatgccatcaagttaaaggttacaatttgaactgctggcaatggggcctcattgttccttcatcttgatcctactgctatgcttcacccccagctctgctttgactggacataatgatataaatacattgttcaaactgagggacatggtcactgaagggaagggatttctccgtgactggtttgattcagaaaaagccccttgcagttggtcaggtataacttgtgtggaacatgctgtagtggatatagacttgtcatctgtgccaatttatgccccgttcccgttatgtgtcgggtcattccaatcactggctcgtctcaacttcagtggttgtgggttttctggcgagcttccggatgccttggggagcttgcacaatcttgagtaccttgatttgagccataaccagcttacaggggcccttcctgtttcattgtatggactgaagtcattgaaagaagtagtgcttgacaataatttcttttctggtcaattgagccctgctattgcacagcttgagtacctcaagaagttttctgtatcctcaaattctatctctggtgccattcctccagagttgggcagtttgcagaatctggagttcctggaccttcacatgaacgcacttaacgggtcgataccatcagctttgggtaatctgtctcagctcttgcaccttgatgctagccagaataatatctgcggctcgatatttccaggaataactgcaatggcaaacctagttacagttgatctctcttcaaatgctttggtggggccactacctagggagattggtcagctacggaatgctcaactgataatattgggacataatggtttcaatggaagcattccagaagagatcggtgaactaaagctgctggaagagctcgatgtccctggatgcaagctcacaggcatcccttggacagttggtgatcttagaagtttgagaaagcttgatatttcagggaatgatttcaatactgaacttccggcatctattggcaagctgggaaatctgactcgtctatatgcaaggagtgctgggcttactgggaatattccgagagaacttggtaactgcaagaagcttgtctttgttgatctcaatggcaactccttttctggccctatacctggagaacttgcaggtttagaagccattgtcacattagatgtgcaagggaacaatctatctggtcccattccagagtggatccggaattggacgaaccttcgttcaatatatctggcgcagaacatgttcgatggacccctgccagtactgccattgcagcatctagttattttttctgcagaaaccaacatgctatcaggttctattcctgatgagatctgtcaggccaaatcactgcagtcactcttgttgcacaacaacaatctgactgggaatatcatggaggcatttaaagggtgcaagaaccttacggaacttaacctgcaaggaaaccatcttcatggtgagataccacattacttgtctgagctaccactagtaacagtggaattggcccaaaacaacttcacaggaaagctgccagagaaattgtgggaatcatcaactattctggagatcacactcagctacaatcagcttactggccctatacctgaaagcatcggtagactctccagtttgcagaggctacagatcgacagtaactacttagaagggcctattccgcggtcaatcggctctctaaggaatctgacaaatctctctctatggggcaataggctgtctgggaacattccacttgagctcttcaactgcagaaaccttgtcaccttggatctaagttctaacaatttgtctggccacatcccgagtgccatatcacacttgacatttctcaacagcttgaacttgtccaataaccagctgtccagtgctatacctgctgagatctgtgttggatttgggagtgcagctcaccctgactcagagtttatccagcatcatggtttgcttgatctttcatacaacagattgactggtcatataccagcagcgatcaagaattgtgttatggttacagtcctcaacctccaaggaaatatgctaagtggtgccattccaccagagctttcagaactgcctaatgttacatccatctatctttctcataacacattagttggccccatacttccttggtctgtaccgtcggttcaactgcagggcctttttctctctaataaccacttaagtggctccattcctgctgagataggtcaaatacttcccaaaatcgaaaagctagacttatccagtaatgcacttactggaacactacccgactctttactctgcatcaattacttaacctatctggatatcagcaataacagcctctctggacaaatcccattgtcttgtcctaaagaaaaagaggcatcgagctccctgatattgttcaatgggagcagtaaccatttctcagggaacctagatgagtctatttcaaacttcacacaactgtcttttcttgatatccacaacaacagcctcactggaagtttgcccttctcactttctgatctcagttatttaaactatcttgacctctcaagcaatgacttcaatggccccgccccttgtggtatctgcaatatagttggcctcacatttgccgacttctctggtaatcacattggcatgagcggcttagtggattgtgctgcagaaggcttttgtactggaaagggttttgatcggaaggcacttaattcatctgatagagttcgaagagcagcaatcatttgtgttagtatactcactgttgtcattgtcttagtttttctggtggtttatctgaaacggaggctattgagaagcagacccttggctcttgtacctgtcagcaaggccaaggctaccattgaaccaacctcaagtgatgagctcctagggaagaagtttcgagaacccttgagtatcaatcttgcaacatttgagcatgcacttctgagggtcaccgcagatgatatccagaaagccacggagaatttcagtaaggtgcacattattggggatggtgggtttggcactgtctacagggcagcacttcctgaaggtcggagagtagcgatcaaaaggcttcatggtggccatcagttccaaggtgatcgtgaattcctggccgaaatggagacaattggaaaggtgaaacatcctaaccttgttcctctacttggctactgtgtatgtggtgatgaaaggttcctgatatacgagtacatggaaaatgggagccttgagatgtggctcaggaaccgggctgatgccatcgaaacacttggatggccagaccgcctgaagatatgtattggttctgcccgcggtctttcgttcctgcatcacggttttgtgccccatatcatccaccgtgacatgaagtcaagcaacattctattggacgagaactttgagccaagggtctctgattttggccttgcaaggataatcagtgcatgcgagactcatgtcagcactgacattgctggtacatttggctacatacctccagagtatgccctgacaatgaagtcctctacaaaaggcgacgtctacagctttggcgttgtcatgcttgagctgctcactggacggccacctacagggcaagaggaaggggaagggggtggaaaccttgtaggctgggtgcgatggatgatggcacatggcaaggaaggtgagctgtttgatccttgtttgcctgtctcaagcgtgtggcgggtacagatggcccatgtgctcgccattgcccgagactgcactgtggacgagccatggaagaggccaactatgctggaggtggtgaagggcctcaagatggccgaaacgatagaatgtggacctctggttgtgacagtcaccaaggacatgtaatgctgacggcatcaacgctgatgtatggaactgggtgttcagggaatgttgttcttgtgtcgatataataatgtaggctccttgttgctgtagctgtactggtgactgtaatgagaaactaacgctgctcatgttcaggctgtagttattgatgtaaccttttcatctggacccaagcaagcacttatgatatggcagggatcgtttaagcacaaaagatgcagtgactaggtttagctcttgagattttgcattctactacattttctactttgttgttctactgctcatggtcctccc

SEQ ID NO: 35663 - DNA, 4417 bp, Zea Mays
aagaaacatccccaggaaccagcagcttctgctgtatcgggtcacgggcgtactgatctgctgcgagatcaacaattcagtaaacctcctgggatcaagacaggaaatcctgatctgctacagtgcttgatctatattgttatacattgccgctttgattgctgatcttcttctgctgccactacttggatggagaatgccatcaagttaaaggttacaatttgaactgctggcaatggggcctcattgttccttcatcttgatcctactgctatgcttcacccccagctctgctttgactggacataatgatataaatacattgttcaaactgagggacatggtcactgaagggaagggatttctccgtgactggtttgattcagaaaaagccccttgcagttggtcaggtataacttgtgtggaacatgctgtagtggatatagacttgtcatctgtgccaatttatgccccgttcccgttatgtgtcgggtcattccaatcactggctcgtctcaacttcagtggttgtgggttttctggcgagcttccggatgccttggggagcttgcacaatcttgagtaccttgatttgagccataaccagcttacaggggcccttcctgtttcattgtatggactgaagtcattgaaagaagtagtgcttgacaataatttcttttctggtcaattgagccctgctattgcacagcttgagtacctcaagaagttttctgtatcctcaaattctatctctggtgccattcctccagagttgggcagtttgcagaatctggagttcctggaccttcacatgaacgcacttaacgggtcgataccatcagctttgggtaatctgtctcagctcttgcaccttgatgctagccagaataatatctgcggctcgatatttccaggaataactgcaatggcaaacctagttacagttgatctctcttcaaatgctttggtggggccactacctagggagattggtcagctacggaatgctcaactgataatattgggacataatggtttcaatggaagcattccagaagagatcggtgaactaaagctgctggaagagctcgatgtccctggatgcaagctcacaggcatcccttggacagttggtgatcttagaagtttgagaaagcttgatatttcagggaatgatttcaatactgaacttccggcatctattggcaagctgggaaatctgactcgtctatatgcaaggagtgctgggcttactgggaatattccgagagaacttggtaactgcaagaagcttgtctttgttgatctcaatggcaactccttttctggccctatacctggagaacttgcaggtttagaagccattgtcacattagatgtgcaagggaacaatctatctggtcccattccagagtggatccggaattggacgaaccttcgttcaatatatctggcgcagaacatgttcgatggacccctgccagtactgccattgcagcatctagttattttttctgcagaaaccaacatgctatcaggttctattcctgatgagatctgtcaggccaaatcactgcagtcactcttgttgcacaacaacaatctgactgggaatatcatggaggcatttaaagggtgcaagaaccttacggaacttaacctgcaaggaaaccatcttcatggtgagataccacattacttgtctgagctaccactagtaacagtggaattggcccaaaacaacttcacaggaaagctgccagagaaattgtgggaatcatcaactattctggagatcacactcagctacaatcagcttactggccctatacctgaaagcatcggtagactctccagtttgcagaggctacagatcgacagtaactacttagaagggcctattccgcggtcaatcggctctctaaggaatctgacaaatctctctctatggggcaataggctgtctgggaacattccacttgagctcttcaactgcagaaaccttgtcaccttggatctaagttctaacaatttgtctggccacatcccgagtgccatatcacacttgacatttctcaacagcttgaacttgtccaataaccagctgtccagtgctatacctgctgagatctgtgttggatttgggagtgcagctcaccctgactcagagtttatccagcatcatggtttgcttgatctttcatacaacagattgactggtcatataccagcagcgatcaagaattgtgttatggttacagtcctcaacctccaaggaaatatgctaagtggtgccattccaccagagctttcagaactgcctaatgttacatccatctatctttctcataacacattagttggccccatacttccttggtctgtaccgtcggttcaactgcagggcctttttctctctaataaccacttaagtggctccattcctgctgagataggtcaaatacttcccaaaatcgaaaagctagacttatccagtaatgcacttactggaacactacccgactctttactctgcatcaattacttaacctatctggatatcagcaataacagcctctctggacaaatcccattgtcttgtcctaaagaaaaagaggcatcgagctccctgatattgttcaatgggagcagtaaccatttctcagggaacctagatgagtctatttcaaacttcacacaactgtcttttcttgatatccacaacaacagcctcactggaagtttgcccttctcactttctgatctcagttatttaaactatcttgacctctcaagcaatgacttcaatggccccgccccttgtggtatctgcaatatagttggcctcacatttgccgacttctctggtaatcacattggcatgagcggcttagtggattgtgctgcagaaggcttttgtactggaaagggttttgatcggaaggcacttaattcatctgatagagttcgaagagcagcaatcatttgtgttagtatactcactgttgtcattgtcttagtttttctggtggtttatctgaaacggaggctattgagaagcagacccttggctcttgtacctgtcagcaaggccaaggctaccattgaaccaacctcaagtgatgagctcctagggaagaagtttcgagaacccttgagtatcaatcttgcaacatttgagcatgcacttctgagggtcaccgcagatgatatccagaaagccacggagaatttcagtaaggtgcacattattggggatggtgggtttggcactgtctacagggcagcacttcctgaaggtcggagagtagcgatcaaaaggcttcatggtggccatcagttccaaggtgatcgtgaattcctggccgaaatggagacaattggaaaggtgaaacatcctaaccttgttcctctacttggctactgtgtatgtggtgatgaaaggttcctgatatacgagtacatggaaaatgggagccttgagatgtggctcaggaaccgggctgatgccatcgaaacacttggatggccagaccgcctgaagatatgtattggttctgcccgcggtctttcgttcctgcatcacggttttgtgccccatatcatccaccgtgacatgaagtcaagcaacattctattggacgagaactttgagccaagggtctctgattttggccttgcaaggataatcagtgcatgcgagactcatgtcagcactgacattgctggtacatttggctacatacctccagagtatgccctgacaatgaagtcctctacaaaaggcgacgtctacagctttggcgttgtcatgcttgagctgctcactggacggccacctacagggcaagaggaaggggaagggggtggaaaccttgtaggctgggtgcgatggatgatggcacatggcaaggaaggtgagctgtttgatccttgtttgcctgtctcaagcgtgtggcgggtacagatggcccatgtgctcgccattgcccgagactgcactgtggacgagccatggaagaggccaactatgctggaggtggtgaagggcctcaagatggccgaaacgatagaatgtggacctctggttgtgacagtcaccaaggacatgtaatgctgacggcatcaacgctgatgtatggaactgggtgttcagggaatgttgttcttgtgtcgatataataatgtaggctccttgttgctgtagctgtactggtgactgtaatgagaaactaacgctgctcatgttcaggctgtagttattgatgtaaccttttcatctggacccaagcaagcacttatgatatggcagggatcgtttaagcacaaaagatgcagtgactaggtttagctcttgagattttgcattctactacattttctactttgttgttctactgctcatggtcctccc

SEQ ID NO: 35664 - DNA, 4439 bp, Zea Mays
gtgcactggattggttcggtgcactggttctgtgggtggttcatggccccggcaaccacggggtgccggtggtaccatggcagggcgtgaaattctgccgttctagtcgttcgtggtgtggcggtggcgccgccttcgggcttcatccgggatctatattgttatacattgccgctttgattgctgatcttcttctgctgccactacttggatggagaatgccatcaagttaaaggttacaatttgaactgctggcaatggggcctcattgttccttcatcttgatcctactgctatgcttcacccccagctctgctttgactggacataatgatataaatacattgttcaaactgagggacatggtcactgaagggaagggatttctccgtgactggtttgattcagaaaaagccccttgcagttggtcaggtataacttgtgtggaacatgctgtagtggatatagacttgtcatctgtgccaatttatgccccgttcccgttatgtgtcgggtcattccaatcactggctcgtctcaacttcagtggttgtgggttttctggcgagcttccggatgccttggggagcttgcacaatcttgagtaccttgatttgagccataaccagcttacaggggcccttcctgtttcattgtatggactgaagtcattgaaagaagtagtgcttgacaataatttcttttctggtcaattgagccctgctattgcacagcttgagtacctcaagaagttttctgtatcctcaaattctatctctggtgccattcctccagagttgggcagtttgcagaatctggagttcctggaccttcacatgaacgcacttaacgggtcgataccatcagctttgggtaatctgtctcagctcttgcaccttgatgctagccagaataatatctgcggctcgatatttccaggaataactgcaatggcaaacctagttacagttgatctctcttcaaatgctttggtggggccactacctagggagattggtcagctacggaatgctcaactgataatattgggacataatggtttcaatggaagcattccagaagagatcggtgaactaaagctgctggaagagctcgatgtccctggatgcaagctcacaggcatcccttggacagttggtgatcttagaagtttgagaaagcttgatatttcagggaatgatttcaatactgaacttccggcatctattggcaagctgggaaatctgactcgtctatatgcaaggagtgctgggcttactgggaatattccgagagaacttggtaactgcaagaagcttgtctttgttgatctcaatggcaactccttttctggccctatacctggagaacttgcaggtttagaagccattgtcacattagatgtgcaagggaacaatctatctggtcccattccagagtggatccggaattggacgaaccttcgttcaatatatctggcgcagaacatgttcgatggacccctgccagtactgccattgcagcatctagttattttttctgcagaaaccaacatgctatcaggttctattcctgatgagatctgtcaggccaaatcactgcagtcactcttgttgcacaacaacaatctgactgggaatatcatggaggcatttaaagggtgcaagaaccttacggaacttaacctgcaaggaaaccatcttcatggtgagataccacattacttgtctgagctaccactagtaacagtggaattggcccaaaacaacttcacaggaaagctgccagagaaattgtgggaatcatcaactattctggagatcacactcagctacaatcagcttactggccctatacctgaaagcatcggtagactctccagtttgcagaggctacagatcgacagtaactacttagaagggcctattccgcggtcaatcggctctctaaggaatctgacaaatctctctctatggggcaataggctgtctgggaacattccacttgagctcttcaactgcagaaaccttgtcaccttggatctaagttctaacaatttgtctggccacatcccgagtgccatatcacacttgacatttctcaacagcttgaacttgtccaataaccagctgtccagtgctatacctgctgagatctgtgttggatttgggagtgcagctcaccctgactcagagtttatccagcatcatggtttgcttgatctttcatacaacagattgactggtcatataccagcagcgatcaagaattgtgttatggttacagtcctcaacctccaaggaaatatgctaagtggtgccattccaccagagctttcagaactgcctaatgttacatccatctatctttctcataacacattagttggccccatacttccttggtctgtaccgtcggttcaactgcagggcctttttctctctaataaccacttaagtggctccattcctgctgagataggtcaaatacttcccaaaatcgaaaagctagacttatccagtaatgcacttactggaacactacccgactctttactctgcatcaattacttaacctatctggatatcagcaataacagcctctctggacaaatcccattgtcttgtcctaaagaaaaagaggcatcgagctccctgatattgttcaatgggagcagtaaccatttctcagggaacctagatgagtctatttcaaacttcacacaactgtcttttcttgatatccacaacaacagcctcactggaagtttgcccttctcactttctgatctcagttatttaaactatcttgacctctcaagcaatgacttcaatggccccgccccttgtggtatctgcaatatagttggcctcacatttgccgacttctctggtaatcacattggcatgagcggcttagtggattgtgctgcagaaggcttttgtactggaaagggttttgatcggaaggcacttaattcatctgatagagttcgaagagcagcaatcatttgtgttagtatactcactgttgtcattgtcttagtttttctggtggtttatctgaaacggaggctattgagaagcagacccttggctcttgtacctgtcagcaaggccaaggctaccattgaaccaacctcaagtgatgagctcctagggaagaagtttcgagaacccttgagtatcaatcttgcaacatttgagcatgcacttctgagggtcaccgcagatgatatccagaaagccacggagaatttcagtaaggtgcacattattggggatggtgggtttggcactgtctacagggcagcacttcctgaaggtcggagagtagcgatcaaaaggcttcatggtggccatcagttccaaggtgatcgtgaattcctggccgaaatggagacaattggaaaggtgaaacatcctaaccttgttcctctacttggctactgtgtatgtggtgatgaaaggttcctgatatacgagtacatggaaaatgggagccttgagatgtggctcaggaaccgggctgatgccatcgaaacacttggatggccagaccgcctgaagatatgtattggttctgcccgcggtctttcgttcctgcatcacggttttgtgccccatatcatccaccgtgacatgaagtcaagcaacattctattggacgagaactttgagccaagggtctctgattttggccttgcaaggataatcagtgcatgcgagactcatgtcagcactgacattgctggtacatttggctacatacctccagagtatgccctgacaatgaagtcctctacaaaaggcgacgtctacagctttggcgttgtcatgcttgagctgctcactggacggccacctacagggcaagaggaaggggaagggggtggaaaccttgtaggctgggtgcgatggatgatggcacatggcaaggaaggtgagctgtttgatccttgtttgcctgtctcaagcgtgtggcgggtacagatggcccatgtgctcgccattgcccgagactgcactgtggacgagccatggaagaggccaactatgctggaggtggtgaagggcctcaagatggccgaaacgatagaatgtggacctctggttgtgacagtcaccaaggacatgtaatgctgacggcatcaacgctgatgtatggaactgggtgttcagggaatgttgttcttgtgtcgatataataatgtaggctccttgttgctgtagctgtactggtgactgtaatgagaaactaacgctgctcatgttcaggctgtagttattgatgtaaccttttcatctggacccaagcaagcacttatgatatggcagggatcgtttaagcacaaaagatgcagtgactaggtttagctcttgagattttgcattctactacattttctactttgttgttctactgctcatggtcctccc

SEQ ID NO: 35665 - DNA, 4432 bp, Zea Mays
cagggtttgagaggggcagatgcgccgcggtgcccgcagtagatgccgcggtgtcggttcggtgttgccttgcgttgctcgtgcttgtggcgcttctgctgctgctgagttctcccgcttcttcgcggcctttccccttgtcggatctatattgttatacattgccgctttgattgctgatcttcttctgctgccactacttggatggagaatgccatcaagttaaaggttacaatttgaactgctggcaatggggcctcattgttccttcatcttgatcctactgctatgcttcacccccagctctgctttgactggacataatgatataaatacattgttcaaactgagggacatggtcactgaagggaagggatttctccgtgactggtttgattcagaaaaagccccttgcagttggtcaggtataacttgtgtggaacatgctgtagtggatatagacttgtcatctgtgccaatttatgccccgttcccgttatgtgtcgggtcattccaatcactggctcgtctcaacttcagtggttgtgggttttctggcgagcttccggatgccttggggagcttgcacaatcttgagtaccttgatttgagccataaccagcttacaggggcccttcctgtttcattgtatggactgaagtcattgaaagaagtagtgcttgacaataatttcttttctggtcaattgagccctgctattgcacagcttgagtacctcaagaagttttctgtatcctcaaattctatctctggtgccattcctccagagttgggcagtttgcagaatctggagttcctggaccttcacatgaacgcacttaacgggtcgataccatcagctttgggtaatctgtctcagctcttgcaccttgatgctagccagaataatatctgcggctcgatatttccaggaataactgcaatggcaaacctagttacagttgatctctcttcaaatgctttggtggggccactacctagggagattggtcagctacggaatgctcaactgataatattgggacataatggtttcaatggaagcattccagaagagatcggtgaactaaagctgctggaagagctcgatgtccctggatgcaagctcacaggcatcccttggacagttggtgatcttagaagtttgagaaagcttgatatttcagggaatgatttcaatactgaacttccggcatctattggcaagctgggaaatctgactcgtctatatgcaaggagtgctgggcttactgggaatattccgagagaacttggtaactgcaagaagcttgtctttgttgatctcaatggcaactccttttctggccctatacctggagaacttgcaggtttagaagccattgtcacattagatgtgcaagggaacaatctatctggtcccattccagagtggatccggaattggacgaaccttcgttcaatatatctggcgcagaacatgttcgatggacccctgccagtactgccattgcagcatctagttattttttctgcagaaaccaacatgctatcaggttctattcctgatgagatctgtcaggccaaatcactgcagtcactcttgttgcacaacaacaatctgactgggaatatcatggaggcatttaaagggtgcaagaaccttacggaacttaacctgcaaggaaaccatcttcatggtgagataccacattacttgtctgagctaccactagtaacagtggaattggcccaaaacaacttcacaggaaagctgccagagaaattgtgggaatcatcaactattctggagatcacactcagctacaatcagcttactggccctatacctgaaagcatcggtagactctccagtttgcagaggctacagatcgacagtaactacttagaagggcctattccgcggtcaatcggctctctaaggaatctgacaaatctctctctatggggcaataggctgtctgggaacattccacttgagctcttcaactgcagaaaccttgtcaccttggatctaagttctaacaatttgtctggccacatcccgagtgccatatcacacttgacatttctcaacagcttgaacttgtccaataaccagctgtccagtgctatacctgctgagatctgtgttggatttgggagtgcagctcaccctgactcagagtttatccagcatcatggtttgcttgatctttcatacaacagattgactggtcatataccagcagcgatcaagaattgtgttatggttacagtcctcaacctccaaggaaatatgctaagtggtgccattccaccagagctttcagaactgcctaatgttacatccatctatctttctcataacacattagttggccccatacttccttggtctgtaccgtcggttcaactgcagggcctttttctctctaataaccacttaagtggctccattcctgctgagataggtcaaatacttcccaaaatcgaaaagctagacttatccagtaatgcacttactggaacactacccgactctttactctgcatcaattacttaacctatctggatatcagcaataacagcctctctggacaaatcccattgtcttgtcctaaagaaaaagaggcatcgagctccctgatattgttcaatgggagcagtaaccatttctcagggaacctagatgagtctatttcaaacttcacacaactgtcttttcttgatatccacaacaacagcctcactggaagtttgcccttctcactttctgatctcagttatttaaactatcttgacctctcaagcaatgacttcaatggccccgccccttgtggtatctgcaatatagttggcctcacatttgccgacttctctggtaatcacattggcatgagcggcttagtggattgtgctgcagaaggcttttgtactggaaagggttttgatcggaaggcacttaattcatctgatagagttcgaagagcagcaatcatttgtgttagtatactcactgttgtcattgtcttagtttttctggtggtttatctgaaacggaggctattgagaagcagacccttggctcttgtacctgtcagcaaggccaaggctaccattgaaccaacctcaagtgatgagctcctagggaagaagtttcgagaacccttgagtatcaatcttgcaacatttgagcatgcacttctgagggtcaccgcagatgatatccagaaagccacggagaatttcagtaaggtgcacattattggggatggtgggtttggcactgtctacagggcagcacttcctgaaggtcggagagtagcgatcaaaaggcttcatggtggccatcagttccaaggtgatcgtgaattcctggccgaaatggagacaattggaaaggtgaaacatcctaaccttgttcctctacttggctactgtgtatgtggtgatgaaaggttcctgatatacgagtacatggaaaatgggagccttgagatgtggctcaggaaccgggctgatgccatcgaaacacttggatggccagaccgcctgaagatatgtattggttctgcccgcggtctttcgttcctgcatcacggttttgtgccccatatcatccaccgtgacatgaagtcaagcaacattctattggacgagaactttgagccaagggtctctgattttggccttgcaaggataatcagtgcatgcgagactcatgtcagcactgacattgctggtacatttggctacatacctccagagtatgccctgacaatgaagtcctctacaaaaggcgacgtctacagctttggcgttgtcatgcttgagctgctcactggacggccacctacagggcaagaggaaggggaagggggtggaaaccttgtaggctgggtgcgatggatgatggcacatggcaaggaaggtgagctgtttgatccttgtttgcctgtctcaagcgtgtggcgggtacagatggcccatgtgctcgccattgcccgagactgcactgtggacgagccatggaagaggccaactatgctggaggtggtgaagggcctcaagatggccgaaacgatagaatgtggacctctggttgtgacagtcaccaaggacatgtaatgctgacggcatcaacgctgatgtatggaactgggtgttcagggaatgttgttcttgtgtcgatataataatgtaggctccttgttgctgtagctgtactggtgactgtaatgagaaactaacgctgctcatgttcaggctgtagttattgatgtaaccttttcatctggacccaagcaagcacttatgatatggcagggatcgtttaagcacaaaagatgcagtgactaggtttagctcttgagattttgcattctactacattttctactttgttgttctactgctcatggtcctccc

SEQ ID NO: 35666 - DNA, 4609 bp, Zea Mays
catttcctgctgcccaacacaacaccgcctccctcccatcgtcgcccctcgcgcacggccaccaccagttcgtgcgtgaactccgcgtcccctctcggctctcgccgctcacgcgttcctcgtgcccgcgccacacaccgcgggggcacggcactgccgagaccggcattgtggagcgcccgcgaccccggcgaggatctatattgttatacattgccgctttgattgctgatcttcttctgctgccactacttggatggagaatgccatcaagttaaagatgttgtatggtgcatgtcacgatcacaccaattgaattagaagtatctcatctcttgctgatatgaatggaaagattagaaagaatgttgcataaacgctagcatatggaccgctttataccaggttacaatttgaactgctggcaatggggcctcattgttccttcatcttgatcctactgctatgcttcacccccagctctgctttgactggacataatgatataaatacattgttcaaactgagggacatggtcactgaagggaagggatttctccgtgactggtttgattcagaaaaagccccttgcagttggtcaggtataacttgtgtggaacatgctgtagtggatatagacttgtcatctgtgccaatttatgccccgttcccgttatgtgtcgggtcattccaatcactggctcgtctcaacttcagtggttgtgggttttctggcgagcttccggatgccttggggagcttgcacaatcttgagtaccttgatttgagccataaccagcttacaggggcccttcctgtttcattgtatggactgaagtcattgaaagaagtagtgcttgacaataatttcttttctggtcaattgagccctgctattgcacagcttgagtacctcaagaagttttctgtatcctcaaattctatctctggtgccattcctccagagttgggcagtttgcagaatctggagttcctggaccttcacatgaacgcacttaacgggtcgataccatcagctttgggtaatctgtctcagctcttgcaccttgatgctagccagaataatatctgcggctcgatatttccaggaataactgcaatggcaaacctagttacagttgatctctcttcaaatgctttggtggggccactacctagggagattggtcagctacggaatgctcaactgataatattgggacataatggtttcaatggaagcattccagaagagatcggtgaactaaagctgctggaagagctcgatgtccctggatgcaagctcacaggcatcccttggacagttggtgatcttagaagtttgagaaagcttgatatttcagggaatgatttcaatactgaacttccggcatctattggcaagctgggaaatctgactcgtctatatgcaaggagtgctgggcttactgggaatattccgagagaacttggtaactgcaagaagcttgtctttgttgatctcaatggcaactccttttctggccctatacctggagaacttgcaggtttagaagccattgtcacattagatgtgcaagggaacaatctatctggtcccattccagagtggatccggaattggacgaaccttcgttcaatatatctggcgcagaacatgttcgatggacccctgccagtactgccattgcagcatctagttattttttctgcagaaaccaacatgctatcaggttctattcctgatgagatctgtcaggccaaatcactgcagtcactcttgttgcacaacaacaatctgactgggaatatcatggaggcatttaaagggtgcaagaaccttacggaacttaacctgcaaggaaaccatcttcatggtgagataccacattacttgtctgagctaccactagtaacagtggaattggcccaaaacaacttcacaggaaagctgccagagaaattgtgggaatcatcaactattctggagatcacactcagctacaatcagcttactggccctatacctgaaagcatcggtagactctccagtttgcagaggctacagatcgacagtaactacttagaagggcctattccgcggtcaatcggctctctaaggaatctgacaaatctctctctatggggcaataggctgtctgggaacattccacttgagctcttcaactgcagaaaccttgtcaccttggatctaagttctaacaatttgtctggccacatcccgagtgccatatcacacttgacatttctcaacagcttgaacttgtccaataaccagctgtccagtgctatacctgctgagatctgtgttggatttgggagtgcagctcaccctgactcagagtttatccagcatcatggtttgcttgatctttcatacaacagattgactggtcatataccagcagcgatcaagaattgtgttatggttacagtcctcaacctccaaggaaatatgctaagtggtgccattccaccagagctttcagaactgcctaatgttacatccatctatctttctcataacacattagttggccccatacttccttggtctgtaccgtcggttcaactgcagggcctttttctctctaataaccacttaagtggctccattcctgctgagataggtcaaatacttcccaaaatcgaaaagctagacttatccagtaatgcacttactggaacactacccgactctttactctgcatcaattacttaacctatctggatatcagcaataacagcctctctggacaaatcccattgtcttgtcctaaagaaaaagaggcatcgagctccctgatattgttcaatgggagcagtaaccatttctcagggaacctagatgagtctatttcaaacttcacacaactgtcttttcttgatatccacaacaacagcctcactggaagtttgcccttctcactttctgatctcagttatttaaactatcttgacctctcaagcaatgacttcaatggccccgccccttgtggtatctgcaatatagttggcctcacatttgccgacttctctggtaatcacattggcatgagcggcttagtggattgtgctgcagaaggcttttgtactggaaagggttttgatcggaaggcacttaattcatctgatagagttcgaagagcagcaatcatttgtgttagtatactcactgttgtcattgtcttagtttttctggtggtttatctgaaacggaggctattgagaagcagacccttggctcttgtacctgtcagcaaggccaaggctaccattgaaccaacctcaagtgatgagctcctagggaagaagtttcgagaacccttgagtatcaatcttgcaacatttgagcatgcacttctgagggtcaccgcagatgatatccagaaagccacggagaatttcagtaaggtgcacattattggggatggtgggtttggcactgtctacagggcagcacttcctgaaggtcggagagtagcgatcaaaaggcttcatggtggccatcagttccaaggtgatcgtgaattcctggccgaaatggagacaattggaaaggtgaaacatcctaaccttgttcctctacttggctactgtgtatgtggtgatgaaaggttcctgatatacgagtacatggaaaatgggagccttgagatgtggctcaggaaccgggctgatgccatcgaaacacttggatggccagaccgcctgaagatatgtattggttctgcccgcggtctttcgttcctgcatcacggttttgtgccccatatcatccaccgtgacatgaagtcaagcaacattctattggacgagaactttgagccaagggtctctgattttggccttgcaaggataatcagtgcatgcgagactcatgtcagcactgacattgctggtacatttggctacatacctccagagtatgccctgacaatgaagtcctctacaaaaggcgacgtctacagctttggcgttgtcatgcttgagctgctcactggacggccacctacagggcaagaggaaggggaagggggtggaaaccttgtaggctgggtgcgatggatgatggcacatggcaaggaaggtgagctgtttgatccttgtttgcctgtctcaagcgtgtggcgggtacagatggcccatgtgctcgccattgcccgagactgcactgtggacgagccatggaagaggccaactatgctggaggtggtgaagggcctcaagatggccgaaacgatagaatgtggacctctggttgtgacagtcaccaaggacatgtaatgctgacggcatcaacgctgatgtatggaactgggtgttcagggaatgttgttcttgtgtcgatataataatgtaggctccttgttgctgtagctgtactggtgactgtaatgagaaactaacgctgctcatgttcaggctgtagttattgatgtaaccttttcatctggacccaagcaagcacttatgatatggcagggatcgtttaagcacaaaagatgcagtgactaggtttagctcttgagattttgcattctactacattttctactttgttgttctactgctcatggtcctccc

SEQ ID NO: 35667 - DNA, 4562 bp, Zea Mays
ctcgaaggcaggagcccccacggaaaggcaaccgagaagccgagaaaacctcaaaaccccgccgcggccgtttcctcccatttcctgctgcccaacacaacaccgcctccctcccatcgtcgcccctcgcgcacggccaccaccagttcgtgcgtgaactccgcgtcccctctcggctctcgccgctcacgcgttcctcgtgcccgcgccacacaccgcgggggcacggcactgccgagaccggcattgtggagcgcccgcgaccccggcgaggatctatattgttatacattgccgctttgattgctgatcttcttctgctgccactacttggatggagaatgccatcaagttaaaggttacaatttgaactgctggcaatggggcctcattgttccttcatcttgatcctactgctatgcttcacccccagctctgctttgactggacataatgatataaatacattgttcaaactgagggacatggtcactgaagggaagggatttctccgtgactggtttgattcagaaaaagccccttgcagttggtcaggtataacttgtgtggaacatgctgtagtggatatagacttgtcatctgtgccaatttatgccccgttcccgttatgtgtcgggtcattccaatcactggctcgtctcaacttcagtggttgtgggttttctggcgagcttccggatgccttggggagcttgcacaatcttgagtaccttgatttgagccataaccagcttacaggggcccttcctgtttcattgtatggactgaagtcattgaaagaagtagtgcttgacaataatttcttttctggtcaattgagccctgctattgcacagcttgagtacctcaagaagttttctgtatcctcaaattctatctctggtgccattcctccagagttgggcagtttgcagaatctggagttcctggaccttcacatgaacgcacttaacgggtcgataccatcagctttgggtaatctgtctcagctcttgcaccttgatgctagccagaataatatctgcggctcgatatttccaggaataactgcaatggcaaacctagttacagttgatctctcttcaaatgctttggtggggccactacctagggagattggtcagctacggaatgctcaactgataatattgggacataatggtttcaatggaagcattccagaagagatcggtgaactaaagctgctggaagagctcgatgtccctggatgcaagctcacaggcatcccttggacagttggtgatcttagaagtttgagaaagcttgatatttcagggaatgatttcaatactgaacttccggcatctattggcaagctgggaaatctgactcgtctatatgcaaggagtgctgggcttactgggaatattccgagagaacttggtaactgcaagaagcttgtctttgttgatctcaatggcaactccttttctggccctatacctggagaacttgcaggtttagaagccattgtcacattagatgtgcaagggaacaatctatctggtcccattccagagtggatccggaattggacgaaccttcgttcaatatatctggcgcagaacatgttcgatggacccctgccagtactgccattgcagcatctagttattttttctgcagaaaccaacatgctatcaggttctattcctgatgagatctgtcaggccaaatcactgcagtcactcttgttgcacaacaacaatctgactgggaatatcatggaggcatttaaagggtgcaagaaccttacggaacttaacctgcaaggaaaccatcttcatggtgagataccacattacttgtctgagctaccactagtaacagtggaattggcccaaaacaacttcacaggaaagctgccagagaaattgtgggaatcatcaactattctggagatcacactcagctacaatcagcttactggccctatacctgaaagcatcggtagactctccagtttgcagaggctacagatcgacagtaactacttagaagggcctattccgcggtcaatcggctctctaaggaatctgacaaatctctctctatggggcaataggctgtctgggaacattccacttgagctcttcaactgcagaaaccttgtcaccttggatctaagttctaacaatttgtctggccacatcccgagtgccatatcacacttgacatttctcaacagcttgaacttgtccaataaccagctgtccagtgctatacctgctgagatctgtgttggatttgggagtgcagctcaccctgactcagagtttatccagcatcatggtttgcttgatctttcatacaacagattgactggtcatataccagcagcgatcaagaattgtgttatggttacagtcctcaacctccaaggaaatatgctaagtggtgccattccaccagagctttcagaactgcctaatgttacatccatctatctttctcataacacattagttggccccatacttccttggtctgtaccgtcggttcaactgcagggcctttttctctctaataaccacttaagtggctccattcctgctgagataggtcaaatacttcccaaaatcgaaaagctagacttatccagtaatgcacttactggaacactacccgactctttactctgcatcaattacttaacctatctggatatcagcaataacagcctctctggacaaatcccattgtcttgtcctaaagaaaaagaggcatcgagctccctgatattgttcaatgggagcagtaaccatttctcagggaacctagatgagtctatttcaaacttcacacaactgtcttttcttgatatccacaacaacagcctcactggaagtttgcccttctcactttctgatctcagttatttaaactatcttgacctctcaagcaatgacttcaatggccccgccccttgtggtatctgcaatatagttggcctcacatttgccgacttctctggtaatcacattggcatgagcggcttagtggattgtgctgcagaaggcttttgtactggaaagggttttgatcggaaggcacttaattcatctgatagagttcgaagagcagcaatcatttgtgttagtatactcactgttgtcattgtcttagtttttctggtggtttatctgaaacggaggctattgagaagcagacccttggctcttgtacctgtcagcaaggccaaggctaccattgaaccaacctcaagtgatgagctcctagggaagaagtttcgagaacccttgagtatcaatcttgcaacatttgagcatgcacttctgagggtcaccgcagatgatatccagaaagccacggagaatttcagtaaggtgcacattattggggatggtgggtttggcactgtctacagggcagcacttcctgaaggtcggagagtagcgatcaaaaggcttcatggtggccatcagttccaaggtgatcgtgaattcctggccgaaatggagacaattggaaaggtgaaacatcctaaccttgttcctctacttggctactgtgtatgtggtgatgaaaggttcctgatatacgagtacatggaaaatgggagccttgagatgtggctcaggaaccgggctgatgccatcgaaacacttggatggccagaccgcctgaagatatgtattggttctgcccgcggtctttcgttcctgcatcacggttttgtgccccatatcatccaccgtgacatgaagtcaagcaacattctattggacgagaactttgagccaagggtctctgattttggccttgcaaggataatcagtgcatgcgagactcatgtcagcactgacattgctggtacatttggctacatacctccagagtatgccctgacaatgaagtcctctacaaaaggcgacgtctacagctttggcgttgtcatgcttgagctgctcactggacggccacctacagggcaagaggaaggggaagggggtggaaaccttgtaggctgggtgcgatggatgatggcacatggcaaggaaggtgagctgtttgatccttgtttgcctgtctcaagcgtgtggcgggtacagatggcccatgtgctcgccattgcccgagactgcactgtggacgagccatggaagaggccaactatgctggaggtggtgaagggcctcaagatggccgaaacgatagaatgtggacctctggttgtgacagtcaccaaggacatgtaatgctgacggcatcaacgctgatgtatggaactgggtgttcagggaatgttgttcttgtgtcgatataataatgtaggctccttgttgctgtagctgtactggtgactgtaatgagaaactaacgctgctcatgttcaggctgtagttattgatgtaaccttttcatctggacccaagcaagcacttatgatatggcagggatcgtttaagcacaaaagatgcagtgactaggtttagctcttgagattttgcattctactacattttctactttgttgttctactgctcatggtcctccc

SEQ ID NO: 35668 - DNA, 2090 bp, Zea Mays
cacccacaagcaataagtggttcatgatgaagaaagaaaagtagtagcaatcctgggtaaaagttcaaagtgccctgattttcgcattttgtgtcatctcggatgaactttgctgctcagtcaggaaattatctgaaaaatttttcatcagcagctcgattcttgatcttacaatagttggtattgattatacagagggtgactcgaccctacagggtcagcaacctcactatttgaaaacaagctgcaaaccaagcctagatcatgggagtcccgtgtacctgctgggacatacagggaaaaaagaactggtgattggtgagggcaaggtggttattggcacagacaacctcataaaactctcagccgagggggtgacatggtgtcctgggtctgctggttttgatgcccaagggaacctagctttcatgatctgtgatccaatgaagctggcctcttctcccaccgcaagatcatcctcggcatcctcatcctcatcacattcatggaagaaggatcagccaatgcaatttgggattcccatatctgtagtttgtgattggttatatcagcactggcagggcagcttggacgaggttagcaagccaaagttacctcttgttcggctgatgtccagcaggagtgatcactcaagcacctcgttcactcgtcgtcatgtgttcaagcctgacgatgagaacgatgatgcatccgtttgttcaaagcctaaacatcagcaggtatcaggtagcacagccactgcaaggatttcacatgaagcaaatcctatagttgatctgcgcacaagctgtgagcagggtgttacgactccagaaatatatgaatcgccaaggcgaagttcttgtcaggctcagaagaacgctgctgcaccaattcaactcttggacatcaacttcccacccagggttccaaagactatatttctaccattgcctctgaagcaaatgctttctgatgagaacaatgttgaaacgtcgaagccaaaatatcggtcaaaagacaatggcttcccatcagggctgatatggcaccgcaatattgaggctgagtgtagggaccctccggtagctcttcagcatatggattgcagcagcgagggacagtcgagctcatcacctgctgagataccggagtatggatgccaagaccagtacgatagcgaggaggaaacaatgtactcagctgaaaccatggaaagcaggaacattccaagccccagggagaaacatgtggggaggagccagagctgtgttacctacagcaggtggagctctccaaggacctcatcaatgcagaatggaaccttgcgaaagcagcatacactgatccctgtgcggaagacgcactcgcagaacacgactcttccgcagaggagtcatgactacttaagcccaacagtttcctcagccatgaagaagaggaactccatggaacagcagcaggccacaaagcctcgacggagcaccatacagtcttctccaaaatggatgttttgatggttctatctatatctggttttgaggtggaaacaatgaagaaagcaagtgcctactcggtgaaaactactgctcctatgtttcctactcaaaacttacatgtaagtctgctcccttccctcagttctctacttctctccctgggttcctgtgtgcagaatggcatggataaataaagagaaacaaaaaggaaaagaaaagcaaaaaaatcatcacaaaagattacagatgaaatgtgttgaaggcggcatttgtgaggtgcgatgaggactgttatattcctgccgactctagtgttcagcttacaattttcaactaaacatttttaatatgttttttttggtattttgctattcatccatagccatgatgactgtaatcattttgtttgctactgcttgcggccttatgtaccatgtgtgtcatcctgaattagaccaggaaataggttgagagttggctaccaagtgagtttttttttttcaattgaccgcttgtccgcagtgttggctgtgtgccatactatatagcaatgtaaatagcttttatttgaatgatgcggcagagttcatt

SEQ ID NO: 35669 - DNA, 1136 bp, Zea Mays
gtgattcatgtaatgtgctctaaattaactgcagatttgggaaaagccaggtcacagtcccttgtttggatatgacttctggtaccagcctcgccacaagacgatgatcagttcgtcatggggagcccctgcagcgttcaggacaggtttcgatcttcaacatgtccaggatggcctgtatggaaggcacctgcatgtgtacgactggcctggcggtgagctcaagcagacacttgatctaggtgacactggactccttccccttgaggtgaggtttttacatgatccatcaaaggacactggctatgttggctgtgctttaacaagcaacatggtgagatttttcaagaccgcggatggatcgtggagccatgaggttgctatctctgtgaaaccactgaaggtccgcaactggattctgccggaaatgccaggattgataactgatttcgtcatctctcttgatgaccgttatctctactttgtaaattggcttcatggcgatattaggcagtacaacattgaggatcccgcaaagcctttcttggctggacaagtatgggttggtggtcttcttcagaagggcagtgatgtcgtctatgttactgatgatggtcaggaacagcagtacaatgtgcctcaagtcaagggtcatcgacttagaggtgggccacagatgattcagctgagcttggatggcaagaggatatacgtgacaaactcacttttcagccgatgggatgagcagtttttcggtgatgatcttgtcaagaagggctcccacatgttgcagatcgatgtcgacaccgagaaaggaggcctggctgtcaaccccaacttcttcgtcgattttggcaccgagcctgatggtcctgccctggcccacgagatgagatatcctggtggggactgcacctctgatatatggatctgaggtcaaggattcggcgtaattaacaggctgctggagaatccctgttgttgtatgcactgtaattaacatggtatccgtgcggtgttctgtcttgtactgcgactgttgccagtggaataaggcatggtttcatgagaactctagattaataaaagaagtcctgattctaaattttctgattgtcactgctctggtttcttta

SEQ ID NO: 35670 - DNA, 1205 bp, Zea Mays
gtctctgcatggtatggcacagggatatgcatatgcaaggcatgagcagagtcacagagctgccacacacaagccattgcacctgtctcccagtttatataacctctaacacttgcttccttatgctgtttctctgaatccaaataaagcaccatcccccccattttctatccattgctcacttgaactagagggatggctaatggttgctccacgactaccacaagctccctgctcctcttcttccttctctcttacttgctcatcggtcatgctctctgcagccaaggccacaatggcagaacatcaggtgctgattatgtggtgcaatatctccaccaggaattacctggtaaacatatagttttgcaggagaccgtcaaggtacccatctctctttcagatgtagcgatgtagcgttcttcagggttctaagtttcaaaggcttgcagtacctttttattcttttacacatgtattatgacaggaaaactttggaaggacaaaatgtcaaccacttgcctccaacatccatcactcctctagtattactggaaaaaaactttagaattgaaacaaggaatgaaactaaagttttttttctaaaaaaaagtggaatacaaccttgcaatagattaacccacaaattgctcagtgaccttaaagcaagtatagttagcgtgatattttcacatgccttgttattagggtctaaacaaaggcatattgccaaagtatgcacggagaatgttgatcggctcaattgcgccaatatgcacatacaacgagtgcagagggtgtcgattcaagtgtactgctgagcaagtcccagtggatgcaaatgaccccatgaacagtgcttaccactacaagtgtgtttgccacaggtgatcttcaatgagtaggaggagcttctatgttattgtgtgtcctggagaatagtagtattttcgcccgtttttggttctccctctccttttctttctattctttgttttctctgttgaaaaaggcttctttgtctcatttctattttacaagaggttagctagtagaggactggagtctggaggagcattttgtactttaaaatgcctagctcaggttatggactagtaattttgttagtataaatggttaccaattttgacatctgaaagtatgaatggccagccaattcaagtgcataaatagtacggttgacc

SEQ ID NO: 35671 - DNA, 970 bp, Zea Mays
gttatcccgtgcgttcgtgcatacgagagggtggagccacctggtgctggtggtctccgcagtccccactgctccccctccatactagtgtctctgcatggtatggcacagggatatgcatatgcaaggcatgagcagagtcacagagctgccacacacaagccattgcacctgtctcccagtttatataacctctaacacttgcttccttatgctgtttctctgaatccaaataaagcaccatcccccccattttctatccattgctcacttgaactagagggatggctaatggttgctccacgactaccacaagctccctgctcctcttcttccttctctcttacttgctcatcggtcatgctctctgcagccaaggccacaatggcagaacatcaggtgctgattatgtggtgcaatatctccaccaggaattacctggtaaacatatagttttgcaggagaccgtcaagggtctaaacaaaggcatattgccaaagtatgcacggagaatgttgatcggctcaattgcgccaatatgcacatacaacgagtgcagagggtgtcgattcaagtgtactgctgagcaagtcccagtggatgcaaatgaccccatgaacagtgcttaccactacaagtgtgtttgccacaggtgatcttcaatgagtaggaggagcttctatgttattgtgtgtcctggagaatagtagtattttcgcccgtttttggttctccctctccttttctttctattctttgttttctctgttgaaaaaggcttctttgtctcatttctattttacaagaggttagctagtagaggactggagtctggaggagcattttgtactttaaaatgcctagctcaggttatggactagtaattttgttagtataaatggttaccaattttgacatctgaaagtatgaatggccagccaattcaagtgcataaatagtacggttgacc

SEQ ID NO: 35672 - DNA, 1418 bp, Zea Mays
ctcaatggtattgtccgagctctaacaatctcttatttgtttcagtcactcaacaagaggcgaacacgtctcacctcactgtagactctagttcggttatttctgtcccaagtcaattggataggattgaaaaatattatgatgttcatttttttccaaatccatgtggattgagaggaaataaatccacaactagtcaaaatttaccttacgccttgatcggttagctctcaatccatgtggattgagtgagattagatgagtttgaatcctaaacaagtcaaacttcttctcaatttttttcaatctcatccaatccatatgtattggaaataaccgaacaaggccttaatacaccccaatacccctcaatccacatggtttaagtacaaaacgaacaagtccaaaagatccacatggtttaagtacaaaacgaacaagtccaaaagattttgacttgtttgaaatttaaacccactcaattccaaccaattcacatggattgagaggaaagcgaacaagcccttaatccttgttcgattaggagtagattgaaggagattggagcggattaaatctcttgctattcaaaattaaatagaaaagaattcaatctcttaaatccccctctaatcaagccctcagttgggaatatttccctgtttcttgtgtattcacgactctctgccccgtggaatatgacatgctgaaaagctcccgcgcatgctacttgcagctttcagtaaagaaactgggtataaaggttgtgccaacattcaagatcattgaggattgaatgatgtcaaggaggtcactggtcccaagatcgatgaattagagctcgtgccatcgagagagtgaggctaggatgagaaatgacctgaaaaaaaaatgtgcacaaattagtatgctatttatgaatgaggaactcccttctatacaagtggatactcagcatgcagaatagagctattctagttgtaaataaccatttcatgcagtgaatgtgaatatgctcatactttatcagtaaatcaagaccaatgtacactaattcatatggagtgattgttctaaataatcctttactacttcatagcaattcctattactaaatgttcagggaatcatatatttgaatctcttgctataacacctattctatatgtaagaactttattgcaacctacctaggttcattgggagacattgtacacttactataggaaatcaccttgaccagtgcctatacataggaccttagtggcaaactgatacgaagctcctctgctttgctgactgtcaaatagctatgttttcagccttcctagcttccaccatctccagaaagtggtgtttctgctcatcctcagtccatgatagacatcttagcatgctctctctgtcgatcctcaaac

SEQ ID NO: 35673 - DNA, 2771 bp, Zea Mays
ctctatttagaaaaaaaacagtatttttttgttttcgtgagcacggccaggcaccagcgaccgaccgcgacgacgcaacagcagggcatgcagaattgcagattgcagaggcaggaactcaaaccggtcggactccacgacgagtcgacgacgcacacaaaaaaaaaacagcaggcgaggcgggatttagaagctgcgcagcgcgcatccctcccccaatcccgacccgacccgaccccgtccccgtcgccagatctcgcgccccctccccggggctcgatcggatcagcggcggccggtgatacggggacggggagatctcgccgaggtttgggccgggccgggccgggctggtgggagcaggggagccatggcgtcggcgcaggcgccgtcctccgccgccgcgccgtcgcgcaaggaccatctcgaggccgggaagaagcggctcgagcagttccgcaagaaaaaagcggcgaagaaggccaatgcagctggtgcagagcaggcaaaagtgcctgctcctgatgtagagccaaaccaagcgagcacgtcttcggtgccatgggctgtatatgagaatggcccagagagtgcttccagcggtgcagaattcctgtcaaatgctccggtcaatgtatatacttctgttggtgttagtagtgttagaccccagcaagatgctgttactgatggaggaagtaagttctatgggaacttaagcttctctgatcttgttaatggtcatcatgagaactggagaggcgatgaagcccgtaaaagggatgagcacagccctgacaaggatgtgcaatcaacatctaaattaagtgcctttgggaacagcagtttaactttaccttctactgacaacatgccaagttggggaagaatttctttatcaagtcaagtacatgataccaagcaatctagttcatattcatccagcaccctttttggaaagtctgaaaatgcttactctcaggactactccacaaagagtgatacctctagtcagttgagagatacctccaaagactcttcccaagtggagcaatctctgtatgccagcactcgggattatggcaatgccttcaatagttcaaggactattgttactgtagagcatgatacaaatgttggaataactcggacatctgcagattccgcacctggtgttaattttgaaagacaggatccttttctgtcatctggttatccaactacatacactcgttcaaggccatcgtttcttgattcaattggagtacaaagagtccctccaacaactcaagcctcatatagggagcctgcaaaggctaatcaactatcccacaattcgaattatcagagttcatttgtgaagcaatcaaatcaacaacccacttcaagtaatgctgcagatatttcttttgcatcagaaagtcaggaatatagtcatgaaaaggggtcatatggcagctccaaccatcctgatttctcacttcctaaagaagaaagaagtatacaacatggtaaacaaacattccaaaattttgcaactcatgggaaagatgacgattttgcaacattagagcagctcattgaagatttaacaaaagagaagttttccttacaacgatctcttcagaaatctcaagagctagcagaaactttggccacagataactctgcactaactgacaagttcaaccaacaggcacatgtaatcagccagttgacatctgacatggagagattgcaggaagaaattcaagctcaattgctggctctggagtctgtcaggaccgagtatgctaatgcacaactagaatgcagtgctgcagatgagagggcaaaagtacttgcagctgaagtcattctactagaagataaggctttgagactgagatcaagtgagctaaaacttgaaaaggaagttgaaggtttgcattctgagatttctgcttacaggcgcaaagtttctagtctagaaaaggagcgccagcatcttcaatccactgttgaagctcttcaagaagaaaagaagctcctatattctaaattgaggaacattcctgtgaatgagagggcaactactgtagagaaaccttcagttgataaaaaagatgcatcaaccgtgacagaagatttagatactggggaaatcagctcttcagagacactgaccagcactgttgacatattggaagacgctggaacatctgttttgcgttccaacattgtgtctgattttccttcctcggaacaggtctcatctagcattccagatgatcagcttagaatgattgacaacatcaattctttgatgtcagagttagcagtggagagagaagaactgctgcgagcactgagaattgagtcatccaactgctccaagctgaaggaattgaacaaggacctaacacaaaagctggaggttcagacacagaggcttgaactattgacttctcaaaggatggctaacgagaatgccctggcgaaaccaattgacacacgccccatcaacgaggcaacaatgtatgcggatgaaggagacgagacttttggtggcgcattcagcatcatgtaatcaagtatgcactttgcgcatgttccagagccaccaccaatctcgtatatctgatcagtacgagaatccaattcataagcaaaaatggatgaagcatactcttagatattcatgaaatctgaggaaagcaaatccggaacttcatatgtggggttgaagagtagcatgatgtgacaagaaatcttgagaccacaccttcaat

SEQ ID NO: 35674 - DNA, 3316 bp, Zea Mays
cgaccgaccgcgacgacgcaacagcagggcatgcagaattgcagattgcagaggcaggaactcaaaccggtcggactccacgacgagtcgacgacgcacacaaaaaaaaaacagcaggcgaggcgggatttagaagctgcgcagcgcgcatccctcccccaatcccgacccgacccgaccccgtccccgtcgccagatctcgcgccccctccccggggctcgatcggatcagcggcggccggtgatacggggacggggagatctcgccgaggtttgggccgggccgggccgggctggtgggagcaggggagccatggcgtcggcgcaggcgccgtcctccgccgccgcgccgtcgcgcaaggaccatctcgaggccgggaagaagcggctcgagcagttccgcaagaaaaaagcggcgaagaaggccaatgcagctggtgcagagcaggcaaaagtgcctgctcctgatgtagagccaaaccaagcgagcacgtcttcggtgccatgggctgtatatgagaatggcccagagagtgcttccagcggtgcagaattcctgtcaaatgctccggtcaatgtatatacttctgttggtgttagtagtgttagaccccagcaagatgctgttactgatggaggaagtaagttctatgggaacttaagcttctctgatcttgttaatggtcatcatgagaactggagaggcgatgaagcccgtaaaagggatgagcacagccctgacaaggatgtgcaatcaacatctaaattaagtgcctttgggaacagcagtttaactttaccttctactgacaacatgccaagttggggaagaatttctttatcaagtcaagtacatgataccaagcaatctagttcatattcatccagcaccctttttggaaagtctgaaaatgcttactctcaggactactccacaaagagtgatacctctagtcagttgagagatacctccaaagactcttcccaagtggagcaatctctgtatgccagcactcgggattatggcaatgccttcaatagttcaaggactattgttactgtagagcatgatacaaatgttggaataactcggacatctgcagattccgcacctggtgttaattttgaaagacaggatccttttctgtcatctggttatccaactacatacactcgttcaaggccatcgtttcttgattcaattggagtacaaagagtccctccaacaactcaagcctcatatagggagcctgcaaaggctaatcaactatcccacaattcgaattatcagagttcatttgtgaagcaatcaaatcaacaacccacttcaagtaatgctgcagatatttcttttgcatcagaaagtcaggaatatagtcatgaaaaggggtcatatggcagctccaaccatcctgatttctcacttcctaaagaagaaagaagtatacaacatggtaaacaaacattccaaaattttgcaactcatgggaaagatgacgattttgcaacattagagcagctcattgaagatttaacaaaagagaagttttccttacaacgatctcttcagaaatctcaagagctagcagaaactttggccacagataactctgcactaactgacaagttcaaccaacaggcacatgtaatcagccagttgacatctgacatggagagattgcaggaagaaattcaagctcaattgctggctctggagtctgtcaggaccgagtatgctaatgcacaactagaatgcagtgctgcagatgagagggcaaaagtacttgcagctgaagtcattctactagaagataaggctttgagactgagatcaagtgagctaaaacttgaaaaggaagttgaaggtttgcattctgagatttctgcttacaggcgcaaagtttctagtctagaaaaggagcgccagcatcttcaatccactgttgaagctcttcaagaagaaaagaagctcctatattctaaattgaggaacattcctgtgaatgagagggcaactactgtagagaaaccttcagttgataaaaaagatgcatcaaccgtgacagaagatttagatactggggaaatcagctcttcagagacactgaccagcactgttgacatattggaagacgctggaacatctgttttgcgttccaacattgtgtctgattttccttcctcggaacaggtctcatctagcattccagatgatcagcttagaatgattgacaacatcaattctttgatgtcagagttagcagtggagagagaagaactgctgcgagcactgagaattgagtcatccaactgctccaagctgaaggaattgaacaaggacctaacacaaaagctggaggttcagacacagaggcttgaactattgacttctcaaaggatggctaacgagaatgccctggcgaaaccaattgacacacgccccatcaacgaggcaacaatgtatgcggatgaaggagacgaggtaagtgtccttcaccaagtatttagttggaatttggtagttgatcctaccacataatccttgatgttaactttttgtgctgtcatgttgtgttcccagagtatggttccagtgttttagcttgaataagagctagtttggaaactcaaataatttccctatcaatcccctttaatcccggagaggatttgagtttccaaactagccctaagggcttgtttgggagcaaggaccatagaagattggagaggctaaaattctcttgctatttaattttgaatagcaaggaaattttagcccttacaatcaatctttgctcccaaaaagccctaagagttatccgaactttacatgtgcacgttaagttcatacccccctgaaaacgttatttgtagacgtttgacacggaatatggctcaggttgttgaacgggtgcttggctggataatgaagctcttcccaggtgggccaaagcggcgaaccagcaagcttctgtaatgaaaatagagctcctagtataccagatatttcttccatttagggtgtgtttgatgaaagggggttgcgctagcagcacaaggtatttagttcaaatttgaactaaatcttaactaatctgttccaaatccccgacatccaaacatgccttttatatatatacattttttgtttgcccggttttgctgatagcatggtgagaagctgtatattggagccattcgatgtaaccattcttttttttgttagaagataatgtaattccctggagtatggggcggcagctgtattggcaacgaaaagattaatcgcaaagaatatacccttttgtatcca

SEQ ID NO: 35675 - DNA, 1853 bp, Zea Mays
gacaatataaaagcctacagatgcagcccaacatgagccaccagcaaataaggaaaaacttatattatataagtattgcactagaagcattagcaggtattgtttcactggcagatgcagcggttgacccatccatgatgggagtggttaaaaatgacgtcgtgaagctgtttgacaccatcaagagctacaatgatgggaccttctactttgatgaaaagcatgttgatgctactgaatacaagggccctataatcacatctgcttcagtggtgcggggtgtcacctcttttgcagctgttgtttctggaaaattgaatatccctgccgagaaaatacttggcctggcaaaattcttccttggtattgggctcccaggtagcgcaaaggattgctttaatcagattgagtctttgtcattcttggagaacaatagggtcttcgttccgttgatactatcactttcttccaaagtattttcattgacttcgaaagatcagctcaaggttgaagttacatcagtttttggatctgctgcaccttcactcaaagtgaatcttgtgcaagtgttgggatctgactctaaagtcatcaccagtgagaacaaggaacttcaatacgaccttgacaacaatgtccattacttggacattgctccattgaaaattgatgttgggaaatactcgatagtttttgagatttcacttcaggaaccagagcaggagactgtttatgctactggagggagaaacactgaaagtgtaattgtcacaggactgatcaaagttgacaaggcagaaataggaatctctgacaatgatgctggggccgtggagtctgtccaaaagttagatcttctgaaagatacaaaagtgtctctttctgcaaaccatctgcagaaactgtgtttatcttttcaactaaccacaccgcttgggcacacatttaaacctcaccaggtgttcttgaaattgaggcatgagagtaaggttgaacacttattcgtggtacctggctctgcaaggcagttcaaaattgttcttgacttcctaggtttggtggagaaattttactacctttctggaagatatgaccttgagcttaccgttggtgatgctgtaatggaaaattcatttctacgacctcttggccatttggagttggacctgccagatgccccagaaaaagccccacgtcctcctgcacaagctgttgacccattctcaaaatttgggccaaaggcagagatatcacatatattccgcgcaccagagaagaggccacccaaggagctctcgctagcgttcacgggtctcacgcttctgccgtttattggattcttgatagggctcgttcgtcttggagtgaacttgaagaacttcccgtccttgccaggaccggccgcatttgcctcacttttccatgctgggataggagcagtcctgatgctctacgttctcttctggatcaagttggaccttttcacaactctcaagtacctcggcttcctcggcatcttccttgtgtttgtgggccatagggctctatcctacctttcctcggtgtcgacaaaacagaagacggcatgagtggacagagttttttccgaccatccatttcttgagggggggccattgcaggcccttgggtgtcttatgagggagggctcggtttatttcagttggctttgcagaatactgataactagaaaaagtagtaggacctcaccttcgtgtattatgatgatgcacatacaattttctgagtagaatggatgttgaatcatagaactaatgaataatatgaacactcgccttcgccccaagtgctagtttggaaacttaggatgtgtt

SEQ ID NO: 35676 - DNA, 2714 bp, Zea Mays
agtcgtccccttctaacctccagatctggccactcccacatgccccagtctcctaaaccctacacatctctctcggccacggtaattgccatcgccatggccgggaggcgcccggcaccggtggccatcctccttctcctcgccgcggcattcgcccccatctcctccgccgttcgcccagtctccgacgcgcacagatccgctgccgtggagcttttcgccccctccgctgacggatccttcggcgatttggagagtacgtatgaggcggtgaggactttccagatactcgggctggagaactataagagtctgtctgggaaggcgtgcaagtttgccgcggagaacctggcttcccccggttccaccacgaaagatctgttccatgctgtccggatcagtggcgcgcttggatgcgctgttgatgccggcgtgtacgatggtgttgtggcgaggctcaaggcagtgattcaggatactaattccctgttggaattatactatcctgtgggaggtttgcttggcatcaaggaacaaggccataatgttgttctgtctgatgcagaaggtacattccatgccactaaggcacttagccaaagtgacgggagatggcgttatgacactgacagtgctgagtctagcacatttgctgctggtattgcactagaagcattagcaggtattgtttcactggcagatgcagcggttgacccatccatgatgggagtggttaaaaatgacgtcgtgaagctgtttgacaccatcaagagctacaatgatgggaccttctactttgatgaaaagcatgttgatgctactgaatacaagggccctataatcacatctgcttcagtggtgcggggtgtcacctcttttgcagctgttgtttctggaaaattgaatatccctgccgagaaaatacttggcctggcaaaattcttccttggtattgggctcccaggtagcgcaaaggattgctttaatcagattgagtctttgtcattcttggagaacaatagggtcttcgttccgttgatactatcactttcttccaaagtattttcattgacttcgaaagatcagctcaaggttgaagttacatcagtttttggatctgctgcaccttcactcaaagtgaatcttgtgcaagtgttgggatctgactctaaagtcatcaccagtgagaacaaggaacttcaatacgaccttgacaacaatgtccattacttggacattgctccattgaaaattgatgttgggaaatactcgatagtttttgagatttcacttcaggaaccagagcaggagactgtttatgctactggagggagaaacactgaaagtgtaattgtcacaggactgatcaaagttgacaaggcagaaataggaatctctgacaatgatgctggggccgtggagtctgtccaaaagttagatcttctgaaagatacaaaagtgtctctttctgcaaaccatctgcagaaactgtgtttatcttttcaactaaccacaccgcttgggcacacatttaaacctcaccaggtgttcttgaaattgaggcatgagagtaaggttgaacacttattcgtggtacctggctctgcaaggcagttcaaaattgttcttgtgagtatctctacactggaattggcttcgttagttctttggatgctcataattcattgtggcaatgtagccaatactctagaccaggcactgaactatcttgagaagttgcacctatataccaacaaagtttttgaacctggaaggtaatatttaggcaatgaagcctgtattcgagtttttactctatagtcatgcttatgggaagcagcactgcgggtatgtaggtggcaactgacaaattgaggtttaaaacatcacccagttgcattttggacttcctaggtttggtggagaaattttactacctttctggaagatatgaccttgagcttaccgttggtgatgctgtaatggaaaattcatttctacgacctcttggccatttggagttggacctgccagatgccccagaaaaagccccacgtcctcctgcacaagctgttgacccattctcaaaatttgggccaaaggcagagatatcacatatattccgcgcaccagagaagaggccacccaaggagctctcgctagcgttcacgggtctcacgcttctgccgtttattggattcttgatagggctcgttcgtcttggagtgaacttgaagaacttcccgtccttgccaggaccggccgcatttgcctcacttttccatgctgggataggagcagtcctgatgctctacgttctcttctggatcaagttggaccttttcacaactctcaagtacctcggcttcctcggcatcttccttgtgtttgtgggccatagggctctatcctacctttcctcggtgtcgacaaaacagaagacggcatgagtggacagagttttttccgaccatccatttcttgagggggggccattgcaggcccttgggtgtcttatgagggagggctcggtttatttcagttggctttgcagaatactgataactagaaaaagtagtaggacctcaccttcgtgtattatgatgatgcacatacaattttctgagtagaatggatgttgaatcatagaactaatgaataatatgaacactcgccttcgccccaagtgctagtttggaaacttaggatgtgtt

SEQ ID NO: 35677 - DNA, 2709 bp, Zea Mays
atttatagtcgtccccttctaacctccagatctggccactcccacatgccccagtctcctaaaccctacacatctctctcggccacggtaattgccatcgccatggccgggaggcgcccggcaccggtggccatcctccttctcctcgccgcggcattcgcccccatctcctccgccgttcgcccagtctccgacgcgcacagatccgctgccgtggagcttttcgccccctccgctgacggatccttcggcgatttggagagtacgtatgaggcggtgaggactttccagatactcgggctggagaactataagagtctgtctgggaaggcgtgcaagtttgccgcggagaacctggcttcccccggttccaccacgaaagatctgttccatgctgtccggatcagtggcgcgcttggatgcgctgttgatgccggcgtgtacgatggtgttgtggcgaggctcaaggcagtgattcaggatactaattccctgttggaattatactatcctgtgggaggtttgcttggcatcaaggaacaaggccataatgttgttctgtctgatgcagaaggtacattccatgccactaaggcacttagccaaagtgacgggagatggcgttatgacactgacagtgctgagtctagcacatttgctgctggtattgcactagaagcattagcaggtattgtttcactggcagatgcagcggttgacccatccatgatgggagtggttaaaaatgacgtcgtgaagctgtttgacaccatcaagagctacaatgatgggaccttctactttgatgaaaagcatgttgatgctactgaatacaagggccctataatcacatctgcttcagtggtgcggggtgtcacctcttttgcagctgttgtttctggaaaattgaatatccctgccgagaaaatacttggcctggcaaaattcttccttggtattgggctcccaggtagcgcaaaggattgctttaatcagattgagtctttgtcattcttggagaacaatagggtcttcgttccgttgatactatcactttcttccaaagtattttcattgacttcgaaagatcagctcaaggttgaagttacatcagtttttggatctgctgcaccttcactcaaagtgaatcttgtgcaagtgttgggatctgactctaaagtcatcaccagaacttcaatacgaccttgacaacaatgtccattacttggacattgctccattgaaaattgatgttgggaaatactcgatagtttttgagatttcacttcaggaaccagagcaggagactgtttatgctactggagggagaaacactgaaagtgtaattgtcacaggactgatcaaagttgacaaggcagaaataggaatctctgacaatgatgctggggccgtggagtctgtccaaaagttagatcttctgaaagatacaaaagtgtctctttctgcaaaccatctgcagaaactgtgtttatcttttcaactaaccacaccgcttgggcacacatttaaacctcaccaggtgttcttgaaattgaggcatgagagtaaggttgaacacttattcgtggtacctggctctgcaaggcagttcaaaattgttcttgtgagtatctctacactggaattggcttcgttagttctttggatgctcataattcattgtggcaatgtagccaatactctagaccaggcactgaactatcttgagaagttgcacctatataccaacaaagtttttgaacctggaaggtaatatttaggcaatgaagcctgtattcgagtttttactctatagtcatgcttatgggaagcagcactgcgggtatgtaggtggcaactgacaaattgaggtttaaaacatcacccagttgcattttggacttcctaggtttggtggagaaattttactacctttctggaagatatgaccttgagcttaccgttggtgatgctgtaatggaaaattcatttctacgacctcttggccatttggagttggacctgccagatgccccagaaaaagccccacgtcctcctgcacaagctgttgacccattctcaaaatttgggccaaaggcagagatatcacatatattccgcgcaccagagaagaggccacccaaggagctctcgctagcgttcacgggtctcacgcttctgccgtttattggattcttgatagggctcgttcgtcttggagtgaacttgaagaacttcccgtccttgccaggaccggccgcatttgcctcacttttccatgctgggataggagcagtcctgatgctctacgttctcttctggatcaagttggaccttttcacaactctcaagtacctcggcttcctcggcatcttccttgtgtttgtgggccatagggctctatcctacctttcctcggtgtcgacaaaacagaagacggcatgagtggacagagttttttccgaccatccatttcttgagggggggccattgcaggcccttgggtgtcttatgagggagggctcggtttatttcagttggctttgcagaatactgataactagaaaaagtagtaggacctcaccttcgtgtattatgatgatgcacatacaattttctgagtagaatggatgttgaatcatagaactaatgaataatatgaacactcgccttcgccccaagtgctagtttggaaacttaggatgtgtt

SEQ ID NO: 35678 - DNA, 1306 bp, Zea Mays
ctgaagtgtgaagaggacttttggtgtaaatattaccctgcggcccctacttaatactgattagaattggtcataccacgtagcagctgaagtgcttgttcagcatgatgagtgatcttccttctgtcttagaagcattcgtggacaggaaacacaataaagataggtctggggttgatagcagcggcaagtccagacactcatcaaatgtgcccacatgaatctttccaacaagaggaaaagatggccatgccaagagttccagggcagcacctcctgccgccaatgagtatgacgaagacgaggaggagcacacgaagaccttttgtggaagctatggcgacctttacattggcagcaactaaataattgtatcatgtttcgtttaccatctctattgtcaagattaaagctctggatatcttttcaagaccatgctgagtgtacagtgtttcagtttctatttatccactgaaatctatcttctggaggaccgaggccattcaagtagagggtgcagggacagactcctgttccccgtggtactcaaggcctgtgattgcgtgcatggctgcagggaggactcttggttcccggcgaatagagtaactttttgagtaccagtgatgtaaagggacacaagctctagcaatgtttctgcttctcatgtaggccgtgtaagacgtcgcaaacatccaactaaggctaccacagatgggaatagagctaatggacaaccattgcttgtcaatgatcagaacaaatataaatcaatgcttacccatacgtattctacagtatggatgattagaggctttgcctttattatttatatgggtcatctatatatctgggctatggtggttgtgattcaaatatacatggcaagagaacttttcaacttactcagaaaatccagtgaagagaaacaactgccagggttcagggtcctgaattgatctagatgccaaccattaggcatgattcgattctagaagatcctgatggtgacacctcacaaccacaacacatctcgaactactaccatgtcaatctcaagaatgtgatgataacatgaccattcaaattggtgaagtacttcagatgcaaattgaggttcagagatagttaaatgaacaacttgagaaatggtcatttgttaaatctgagcataaaagatcggaaatccaagggcttatggaattggtattgcaaagatcttcatgtgattcggatccttataaggaaagataatttatatacatgagggagccacctattgattcttttgatgtctctacatgtg

SEQ ID NO: 35679 - DNA, 1390 bp, Zea Mays
gattcttttgacagtcgtgacactttgttccattgtccttggttgctctgtgttaaatgagctggagaacgtgatcgacaaccgatagagttctgaagtgtgaagaggacttttggtgtaaatattaccctgcggcccctacttaatactgattagaattggtcataccacgtagcagctgaagtgcttgttcagcatgatgagtgatcttccttctgtcttagaagcattcgtggacaggaaacacaataaagataggtctggggttgatagcagcggcaagtccagacactcatcaaatgtgcccacatgaatctttccaacaagaggaaaagatggccatgccaagagttccagggcagcacctcctgccgccaatgagtatgacgaagacgaggaggagcacacgaagaccttttgtggaagctatggcgacctttacattggcagcaactaaataattgtatcatgtttcgtttaccatctctattgtcaagattaaagctctggatatcttttcaagaccatgctgagtgtacagtttctatttatccactgaaatctatcttctggaggaccgaggccattcaagtagagggtgcagggacagactcctgttccccgtggtactcaaggcctgtgattgcgtgcatggctgcagggaggactcttggttcccggcgaatagagtaactttttgagtaccagtgatgtaaagggacacaagctctagcaatgtttctgcttctcatgtaggccgtgtaagacgtcgcaaacatccaactaaggctaccacagatgggaatagagctaatggacaaccattgcttgtcaatgatcagaacaaatataaatcaatgcttacccatacgtattctacagtatggatgattagaggctttgcctttattatttatatgggtcatctatatatctgggctatggtggttgtgattcaaatatacatggcaagagaacttttcaacttactcagaaaatccagtgaagagaaacaactgccagggttcagggtcctgaattgatctagatgccaaccattaggcatgattcgattctagaagatcctgatggtgacacctcacaaccacaacacatctcgaactactaccatgtcaatctcaagaatgtgatgataacatgaccattcaaattggtgaagtacttcagatgcaaattgaggttcagagatagttaaatgaacaacttgagaaatggtcatttgttaaatctgagcataaaagatcggaaatccaagggcttatggaattggtattgcaaagatcttcatgtgattcggatccttataaggaaagataatttatatacatgagggagccacctattgattcttttgatgtctctacatgtg

SEQ ID NO: 35680 - DNA, 1775 bp, Zea Mays
atggctcgacagctcgtctctgtcgtctatggcggcggcggcgcagcagcagcagcgggagaaggcggcgtcgcaggtgtggcaggcggtggtggggtggatcggcttccttgttcaggttctgcttcagatccttcggggcacgccgtcctgcgcccagctctttccttcgtcggcgtccggtacccgctcctctccgggcccacggcctcgaacccgtcgtcggaggtggccttcatgccgctccgctccgaggtcccagttgacgcggcacctgccccgacacctgtgcctgagcccgtgggccgcctcacgggcaccggtgttgtactacgttctcctgacgttgcaggacagcgtgcacaaggtcttctacgccatcgtcgaggccgctgcagttcgcgcagacaacaaccatcttggaggtatctaattccaatattgtatgtctcggttgaacttgtgaaggcgttgcaagcacatatcattaactgggatattcatatgtttgatgaggagatcggcaataccactcaggttgtcgcgctcatcgcctcgagcacccccggcgacgaggaggctgctgcgacgaccgcgccacgttcctggttggcaaggtacaaacttgtcatcgtggctagggacaaaacgggtgaaactgagtttgctatgtttggtcggataacacagcatgtcagcatctcgtgcggaaaatggctgcagcgaactctaaggtgggtggtggaggaggaggagagcgagggaggacgacgaggctgcctggcggaggcacgaggggaaggtgagcgtcacctgcaaggccacaatcttggtgagactgccaccacgagcgtgccccacgaccgccaccaggatctcaagctcgccatcgatgacttcgacgaggagttgatcgaccctgagctacgcttctcgttccagcgcaacaacaagcctcttcggcatcgccatcagacttcctgtcatgctgctccaagataggcgtgcctgattttccgacagacttggtacagatttgggagggaggcatgtgcaggtggagctacagtggcagttcagatccgctgtcatgagctgctactgatcctgatgcgtgaagacttgcgacaaatgacggcaaaaaagatatagcaggagtgtggagaataatggcacttggggattcaggtttgtggagtggacttgactgacaaagtagtggacataattttccatgtatttgatgctaactgtgatggtaacctaagctcagaggagttcttgaggaagtgcttgttcagcatgatgagtgatcttccttctgtcttagaagcattcgtggacaggaaacacaataaagataggtctggggttgatagcagcggcaagtccagacactcatcaaatagaggaaaagatggccatgccaagagttccagggcagcacctcctgccgccaatgagtatgacgaagacgaggaggagcacacgaagaccttttgtggaagctatggcgacctttacattggcagcaactaaataattgtatcatgtttcgtttaccatctctattgtcaagattaaagctctggatatcttttcaagaccatgctgagtgtacagtgtttcagtttctatttatccactgaaatctatcttctggaggaccgaggccattcaagtagagtgtgttagccaattttatagtaggttaccagccagcagcaccactcacaaaagaaccccgtgggccagtcatcctttgttgcttgagg

SEQ ID NO: 35681 - DNA, 2516 bp, Zea Mays
aggcgatcagggctaacgacgcgacgcgatcagtacgatcagataactgatcgttcgattagtcggcaattaaccacaactaatcgtccgatcaacgcatggacgttgaaattttggcccagtagcatttcggtccagcggctcagcccatattccacttatcccaattcccacgtgaacacaggcagctgcaacgcgtgaaatacgggcacaacagtaccacgcgacgttaaatacgggcacaactcgtgaacgacggcggcgcctagcggtgacatcgtcccctcgactcctcctccatccccgacgcggcggcgccagcctgcagattagcttattaccaccatgggtaaaagaaagcggtcgtcatgtcaacgagataaccataatgattctctagccagcaaaataatgagaactagaatcccagatcttcctgaggacatttggtctcatgtacattccctaatgccaatgcgtgatgctggccgtgctgcttgcctatctcgtgcctttttacgttcctggagacgtcatcctaatcttatctttaataaggatacgattggcatgaaaaaaaattcatatggagagaatttccaccacaaaattagccgcattctcaggaatcactctggcattagtttgaaaacattcaagcttgactacagtggcatgtgtgggttcgatggaactagttatcttgacagttggcttcaggctgctcttaatccagggattgaagaagtcaccctctggttgttccatacaaggagaatatatgaattcccatgctcacttttatctgatggggttcgaaattcacttcggtaccttaaacttcgttgttgtgctctccgtcccacagttgaacttgcccccatgagaagcctaacaagtttacatttgtcctttgtgagcattaaatggaatgggttaaagcgcctcctttccaactcccttgctctggaggaattagagctagtatgttgtgacaagatcgtttgcctcaagataccttctgccctgcagcgtctcaacagccttaatatttttggatgctcggccctcaaagtgctagagagcaaagctccaaatctctctagtctttctctttcagattttggaggcgggctagtcttctcacttgtgaaaacattgcaaatgaagaaactaatcactgaaagttgttgatgcaccaatgctgcctaccaaattcctctgtcttaagcacctgaccgttcgcttgtcatcaggaacaaccattacccaggcatttgactatttctctttggtttctttccttgatgcgtctccttccttggagacttttatattaaatgtgagtgggaaaggcatgatccatgaatcgatttctgcacatccacaattgaggcacacacctgagcaccaccatggccacctcaggagtgtgaagatatgtggtttcagctctgagaaaagcttatttgaactaacacgttatattcttgagaatgcggtgtcactgaaatttcttacactggacaccttttatgggtatcggtgtggtcagggtaagtgtacaagttgtttacccacgcctgatgtttttatggatgtttccaaagcgatctcaggtatcaagacatacatcgagaacaaagttccatccacagttaaactaactgttctggagccttgcagccggtgccatgttagaagagtaatttagacaccatcctagtcatgctacgtcacttccatttaatttaatttgagaagaaccatgcttgtttcctggattatttatagctgtgtcccgatgcacgcaaatttaatctctgatgatggaccgtgctttgtttcctgaattaatacatgccaactgtttagttttgtagtatggaatgtggatttatttaagacaagttgtcaaatcttgtgtattcggtccgatgctgatatgttaattgtagtgtgtggctgtgctgtggacttgagagaaaatactggaaacataattttgcgttcaattctactgcaacgagctcatcaatatgattagcgacaaatcaaaccatatgagcaatgggaaaatttgcggttgcagataatatctgggcatttcttcacccaaacctctaacaagtaacaagccccatcatacttagtaatggtaatggatcatcgaagaatagggctctaaataaattttagtttaaaataaatagaaatatagtctgatcctaatccgatatgatcattaaatcttaatgtaaaatttatagctcattgccacccctaatcgtacttgtcatgccgtacctttaaattgttggcatgaacaattttggtaagctcaaaaggacacttaaactccacatgattaactgaacctaaaattgtaggcactaatggcgagagcgaggtgaattgcctagcagatgacgacgggtaaaaaattgagaaccattaacgagctcgcattcatggtgacctcaagtccctcctgcctaagagagaagtcgtgccag

SEQ ID NO: 35682 - DNA, 2596 bp, Zea Mays
aggcgatcagggctaacgacgcgacgcgatcagtacgatcagataactgatcgttcgattagtcggcaattaaccacaactaatcgtccgatcaacgcatggacgttgaaattttggcccagtagcatttcggtccagcggctcagcccatattccacttatcccaattcccacgtgaacacaggcagctgcaacgcgtgaaatacgggcacaacagtaccacgcgacgttaaatacgggcacaactcgtgaacgacggcggcgcctagcggtgacatcgtcccctcgactcctcctccatccccgacgcggcggcgccagcctgcagattagcttattaccaccatgggtaaaagaaagcggtcgtcatgtcaacgagataaccataatgattctctagccagcaaaataatgagaactagaatcccagatcttcctgaggacatttggtctcatgtacattccctaatgccaatgcgtgatgctggccgtgctgcttgcctatctcgtgcctttttacgttcctggagacgtcatcctaatcttatctttaataaggatacgattggcatgaaaaaaaattcatatggagagaatttccaccacaaaattagccgcattctcaggaatcactctggcattagtttgaaaacattcaagcttgactacagtggcatgtgtgggttcgatggaactagttatcttgacagttggcttcaggctgctcttaatccagggattgaagaagtcaccctctggttgttccatacaaggagaatatatgaattcccatgctcacttttatctgatggggttcgaaattcacttcggtaccttaaacttcgttgttgtgctctccgtcccacagttgaacttgcccccatgagaagcctaacaagtttacatttgtcctttgtgagcattaaatggaatgggttaaagcgcctcctttccaactcccttgctctggaggaattagagctagtatgttgtgacaagatcgtttgcctcaagataccttctgccctgcagcgtctcaacagccttaatatttttggatgctcggccctcaaagtgctagagagcaaagctccaaatctctctagtctttctctttcagattttggaggcgggctagtcttctcacttgtgaaaacattgcaaatgaagaaactaatcactgaaagtactgtctatgatgctcgtaccaggctgccatccattatgcccaatcttgaaactcttgtcataaactcatgtcagcaggttgttgatgcaccaatgctgcctaccaaattcctctgtcttaagcacctgaccgttcgcttgtcatcaggaacaaccattacccaggcatttgactatttctctttggtttctttccttgatgcgtctccttccttggagacttttatattaaatgtgagtgggaaaggcatgatccatgaatcgatttctgcacatccacaattgaggcacacacctgagcaccaccatggccacctcaggagtgtgaagatatgtggtttcagctctgagaaaagcttatttgaactaacacgttatattcttgagaatgcggtgtcactgaaatttcttacactggacaccttttatgggtatcggtgtggtcagggtaagtgtacaagttgtttacccacgcctgatgtttttatggatgtttccaaagcgatctcaggtatcaagacatacatcgagaacaaagttccatccacagttaaactaactgttctggagccttgcagccggtgccatgttagaagagtaatttagacaccatcctagtcatgctacgtcacttccatttaatttaatttgagaagaaccatgcttgtttcctggattatttatagctgtgtcccgatgcacgcaaatttaatctctgatgatggaccgtgctttgtttcctgaattaatacatgccaactgtttagttttgtagtatggaatgtggatttatttaagacaagttgtcaaatcttgtgtattcggtccgatgctgatatgttaattgtagtgtgtggctgtgctgtggacttgagagaaaatactggaaacataattttgcgttcaattctactgcaacgagctcatcaatatgattagcgacaaatcaaaccatatgagcaatgggaaaatttgcggttgcagataatatctgggcatttcttcacccaaacctctaacaagtaacaagccccatcatacttagtaatggtaatggatcatcgaagaatagggctctaaataaattttagtttaaaataaatagaaatatagtctgatcctaatccgatatgatcattaaatcttaatgtaaaatttatagctcattgccacccctaatcgtacttgtcatgccgtacctttaaattgttggcatgaacaattttggtaagctcaaaaggacacttaaactccacatgattaactgaacctaaaattgtaggcactaatggcgagagcgaggtgaattgcctagcagatgacgacgggtaaaaaattgagaaccattaacgagctcgcattcatggtgacctcaagtccctcctgcctaagagagaagtcgtgccag

SEQ ID NO: 35683 - DNA, 601 bp, Zea Mays
cttggccacctctgtcatgtctattgacctctgctctacgtggtggtcatgcaagagtagtgtggaacatgttgatatggtgtcctcctgctaagttacagcctggccccagcaaacccatggtttgggatggcttgccatgggctataaagcctaatgaggaccctgtcgtgctcttgctgttttcctagcatctccagcatatcaaacctgtcctccatagcttgatcaagcctttaaccattccccagctcttctactgctttgccagcacctgatctggagttgatagctgacagtggtgaccacgttcaccgatgactcacctcaccgtggccagggtagctggagcaatcccacccacgagaacaaggtcgcgacgccgcggactagcgccgtggacaacctccccgctggcctgctaatccacgccgtccccggtaattctcacacaagcaccctggttgagactgatcgttgttgctctccacgccggagtttggaattctaccacgccgtggccgtagaattgggtcgccggaccaactttgcccccgtcgctgaaggtagcagtgctccggtgttccgcggccaaattgag

SEQ ID NO: 35684 - DNA, 2453 bp, Zea Mays
cacggactgcagccagtccggcatcgccttcttcgtctccggatgtggcaaccgcctgctgctgctggctgctgccgtctccagatctcccaccgcctcgtcgtccttaccctgtccgttcccgcacgccactagcaaaagccacacccaacaaaaggtaaaccaccgcgtctccgcccgccgccgcccgcagatccatcccctcccggcctccctagcctttcccctcgagcacgtcagcgccctcgccctgctctgtcggccggccaagctcctcaccggcgccatgaacccgtatgatctccgcttcgctgacccctcatcctaccacgacaggcgcagcgacttgaccgtggctcctacgttcgctccgccggctcccgtggctgcggcgaacctgaacccttacgccgccgcctacccgctgcctgtgcccgttcccgtgcccgcggcccccgcgggcggcgactaccagcgctacgggcagggaggcagaggccgtggtggcggtggcagaggcggtggaggagggtacggaggtggcggcagaggaggaggtcgcgggagggacgggcttgactcgctcgccctccctaagccggactttcggagcctgataccgttcgagaaaaacttctacgtggagtgtccctccgtccaggcaatgtcggaggcggatgtggcgcagtaccgccgcctccgggatatcaccatcgagggccgggatgtgcccaagccggttagatacttccaggaagccaacttcccagattactgcatgcaagctattgccaaatctggatttgtggagccaacacctattcaatctcaaggttggcctatggctttgaagggtagggacctgattggtatcgctcaaacaggctcagggaaaacattatcttatctgttacctgggttggttcatgttggtgcccagcctcggctagaacaaggcgatggcccaattgtattaattctcgctcccacgagagaactggctgttcaaatacaggaagaatctacaaaatttggatcatattcaagaactagaagcacatgtgtctatggtggtgcacctaagggtccacaaatacgggaccttagaagaggagttgaaattgtcattgcaactcctggccggttgattgatatgctggaagctggtcacacaaacctacgtagagtgacataccttgtgttggatgaggcggaccggatgctagatatggggtttgagccccaaattcggaaaatagtagcacagacaggcaaaccttgtactggagtgccacatggcctagagaagttgaagccttagcaagacagtttctacaaaatccttacaaggtaatcataggctcacctgaacttaaagctaatcattccatacaacaaattgttgaagttatttcagatcatgagaagtatccaagactcagtaagctcttgtctgatctaatggatgggagccgtatcttgatattcttccaaacaaaaaaggattgcgataagatcacccggcagcttagaatggatgggtggccagcattatctatacatggtgataaagctcaagctgaacgggactatgttcttgcagagtttaagagcggcaagagccccataatggctgccacagatgtggcagcacgtggtcttgatgtgaaggacataaagtgtgtgataaattatgattttccaacaactcttgaagattatattcacaggataggtcgaactggccgtgctggtgctagcggaactgcatttacttttttcacacacgcaaatgcaaagttctcaaggaatctagtgaagattctgcgagaagctggccaagttgtgaatcctgccttagaatccatgtccaggtcttcgaactcaacgggaggaggcaattttcggtcgagaggcagaggtgggtttggtaaccggggccatatgtctggatcaaatacctttcctttaggaggaagaaggccatattgatgtgtgcaaaagaactgtgggagtatgggactatttgtatactactcggcattaagtgcattctttgggaaatttctgagaaatttcccctactaccaggattgataacaccatcgattttcgctacagtacctggagcttcttatatgaaagaacaacacatcaactatctagcaacagcatatgcattccattcagatatttcttttggaaggaccctgtcttgttttagtggagtccctgtgatcgtttaaagtcgtctgtatacttgtactgaacttcttgtggtgttactgttaggatttatggttgctctctattggtgtgcggtgttactgaacaaatttagttaagaagttaggcatttccatatttaatctgattctgaaataaactagcaaatttatgatgtacactttataatagtagctaatatatatatgcaaactctatatgcaaac

SEQ ID NO: 35685 - DNA, 3452 bp, Zea Mays
cacggactgcagccagtccggcatcgccttcttcgtctccggatgtggcaaccgcctgctgctgctggctgctgccgtctccagatctcccaccgcctcgtcgtccttaccctgtccgttcccgcacgccactagcaaaagccacacccaacaaaaggtaaaccaccgcgtctccgcccgccgccgcccgcagatccatcccctcccggcctccctagcctttcccctcgagcacgtcagcgccctcgccctgctctgtcggccggccaagctcctcaccggcgccatgaacccgtatgatctccgcttcgctgacccctcatcctaccacgacaggcgcagcgacttgaccgtggctcctacgttcgctccgccggctcccgtggctgcggcgaacctgaacccttacgccgccgcctacccgctgcctgtgcccgttcccgtgcccgcggcccccgcgggcggcgactaccagcgctacgggcagggaggcagaggccgtggtggcggtggcagaggcggtggaggagggtacggaggtggcggcagaggaggaggtcgcgggagggacgggcttgactcgctcgccctccctaagccggactttcggagcctgataccgttcgagaaaaacttctacgtggagtgtccctccgtccaggcaatgtcggaggcggatgtggcgcagtaccgccgcctccgggatatcaccatcgagggccgggatgtgcccaagccggttagatacttccaggaagccaacttcccagattactgcatgcaagctattgccaaatctggatttgtggagccaacacctattcaatctcaaggttggcctatggctttgaagggtagggacctgattggtatcgctcaaacaggctcagggaaaacattatcttatctgttacctgggttggttcatgttggtgcccagcctcggctagaacaaggcgatggcccaattgtattaattctcgctcccacgagagaactggctgttcaaatacaggaagaatctacaaaatttggatcatattcaagaactagaagcacatgtgtctatggtggtgcacctaagggtccacaaatacgggaccttagaagaggagttgaaattgtcattgcaactcctggccggttgattgatatgctggaagctggtcacacaaacctacgtagagtgacataccttgtgttggatgaggcggaccggatgctagatatggggtttgagccccaaattcggaaaatagtagcacagatccgcccagacaggcaaaccttgtactggagtgccacatggcctagagaagttgaagccttagcaagacagtttctacaaaatccttacaaggtaatcataggctcacctgaacttaaagctaatcattccatacaacaaattgttgaagttatttcagatcatgagaagtatccaagactcagtaagctcttgtctgatctaatggatgggagccgtatcttgatattcttccaaacaaaaaaggattgcgataagatcacccggcagcttagaatggatgggtggccagcattatctatacatggtgataaagctcaagctgaacgggactatgttcttgcagagtttaagagcggcaagagccccataatggctgccacagatgtggcagcacgtggtcttggtatgatgatttatttgaatattaggattaggtagtagttccaagtgctcaagggtgataagtcggagggttgttgagctgcgattggttgagtgaactgaacttgtggattggtggtgtataccaaggtgccatcatgtcaaaggtagataatttccccccgtggtttacctcatttgagcgtgagcattggcagtgttacacaggcagttcaactttgagctatcatggtaatgttccctttccgaataagccttttagggagcctacatttggataaaatggaaatcctcaaaaagtagcatgcaaccgaatatgcatttcacactatagttgatttcttagcttgatttgaattccttgatccctgcatatctgaccattttggaacatttaggtattgtgttgctgccctcttcattcattctttgtccttgtaattgaattcttttcaatccaatagtctgcttttcttgcaagtatttttggcttacctttctacattttctttgtaaatccatgtttaatttgtttagaattaattggagcaataattcttttcagagatgtattgcaaaattttaggcataaaacatttgtatacaaatgacaatatcaatttcaaatatatttgtttgcacaaatgcacattcttcatgagtagcatgtccatggatctcctttgctttcccctagttttacatgaacctttagaaagtcgttctgctttctcaatcaagctcctcatcatcggtatcactgccaagtgtgaactggtcaaaaaggatggttgtaatcagcattcttttcagttgattcacgatagtgacctctgatgcagcaccttacacattacagcctacgttggactggcatgtcctacagaattttgtttgggttatggatattgatgctgttacattattggataagtggttacccaggcatgccagttgcagtcttccaacattttttgataaggctgagagatgtgaaggacataaagtgtgtgataaattatgattttccaacaactcttgaagattatattcacaggataggtcgaactggccgtgctggtgctagcggaactgcatttacttttttcacacacgcaaatgcaaagttctcaaggaatctagtgaagattctgcgagaagctggccaagttgtgaatcctgccttagaatccatgtccaggtcttcgaactcaacgggaggaggcaattttcggtcgagaggcagaggtgggtttggtaaccggggccatatgtctggatcaaatacctttcctttaggaggaagaaggccatattgatgtgtgcaaaagaactgtgggagtatgggactatttgtatactactcggcattaagtgcattctttgggaaatttctgagaaatttcccctactaccaggattgataacaccatcgattttcgctacagtacctggagcttcttatatgaaagaacaacacatcaactatctagcaacagcatatgcattccattcagatatttcttttggaaggaccctgtcttgttttagtggagtccctgtgatcgtttaaagtcgtctgtatacttgtactgaacttcttgtggtgttactgttaggatttatggttgctctctattggtgtgcggtgttactgaacaaatttagttaagaagttaggcatttccatatttaatctgattctgaaataaactagcaaatttatgatgtacactttataatagtagctaatatatatatgcaaactctatatgcaaac

SEQ ID NO: 35686 - DNA, 2608 bp, Zea Mays
cacggactgcagccagtccggcatcgccttcttcgtctccggatgtggcaaccgcctgctgctgctggctgctgccgtctccagatctcccaccgcctcgtcgtccttaccctgtccgttcccgcacgccactagcaaaagccacacccaacaaaaggtaaaccaccgcgtctccgcccgccgccgcccgcagatccatcccctcccggcctccctagcctttcccctcgagcacgtcagcgccctcgccctgctctgtcggccggccaagctcctcaccggcgccatgaacccgtatgatctccgcttcgctgacccctcatcctaccacgacaggcgcagcgacttgaccgtggctcctacgttcgctccgccggctcccgtggctgcggcgaacctgaacccttacgccgccgcctacccgctgcctgtgcccgttcccgtgcccgcggcccccgcgggcggcgactaccagcgctacgggcagggaggcagaggccgtggtggcggtggcagaggcggtggaggagggtacggaggtggcggcagaggaggaggtcgcgggagggacgggcttgactcgctcgccctccctaagccggactttcggagcctgataccgttcgagaaaaacttctacgtggagtgtccctccgtccaggcaatgtcggaggcggatgtggcgcagtaccgccgcctccgggatatcaccatcgagggccgggatgtgcccaagccggttagatacttccaggaagccaacttcccagattactgcatgcaagctattgccaaatctggatttgtggagccaacacctattcaatctcaaggttggcctatggctttgaagggtagggacctgattggtatcgctcaaacaggctcagggaaaacattatcttatctgttacctgggttggttcatgttggtgcccagcctcggctagaacaaggcgatggcccaattgtattaattctcgctcccacgagagaactggctgttcaaatacaggaagaatctacaaaatttggatcatattcaagaactagaagcacatgtgtctatggtggtgcacctaagggtccacaaatacgggaccttagaagaggagttgaaattgtcattgcaactcctggccggttgattgatatgctggaagctggtcacacaaacctacgtagagtgacataccttgtgttggatgaggcggaccggatgctagatatggggtttgagccccaaattcggaaaatagtagcacagatccgcccagacaggcaaaccttgtactggagtgccacatggcctagagaagttgaagccttagcaagacagtttctacaaaatccttacaaggtaatcataggctcacctgaacttaaagctaatcattccatacaacaaattgttgaagttatttcagatcatgagaagtatccaagactcagtaagctcttgtctgatctaatggatgggagccgtatcttgatattcttccaaacaaaaaaggattgcgataagatcacccggcagcttagaatggatgggtggccagcattatctatacatggtgataaagctcaagctgaacgggactatgttcttgcagagtttaagagcggcaagagccccataatggctgccacagatgtggcagcacgtggtcttggtatgatgatttatttgaatattaggattaggtagtagttccaagtgctcaagggtgataagtcggagggttgttgagctgcgattggttgagtgaactgaacttgtggattggtggtgtataccaaggtgccatcatgtcaaagatgtgaaggacataaagtgtgtgataaattatgattttccaacaactcttgaagattatattcacaggataggtcgaactggccgtgctggtgctagcggaactgcatttacttttttcacacacgcaaatgcaaagttctcaaggaatctagtgaagattctgcgagaagctggccaagttgtgaatcctgccttagaatccatgtccaggtcttcgaactcaacgggaggaggcaattttcggtcgagaggcagaggtgggtttggtaaccggggccatatgtctggatcaaatacctttcctttaggaggaagaaggccatattgatgtgtgcaaaagaactgtgggagtatgggactatttgtatactactcggcattaagtgcattctttgggaaatttctgagaaatttcccctactaccaggattgataacaccatcgattttcgctacagtacctggagcttcttatatgaaagaacaacacatcaactatctagcaacagcatatgcattccattcagatatttcttttggaaggaccctgtcttgttttagtggagtccctgtgatcgtttaaagtcgtctgtatacttgtactgaacttcttgtggtgttactgttaggatttatggttgctctctattggtgtgcggtgttactgaacaaatttagttaagaagttaggcatttccatatttaatctgattctgaaataaactagcaaatttatgatgtacactttataatagtagctaatatatatatgcaaactctatatgcaaac

SEQ ID NO: 35687 - DNA, 3678 bp, Zea Mays
cacggactgcagccagtccggcatcgccttcttcgtctccggatgtggcaaccgcctgctgctgctggctgctgccgtctccagatctcccaccgcctcgtcgtccttaccctgtccgttcccgcacgccactagcaaaagccacacccaacaaaaggtaaaccaccgcgtctccgcccgccgccgcccgcagatccatcccctcccggcctccctagcctttcccctcgagcacgtcagcgccctcgccctgctctgtcggccggccaagctcctcaccggcgccatgaacccgtatgatctccgcttcgctgacccctcatcctaccacgacaggcgcagcgacttgaccgtggctcctacgttcgctccgccggctcccgtggctgcggcgaacctgaacccttacgccgccgcctacccgctgcctgtgcccgttcccgtgcccgcggcccccgcgggcggcgactaccagcgctacgggcagggaggcagaggccgtggtggcggtggcagaggcggtggaggagggtacggaggtggcggcagaggaggaggtcgcgggagggacgggcttgactcgctcgccctccctaagccggactttcggagcctgataccgttcgagaaaaacttctacgtggagtgtccctccgtccaggcaatgtcggaggcggatgtggcgcagtaccgccgcctccgggatatcaccatcgagggccgggatgtgcccaagccggttagatacttccaggaagccaacttcccagattactgcatgcaagctattgccaaatctggatttgtggagccaacacctattcaatctcaaggttggcctatggctttgaagggtagggacctgattggtatcgctcaaacaggctcagggaaaacattatcttatctgttacctgggttggttcatgttggtgcccagcctcggctagaacaaggcgatggcccaattgtattaattctcgctcccacgagagaactggctgttcaaatacaggaagaatctacaaaatttggatcatattcaagaactagaagcacatgtgtctatggtggtgcacctaagggtccacaaatacgggaccttagaagaggagttgaaattgtcattgcaactcctggccggttgattgatatgctggaagctggtcacacaaacctacgtagagtgacataccttgtgttggatgaggcggaccggatgctagatatggggtttgagccccaaattcggaaaatagtagcacagacaggcaaaccttgtactggagtgccacatggcctagagaagttgaagccttagcaagacagtttctacaaaatccttacaaggtaatcataggctcacctgaacttaaagctaatcattccatacaacaaattgttgaagttatttcagatcatgagaagtatccaagactcagtaagctcttgtctgatctaatggatgggagccgtatcttgatattcttccaaacaaaaaaggattgcgataagatcacccggcagcttagaatggatgggtggccagcattatctatacatggtgataaagctcaagctgaacgggactatgttcttgcagagtttaagagcggcaagagccccataatggctgccacagatgtggcagcacgtggtcttggtatgatgatttatttgaatattaggattaggtagtagttccaagtgctcaagggtgataagtcggagggttgttgagctgcgattggttgagtgaactgaacttgtggattggtggtgtataccaaggtgccatcatgtcaaaggtagataatttccccccgtggtttacctcatttgagcgtgagcattggcagtgttacacaggcagttcaactttgagctatcatggtaatgttccctttccgaataagccttttagggagcctacatttggataaaatggaaatcctcaaaaagtagcatgcaaccgaatatgcatttcacactatagttgatttcttagcttgatttgaattccttgatccctgcatatctgaccattttggaacatttaggtattgtgttgctgccctcttcattcattctttgtccttgtaattgaattcttttcaatccaatagtctgcttttcttgcaagtatttttggcttacctttctacattttctttgtaaatccatgtttaatttgtttagaattaattggagcaataattcttttcagagatgtattgcaaaattttaggcataaaacatttgtatacaaatgacaatatcaatttcaaatatatttgtttgcacaaatgcacattcttcatgagtagcatgtccatggatctcctttgctttcccctagttttacatgaacctttagaaagtcgttctgctttctcaatcaagctcctcatcatcggtatcactgccaagtgtgaactggtcaaaaaggatggttgtaatcagcattcttttcagttgattcacgatagtgacctctgatgcagcaccttacacattacagcctacgttggactggcatgtcctacagaattttgtttgggttatggatattgatgctgttacattattggataagtggttacccaggcatgccagttgcagtcttccaacattttttgataaggctgagaggttaatcaccatcaattccacatccagcagtgattgatgcctggttcagtttttcagctccttcgacttgtgttttagaattcaaaagtgcagcactgtggactttttggtgcttgtctagaccatgtaccttctatggggatcgacaatgttgatgttccagcgtggtccagcatggtattcaggacaacacatcaattttgattaagtactgataatatttgttgattttgcagatgtgaaggacataaagtgtgtgataaattatgattttccaacaactcttgaagattatattcacaggataggtcgaactggccgtgctggtgctagcggaactgcatttacttttttcacacacgcaaatgcaaagttctcaaggaatctagtgaagattctgcgagaagctggccaagttgtgaatcctgccttagaatccatgtccaggtcttcgaactcaacgggaggaggcaattttcggtcgagaggcagaggtgggtttggtaaccggggccatatgtctggatcaaatacctttcctttaggaggaagaaggccatattgatgtgtgcaaaagaactgtgggagtatgggactatttgtatactactcggcattaagtgcattctttgggaaatttctgagaaatttcccctactaccaggattgataacaccatcgattttcgctacagtacctggagcttcttatatgaaagaacaacacatcaactatctagcaacagcatatgcattccattcagatatttcttttggaaggaccctgtcttgttttagtggagtccctgtgatcgtttaaagtcgtctgtatacttgtactgaacttcttgtggtgttactgttaggatttatggttgctctctattggtgtgcggtgttactgaacaaatttagttaagaagttaggcatttccatatttaatctgattctgaaataaactagcaaatttatgatgtacactttataatagtagctaatatatatatgcaaactctatatgcaaac

SEQ ID NO: 35688 - DNA, 2693 bp, Zea Mays
cacggactgcagccagtccggcatcgccttcttcgtctccggatgtggcaaccgcctgctgctgctggctgctgccgtctccagatctcccaccgcctcgtcgtccttaccctgtccgttcccgcacgccactagcaaaagccacacccaacaaaaggtaaaccaccgcgtctccgcccgccgccgcccgcagatccatcccctcccggcctccctagcctttcccctcgagcacgtcagcgccctcgccctgctctgtcggccggccaagctcctcaccggcgccatgaacccgtatgatctccgcttcgctgacccctcatcctaccacgacaggcgcagcgacttgaccgtggctcctacgttcgctccgccggctcccgtggctgcggcgaacctgaacccttacgccgccgcctacccgctgcctgtgcccgttcccgtgcccgcggcccccgcgggcggcgactaccagcgctacgggcagggaggcagaggccgtggtggcggtggcagaggcggtggaggagggtacggaggtggcggcagaggaggaggtcgcgggagggacgggcttgactcgctcgccctccctaagccggactttcggagcctgataccgttcgagaaaaacttctacgtggagtgtccctccgtccaggcaatgtcggaggcggatgtggcgcagtaccgccgcctccgggatatcaccatcgagggccgggatgtgcccaagccggttagatacttccaggaagccaacttcccagattactgcatgcaagctattgccaaatctggatttgtggagccaacacctattcaatctcaaggttggcctatggctttgaagggtagggacctgattggtatcgctcaaacaggctcagggaaaacattatcttatctgttacctgggttggttcatgttggtgcccagcctcggctagaacaaggcgatggcccaattgtattaattctcgctcccacgagagaactggctgttcaaatacaggaagaatctacaaaatttggatcatattcaagaactagaagcacatgtgtctatggtggtgcacctaagggtccacaaatacgggaccttagaagaggagttgaaattgtcattgcaactcctggccggttgattgatatgctggaagctggtcacacaaacctacgtagagtgacataccttgtgttggatgaggcggaccggatgctagatatggggtttgagccccaaattcggaaaatagtagcacagatccgcccagacaggcaaaccttgtactggagtgccacatggcctagagaagttgaagccttagcaagacagtttctacaaaatccttacaaggtaatcataggctcacctgaacttaaagctaatcattccatacaacaaattgttgaagttatttcagatcatgagaagtatccaagactcagtaagctcttgtctgatctaatggatgggagccgtatcttgatattcttccaaacaaaaaaggattgcgataagatcacccggcagcttagaatggatgggtggccagcattatctatacatggtgataaagctcaagctgaacgggactatgttcttgcagagtttaagagcggcaagagccccataatggctgccacagatgtggcagcacgtggtcttggtatgatgatttatttgaatattaggattaggtagtagttccaagtgctcaagggtgataagtcggagggttgttgagctgcgattggttgagtgaactgaacttgtggattggtggtgtataccaaggtgccatcatgtcaaaggtagataatttccccccgtggtttacctcatttgagcgtgagcattggcagtgttacacaggcagttcaactttgagctatcatgatgtgaaggacataaagtgtgtgataaattatgattttccaacaactcttgaagattatattcacaggataggtcgaactggccgtgctggtgctagcggaactgcatttacttttttcacacacgcaaatgcaaagttctcaaggaatctagtgaagattctgcgagaagctggccaagttgtgaatcctgccttagaatccatgtccaggtcttcgaactcaacgggaggaggcaattttcggtcgagaggcagaggtgggtttggtaaccggggccatatgtctggatcaaatacctttcctttaggaggaagaaggccatattgatgtgtgcaaaagaactgtgggagtatgggactatttgtatactactcggcattaagtgcattctttgggaaatttctgagaaatttcccctactaccaggattgataacaccatcgattttcgctacagtacctggagcttcttatatgaaagaacaacacatcaactatctagcaacagcatatgcattccattcagatatttcttttggaaggaccctgtcttgttttagtggagtccctgtgatcgtttaaagtcgtctgtatacttgtactgaacttcttgtggtgttactgttaggatttatggttgctctctattggtgtgcggtgttactgaacaaatttagttaagaagttaggcatttccatatttaatctgattctgaaataaactagcaaatttatgatgtacactttataatagtagctaatatatatatgcaaactctatatgcaaac

SEQ ID NO: 35689 - DNA, 865 bp, Zea Mays
gcaggtttgttgaaattatggcaactgtattctcaagggatgcatggcgctgtgtatggcatatgattcagaacgacttggtccatggatggggccttgattttgctcttaggaaatgtgtggagccagcccatgagaaaattggagtggttgactcccagtggattgttcatcaagtcatcccttcgcttggtaaccagggcaaggcagagaatggaaaagcaccatgggaaggggttagagcacgctgtcgtaaagaatgggggatgttccaaacaaggttgactgatgctgagaaagcatattacttggagcacgggatcacaccaccaaaatcgacggtagcttagctgcacgcaccgacagtagcttagctgcactgcatgcctgcatacaggcacctcgcgagtcacgccaaggtttctgttttgtgaacctagcgccttcctgtccgataagcaactgactctgtagagatgcagcaccacagccagatttgtacagaatcgatgtacgtttttactcttcttaatcttctttacttgttttcaaccgtagcgacgagagtagctcttgtgtaagtaaccgatttagcatgaatccggtggctcttttttttttgatatattgcccaaatgcaatatcgatatggtcatttcgtttcattgttttaataacaagcaaatggttgctttgggacagcccttgtgccttcagtgcctcattttcatgctctagccagttatcagaatgacagccctgaaacatcttgctgcatagccagatgcaaacagttatccacatatggtgtggtgtgattagttgcttgcattacccatcacctgtataacccaagtcaggatga

SEQ ID NO: 35690 - DNA, 1917 bp, Zea Mays
cccgttctgggttttacccctgcgccactgccttgttctttcttgctccgctccccacgcgtacgcgctctcgtggcgacgactgggtgatcgccgccgccgccgccgccaccacgcaccaccaggccttcaccggcgacaaacaccaccaacagacacaagtgcttcagtcattatagtgccagtaccattctgccagcgagttcctttgccacaaaaagataacactcggatatctcatggcaaaacctgggattttaggccgcagtgcacagagatcaaatgagggcatgcgaatcatattctcagcagttattggtgttatgctagggtacttgtttggcatttccttccctaccgttaatataacaaagcttcacttcccttccagcattatctcctatatcgaggacagaaactctggcatcacaacccaaacattattgaatcatgcatggacgtctgcagctactcataagaagaacaattcagcttctaactctgatgaaattcctaagatttatgttccaacaaaccctaaaggtgctgaaaggcttccaccgggcattgtagtgtctgaaacagacctttatctccggagattgtggggtgaacctagtgagtgggatactctcaaaaggcaaacattgatgcagcggtgaaaaagttttcagataacttcacaattatgttgttccattatgatggtcggacaactgagtgggatgaatttgagtggtcaaaaagggccgtccatgtgagtgtcacaaagcaaaccaaatggtggtatgccaaacgatttctacatcctgacattgttgcccgctacgactacatatttatctgggatgaagatcttggtgtcgaacattttaatgcagaggcgtacattaagcttgttaggaagcatgggcttgagatctctcagcctggtttggagcccgataaaggtttgacatggcaaatgactaaacgaagaggtgatcaggaagtccacaaagtaactgaggagagacctggctggtgtagcgaccctcacctgccaccatgtgcagcgtttgttgaaattatggcaactgtattctcaagggatgcatggcgctgtgtatggcatatgattcagaacgacttggtccatggatggggccttgattttgctcttaggaaatgtgtggagccagcccatgagaaaattggagtggttgactcccagtggattgttcatcaagtcatcccttcgcttggtaaccagggcaaggcagagaatggaaaagcaccatgggaaggggttagagcacgctgtcgtaaagaatgggggatgttccaaacaaggttgactgatgctgagaaagcatattacttggagcacgggatcacaccaccaaaatcgacggtagcttagctgcacgcaccgacagtagcttagctgcactgcatgcctgcatacaggcacctcgcgagtcacgccaaggtttctgttttgtgaacctagcgccttcctgtccgataagcaactgactctgtagagatgcagcaccacagccagatttgtacagaatcgatgtacgtttttactcttcttaatcttctttacttgttttcaaccgtagcgacgagagtagctcttgtgtaagtaaccgatttagcatgaatccggtggctcttttttttttgatatattgcccaaatgcaatatcgatatggtcatttcgtttcattgttttaataacaagcaaatggttgctttgggacagcccttgtgccttcagtgcctcattttcatgctctagccagttatcagaatgacagccctgaaacatcttgctgcatagccagatgcaaacagttatccacatatggtgtggtgtgattagttgcttgcattacccatcacctgtataacccaagtcaggatga

SEQ ID NO: 35691 - DNA, 1959 bp, Zea Mays
cggacccgttctgggttttacccctgcgccactgccttgttctttcttgctccgctccccacgcgtacgcgctctcgtggcgacgactgggtgatcgccgccgccgccgccgccaccacgcaccaccaggccttcaccggcgacaaacaccaccaacagacacaagtgcttcagtcattatagtgccagtaccattctgccagcgagttcctttgccacaaaaagataacactcggatatctcatggcaaaacctgggattttaggccgcagcagtgcacagagatcaaatgagggcatgcgaatcatattctcagcagttattggtgttatgctagggtacttgtttggcatttccttccctaccgttaatataacaaagcttcacttcccttccagcattatctcctatatcgaggacagaaactctggcatcacaacccaaacattattgaatcatgcatggacgtctgcagctactcataagaagaacaattcagcttctaactctgatgaaattcctaagatttatgttccaacaaaccctaaaggtgctgaaaggcttccaccgggcattgtagtgtctgaaacagacctttatctccggagattgtggggtgaacctagtgaggatcttactaccaaaccaagataccttgttacatttacagtgggatactctcaaaaggcaaacattgatgcagcggtgaaaaagttttcagataacttcacaattatgttgttccattatgatggtcggacaactgagtgggatgaatttgagtggtcaaaaagggccgtccatgtgagtgtcacaaagcaaaccaaatggtggtatgccaaacgatttctacatcctgacattgttgcccgctacgactacatatttatctgggatgaagatcttggtgtcgaacattttaatgcagaggcgtacattaagcttgttaggaagcatgggcttgagatctctcagcctggtttggagcccgataaaggtttgacatggcaaatgactaaacgaagaggtgatcaggaagtccacaaagtaactgaggagagacctggctggtgtagcgaccctcacctgccaccatgtgtttgttgaaattatggcaactgtattctcaagggatgcatggcgctgtgtatggcatatgattcagaacgacttggtccatggatggggccttgattttgctcttaggaaatgtgtggagccagcccatgagaaaattggagtggttgactcccagtggattgttcatcaagtcatcccttcgcttggtaaccagggcaaggcagagaatggaaaagcaccatgggaaggggttagagcacgctgtcgtaaagaatgggggatgttccaaacaaggttgactgatgctgagaaagcatattacttggagcacgggatcacaccaccaaaatcgacggtagcttagctgcacgcaccgacagtagcttagctgcactgcatgcctgcatacaggcacctcgcgagtcacgccaaggtttctgttttgtgaacctagcgccttcctgtccgataagcaactgactctgtagagatgcagcaccacagccagatttgtacagaatcgatgtacgtttttactcttcttaatcttctttacttgttttcaaccgtagcgacgagagtagctcttgtgtaagtaaccgatttagcatgaatccggtggctcttttttttttgatatattgcccaaatgcaatatcgatatggtcatttcgtttcattgttttaataacaagcaaatggttgctttgggacagcccttgtgccttcagtgcctcattttcatgctctagccagttatcagaatgacagccctgaaacatcttgctgcatagccagatgcaaacagttatccacatatggtgtggtgtgattagttgcttgcattacccatcacctgtataacccaagtcaggatga

SEQ ID NO: 35692 - DNA, 2092 bp, Zea Mays
caactacagcaccggacccgttctgggttttacccctgcgccactgccttgttctttcttgctccgctccccacgcgtacgcgctctcgtggcgacgactgggtgatcgccgccgccgccgccgccaccacgcaccaccaggccttcaccggcgacaaacaccaccaacagacacaagtgcttcagtcattatagtgccagtaccattctgccagcgagttcctttgccacaaaaagataacactcggatatctcatggcaaaacctgggattttaggccgcagtgcacagagatcaaatgagggcatgcgaatcatattctcagcagttattggtgttatgctagggtacttgtttggcatttccttccctaccgttaatataacaaagcttcacttcccttccagcattatctcctatatcgaggacagaaactctggcatcacaacccaaacattattgaatcatgcatggacgtctgcagctactcataagaagaacaattcagcttctaactctgatgaaattcctaagatttatgttccaacaaaccctaaaggtgctgaaaggcttccaccgggcattgtagtgtctgaaacagacctttatctccggagattgtggggtgaacctagtgaggatcttactaccaaaccaagataccttgttacatttacagtgggatactctcaaaaggcaaacattgatgcagcggtgaaaaagttttcagataacttcacaattatgttgttccattatgatggtcggacaactgagtgggatgaatttgagtggtcaaaaagggccgtccatgtgagtgtcacaaagcaaaccaaatggtgagttgttcttttgtgtgtttgcaatgatcaggcccccattagaatgcaggatgccgcccgccctccattcttgtgtttttatggaaatgaaccggttcctgtcatcctgtgaatttcctaaacaattcctatgaattttctgcgttccaaaggggcccctcagtctctatgcatttgtccatcaaagatcttggtgtcgaacattttaatgcagaggcgtacattaagcttgttaggaagcatgggcttgagatctctcagcctggtttggagcccgataaaggtttgacatggcaaatgactaaacgaagaggtgatcaggaagtccacaaagtaactgaggagagacctggctggtgtagcgaccctcacctgccaccatgtgcagcgtttgttgaaattatggcaactgtattctcaagggatgcatggcgctgtgtatggcatatgattcagaacgacttggtccatggatggggccttgattttgctcttaggaaatgtgtggagccagcccatgagaaaattggagtggttgactcccagtggattgttcatcaagtcatcccttcgcttggtaaccagggcaaggcagagaatggaaaagcaccatgggaaggggttagagcacgctgtcgtaaagaatgggggatgttccaaacaaggttgactgatgctgagaaagcatattacttggagcacgggatcacaccaccaaaatcgacggtagcttagctgcacgcaccgacagtagcttagctgcactgcatgcctgcatacaggcacctcgcgagtcacgccaaggtttctgttttgtgaacctagcgccttcctgtccgataagcaactgactctgtagagatgcagcaccacagccagatttgtacagaatcgatgtacgtttttactcttcttaatcttctttacttgttttcaaccgtagcgacgagagtagctcttgtgtaagtaaccgatttagcatgaatccggtggctcttttttttttgatatattgcccaaatgcaatatcgatatggtcatttcgtttcattgttttaataacaagcaaatggttgctttgggacagcccttgtgccttcagtgcctcattttcatgctctagccagttatcagaatgacagccctgaaacatcttgctgcatagccagatgcaaacagttatccacatatggtgtggtgtgattagttgcttgcattacccatcacctgtataacccaagtcaggatga

SEQ ID NO: 35693 - DNA, 2032 bp, Zea Mays
tccagctctgctgcaagcctttcgacggatccagtgcaggctgtgcagtacaactacagcaccggacccgttctgggttttacccctgcgccactgccttgttctttcttgctccgctccccacgcgtacgcgctctcgtggcgacgactgggtgatcgccgccgccgccgccgccaccacgcaccaccaggccttcaccggcgacaaacaccaccaacagacacaagtgcttcagtcattatagtgccagtaccattctgccagcgagttcctttgccacaaaaagataacactcggatatctcatggcaaaacctgggattttaggccgcagcagtgcacagagatcaaatgagggcatgcgaatcatattctcagcagttattggtgttatgctagggtacttgtttggcatttccttccctaccgttaatataacaaagcttcacttcccttccagcattatctcctatatcgaggacagaaactctggcatcacaacccaaacattattgaatcatgcatggacgtctgcagctactcataagaagaacaattcagcttctaactctgatgaaattcctaagatttatgttccaacaaaccctaaaggtgctgaaaggcttccaccgggcattgtagtgtctgaaacagacctttatctccggagattgtggggtgaacctagtgaggatcttactaccaaaccaagataccttgttacatttacagtgggatactctcaaaaggcaaacattgatgcagcggtgaaaaagttttcagataacttcacaattatgttgttccattatgatggtcggacaactgagtgggatgaatttgagtggtcaaaaagggccgtccatgtgagtgtcacaaagcaaaccaaatggtggtatgccaaacgatttctacatcctgacattgttgcccgctacgactacatatttatctgggatgaagatcttggtgtcgaacattttaatgcagaggcgtacattaagcttgttaggaagcatgggcttgagatctctcagcctggtttggagcccgataaaggtttgacatggcaaatgactaaacgaagaggtgatcaggaagtccacaaagtaactgaggagagacctggctggtgtagcgaccctcacctgccaccatgtgcagcgtaggagtttgttgaaattatggcaactgtattctcaagggatgcatggcgctgtgtatggcatatgattcagaacgacttggtccatggatggggccttgattttgctcttaggaaatgtgtggagccagcccatgagaaaattggagtggttgactcccagtggattgttcatcaagtcatcccttcgcttggtaaccagggcaaggcagagaatggaaaagcaccatgggaaggggttagagcacgctgtcgtaaagaatgggggatgttccaaacaaggttgactgatgctgagaaagcatattacttggagcacgggatcacaccaccaaaatcgacggtagcttagctgcacgcaccgacagtagcttagctgcactgcatgcctgcatacaggcacctcgcgagtcacgccaaggtttctgttttgtgaacctagcgccttcctgtccgataagcaactgactctgtagagatgcagcaccacagccagatttgtacagaatcgatgtacgtttttactcttcttaatcttctttacttgttttcaaccgtagcgacgagagtagctcttgtgtaagtaaccgatttagcatgaatccggtggctcttttttttttgatatattgcccaaatgcaatatcgatatggtcatttcgtttcattgttttaataacaagcaaatggttgctttgggacagcccttgtgccttcagtgcctcattttcatgctctagccagttatcagaatgacagccctgaaacatcttgctgcatagccagatgcaaacagttatccacatatggtgtggtgtgattagttgcttgcattacccatcacctgtataacccaagtcaggatga

SEQ ID NO: 35694 - DNA, 608 bp, Zea Mays
ccactgccttgttctttcttgctccgctccccacgcgtacgcgctctcgtggcgacgactgggtgatcgccgccgccgccgccgccaccacgcaccaccaggccttcaccggcgacaaacaccaccaacagacacaagtgcttcagtcattatagtgccagtaccattctgccagcgagttcctttgccacaaaaagataacactcggatatctcatggcaaaacctgggattttaggccgcagcagtgcacagagatcaaatgagggcatgcgaatcatattctcagcagttattggtgttatgctagggtacttgtttggcatttccttccctaccgttaatataacaaagcttcacttcccttccagcattatctcctatatcgaggacagaaactctggcatcacaacccaaacattattgaatcatgcatggacgtctgcagctactcataagaagaacaattcagcttctaactctgatgaaattcctaagatttatgttccaacaaaccctaaaggtgctgaaaggcttccaccgggcattgtagtgtctgaaacagacctttatctccggagattgtggggtgaacctagtgagtaatac

SEQ ID NO: 35695 - DNA, 1358 bp, Zea Mays
gtcagaattaggcacctagaggaactctctttccgccagtatttcgtactcgatactctatgggtactgccgcatgcacggcacctgtttgatcaaatgatgtgtcaatgaaccatgcgatgcattaacgcacaacgtcttacttgcaatgagttgaagaagaggttggagacttactatggggtggatgaagaggctgaattaccatctgtcgctaaggctgttcttgagcggaatctcacgggtgcccatagtgagactgatgatgaccttattgaggagctgcgtagtaagccactccctgaagtccatgaccgggactttgagtctgattttgaggagatgcatgatactgatgaggagctgaatgacctgtacaatacaagggagtatgttgagaagaagatcaagagtgatgagttctttaacatggatgacacaaagtgggatgccatgatcaaggaggccacagacaagggtcacttaactaacatgaaggagtgcgaggaaatcctcgaggacatgctctactgggacaagctacttcctgatgagatcaagcaaaaggtggagaccaaatttaatgagttgggagacatgtgtgagaggggagagatggaacctgagcaagcatatgagatgttcaaagaatttgaggataagatggtcgctgagtgcactgaattaattgaatcaaagatgccaactgacgctgatgaactgactgaatcaggaggtaagaaagttgagttagatgatctacctggcgagggacctgttctaaggtgggaatcacggattgtatttgttcctagtggagatgcatatcatcccaaaaacagaaaagtcaagctcagtgtgactgtgaaggaattgggactttcacgacatgctttccgtcggttgcgtgaggttgttggaaagaggtataattctgggaaagatgagctcacaataatcagtgaaaggtttgaacaccgggaagagaacagaaaagactgcttgaggacactgtatactctaataaaagacgcaatgaaagctgacaaacttgttgaggatgccaggaattcttatgttaaaggaagacttaaggctaatccacaatttatggagcgattgaagaggaagacagataagttgatggcagctgcataaggactggaatctaatctcaaccttgtgatctgtacaattgattcatttaaaggtgtatgcgggagtatgtttgatgcaagaactatgagccatccatcaggcatgagcaggaccaccacggtcctcaccgtgtcctcctacagcggctcctacagcggcgtggcggcggcaaacaccgtggatgacttgtgcgacatgat

SEQ ID NO: 35696 - DNA, 1686 bp, Zea Mays
accgccatctgggcccaacgacaaaccctaaacccttttcctccaaattcacgcgagctccaatctgtgtgggtctccgtcgtcgtctctctcctcccggccgccggcgcgatgaggcggttgctcggccacctacacccccatgcccagagcctcttcgcttccctgcctcgcaaaccgtccatcgccaccaagctccccttcctcctctcccgccgcctcctttccgatgccgcctcgcctcctgccccctcgctgccgcctcctcccccgccctctgccgacgtcacgaacacagagttgaagaagaggttggagacttactatggggtggatgaagaggctgaattaccatctgtcgctaaggctgttcttgagcggaatctcacgggtgcccatagtgagactgatgatgaccttattgaggagctgcgtagtaagccactccctgaagtccatgaccgggactttgagtctgattttgaggagatgcatgatactgatgaggagctgaatgacctgtacaatacaagggagtatgttgagaagaagatcaagagtgatgagttctttaacatggatgacacaaagtgggatgccatgatcaaggaggccacagacaagggtcacttaactaacatgaaggagtgcgaggaaatcctcgaggacatgctctactgggacaagctacttcctgatgagatcaagcaaaaggtggagaccaaatttaatgagttgggagacatgtgtgagaggggagagatggaacctgagcaagcatatgagatgttcaaagaatttgaggataagatggtcgctgagtgcactgaattaattgaatcaaagatgccaactgacgctgatgaactgactgaatcaggagtggagatgcatatcatcccaaaaacagaaaagtcaagctcagtgtgactgtgaaggaattgggactttcacgacatgctttccgtcggttgcgtgaggttgttggaaagaggtataattctgggaaagatgagctcacaataatcagtgaaaggtttgaacaccgggaagagaacagaaaagactgcttgaggacactgtatactctaataaaagacgcaatgaaagctgacaaacttgttgaggatgccaggaattcttatgttaaaggaagacttaaggctaatccacaatttatggagcgattgaagaggaagacagataagttgatggcagctgcataaggtgttacagagctccttgttttaacagctcctctctttccctcatcaacatgggtcattcttagtcataaatatatgttgagcatctcgaataacaatgtcaacacacatccccagcctatgcctttttggaaatcttttgctgctttcctaaattgaagatgcttaatttccatagtttgctgaggaaagtagctactgaggtgtaaattttggagtcaatatgtcgcttcttctgaagtcacagaatcatgctggcaggactggaatctaatctcaaccttgtgatctgtacaattgattcatttaaaggtgtatgcgggagtatgtttgatgcaagaactatgagccatccatcaggcatgagcaggaccaccacggtcctcaccgtgtcctcctacagcggctcctacagcggcgtggcggcggcaaacaccgtggatgacttgtgcgacatgat

SEQ ID NO: 35697 - DNA, 1505 bp, Zea Mays
accgccatctgggcccaacgacaaaccctaaacccttttcctccaaattcacgcgagctccaatctgtgtgggtctccgtcgtcgtctctctcctcccggccgccggcgcgatgaggcggttgctcggccacctacacccccatgcccagagcctcttcgcttccctgcctcgcaaaccgtccatcgccaccaagctccccttcctcctctcccgccgcctcctttccgatgccgcctcgcctcctgccccctcgctgccgcctcctcccccgccctctgccgacgtcacgaacacagagttgaagaagaggttggagacttactatggggtggatgaagaggctgaattaccatctgtcgctaaggctgttcttgagcggaatctcacgggtgcccatagtgagactgatgatgaccttattgaggagctgcgtagtaagccactccctgaagtccatgaccgggactttgagtctgattttgaggagatgcatgatactgatgaggagctgaatgacctgtacaatacaagggagtatgttgagaagaagatcaagagtgatgagttctttaacatggatgacacaaagtgggatgccatgatcaaggaggccacagacaagggtcacttaactaacatgaaggagtgcgaggaaatcctcgaggacatgctctactgggacaagctacttcctgatgagatcaagcaaaaggtggagaccaaatttaatgagttgggagacatgtgtgagaggggagagatggaacctgagcaagcatatgagatgttcaaagaatttgaggataagatggtcgctgagtgcactgaattaattgaatcaaagatgccaactgacgctgatgaactgactgaatcaggaggtaagaaagttgagttagatgatctacctggcgagggacctgttctaaggtgggaatcacggattgtatttgttcctagtggagatgcatatcatcccaaaaacagaaaagtcaagctcagtgtgactgtgaaggaattgggactttcacgacatgctttccgtcggttgcgtgaggttgttggaaagaggtataattctgggaaagatgagctcacaataatcagtgaaaggtttgaacaccgggaagagaacagaaaagactgcttgaggacactgtatactctaataaaagacgcaatgaaagctgacaaacttgttgaggatgccaggaattcttatgttaaaggaagacttaaggctaatccacaatttatggagcgattgaagaggaagacagataagttgatggcagctgcataaggactggaatctaatctcaaccttgtgatctgtacaattgattcatttaaaggtgtatgcgggagtatgtttgatgcaagaactatgagccatccatcaggcatgagcaggaccaccacggtcctcaccgtgtcctcctacagcggctcctacagcggcgtggcggcggcaaacaccgtggatgacttgtgcgacatgat

SEQ ID NO: 35698 - DNA, 2570 bp, Zea Mays
ccttcgccagttcaccccccacagaccacaactgtcgcgtcgccggctcgccgctcgccctatcccccaccgccaccggccacgcttccgtactgagccgctgagggggccagtcaggcgcgccgaccgccgaaactgccatgaagctgacctgcttgtccgccgccgccggcggcggcggcggctaccactcgccagcgagccatctcctggagctggagggggtccgcttcctcctcgactgccccatcgacctctccgctctcgcggccttcgcgccggtgcccctcgccggtgacgcaggaggtctcatccgcgcggtgccgcgctactggttgccagcggccgtgaaagaaggcggcgtggacgccgtgctcgtgtcttccgctacggggatgctcggactccccttcctcaccgggctccccggattcaccaacacgaaggtatatgtgacagaggtagcagcaaggatcggaaagccaatgatggaggagctggtggagatgcatcgtgagtttgtgaggtactatgggccagatacggatgcatcacccaagtggatggaaggggaggaactcaatgaactcatgtcaatgtcgcaaaaggcagtgattgaaggcagggaaaatgatttgacttctctggtgcctttatacaggtccgctatggaatcacaatcctgctgggtcctggcttgcacatctgtggcttctcttccagtcttcccgcagggcaatctatatgtctgaaagcttgagataaatccaggaaacgttgaagaatgcatgcacaaagtacagtctgttaaatatggagaggaggtttgcttcaatggcatatttatgctgaaagcttctagttcaggccttgaacttggcaattctacctggacaatacaaagtccaagagctagcattacctacctaccaagttcagtatttgtgtcggctcatgcattagattttgattacagctctctgaaggaaaatgatgtgattttgttttcggatttctcatccttgaatgacacggacgaggataatgagaaactgaatgagcattcaatggatgaaacggactcttctctatgtcgctactcagtgtttagggatgacggcgctgatgcagatgaaagggtgccattcgtgtgcaacaatgatgatatcacagaggagattgagagaatcagctttatatgctcatgtatttttggtgcagtaaaatctggaggctctgttctaataccaattggccgccttggtgttattcttttacttttggagcttatatcagaaatgctacattcttccagcctgaaggtgcccatatttgtgatttctgaaacagcagaagaaatatttgcttttaccaataccttgcctgaatggctatgcaagtcacgtcaagaaaagttattcgctggtgaagcattgtttggccatgtcgagcttttgaaggagggcaaattatttttgttcccgcatctacattcaaagggtttgctggcagcatggaaggagccttgtattgtgctatgtccacactggagccttagactcggcccagctgttcatttgcttcgtcgctggcatgcagacaaacggtgccttcttgttgtggagcaaggaaatggtgctgagttgagtcttaagcctttcatgcccttggcaattcaagtccttgagtgttctttcctttcgggcgtaagggcggggaaaattgatccattactgggagtgctcaaaccgaagtttgttatgcttccagaaggtcttaagtcgcggtgttcaataaagggggtgccatggtcattcttgtattactccaaggcctagacaactgaacgaaaccactgcagtggcgagattgagaacaaagctgcttgtaagcaatggacggtaccagctggcctctgcagaaaagcaaccagatcaatcaaagcgtcacttgctacactgtagcactattgaccctggtcgcttgctgtcagctttgcgagagaaggggatggtatgttcatttgctgcagatgatagccccactgctagtgaatcctcagttctggtcactagtcctggagatgctttggtgaggataacgcccgacacgactgttatatactgcgacgacgagagaacatccaatcaaatttatgatgcgcttagcagtgtttgtaaagggatctgactgcatcatgtgtaattgttgttcgttatggggtgtttggtttttagggactaatttttagtactccattttaatctataaattgctaaatgcggaaaataaaacttttatttttcgtacttggtaatttatgaactaaaataaaataggggactaaaaattagcctctagaaaccaaacattcccgaagttgtgcgtgtgcgttaaattgtgaattgccatgtggtggtttagtggttgaaaaaaggttaagttttttcttccagaacggagaaagtgagttatttcagtttgtgagaagcatgtttcgttctcgtttggcacaactgctgcttgttgaaaaagcagcttatctgagaagccggtgaaaaacaatttct

SEQ ID NO: 35699 - DNA, 2688 bp, Zea Mays
ccttcgccagttcaccccccacagaccacaactgtcgcgtcgccggctcgccgctcgccctatcccccaccgccaccggccacgcttccgtactgagccgctgagggggccagtcaggcgcgccgaccgccgaaactgccatgaagctgacctgcttgtccgccgccgccggcggcggcggcggctaccactcgccagcgagccatctcctggagctggagggggtccgcttcctcctcgactgccccatcgacctctccgctctcgcggccttcgcgccggtgcccctcgccggtgacgcaggaggtctcatccgcgcggtgccgcgctactggttgccagcggccgtgaaagaaggcggcgtggacgccgtgctcgtgtcttccgctacggggatgctcggactccccttcctcaccgggctccccggattcaccaacacgaaggtatatgtgacagaggtagcagcaaggatcggaaagccaatgatggaggagctggtggagatgcatcgtgagtttgtgaggtactatgggccagatacggatgcatcacccaagtggatggaaggggaggaactcaatgaactcatgtcaatgtcgcaaaaggcagtgattgaaggcagggaaaatgatttgacttctctggtgcctttatacagtccaggaaacgttgaagaatgcatgcacaaagtacagtctgttaaatatggagaggaggtttgcttcaatggcatatttatgctgaaagcttctagttcaggccttgaacttggcaattctacctggacaatacaaagtccaagagctagcattacctacctaccaagttcagtatttgtgtcggctcatgcattagattttgattacagctctctgaaggaaaatgatgtgattttgttttcggatttctcatccttgaatgacacggacgaggataatgagaaactgaatgagcattcaatggatgaaacggactcttctctatgtcgctactcagtgtttagggatgacggcgctgatgcagatgaaagggtgccattcgtgtgcaacaatgatgatatcacagaggagattgagagaatcagctttatatgctcatgtatttttggtgcagtaaaatctggaggctctgttctaataccaattggccgccttggtgttattcttttacttttggagcttatatcagaaatgctacattcttccagcctgaaggtgcccatatttgtgatttctgaaacagcagaagaaatatttgcttttaccaataccttgcctgaatggctatgcaagtcacgtcaagaaaagttattcgctggtgaagcattgtttggccatgtcgagcttttgaaggagggcaaattatttttgttcccgcatctacattcaaagggtttgctgtaagaatttgataaaatatgatttacagctaatacataggaagacttagaacaggcttgaaattcttttgtcatctttgctactcttcttataaagaatcagtaaaggctttgttcttatatttttaatttagcacaatttgtggggcatacatcttatgtatcctgtatccatatgagctcacttgtacttgggttgctgttttctgtcatatcttgacagggcagcatggaaggagccttgtattgtgctatgtccacactggagccttagactcggcccagctgttcatttgcttcgtcgctggcatgcagacaaacggtgccttcttgttgtggagcaaggaaatggtgctgagttgagtcttaagcctttcatgcccttggcaattcaagtccttgagtgttctttcctttcgggcgtaagggcggggaaaattgatccattactgggagtgctcaaaccgaagtttgttatgcttccagaaggtcttaagtcgcggtgttcaataaagggggtgccatggtcattcttgtattactccaaggcctagacaactgaacgaaaccactgcagtggcgagattgagaacaaagctgcttgtaagcaatggacggtaccagctggcctctgcagaaaagcaaccagatcaatcaaagcgtcacttgctacactgtagcactattgaccctggtcgcttgctgtcagctttgcgagagaaggggatggtatgttcatttgctgcagatgatagccccactgctagtgaatcctcagttctggtcactagtcctggagatgctttggtgaggataacgcccgacacgactgttatatactgcgacgacgagagaacatccaatcaaatttatgatgcgcttagcagtgtttgtaaagggatctgactgcatcatgtgtaattgttgttcgttatggggtgtttggtttttagggactaatttttagtactccattttaatctataaattgctaaatgcggaaaataaaacttttatttttcgtacttggtaatttatgaactaaaataaaataggggactaaaaattagcctctagaaaccaaacattcccgaagttgtgcgtgtgcgttaaattgtgaattgccatgtggtggtttagtggttgaaaaaaggttaagttttttcttccagaacggagaaagtgagttatttcagtttgtgagaagcatgtttcgttctcgtttggcacaactgctgcttgttgaaaaagcagcttatctgagaagccggtgaaaaacaatttct

SEQ ID NO: 35700 - DNA, 2532 bp, Zea Mays
ccttcgccagttcaccccccacagaccacaactgtcgcgtcgccggctcgccgctcgccctatcccccaccgccaccggccacgcttccgtactgagccgctgagggggccagtcaggcgcgccgaccgccgaaactgccatgaagctgacctgcttgtccgccgccgccggcggcggcggcggctaccactcgccagcgagccatctcctggagctggagggggtccgcttcctcctcgactgccccatcgacctctccgctctcgcggccttcgcgccggtgcccctcgccggtgacgcaggaggtctcatccgcgcggtgccgcgctactggttgccagcggccgtgaaagaaggcggcgtggacgccgtgctcgtgtcttccgctacggggatgctcggactccccttcctcaccgggctccccggattcaccaacacgaaggtatatgtgacagaggtagcagcaaggatcggaaagccaatgatggaggagctggtggagatgcatcgtgagtttgtgaggtactatgggccagatacggatgcatcacccaagtggatggaaggggaggaactcaatgaactcatgtcaatgtcgcaaaaggcagtgattgaaggcagggaaaatgatttgacttctctggtgcctttatacaggaaacgttgaagaatgcatgcacaaagtacagtctgttaaatatggagaggaggtttgcttcaatggcatatttatgctgaaagcttctagttcaggccttgaacttggcaattctacctggacaatacaaagtccaagagctagcattacctacctaccaagttcagtatttgtgtcggctcatgcattagattttgattacagctctctgaaggaaaatgatgtgattttgttttcggatttctcatccttgaatgacacggacgaggataatgagaaactgaatgagcattcaatggatgaaacggactcttctctatgtcgctactcagtgtttagggatgacggcgctgatgcagatgaaagggtgccattcgtgtgcaacaatgatgatatcacagaggagattgagagaatcagctttatatgctcatgtatttttggtgcagtaaaatctggaggctctgttctaataccaattggccgccttggtgttattcttttacttttggagcttatatcagaaatgctacattcttccagcctgaaggtgcccatatttgtgatttctgaaacagcagaagaaatatttgcttttaccaataccttgcctgaatggctatgcaagtcacgtcaagaaaagttattcgctggtgaagcattgtttggccatgtcgagcttttgaaggagggcaaattatttttgttcccgcatctacattcaaagggtttgctcatggaaggagccttgtattgtgctatgtccacactggagccttagactcggcccagctgttcatttgcttcgtcgctggcatgcagacaaacggtgccttcttgttgtggagcaaggaaatggtgctgagttgagtcttaagcctttcatgcccttggcaattcaagtccttgagtgttctttcctttcgggcgtaagggcggggaaaattgatccattactgggagtgctcaaaccgaagtttgttatgcttccagaaggtcttaagtcgcggtgttcaataaagggggtgccatggtcattcttgtattactccaagggcaagaccatcgagctctcaaatttacgtgaagatattgaggtgcatcttgcaactgatgttgccttccgattgcagcctagacaactgaacgaaaccactgcagtggcgagattgagaacaaagctgcttgtaagcaatggacggtaccagctggcctctgcagaaaagcaaccagatcaatcaaagcgtcacttgctacactgtagcactattgaccctggtcgcttgctgtcagctttgcgagagaaggggatggtatgttcatttgctgcagatgatagccccactgctagtgaatcctcagttctggtcactagtcctggagatgctttggtgaggataacgcccgacacgactgttatatactgcgacgacgagagaacatccaatcaaatttatgatgcgcttagcagtgtttgtaaagggatctgactgcatcatgtgtaattgttgttcgttatggggtgtttggtttttagggactaatttttagtactccattttaatctataaattgctaaatgcggaaaataaaacttttatttttcgtacttggtaatttatgaactaaaataaaataggggactaaaaattagcctctagaaaccaaacattcccgaagttgtgcgtgtgcgttaaattgtgaattgccatgtggtggtttagtggttgaaaaaaggttaagttttttcttccagaacggagaaagtgagttatttcagtttgtgagaagcatgtttcgttctcgtttggcacaactgctgcttgttgaaaaagcagcttatctgagaagccggtgaaaaacaatttct

SEQ ID NO: 35701 - DNA, 2537 bp, Zea Mays
ccttcgccagttcaccccccacagaccacaactgtcgcgtcgccggctcgccgctcgccctatcccccaccgccaccggccacgcttccgtactgagccgctgagggggccagtcaggcgcgccgaccgccgaaactgccatgaagctgacctgcttgtccgccgccgccggcggcggcggcggctaccactcgccagcgagccatctcctggagctggagggggtccgcttcctcctcgactgccccatcgacctctccgctctcgcggccttcgcgccggtgcccctcgccggtgacgcaggaggtctcatccgcgcggtgccgcgctactggttgccagcggccgtgaaagaaggcggcgtggacgccgtgctcgtgtcttccgctacggggatgctcggactccccttcctcaccgggctccccggattcaccaacacgaaggtatatgtgacagaggtagcagcaaggatcggaaagccaatgatggaggagctggtggagatgcatcgtgagtttgtgaggtactatgggccagatacggatgcatcacccaagtggatggaaggggaggaactcaatgaactcatgtcaatgtcgcaaaaggcagtgattgaaggcagggaaaatgatttgacttctctggtgcctttatacagtccaggaaacgttgaagaatgcatgcacaaagtacagtctgttaaatatggagaggaggtttgcttcaatggcatatttatgctgaaagcttctagttcaggccttgaacttggcaattctacctggacaatacaaagtccaagagctagcattacctacctaccaagttcagtatttgtgtcggctcatgcattagattttgattacagctctctgaaggaaaatgatgtgattttgttttcggatttctcatccttgaatgacacggacgaggataatgagaaactgaatgagcattcaatggatgaaacggactcttctctatgtcgctactcagtgtttagggatgacggcgctgatgcagatgaaagggtgccattcgtgtgcaacaatgatgatatcacagaggagattgagagaatcagctttatatgctcatgtatttttggtgcagtaaaatctggaggctctgttctaataccaattggccgccttggtgttattcttttacttttggagcttatatcagaaatgctacattcttccagcctgaaggtgcccatatttgtgatttctgaaacagcagaagaaatatttgcttttaccaataccttgcctgaatggctatgcaagtcacgtcaagaaaagttattcgctggtgaagcattgtttggccatgtcgagcttttgaaggagggcaaattatttttgttcccgcatctacattcaaagggtttgctcatggaaggagccttgtattgtgctatgtccacactggagccttagactcggcccagctgttcatttgcttcgtcgctggcatgcagacaaacggtgccttcttgttgtggagcaaggaaatggtgctgagttgagtcttaagcctttcatgcccttggcaattcaagtccttgagtgttctttcctttcgggcgtaagggcggggaaaattgatccattactgggagtgctcaaaccgaagtttgttatgcttccagaaggtcttaagtcgcggtgttcaataaagggggtgccatggtcattcttgtattactccaagggcaagaccatcgagctctcaaatttacgtgaagatattgaggtgcatcttgcaactgatgttgccttccgattgcagcctagacaactgaacgaaaccactgcagtggcgagattgagaacaaagctgcttgtaagcaatggacggtaccagctggcctctgcagaaaagcaaccagatcaatcaaagcgtcacttgctacactgtagcactattgaccctggtcgcttgctgtcagctttgcgagagaaggggatggtatgttcatttgctgcagatgatagccccactgctagtgaatcctcagttctggtcactagtcctggagatgctttggtgaggataacgcccgacacgactgttatatactgcgacgacgagagaacatccaatcaaatttatgatgcgcttagcagtgtttgtaaagggatctgactgcatcatgtgtaattgttgttcgttatggggtgtttggtttttagggactaatttttagtactccattttaatctataaattgctaaatgcggaaaataaaacttttatttttcgtacttggtaatttatgaactaaaataaaataggggactaaaaattagcctctagaaaccaaacattcccgaagttgtgcgtgtgcgttaaattgtgaattgccatgtggtggtttagtggttgaaaaaaggttaagttttttcttccagaacggagaaagtgagttatttcagtttgtgagaagcatgtttcgttctcgtttggcacaactgctgcttgttgaaaaagcagcttatctgagaagccggtgaaaaacaatttct

SEQ ID NO: 35702 - DNA, 2485 bp, Zea Mays
ccttcgccagttcaccccccacagaccacaactgtcgcgtcgccggctcgccgctcgccctatcccccaccgccaccggccacgcttccgtactgagccgctgagggggccagtcaggcgcgccgaccgccgaaactgccatgaagctgacctgcttgtccgccgccgccggcggcggcggcggctaccactcgccagcgagccatctcctggagctggagggggtccgcttcctcctcgactgccccatcgacctctccgctctcgcggccttcgcgccggtgcccctcgccggtgacgcaggaggtctcatccgcgcggtgccgcgctactggttgccagcggccgtgaaagaaggcggcgtggacgccgtgctcgtgtcttccgctacggggatgctcggactccccttcctcaccgggctccccggattcaccaacacgaaggtatatgtgacagaggtagcagcaaggatcggaaagccaatgatggaggagctggtggagatgcatcgtgagtttgtgaggtactatgggccagatacggatgcatcacccaagtggatggaaggggaggaactcaatgaactcatgtcaatgtcgcaaaaggcagtgattgaaggcagggaaaatgatttgacttctctggtgcctttatacagtccaggaaacgttgaagaatgcatgcacaaagtacagtctgttaaatatggagaggaggtttgcttcaatggcatatttatgctgaaagcttctagttcaggccttgaacttggcaattctacctggacaatacaaagtccaagagctagcattacctacctaccaagttcagtatttgtgtcggctcatgcattagattttgattacagctctctgaaggaaaatgatgtgattttgttttcggatttctcatccttgaatgacacggacgaggataatgagaaactgaatgagcattcaatggatgaaacggactcttctctatgtcgctactcagtgtttagggatgacggcgctgatgcagatgaaagggtgccattcgtgtgcaacaatgatgatatcacagaggagattgagagaatcagctttatatgctcatgtatttttggtgcagtaaaatctggaggctctgttctaataccaattggccgccttggtgttattcttttacttttggagcttatatcagaaatgctacattcttccagcctgaaggtgcccatatttgtgatttctgaaacagcagaagaaatatttgcttttaccaataccttgcctgaatggctatgcaagtcacgtcaagaaaagttattcgctggtgaagcattgtttggccatgtcgagcttttgaaggagggcaaattatttttgttcccgcatctacattcaaagggtttgctcatggaaggagccttgtattgtgctatgtccacactggagccttagactcggcccagctgttcatttgcttcgtcgctggcatgcagacaaacggtgccttcttgttgtggagcaaggaaatggtgctgagttgagtcttaagcctttcatgcccttggcaattcaagtccttgagtgttctttcctttcgggcgtaagcttccagaaggtcttaagtcgcggtgttcaataaagggggtgccatggtcattcttgtattactccaagggcaagaccatcgagctctcaaatttacgtgaagatattgaggtgcatcttgcaactgatgttgccttccgattgcagcctagacaactgaacgaaaccactgcagtggcgagattgagaacaaagctgcttgtaagcaatggacggtaccagctggcctctgcagaaaagcaaccagatcaatcaaagcgtcacttgctacactgtagcactattgaccctggtcgcttgctgtcagctttgcgagagaaggggatggtatgttcatttgctgcagatgatagccccactgctagtgaatcctcagttctggtcactagtcctggagatgctttggtgaggataacgcccgacacgactgttatatactgcgacgacgagagaacatccaatcaaatttatgatgcgcttagcagtgtttgtaaagggatctgactgcatcatgtgtaattgttgttcgttatggggtgtttggtttttagggactaatttttagtactccattttaatctataaattgctaaatgcggaaaataaaacttttatttttcgtacttggtaatttatgaactaaaataaaataggggactaaaaattagcctctagaaaccaaacattcccgaagttgtgcgtgtgcgttaaattgtgaattgccatgtggtggtttagtggttgaaaaaaggttaagttttttcttccagaacggagaaagtgagttatttcagtttgtgagaagcatgtttcgttctcgtttggcacaactgctgcttgttgaaaaagcagcttatctgagaagccggtgaaaaacaatttct

SEQ ID NO: 35703 - DNA, 1655 bp, Zea Mays
atagtagtctatacccgtgaacgaattaatgggcaatcgtggcttttcgcttcttcgtgcgttgcctgcctatatatgcagcgtgatggggggcatgtccctccggcctgggccgttactagcttagctcatatacgtacgtacgcaggaaggctgcaagagagaggagcaatataatggctggttcttcgatggacactgaagctgcaggcaaggagctcaagcagggcagcggcggcggcggcggctacaccatgccggctactgctcatgcggtggacacagactcgtggcagcaggtggggctgctcctggtgatcggcttcaactgcgcctacgtgctcagcttctccaacctcatgatggtgcccctgggctgggcgtggggcgtcgcctgcctgctgctcgtcggcgccgccgcgtggtacgccaactggctcctcgccggcctccacttcgtcgacggccagaggttcatccgctacagggacctcatgggcttcatattcgggaggaacatgtactacatcacctggttcctgcagttcgcaactctacttctgtgcaacatgggcttcattttgctaggagcaagagcgctcaaggcaatcaacacggagtttacccacaccccagccaggctgcagtggttcatcacggccacgggaatcgtttacttcgccttcgcctacttcgtgccgacgatttctgccatgaggaactggctcgccacgtcggcggcgctgacgttagcttacgacgtcgctctgctggctatcttgatcagagatgggaaatcgaacaagcagaaggactatgacgtccatgccggatcccaagccgagaaggtgttcaacgcgttgggcgccgtcgctgccatcctcgtctgcaacacgtccgggctgctcccggagatacagtcgacggtgcgggagccggcggttcgcggcatgaggcgggcgctgctgctgcagtacaccgccggcgccgcggggtactacggcatcagcgtggcggggtactgggcgtacgggtcagcggtgtcggagtacctccccaacgagctcggcggcccgaggtgggccgccgtcctcatcaacgccaccgccttcctgcagagcattgtgtcccaacacctgttcacggtgccgatccacgaggcgatggacacgcggctgcagcggctggacgaaggcatgttctcccgctacaacctcacgcgccgcgtctgcgcgcgggggctcgtcttcggcttcaacgtcttcgtcaccgcgctgttcccgttcatgggggacttcgtcaacctcgtcggctccttagcgctcgtcccgctcaccttcacgttccccagcatggccgtcctcaagatcaaaggcaagagcggtgggagatgtaacagactttggcattggggcatcatagttctgtcctcggctctctgcgttgctaccaccgccgccgccgttcgtttgatcttcaacaatgctaggatctaccacttcttcgccgacatgtagcgagcgagtagtagtgggattgacatgtgtatcgtcaccacgaggtattgcatgcccaaagcccaacagaaactagggcggggcgacgcccagcgtcagcggccgcggcaccggcgtcccagccctgcaagacggctg

SEQ ID NO: 35704 - DNA, 479 bp, Zea Mays
gcagacaagagtgcagctttctcatatacttcctttacatattacagttcggtggatacagttacaacagttacagaaatgattacaactgcaagagcaaaaaccgcagctaccgtggtaaacaggtacagaattactgagttgccatgacaggtgaggggcaacaaattgtacaatagttttatttcacacacattactactagcgtacacaagatgtttctttcccggcatagtggaataggacgtactgtatttgagcggcatgccaatgcaacatctcatcttggagatttttgtcaaaccagttttcattgggtgcagaacactcatgtttccacctcattgcatgagtttccacctcattgcagtaatccacttctctttccccaacccatggctatgatgtacaaaatcacgcagccagcaacggtcccaaaagtagtttcccaaaattttctgtttgctgctcgagtttcc

SEQ ID NO: 35705 - DNA, 825 bp, Zea Mays
ggttggtgcgtctgtttgggccggcccgtccacgccgaatgcggcggcgcaagtggcggcggaagcgcgcggagcagcgcgtgtacatggagctgagcgaggccatggactgcctggaccacatctgcacggagggatgcacggaggtcggcccggcggggcgggcgccggcgccggcgccgtgcgcgcgctacgccacgtgccggggcctgcagctgctcatccgccacttctcccagtgccaccgcaagagctgcgcgcggtgccagcgcatgtggcagctgctccgcctccactccgcgctctgcgaccgtaccgaccgctgcaacaccccgctctgcatgaggtttaagcagcaggagcaggataaggcggctgccaagggcggcgatgatggcgacaaatgggggcttctggtgaagaaggtgaagactgccagggtcttctcttctctggccaacaggaagcagatgagcaccaccaccacccagtgctgaggagcagcctgggatgcttaggggtcaaagttagattagtgagagagaatgaagcgagcagtttttttttgggtctgttttgagatgtcagatctcttttgagatatgtacatgtacatgcctactttgtcaccctacgttggtatagctcttttatcgaggtgggagttggtcagccggaagtctatgtaaaaagtgcgcatgtatcattatataataatagggaaatatgagaagtattttagtcttatgatacctttcagtattatggtaccctgacaaaaatgatcaatccaaaacgacacgacgcagaatggacgactgcctc

SEQ ID NO: 35706 - DNA, 820 bp, Zea Mays
cttgtggctcacaggaacttgtcaggtgcggcgaggatgaggatgacgacatggaggagcacgcggtgcaggtgctggtgctggcgcacgcgtaccaggtgccgtggctgaagcgggcgtgcgagggcgccatcggcgcgcgcctcaccgcggactcggtggtggacgtgctgcagctggccggcctctgcgacgcgccgcgcctgcacctgcgctgcgccaggctgctggccaaggagttcgcggccgtggagcgcaccgaggcctggcgcttcctgcaggagaacgacccctggcaggagctccacgtcctgcagcgcctgcacgaggccgacatggaggtttaagcagcaggagcaggataaggcggctgccaagggcggcgatgatggcgacaaatgggggcttctggtgaagaaggtgaagactgccagggtcttctcttctctggccaacaggaagcagatgagcaccaccaccacccagtgctgaggagcagcctgggatgcttaggggtcaaagttagattagtgagagagaatgaagcgagcagtttttttttgggtctgttttgagatgtcagatctcttttgagatatgtacatgtacatgcctactttgtcaccctacgttggtatagctcttttatcgaggtgggagttggtcagccggaagtctatgtaaaaagtgcgcatgtatcattatataataatagggaaatatgagaagtattttagtcttatgatacctttcagtattatggtaccctgacaaaaatgatcaatccaaaacgacacgacgcagaatggacgactgcctc

SEQ ID NO: 35707 - DNA, 1163 bp, Zea Mays
aattggcctggctacccagacaagagcacgcaacgcaagcaactgcgacgtctcccgcccccgccgcgccccggaccttttccgcagatattttttttatccccccacgcccccggctcgttcccttccattccaccacctctcgccagacaacgagatgtgcgaggcaccgcggctcggcaaccgcgccggaggatccccgcgcattcctctgtcctggcctcggcgtcgccggtgctcggcagcatcctggagcgtcgcctgcggaaggacagggagagcggcaagcccgggcggtccgtcgtccggatccgcggcgtcaccgacgacgccgccgcggccttcgtccgcctcctctacgccggcaggtgcggcgaggatgaggatgacgacatggaggagcacgcggtgcaggtgctggtgctggcgcacgcgtaccaggtgccgtggctgaagcgggcgtgcgagggcgccatcggcgcgcgcctcaccgcggactcggtggtggacgtgctgcagctggccggcctctgcgacgcgccgcgcctgcacctgcgctgcgccaggctgctggccaaggagttcgcggccgtggagcgcaccgaggcctggcgcttcctgcaggagaacgacccctggcaggagctccacgtcctgcagcgcctgcacgaggccgacatggaggtttaagcagcaggagcaggataaggcggctgccaagggcggcgatgatggcgacaaatgggggcttctggtgaagaaggtgaagactgccagggtcttctcttctctggccaacaggaagcagatgagcaccaccaccacccagtgctgaggagcagcctgggatgcttaggggtcaaagttagattagtgagagagaatgaagcgagcagtttttttttgggtctgttttgagatgtcagatctcttttgagatatgtacatgtacatgcctactttgtcaccctacgttggtatagctcttttatcgaggtgggagttggtcagccggaagtctatgtaaaaagtgcgcatgtatcattatataataatagggaaatatgagaagtattttagtcttatgatacctttcagtattatggtaccctgacaaaaatgatcaatccaaaacgacacgacgcagaatggacgactgcctc

SEQ ID NO: 35708 - DNA, 1840 bp, Zea Mays
aattggcctggctacccagacaagagcacgcaacgcaagcaactgcgacgtctcccgcccccgccgcgccccggaccttttccgcagatattttttttatccccccacgcccccggctcgttcccttccattccaccacctctcgccagacaacgagatgtgcgaggcaccgcggctcggcaaccgcgccggcgccggcgacccggccgccgccgacgtcgacgtcgtcacgacgggcgggcgccggaggatccccgcgcattcctctgtcctggtgcggcgaggatgaggatgacgacatggaggagcacgcggtgcaggtgctggtgctggcgcacgcgtaccaggtgccgtggctgaagcgggcgtgcgagggcgccatcggcgcgcgcctcaccgcggactcggtggtggacgtgctgcagctggccggcctctgcgacgcgccgcgcctgcacctgcgctgcgccaggctgctggccaaggagttcgcggccgtggagcgcaccgaggcctggcgcttcctgcaggagaacgacccctggcaggagctccacgtcctgcagcgcctgcacgaggccgacatggaaacggtggacatggtcggacctccgtgtcgcgttcgtgcgcgtacggcgtacgaacgacatgacgccagtgttcttttctatgtggttggtgcgtctgtttgggccggcccgtccacgccgaatggtcgggcgaatgttcgcatctctccgacctcttacctttccgactctgttttgattttacacgttttcatctggctgggggtagacaaatcgtgagaccaagtaatttgtgccttggtttgaccaaagttagcagaaatcttggcggctactccatcagttccatctacaaacattcttcgtagggcttcaaaagtccagcggagaacgtttcaccaataataacgtttgttggaaacaacagttccacgatgcacgtttttttttgtgtaccgacgaccgacccagcctcttagctaaagcactgacccgatgcgcgctcggttccttcctggacatgcagcggcggcgcaagtggcggcggaagcgcgcggagcagcgcgtgtacatggagctgagcgaggccatggactgcctggaccacatctgcacggagggatgcacggaggtcggcccggcggggcgggcgccggcgccggcgccgtgcgcgcgctacgccacgtgccggggcctgcagctgctcatccgccacttctcccagtgccaccgcaagagctgcgcgcggtgccagcgcatgtggcagctgctccgcctccactccgcgctctgcgaccgtaccgaccgctgcaacaccccgctctgcatgaggtttaagcagcaggagcaggataaggcggctgccaagggcggcgatgatggcgacaaatgggggcttctggtgaagaaggtgaagactgccagggtcttctcttctctggccaacaggaagcagatgagcaccaccaccacccagtgctgaggagcagcctgggatgcttaggggtcaaagttagattagtgagagagaatgaagcgagcagtttttttttgggtctgttttgagatgtcagatctcttttgagatatgtacatgtacatgcctactttgtcaccctacgttggtatagctcttttatcgaggtgggagttggtcagccggaagtctatgtaaaaagtgcgcatgtatcattatataataatagggaaatatgagaagtattttagtcttatgatacctttcagtattatggtaccctgacaaaaatgatcaatccaaaacgacacgacgcagaatggacgactgcctc

SEQ ID NO: 35709 - DNA, 1069 bp, Zea Mays
aattggcctggctacccagacaagagcacgcaacgcaagcaactgcgacgtctcccgcccccgccgcgccccggaccttttccgcagatattttttttatccccccacgcccccggctcgttcccttccattccaccacctctcgccagacaacgagatgtgcgaggcaccgcggctcggcaaccgcgccggcgccggcgacccggccgccgccgacgtcgacgtcgtcacgacgggcgggcgccggaggatccccgcgcattcctctgtcctggtgcggcgaggatgaggatgacgacatggaggagcacgcggtgcaggtgctggtgctggcgcacgcgtaccaggtgccgtggctgaagcgggcgtgcgagggcgccatcggcgcgcgcctcaccgcggactcggtggtggacgtgctgcagctggccggcctctgcgacgcgccgcgcctgcacctgcgctgcgccaggctgctggccaaggagttcgcggccgtggagcgcaccgaggcctggcgcttcctgcaggagaacgacccctggcaggagctccacgtcctgcagcgcctgcacgaggccgacatggaggtttaagcagcaggagcaggataaggcggctgccaagggcggcgatgatggcgacaaatgggggcttctggtgaagaaggtgaagactgccagggtcttctcttctctggccaacaggaagcagatgagcaccaccaccacccagtgctgaggagcagcctgggatgcttaggggtcaaagttagattagtgagagagaatgaagcgagcagtttttttttgggtctgttttgagatgtcagatctcttttgagatatgtacatgtacatgcctactttgtcaccctacgttggtatagctcttttatcgaggtgggagttggtcagccggaagtctatgtaaaaagtgcgcatgtatcattatataataatagggaaatatgagaagtattttagtcttatgatacctttcagtattatggtaccctgacaaaaatgatcaatccaaaacgacacgacgcagaatggacgactgcctc

SEQ ID NO: 35710 - DNA, 2065 bp, Zea Mays
aattggcctggctacccagacaagagcacgcaacgcaagcaactgcgacgtctcccgcccccgccgcgccccggaccttttccgcagatattttttttatccccccacgcccccggctcgttcccttccattccaccacctctcgccagacaacgagatgtgcgaggcaccgcggctcggcaaccgcgccggcgccggcgacccggccgccgccgacgtcgacgtcgtcacgacgggcgggcgccggaggatccccgcgcattcctctgtcctggtgcggcgaggatgaggatgacgacatggaggagcacgcggtgcaggtgctggtgctggcgcacgcgtaccaggtgccgtggctgaagcgggcgtgcgagggcgccatcggcgcgcgcctcaccgcggactcggtggtggacgtgctgcagctggccggcctctgcgacgcgccgcgcctgcacctgcgctgcgccaggctgctggccaaggagttcgcggccgtggagcgcaccgaggcctggcgcttcctgcaggagaacgacccctggcaggagctccacgtcctgcagcgcctgcacgaggccgacatggtacgcacgcttttttttcttcttccatggattgctaccggaccggaccggaccggaccacggtcggtcgatgtaaatctgactgacacatgcttgcacgcaccgcaccgaatggaagtgcgagtgcgaagaaattatcatgcatgcatgcatgatggcgcacgccggcggggtggggtgggcactggggagcatgctttctttaccgtcaagcttttgttccaggaaacggtggacatggtcggacctccgtgtcgcgttcgtgcgcgtacggcgtacgaacgacatgacgccagtgttcttttctatgtggttggtgcgtctgtttgggccggcccgtccacgccgaatggtcgggcgaatgttcgcatctctccgacctcttacctttccgactctgttttgattttacacgttttcatctggctgggggtagacaaatcgtgagaccaagtaatttgtgccttggtttgaccaaagttagcagaaatcttggcggctactccatcagttccatctacaaacattcttcgtagggcttcaaaagtccagcggagaacgtttcaccaataataacgtttgttggaaacaacagttccacgatgcacgtttttttttgtgtaccgacgaccgacccagcctcttagctaaagcactgacccgatgcgcgctcggttccttcctggacatgcagcggcggcgcaagtggcggcggaagcgcgcggagcagcgcgtgtacatggagctgagcgaggccatggactgcctggaccacatctgcacggagggatgcacggaggtcggcccggcggggcgggcgccggcgccggcgccgtgcgcgcgctacgccacgtgccggggcctgcagctgctcatccgccacttctcccagtgccaccgcaagagctgcgcgcggtgccagcgcatgtggcagctgctccgcctccactccgcgctctgcgaccgtaccgaccgctgcaacaccccgctctgcatgaggtttaagcagcaggagcaggataaggcggctgccaagggcggcgatgatggcgacaaatgggggcttctggtgaagaaggtgaagactgccagggtcttctcttctctggccaacaggaagcagatgagcaccaccaccacccagtgctgaggagcagcctgggatgcttaggggtcaaagttagattagtgagagagaatgaagcgagcagtttttttttgggtctgttttgagatgtcagatctcttttgagatatgtacatgtacatgcctactttgtcaccctacgttggtatagctcttttatcgaggtgggagttggtcagccggaagtctatgtaaaaagtgcgcatgtatcattatataataatagggaaatatgagaagtattttagtcttatgatacctttcagtattatggtaccctgacaaaaatgatcaatccaaaacgacacgacgcagaatggacgactgcctc

SEQ ID NO: 35711 - DNA, 1946 bp, Zea Mays
cagggctgcggcaattggcctggctacccagacaagagcacgcaacgcaagcaactgcgacgtctcccgcccccgccgcgccccggaccttttccgcagatattttttttatccccccacgcccccggctcgttcccttccattccaccacctctcgccagacaacgagatgtgcgaggcaccgcggctcggcaaccgcgccggaggatccccgcgcattcctctgtcctggcctcggcgtcgccggtgctcggcagcatcctggagcgtcgcctgcggaaggacagggagagcggcaagcccgggcggtccgtcgtccggatccgcggcgtcaccgacgacgccgccgcggccttcgtccgcctcctctacgccggcaggtgcggcgaggatgaggatgacgacatggaggagcacgcggtgcaggtgctggtgctggcgcacgcgtaccaggtgccgtggctgaagcgggcgtgcgagggcgccatcggcgcgcgcctcaccgcggactcggtggtggacgtgctgcagctggccggcctctgcgacgcgccgcgcctgcacctgcgctgcgccaggctgctggccaaggagttcgcggccgtggagcgcaccgaggcctggcgcttcctgcaggagaacgacccctggcaggagctccacgtcctgcagcgcctgcacgaggccgacatggaaacggtggacatggtcggacctccgtgtcgcgttcgtgcgcgtacggcgtacgaacgacatgacgccagtgttcttttctatgtggttggtgcgtctgtttgggccggcccgtccacgccgaatggtcgggcgaatgttcgcatctctccgacctcttacctttccgactctgttttgattttacacgttttcatctggctgggggtagacaaatcgtgagaccaagtaatttgtgccttggtttgaccaaagttagcagaaatcttggcggctactccatcagttccatctacaaacattcttcgtagggcttcaaaagtccagcggagaacgtttcaccaataataacgtttgttggaaacaacagttccacgatgcacgtttttttttgtgtaccgacgaccgacccagcctcttagctaaagcactgacccgatgcgcgctcggttccttcctggacatgcagcggcggcgcaagtggcggcggaagcgcgcggagcagcgcgtgtacatggagctgagcgaggccatggactgcctggaccacatctgcacggagggatgcacggaggtcggcccggcggggcgggcgccggcgccggcgccgtgcgcgcgctacgccacgtgccggggcctgcagctgctcatccgccacttctcccagtgccaccgcaagagctgcgcgcggtgccagcgcatgtggcagctgctccgcctccactccgcgctctgcgaccgtaccgaccgctgcaacaccccgctctgcatgaggtttaagcagcaggagcaggataaggcggctgccaagggcggcgatgatggcgacaaatgggggcttctggtgaagaaggtgaagactgccagggtcttctcttctctggccaacaggaagcagatgagcaccaccaccacccagtgctgaggagcagcctgggatgcttaggggtcaaagttagattagtgagagagaatgaagcgagcagtttttttttgggtctgttttgagatgtcagatctcttttgagatatgtacatgtacatgcctactttgtcaccctacgttggtatagctcttttatcgaggtgggagttggtcagccggaagtctatgtaaaaagtgcgcatgtatcattatataataatagggaaatatgagaagtattttagtcttatgatacctttcagtattatggtaccctgacaaaaatgatcaatccaaaacgacacgacgcagaatggacgactgcctc

SEQ ID NO: 35712 - DNA, 2057 bp, Zea Mays
cagatgtattacaaggtcaatgtgggaggacaactggcataattttacgatctggttctgaaatgaatgtcaacagcataatttctgatgctgtgcctctcaatgcacattctgctcttgatcttttggcatcagcttatggagatccatcagattctaatgaagatgttatgaaccaaaaaattcaggtccctaatgcctccaatgagttaataaatcacgcaattgaatcacaacccattacttcaagtaatggtgattgtgatggaacgaaagtgtccttaagtagcaaagaatgccaacaaggaccactttcccagggctcaaagtgtattggtaactcaaacaccttgaatggaccaaaaggtgttcacactagaaataaggatctacttaagatggtgctttctgagggttttcaaccaaaatatatatattcagaaacgcataagaaagttcagtgtgaaccatcaagctcaaacaagacttcaatggagaccccttgtagcacaaactatcatgttagccataacagtgctacaatctgtatgaacagtaaaagaggctctacaacgatggtgaacaacttagctacatcagttgtgaaacctgataaggattcatcaagaatgcatgtattttgtcttgaacatgctattgaggttgagaagcaacttcaagctattggtggtgccgatatttttcttttatgccatccaggatattttttcaaagaggccactattgcggatagggagacgatacaggaagttgtgcaggatgaggaagcaataccaacaaatagtgattgggctgtgaaactgggcattaatctttactatagtgctaatcttgctaagtctcctttatacaacaagcaagtgccatacaatagagttatctatgaggcatttggctacggctctcccagtgactcaccagtaaagctgaggacttattccagaaggcaaggcaggacgaagaaaatactcttggctggcaggtggtgtgggaaagtatggatgtcaaaccaggttcatccatatttggctgacagaatcaaaattcatgaaccagaagaaaccgataaaacttttccttctgatcagaaatccaatgctgaacctgttgaagattcaagtagagaggcagcctccacaagaaagagtagcagcagagcaattgaaggaaaaacgagcaagagggagaaagaatcattggagaaagctaatgccaagaatccaaaatttactgaagaggacaattccaaatcactagagggtactgctgaggcctccacacggaagataaagagcagatcagttctagaaaaaacaatcaagaaggagaaagaacacgtggaaaaagcaaaaaccaagaagctcaaacatactgaaaaggtttcagaagcactaaaaggtccttcagaagcttccttccccgcaccagctgggatggtagtccgcagtagctctaggattgccaataggaaatcaaagatggaagaagaggataatggctcagctaaccctccaaagccaaaggctgaaggcgacaaagataatcctgctggccgttcaagagcaaaatcaccaaggcaaaagactaaagcagacactaagaagaaaacaaaggaaactagagcagaaaagcgaagggctcctagtccagcttctcagaaggatgaagaagagcaagcatatgatgctgagggatgttctatcactaaacaacgtctgtctctacgtaagaagggggctaaaacggaagaaaagcagcagacggaggaatccagatacaggggaagggctcccccaagttctccagaacgcaaggaagaatatgcgagcgacatcgagggctgttccatgagtttcggcacgaaacaggcactgtctctgcataagaatgatatctgcccggagaagggctgctgcaggaagttcttctcgcacaagtatctgctgcagcatcgcaaggttcacgccgacgaccgtccacgaaatgcccgtggaagggctgcagcatggcgttcaagtggccatgggctaggatag

SEQ ID NO: 35713 - DNA, 719 bp, Zea Mays
caaaaaaaagaaagagaaagaaaaggatccaagacctgaccagactcgacgacggcctggctaggtgtgtgcaccatactttacagtaatggccgataaggttacttctggcccagcccacaccagccctgcagcccatcttagatgtgcgctgtggctccaactgcgagcccttttatcccttatccaacctgatccaccacaccaccattcccgagcacactagtctctcttccctgcgcttgctcgctccttcttgcccccatggcgctgctcgccgtccagggcatggccatgtccaccgccgccgcggccctcccatctcacaaccacggcgccgtctcatcctacgtctccacctcctcctacgcgctcgcagcctccgccgccttcccccgcgcccgggctgcgttcgccgtcggcgccgtcttgtcggccaccgtcactccagttcttgacgtctactgcgggagaggggacaagaaaacgaaaaggggcaaaaggttcaaccattcatatggcaatgcgaggccgcgcaacaagaagaagggaactgggcctgcgcggctctttgcccctcctgctcctccaaggaaggatcagttcgatgatggggagatcatttcaatcgagattgacgaggacatcctggaatagctgctgagttctttactctcttcaaaatgaaactgtgtcgaaataagttttttttagaagat

SEQ ID NO: 35714 - DNA, 1189 bp, Zea Mays
cctttgctacctgatttttctttggaaaagctgtagaggcgcatgctatacacagggcgtatgggggtgcctgcgtgcagatgaggctgtcctacagctccatggctccaatctttctcaaccttatccaatggatggactgcagctgctccctgtcatacacgctccctagctaccttggcctgctcgaggttctcgtctacaaggtttatgtcgatgaagatgcctccatatccaccatagaaaggagggcgagcctgaaggaattctacagtatgcttactatccaccatagaaactagtgattaagaagctttttttttctgttcaagatttttttttgttgatgctgctgctgctgctgcagcagtggtttaatatagttttgggaccccatggaatgcagctatcatataccctttcttgcaacaactggaggacaacttgatggacaaggactgcaaggacaaagggtggtctgctgctgccgccgccggcggcggcggcggtcggaagcttgttgccgaagatgacagggaggatgagtgtggcatttgcctggagacctgcaccaagatggtccttccgaattgcaaccatgccatgtgcatcaactgttaccgagactggtacacaaggtcccagtcatgcccgttctgccgcgggagcctgaagagggtccggtccagagacctgtgggtgctcaccggcgacgacgacgtgatcgacacggtgacgctggagaaggagaacgtgaagcacttcctcagcttcatcgacagcctgcccctgatcgtccccgacaacatgctgctggtctactacgactacctagtctagcaaggctcctccccccaccccccactctgaagctctggaagaggaagggggtctgggaagaagacgcggcgtacaagcgacaagggttacccgcagccgaccatcctctgcggatcgagttggcaaagcgaagccgttgccgaccaacagacgatactctcgtgggcatgccacgccgttgcgctggctttattgcatggtggcgttgctcgctgtaatggttgtaaataaagaaggaaaatgtctcgggttttatatataatatactagcttgacatttctcgtctggcgaattgccggactgttcagaatgaagaaatcagggggcctctacttctctgctctatat

SEQ ID NO: 35715 - DNA, 1527 bp, Zea Mays
cttaaaacaatttaacaattgggcaagagtggaaatttggagacagcagaacggcaccataactgctcctaatctaagcaccatgagtgccctctatcagtgtaggcttttttttcctcagcctttgtctccttccctcccccaaactttattccaaagcttttgcacttcttgtcaagcaaaccaagcaaaaacaatttgcaagttgccaagacatctcctgcactccttgcttatataaaaacccaaggggacgcaggagggacaaagggcccccctttcacagtttccctcccccaaaactactttcccacaaacccagaccagagcagcttgcgtctatcgtttcttttcttgcttgagagcttggaatagcggggggtggaggaagcggaagaggagcttcgttttgtgttctagagggagtcatgttccatggcggcaggcctctgtccctccgggggtctctcaaggcgcttgaagctgatatccaccatgccaacaccctggcgcatgctatacacagggcgtatgggggtgcctgcgtgcagatgaggctgtcctacagctccatggctccaatctttctcaaccttatccaatggatggactgcagctgctccctgtcatacacgctccctagctaccttggcctgctcgaggttctcgtctacaaggtttatgtcgatgaagatgcctccatatccaccatagaaaggagggcgagcctgaaggaattctacactatcatataccctttcttgcaacaactggaggacaacttgatggacaaggactgcaaggacaaagggtggtctgctgctgccgccgccggcggcggcggcggtcggaagcttgttgccgaagatgacagggaggatgagtgtggcatttgcctggagacctgcaccaagatggtccttccgaattgcaaccatgccatgtgcatcaactgttaccgagactggtacacaaggtcccagtcatgcccgttctgccgcgggagcctgaagagggtccggtccagagacctgtgggtgctcaccggcgacgacgacgtgatcgacacggtgacgctggagaaggagaacgtgaagcacttcctcagcttcatcgacagcctgcccctgatcgtccccgacaacatgctgctggtctactacgactacctagtctagcaaggctcctccccccaccccccactctgaagctctggaagaggaagggggtctgggaagaagacgcggcgtacaagcgacaagggttacccgcagccgaccatcctctgcggatcgagttggcaaagcgaagccgttgccgaccaacagacgatactctcgtgggcatgccacgccgttgcgctggctttattgcatggtggcgttgctcgctgtaatggttgtaaataaagaaggaaaatgtctcgggttttatatataatatactagcttgacatttctcgtctggcgaattgccggactgttcagaatgaagaaatcagggggcctctacttctctgctctatat

SEQ ID NO: 35716 - DNA, 1550 bp, Zea Mays
cttaaaacaatttaacaattgggcaagagtggaaatttggagacagcagaacggcaccataactgctcctaatctaagcaccatgagtgccctctatcagtgtaggcttttttttcctcagcctttgtctccttccctcccccaaactttattccaaagcttttgcacttcttgtcaagcaaaccaagcaaaaacaatttgcaagttgccaagacatctcctgcactccttgcttatataaaaacccaaggggacgcaggagggacaaagggcccccctttcacagtttccctcccccaaaactactttcccacaaacccagaccagagcagcttgcgtctatcgtttcttttcttgcttgagagcttggaatagcggggggtggaggaagcggaagaggagcttcgttttgtgttctagagggagtcatgttccatggcggcaggcctctgtccctccgggggtctctcaaggcgcttgaagctgatatccaccatgccaacaccctggcgcatgctatacacagggcgtatgggggtgcctgcgtgcagatgaggctgtcctacagctccatggctccaatctttctcaaccttatccaatggatggactgcagctgctccctgtcatacacgctccctagctaccttggcctgctcgaggttctcgtctacaaggtttatgtcgatgaagatgcctccatatccaccatagaaaggagggcgagcctgaaggaattctacattttgggaccccatggaatgcagctatcatataccctttcttgcaacaactggaggacaacttgatggacaaggactgcaaggacaaagggtggtctgctgctgccgccgccggcggcggcggcggtcggaagcttgttgccgaagatgacagggaggatgagtgtggcatttgcctggagacctgcaccaagatggtccttccgaattgcaaccatgccatgtgcatcaactgttaccgagactggtacacaaggtcccagtcatgcccgttctgccgcgggagcctgaagagggtccggtccagagacctgtgggtgctcaccggcgacgacgacgtgatcgacacggtgacgctggagaaggagaacgtgaagcacttcctcagcttcatcgacagcctgcccctgatcgtccccgacaacatgctgctggtctactacgactacctagtctagcaaggctcctccccccaccccccactctgaagctctggaagaggaagggggtctgggaagaagacgcggcgtacaagcgacaagggttacccgcagccgaccatcctctgcggatcgagttggcaaagcgaagccgttgccgaccaacagacgatactctcgtgggcatgccacgccgttgcgctggctttattgcatggtggcgttgctcgctgtaatggttgtaaataaagaaggaaaatgtctcgggttttatatataatatactagcttgacatttctcgtctggcgaattgccggactgttcagaatgaagaaatcagggggcctctacttctctgctctatat

SEQ ID NO: 35717 - DNA, 2036 bp, Zea Mays
gggagagtcaagttcggtgttgttacctactttttggtgtctacctccgtccgtctgcactaggcgacctgaaaactcagtaatgctagttaacctctccagtatctccttctcggatattgaatcacacacggcaacgccgcaacgcgcagcggactcgggtcctcgcactcgcaatcaagcatgggggccgccgttgggaagccagctttcggtgtcgccgtcgcgccgaagacgcaggcggaggagcggctcgccctcgcggagcacgccctgctccagtggactcgctcacccggcgccgactcgggcatctgggacgccggggcgagctacaccaacagaggcctcctggcggcggtcgacgaggtgctcctcctggcggcggagaaccctttcccgctcccggaggccgcctccgcgcgccgccgcctggacagcgccgtcggcgccgccgcgtcgcgcatggtggaggagttcctgcgcgtcaggcgcccgcgaaaggaacagctcggcgggcaccggcggggtggtcgacgcgtccgacgggagccggtcgagggcgagctcgagcgtgcctcacgaggtcgcggccctcttggacaccgaggtctgggacgacctcgatctcatctgccccgcaggcgtgtccgtccttcacgagatcgcgcttcgggtcgttcgtgccggatgcaccgaggtactcttccgggcgttcgccaacgctccctgcgatgtgctagacagtttcttgtcaattcttcgggtcgaatgctcgcagcagacgactgaggccgtgatcaagcggtggacgacggtgacggagatcatagggaaggccatggtcgccatgcggaggcagctgtacgcgcagaacccaggcgccttcgacggtttcagggacgaatacttgctggccatcgcggagaaccgcatcctgatcctgctcgacttcgccaacggattcaccagcatcacgtcgcacgagaagctcgtgtacatgctcggcatgtacgaggctctcaccgacgccgctcccagcctcctgctcctcctcagcggcgcgcgcaaggaggccatctcggagcggacacaaggtggcgtccacccgctgacacgcgacgccatgacctgcgtcgagctgctggcgaggcaccgcaccacgctcgatctgatcctcgcgggcgccgacgagcgcggctccctcgccggcgtcgtctcggacctgatcgcgggcctggaacgcaacctccagaggagattcgctgtcgcctgcgcggacgcagggggctcgcggcacctcttcctggcgaacaacatcagcttcgtgctgagccgcgtcgcggacaacgacggcgtggcttccctgctcggggacgcgtgggcggcgcggcgccggagccgggtcgagcagcacgtagcgagctacgccgcgtcgtcgtggggccccgtcgtcgctctcctggacacgaccgcgtgtggcagaggcaagtcggcgaaagttctggcggagttcaacgcggcgtttaacagatcgcgcgacagcgagatgtgccgcgaggtcccggaccccgtgctccgagcggtgctgcggaacgccgtgtcggagatggtggtccctgcttactgcgcgttcctgcagaagcaacccaagcttgggaaatctgccaggtacacggcagatgatctggtcgagttgctatcggagttgttcgaaggggaatccacggatggcatcaaaatctagctttcaactttgccaaactgagaacgcttgacttctgtaacactacaaaaaaaagttccatttcttcattgatagcagcagtggtagcagtcagacttctttttttagcatgcacggataatctgaatattccattgtaataaaaaaaagaaaaggggacaatctggacatgaaaatgtgccagaaagcatcgacatttccttgttaacagaagtctacatacattcttatttcgggattgaaggaaaaagatgggacacagaagcctaagatacgatagataaggtca

SEQ ID NO: 35718 - DNA, 757 bp, Zea Mays
acatagctcccagtcagtgtcaagggaacaggtcgctggcgtcctttttgaagttctggttgaaatcgaattcgctgatggtagctcatttcacctgtcagcagaatttctcagagtatacagcccagcagctgatagcaaaatccgatcagtgggcggtgaaaaggttatatttggacgacgacatgttgggataatgtcagctgaatcagtaggaaactacggagtccggatactctttgatgacttgcacaagacagggatcttcacatgggattacttgcaccatctcggttcaaacaaattcagtctgatgagaaattacatcagaactttgagaaagcatggtcttagtcgcgatccccagagaaggaaatgatggagcaacagtctctagacagcctcgcttcttggcgcatggatcgatccatcaggcttgcctgccatgtaacaaagagatgctcaattgaatatttgagatgtgaacgcataacacaaggatatccattaactagtgatcaacagtgactgtgatgggaaagactgaataaaagtactaaaacgttcatttactggagttgattgactatttggaacgaactggacaagacaccctcaattctcatatgtacgtatgcagttttctttcctctgtgtgaagggtgctttgtttcgatcaggagcacaaaaaattgcatcgtttaccggaggcttcccaaaccttcagtctgccctgtttgatgtaagggtagaagat

SEQ ID NO: 35719 - DNA, 821 bp, Zea Mays
gtaccagagagcggaagagatttccatcccttcacatttctcattccctccctcgttatcccgcattcgtctatggcggctgcactgggcgccgtgctccggcggctgcatacggcggcggcgcagccccctcgcctgacgaaattcgcgctgcacccgcccaaattcaatttctcagagtatacagcccagcagctgatagcaaaatccgatcagtgggcggtgaaaaggttatatttggacgacgacatgttgggataatgtcagctgaatcagtaggaaactacggagtccggatactctttgatgacttgcacaagacagggatcttcacatgggattacttgcaccatctcggttcaaacaaattcagtctgatgagaaattacatcagaactttgagaaagcatggtcttagtcgcgatccccagagaaggaaatgatggagcaacagtctctagacagcctcgcttcttggcgcatggatcgatccatcaggcttgcctgccatgtaacaaagagatgctcaattgaatatttgagatgtgaacgcataacacaaggatatccattaactagtgatcaacagtgactgtgatgggaaagactgaataaaagtactaaaacgttcatttactggagttgattgactatttggaacgaactggacaagacaccctcaattctcatatgtacgtatgcagttttctttcctctgtgtgaagggtgctttgtttcgatcaggagcacaaaaaattgcatcgtttaccggaggcttcccaaaccttcagtctgccctgtttgatgtaagggtagaagat

SEQ ID NO: 35720 - DNA, 1892 bp, Zea Mays
gaccattgcgtgatagattgtaccggtctcggtctccgtgtctcactctcaagttgcagctgccagcagccagtcatttcgttggcaaccagggcagaactaaatatccgtggataagagctgcactgtgtgctgctgagatatcaagaacgtaacgtacggtggaagacaaggccccgttctcgattagcccaagccaaagagtcagagagagagagagagagtcgtactggtcgtcacctgtcgaagattttcggtgtctcctgagccacagctgctgctgctgctggaaccatggagatggaggccgtggagtcgcacggaggcgccgggcgccggacgcccaagagggatcgcggcatctcctgggcctgcgtcttcatcctggcgagtaactgcttccagttcatcgcctacttcgccgtgtcgacgaacctggtgaactacctcaaggaccgcctgcaccagggcagcaaagccgccgcgaacggcgtcaccaactggatgggcacgagcgccatcacgccgctcgtcgccgccttcctcgccgacgccttcctcggcagatactggaccatcgcgctcttcctggtcatctccgtcctggcctacgtggtgctcacggtgagcgcggcggcggcgctggagagcgcggccttctacgcggggctgtacctgctggcgctgggcggggcgctgcagccggtgctgtcgtcgttcggcgccgaccagttcgacgaggaggagcgcgggcgccagagctccttcttcaactggttctacctctccatcaacgtcggctcgctggtcggcggcaccgtgctggtgtgggtgcagtccagcgtcagctgggggctcgggtacggcatcccggcgctcttcagcgcgctggccgtcgcggcgttcctggccggcaccgccacgtaccgccgccaccagccgccggcaggcagcccgctcaccagggtcgcgcaggtcgtcgtcgccgcgtgcaggaagtgcggcgtccaggtgccggaagacgcgtccacgctgcacgagtgcgaggacgtcggcggcatgtccgcgatacaggggagccgccggctcgcgcacaccgatcagttcaggttcctggacaaggcagcgtcggtggagccatcggacgacaagtcgcgtccggcgagcgcgtggcgtctgtgcacggtgacgcaggtggaggagctcaagtgcgtgctccggctgctgccggtgtgggcgagcgggatcgtgttcgcggcggcgtacacgcagatgaccaccaccttcgtcctgcagggcgacacgctggacccgtacgtgggcggcttccgcgtgcccgccgccgtgctctccgtcttcgacacgctcagcgtcatgctgtgggtgccgctctacgaccgcctggtggtcccactggcgcggcgcgccacgggccacgaccgcgggttcacgcagctggcgcgcatgggcgtgggcctcgtcgtgctcaccgccgccatgctcgccgcgggggcgctggaggtggcgcggcgccgcgtcatcgcgcgccacgacatgtacgacaccaacacgggcgccggcggggacggcgagtacctgccgctgtccttcttctggctgctggccatgctctgcgccggaaacttcggcgtctacctgctcatcgcacgatggtacacatacaagaagactgtggactagtatagtgtatgtatctataaagaccatccctgaacgatctcgtgaaatgtactgccgatctcaatcaattcaaagacacttcacttggaatggtgggcgaatcaaaacgacgggacctggcaaacagaaaagcgtcgttgaacaacgactgggccttgcccagcccaataaagcttactattagttcaggc

SEQ ID NO: 35721 - DNA, 2693 bp, Zea Mays
gctcgcgaagtcgctggctcaggcgctgctaccgttcgagacaagtctcgccgcccacaccgccactaggaaaccttcttctctcctcgccgcccgcggccggccccttctccagaaccttctagaacccatcggggctccgggatggagcccagaagacgagagcgcagggtcatcgccatcgccggtgcggcagcgctcgttgccgtgggcctcaatatcgccttctccgccgtcgtcgcccaccgtcggaggaagcgacgagagcttccagggtttactgctcaagtcaacctatcagcagctgcgattaaaagaacgaccgaccgtatcatctctaagtcaagggaaacttatgattcagtggctgcagtgcccctagataaagtcagttttgctaatgtcattgcaccattggcagaattagatgcgctgcaattccctctggttcaagcttgtgttcttcctaggatggtatcaccatctgaggatgttcgcaaggcaagtgctgaagcagagaagctattggattcccactttgtgctttgcaggcagcgtgaagatgtttatcgtgtcataaaagcatttacagtgaaaggcgagagaataggtgaaagagtttgagcgcaatggagtaaaactatctcaaagcaagagaaaagaaatggagaaattgaaatctcatatagatgcattaaacttgaagtatctccaaaatttgaatgatttcaccaaattccttcttttaggtgaagatgaactagctggaatgccctttgagttccttaaggatctggaaaaggctgatgggaagtttaaggttccgttgactagttaccatgttactccagttcttgagcactgcaaggttggctctaccaggaagcagattgctgttgcttatggacaaaaaggtgggaaggataatgtagccatcctagaaaatttggtccagctaagacacaagtttgctaaattgctggggtacaccaactatgctgattttgctattgagcccagaatgccaaagacttcgaggaagatcttagagtttttggaagagatgtctgaacaattaagtgatgtggctaatagagagctcaacatactcaaagacctcaagatcaaggaggaaggaaatgctcagtttggaatggaagatttgttgtactacatcaaaagagctgaagaattcaaggttgatcttgacgttggtgaaattaaacaatacttccctgttggcctggtcatatctggaatgctgaagatatttcaggatctatttgcactacgattcgacgaaattaaggatgttgatgtttggcatgatacagttcgtgtgttttctgtttgggatgcaagttcaagtgatcttttgggttacttttttcttgatatcttttccagggaaggaaagtatgcccacacttgtgttgtgacccttcagaatggatgcttatgttctaatggtacacgtaaggttccggctgctgtgatattatctcagtgtccaaaagagtttgatggtaattcagcattgctgcggttccctgaagttgtgaggctattccatgaatttagccatgtggtccatcacgtatccaacagagccaccttttcaagattttcaggccttcgactggagggtgactttgctgaaattccaagcctgctactcgagaattggtgctatgagagtatttctctgaaaatgatgtccggcttccatcaggacattacgaaatccataagtagtgaagcttgccaatctctgaaaagaaggcgtgatttgtttgctggcctgaaaatgaaacaagagatacttttgtgccttgttgatcagataatacattcaagtgagaatgtggacattgatgacttaatcaaggatcttcaccccaaggtaatgttgggtatacctttattggaagggaccagtccagcttcaagttttcctcgtattgcctttggctatgatgctgtgtgctacagttacatatggagtgaggtgtttgctgctgatctttttgtatcaaaatttaaagatgacttgctcaatcagcatgctggattgcggttcagaaataaggtgttggctccaggaggctcaaaagatcccctggagataataacggactacctaggaagagaaccatcactccaaccttttattcagagcagaacaaggaacagtctgtgagggatcatttatgatgtaaccgttgagttttttctttcttttttcctttttgaatttagctatagaaggcctgctgactgtctcgagttatttttttcgtaacggactgacaagtctgatctttgtgccattctgttttccgacgtcatttgtttgaccatttagttaagctggaatacaaaagatgtcgctagattctgctgtgttttcctaaccttagcatgctttcaagctcccatcaaaacgtctgagcacgtgaatcaagattgcacagaaagttagaaataagaacttcaagtctgttggtgtaagcacgaagcacgtctttttacaggttttgcgtgaagacttcggaaaattaaagttgatttctggatgaaaacttgtcatacaaacaattcactttcactaaacatttctgaagcttgcaaaacaaattaccagagttcagtgcacaccgaccatccaacaaaaagatgcacgctgatgcaag

SEQ ID NO: 35722 - DNA, 2759 bp, Zea Mays
gctcgcgaagtcgctggctcaggcgctgctaccgttcgagacaagtctcgccgcccacaccgccactaggaaaccttcttctctcctcgccgcccgcggccggccccttctccagaaccttctagaacccatcggggctccgggatggagcccagaagacgagagcgcagggtcatcgccatcgccggtgcggcagcgctcgttgccgtgggcctcaatatcgccttctccgccgtcgtcgcccaccgtcggaggaagcgacgagagcttccagggtttactgctcaagtcaacctatcagcagctgcgattaaaagaacgaccgaccgtatcatctctaagtcaagggaaacttatgattcagtggctgcagtgcccctagataaagtcagttttgctaatgtcattgcaccattggcagaattagatgcgctgcaattccctctggttcaagcttgtgttcttcctaggatggtatcaccatctgaggatgttcgcaaggcaagtgctgaagcagagaagctattggattcccactttgtgctttgcaggcagcgtgaagatgtttatcgtgtcataaaagcatttacagtgaaaggcgagagaataggtcctgaagcaacaagatttcttcagtttttggtgcagaattctttcgctacatataaatttgatcgtgaaagagtttgagcgcaatggagtaaaactatctcaaagcaagagaaaagaaatggagaaattgaaatctcatatagatgcattaaacttgaagtatctccaaaatttgaatgatttcaccaaattccttcttttaggtgaagatgaactagctggaatgccctttgagttccttaaggatctggaaaaggctgatgggaagtttaaggttccgttgactagttaccatgttactccagttcttgagcactgcaaggttggctctaccaggaagcagattgctgttgcttatggacaaaaaggtgggaaggataatgtagccatcctagaaaatttggtccagctaagacacaagtttgctaaattgctggggtacaccaactatgctgattttgctattgagcccagaatgccaaagacttcgaggaagatcttagagtttttggaagagatgtctgaacaattaagtgatgtggctaatagagagctcaacatactcaaagacctcaagatcaaggaggaaggaaatgctcagtttggaatggaagatttgttgtactacatcaaaagagctgaagaattcaaggttgatcttgacgttggtgaaattaaacaatacttccctgttggcctggtcatatctggaatgctgaagatatttcaggatctatttgcactacgattcgacgaaattaaggatgttgatgtttggcatgatacagttcgtgtgttttctgtttgggatgcaagttcaagtgatcttttgggttacttttttcttgatatcttttccagggaaggaaagtatgcccacacttgtgttgtgacccttcagaatggatgcttatgttctaatggtacacgtaaggttccggctgctgtgatattatctcagtgtccaaaagagtttgatggtaattcagcattgctgcggttccctgaagttgtgaggctattccatgaatttagccatgtggtccatcacgtatccaacagagccaccttttcaagattttcaggccttcgactggagggtgactttgctgaaattccaagcctgctactcgagaattggtgctatgagagtatttctctgaaaatgatgtccggcttccatcaggacattacgaaatccataagtagtgaagcttgccaatctctgaaaagaaggcgtgatttgtttgctggcctgaaaatgaaacaagagatacttttgtgccttgttgatcagataatacattcaagtgagaatgtggacattgatgacttaatcaaggatcttcaccccaaggtaatgttgggtatacctttattggaagggaccagtccagcttcaagttttcctcgtattgcctttggctatgatgctgtgtgctacagttacatatggagtgaggtgtttgctgctgatctttttgtatcaaaatttaaagatgacttgctcaatcagcatgctggattgcggttcagaaataaggtgttggctccaggaggctcaaaagatcccctggagataataacggactacctaggaagagaaccatcactccaaccttttattcagagcagaacaaggaacagtctgtgagggatcatttatgatgtaaccgttgagttttttctttcttttttcctttttgaatttagctatagaaggcctgctgactgtctcgagttatttttttcgtaacggactgacaagtctgatctttgtgccattctgttttccgacgtcatttgtttgaccatttagttaagctggaatacaaaagatgtcgctagattctgctgtgttttcctaaccttagcatgctttcaagctcccatcaaaacgtctgagcacgtgaatcaagattgcacagaaagttagaaataagaacttcaagtctgttggtgtaagcacgaagcacgtctttttacaggttttgcgtgaagacttcggaaaattaaagttgatttctggatgaaaacttgtcatacaaacaattcactttcactaaacatttctgaagcttgcaaaacaaattaccagagttcagtgcacaccgaccatccaacaaaaagatgcacgctgatgcaag

SEQ ID NO: 35723 - DNA, 2688 bp, Zea Mays
gctcgcgaagtcgctggctcaggcgctgctaccgttcgagacaagtctcgccgcccacaccgccactaggaaaccttcttctctcctcgccgcccgcggccggccccttctccagaaccttctagaacccatcggggctccgggatggagcccagaagacgagagcgcagggtcatcgccatcgccggtgcggcagcgctcgttgccgtgggcctcaatatcgccttctccgccgtcgtcgcccaccgtcggaggaagcgacgagagcttccagggtttactgctcaagtcaacctatcagcagctgcgattaaaagaacgaccgaccgtatcatctctaagtcaagggaaacttatgattcagtggctgcagtgcccctagataaagtcagttttgctaatgtcattgcaccattggcagaattagatgcgctgcaattccctctggttcaagcttgtgttcttcctaggatggtatcaccatctgaggatgttcgcaaggcaagtgctgaagcagagaagctattggattcccactttgtgctttgcaggcagcgtgaagatgtttatcgtgtcataaaagcatttacagtgaaaggcgagagaataggtcctgaagcaacaagatttcttcagtttttggtgaaagagtttgagcgcaatggagtaaaactatctcaaagcaagagaaaagaaatggagaaattgaaatctcatatagatgcattaaacttgaagtatctccaaaatttgaatgatttcaccaaattccttcttttaggtgaagatgaactagctggaatgccctttgagttccttaaggatctggaaaaggctgatgggaagtttaaggttccgttgactagttaccatgttactccagttcttgagcactgcaaggttggctctaccaggaagcagattgctgttgcttatggacaaaaaggtgggaaggataatgtagccatcctagaaaatttggtccagctaagacacaagtttgctaaattgctggggtacaccaactatgctgattttgctattgagcccagaatgccaaagacttcgaggaagatcttagagtttttggaagagatgtctgaacaattaagtgatgtggctaatagagagctcaacatactcaaagacctcaagatcaaggaggaaggaaatgctcagtttggaatggaagatttgttgtactacatcaaaagagctgaagaattcaaggttgatcttgacgttggtgaaattaaacaatacttccctgttggcctggtcatatctggaatgctgaagatatttcaggatctatttgcactacgattcgacgaaattaaggatgttgatgtttggcatgatacagttcgtgtgttttctgtttgggatgcaagttcaagtgatcttttgggttacttttttcttgatatcttttccagggaaggaaagtatgcccacacttgtgttgtgacccttcagaatggatgcttatgttctaatggtacacgtaaggttccggctgctgtgatattatctcagtgtccaaaagagtttgatggtaattcagcattgctgcggttccctgaagttgtgaggctattccatgaatttagccatgtggtccatcacgtatccaacagagccaccttttcaagattttcaggccttcgactggagggtgactttgctgaaattccaagcctgctactcgagaattggtgctatgagagtatttctctgaaaatgatgtccggcttccatcaggacattacgaaatccataagtagtgaagcttgccaatctctgaaaagaaggcgtgatttgtttgctggcctgaaaatgaaacaagagatacttttgtgccttgttgatcagataatacattcaagtgagaatgtggacattgatgacttaatcaaggatcttcaccccaaggtaatgttgggtatacctttattggaagggaccagtccagcttcaagttttcctcgtattgcctttggctatgatgctgtgtgctacagttacatatggagtgagatgacttgctcaatcagcatgctggattgcggttcagaaataaggtgttggctccaggaggctcaaaagatcccctggagataataacggactacctaggaagagaaccatcactccaaccttttattcagagcagaacaaggaacagtctgtgagggatcatttatgatgtaaccgttgagttttttctttcttttttcctttttgaatttagctatagaaggcctgctgactgtctcgagttatttttttcgtaacggactgacaagtctgatctttgtgccattctgttttccgacgtcatttgtttgaccatttagttaagctggaatacaaaagatgtcgctagattctgctgtgttttcctaaccttagcatgctttcaagctcccatcaaaacgtctgagcacgtgaatcaagattgcacagaaagttagaaataagaacttcaagtctgttggtgtaagcacgaagcacgtctttttacaggttttgcgtgaagacttcggaaaattaaagttgatttctggatgaaaacttgtcatacaaacaattcactttcactaaacatttctgaagcttgcaaaacaaattaccagagttcagtgcacaccgaccatccaacaaaaagatgcacgctgatgcaag

SEQ ID NO: 35724 - DNA, 2737 bp, Zea Mays
gctcgcgaagtcgctggctcaggcgctgctaccgttcgagacaagtctcgccgcccacaccgccactaggaaaccttcttctctcctcgccgcccgcggccggccccttctccagaaccttctagaacccatcggggctccgggatggagcccagaagacgagagcgcagggtcatcgccatcgccggtgcggcagcgctcgttgccgtgggcctcaatatcgccttctccgccgtcgtcgcccaccgtcggaggaagcgacgagagcttccagggtttactgctcaagtcaacctatcagcagctgcgattaaaagaacgaccgaccgtatcatctctaagtcaagggaaacttatgattcagtggctgcagtgcccctagataaagtcagttttgctaatgtcattgcaccattggcagaattagatgcgctgcaattccctctggttcaagcttgtgttcttcctaggatggtatcaccatctgaggatgttcgcaaggcaagtgctgaagcagagaagctattggattcccactttgtgctttgcaggcagcgtgaagatgtttatcgtgtcataaaagcatttacagtgaaaggcgagagaataggtcctgaagcaacaagatttcttcagtttttggtgaaagagtttgagcgcaatggagtaaaactatctcaaagcaagagaaaagaaatggagaaattgaaatctcatatagatgcattaaacttgaagtatctccaaaatttgaatgatttcaccaaattccttcttttaggtgaagatgaactagctggaatgccctttgagttccttaaggttagctagagagatctggaaaaggctgatgggaagtttaaggttccgttgactagttaccatgttactccagttcttgagcactgcaaggttggctctaccaggaagcagattgctgttgcttatggacaaaaaggtgggaaggataatgtagccatcctagaaaatttggtccagctaagacacaagtttgctaaattgctggggtacaccaactatgctgattttgctattgagcccagaatgccaaagacttcgaggaagatcttagagtttttggaagagatgtctgaacaattaagtgatgtggctaatagagagctcaacatactcaaagacctcaagatcaaggaggaaggaaatgctcagtttggaatggaagatttgttgtactacatcaaaagagctgaagaattcaaggttgatcttgacgttggtgaaattaaacaatacttccctgttggcctggtcatatctggaatgctgaagatatttcaggatctatttgcactacgattcgacgaaattaaggatgttgatgtttggcatgatacagttcgtgtgttttctgtttgggatgcaagttcaagtgatcttttgggttacttttttcttgatatcttttccagggaaggaaagtatgcccacacttgtgttgtgacccttcagaatggatgcttatgttctaatggtacacgtaaggttccggctgctgtgatattatctcagtgtccaaaagagtttgatggtaattcagcattgctgcggttccctgaagttgtgaggctattccatgaatttagccatgtggtccatcacgtatccaacagagccaccttttcaagattttcaggccttcgactggagggtgactttgctgaaattccaagcctgctactcgagaattggtgctatgagagtatttctctgaaaatgatgtccggcttccatcaggacattacgaaatccataagtagtgaagcttgccaatctctgaaaagaaggcgtgatttgtttgctggcctgaaaatgaaacaagagatacttttgtgccttgttgatcagataatacattcaagtgagaatgtggacattgatgacttaatcaaggatcttcaccccaaggtaatgttgggtatacctttattggaagggaccagtccagcttcaagttttcctcgtattgcctttggctatgatgctgtgtgctacagttacatatggagtgaggtgtttgctgctgatctttttgtatcaaaatttaaagatgacttgctcaatcagcatgctggattgcggttcagaaataaggtgttggctccaggaggctcaaaagatcccctggagataataacggactacctaggaagagaaccatcactccaaccttttattcagagcagaacaaggaacagtctgtgagggatcatttatgatgtaaccgttgagttttttctttcttttttcctttttgaatttagctatagaaggcctgctgactgtctcgagttatttttttcgtaacggactgacaagtctgatctttgtgccattctgttttccgacgtcatttgtttgaccatttagttaagctggaatacaaaagatgtcgctagattctgctgtgttttcctaaccttagcatgctttcaagctcccatcaaaacgtctgagcacgtgaatcaagattgcacagaaagttagaaataagaacttcaagtctgttggtgtaagcacgaagcacgtctttttacaggttttgcgtgaagacttcggaaaattaaagttgatttctggatgaaaacttgtcatacaaacaattcactttcactaaacatttctgaagcttgcaaaacaaattaccagagttcagtgcacaccgaccatccaacaaaaagatgcacgctgatgcaag

SEQ ID NO: 35725 - DNA, 2868 bp, Zea Mays
gctcgcgaagtcgctggctcaggcgctgctaccgttcgagacaagtctcgccgcccacaccgccactaggaaaccttcttctctcctcgccgcccgcggccggccccttctccagaaccttctagaacccatcggggctccgggatggagcccagaagacgagagcgcagggtcatcgccatcgccggtgcggcagcgctcgttgccgtgggcctcaatatcgccttctccgccgtcgtcgcccaccgtcggaggaagcgacgagagcttccagggtttactgctcaagtcaacctatcagcagctgcgattaaaagaacgaccgaccgtatcatctctaagtcaagggaaacttatgattcagtggctgcagtgcccctagataaagtcagttttgctaatgtcattgcaccattggcagaattagatgcgctgcaattccctctggttcaagcttgtgttcttcctaggatggtatcaccatctgaggatgttcgcaaggcaagtgctgaagcagagaagctattggattcccactttgtgctttgcaggcagcgtgaagatgtttatcgtgtcataaaagcatttacagtgaaaggcgagagaataggtcctgaagcaacaagatttcttcagtttttggtgcagaattctttcgctacatataaatttgatcgtgaaagagtttgagcgcaatggagtaaaactatctcaaagcaagagaaaagaaatggagaaattgaaatctcatatagatgcattaaacttgaagtatctccaaaatttgaatgatttcaccaaattccttcttttaggtgaagatgaactagctggaatgccctttgagttccttaaggatctggaaaaggctgatgggaagtttaaggttccgttgactagttaccatgttactccagttcttgagcactgcaaggttggctctaccaggaagcagattgctgttgcttatggacaaaaaggtccagctaagacacaagtttgctaaattgctggggtacaccaactatgctgattttgctattgagcccagaatgccaaagacttcgaggaagatcttagagtttttggaagagatgtctgaacaattaagtgatgtggctaatagagagctcaacatactcaaagacctcaagatcaaggaggaaggaaatgctcagtttggaatggaagatttgttgtactacatcaaaagagctgaagaattcaaggttgatcttgacgttggtgaaattaaacaatacttccctgttggcctggtcatatctggaatgctgaagatatttcaggatctatttgcactacgattcgacgaaattaaggatgttgatgtttggcatgatacagttcgtgtgttttctgtttgggatgcaagttcaagtgatcttttgggttacttttttcttgatatcttttccaggtttgttctgaaagcatgtgatcgaagcttgaatgattttcaaggtttcatgatatggaaaacatgtttgattggatacaaatgctgaaagttgtacacataaaacagggttattttaattgactaccctgttttgcttcacagggaaggaaagtatgcccacacttgtgttgtgacccttcagaatggatgcttatgttctaatggtacacgtaaggttccggctgctgtgatattatctcagtgtccaaaagagtttgatggtaattcagcattgctgcggttccctgaagttgtgaggctattccatgaatttagccatgtggtccatcacgtatccaacagagccaccttttcaagattttcaggccttcgactggagggtgactttgctgaaattccaagcctgctactcgagaattggtgctatgagagtatttctctgaaaatgatgtccggcttccatcaggacattacgaaatccataagtagtgaagcttgccaatctctgaaaagaaggcgtgatttgtttgctggcctgaaaatgaaacaagagatacttttgtgccttgttgatcagataatacattcaagtgagaatgtggacattgatgacttaatcaaggatcttcaccccaaggtaatgttgggtatacctttattggaagggaccagtccagcttcaagttttcctcgtattgcctttggctatgatgctgtgtgctacagttacatatggagtgaggtgtttgctgctgatctttttgtatcaaaatttaaagatgacttgctcaatcagcatgctggattgcggttcagaaataaggtgttggctccaggaggctcaaaagatcccctggagataataacggactacctaggaagagaaccatcactccaaccttttattcagagcagaacaaggaacagtctgtgagggatcatttatgatgtaaccgttgagttttttctttcttttttcctttttgaatttagctatagaaggcctgctgactgtctcgagttatttttttcgtaacggactgacaagtctgatctttgtgccattctgttttccgacgtcatttgtttgaccatttagttaagctggaatacaaaagatgtcgctagattctgctgtgttttcctaaccttagcatgctttcaagctcccatcaaaacgtctgagcacgtgaatcaagattgcacagaaagttagaaataagaacttcaagtctgttggtgtaagcacgaagcacgtctttttacaggttttgcgtgaagacttcggaaaattaaagttgatttctggatgaaaacttgtcatacaaacaattcactttcactaaacatttctgaagcttgcaaaacaaattaccagagttcagtgcacaccgaccatccaacaaaaagatgcacgctgatgcaag

SEQ ID NO: 35726 - DNA, 2965 bp, Zea Mays
gctcgcgaagtcgctggctcaggcgctgctaccgttcgagacaagtctcgccgcccacaccgccactaggaaaccttcttctctcctcgccgcccgcggccggccccttctccagaaccttctagaacccatcggggctccgggatggagcccagaagacgagagcgcagggtcatcgccatcgccggtgcggcagcgctcgttgccgtgggcctcaatatcgccttctccgccgtcgtcgcccaccgtcggaggaagcgacgagagcttccagggtttactgctcaagtcaacctatcagcagctgcgattaaaagaacgaccgaccgtatcatctctaagtcaagggaaacttatgattcagtggctgcagtgcccctagataaagtcagttttgctaatgtcattgcaccattggcagaattagatgcgctgcaattccctctggttcaagcttgtgttcttcctaggatggtatcaccatctgaggatgttcgcaaggcaagtgctgaagcagagaagctattggattcccactttgtgctttgcaggcagcgtgaagatgtttatcgtgtcataaaagcatttacagtgaaaggcgagagaataggtcctgaagcaacaagatttcttcagtttttggtgcagaattctttcgctacatataaatttgatcgtaatgttctgattctgaccgacaactgaatgtttatacatgtgatgatttattgtcaatgctttaaccctgaatatcatttttccataactgttgtatacttgtattcttatctatttcaatatgaacatacctaatggctaatgtaggtataatctggctcctgagtggtctcgtaaggttctcatactgcatgttcttttacggtgaaagagtttgagcgcaatggagtaaaactatctcaaagcaagagaaaagaaatggagaaattgaaatctcatatagatgcattaaacttgaagtatctccaaaatttgaatgatttcaccaaattccttcttttaggtgaagatgaactagctggaatgccctttgagttccttaaggatctggaaaaggctgatgggaagtttaaggttccgttgactagttaccatgttactccagttcttgagcactgcaaggttggctctaccaggaagcagattgctgttgcttatggacaaaaaggtgggaaggataatgtagccatcctagaaaatttggtccagctaagacacaagtttgctaaattgctggggtacaccaactatgctgattttgctattgagcccagaatgccaaagacttcgaggaagatcttagagtttttggaagagatgtctgaacaattaagtgatgtggctaatagagagctcaacatactcaaagacctcaagatcaaggaggaaggaaatgctcagtttggaatggaagatttgttgtactacatcaaaagagctgaagaattcaaggttgatcttgacgttggtgaaattaaacaatacttccctgttggcctggtcatatctggaatgctgaagatatttcaggatctatttgcactacgattcgacgaaattaaggatgttgatgtttggcatgatacagttcgtgtgttttctgtttgggatgcaagttcaagtgatcttttgggttacttttttcttgatatcttttccagggaaggaaagtatgcccacacttgtgttgtgacccttcagaatggatgcttatgttctaatggtacacgtaaggttccggctgctgtgatattatctcagtgtccaaaagagtttgatggtaattcagcattgctgcggttccctgaagttgtgaggctattccatgaatttagccatgtggtccatcacgtatccaacagagccaccttttcaagattttcaggccttcgactggagggtgactttgctgaaattccaagcctgctactcgagaattggtgctatgagagtatttctctgaaaatgatgtccggcttccatcaggacattacgaaatccataagtagtgaagcttgccaatctctgaaaagaaggcgtgatttgtttgctggcctgaaaatgaaacaagagatacttttgtgccttgttgatcagataatacattcaagtgagaatgtggacattgatgacttaatcaaggatcttcaccccaaggtaatgttgggtatacctttattggaagggaccagtccagcttcaagttttcctcgtattgcctttggctatgatgctgtgtgctacagttacatatggagtgaggtgtttgctgctgatctttttgtatcaaaatttaaagatgacttgctcaatcagcatgctggattgcggttcagaaataaggtgttggctccaggaggctcaaaagatcccctggagataataacggactacctaggaagagaaccatcactccaaccttttattcagagcagaacaaggaacagtctgtgagggatcatttatgatgtaaccgttgagttttttctttcttttttcctttttgaatttagctatagaaggcctgctgactgtctcgagttatttttttcgtaacggactgacaagtctgatctttgtgccattctgttttccgacgtcatttgtttgaccatttagttaagctggaatacaaaagatgtcgctagattctgctgtgttttcctaaccttagcatgctttcaagctcccatcaaaacgtctgagcacgtgaatcaagattgcacagaaagttagaaataagaacttcaagtctgttggtgtaagcacgaagcacgtctttttacaggttttgcgtgaagacttcggaaaattaaagttgatttctggatgaaaacttgtcatacaaacaattcactttcactaaacatttctgaagcttgcaaaacaaattaccagagttcagtgcacaccgaccatccaacaaaaagatgcacgctgatgcaag

SEQ ID NO: 35727 - DNA, 2691 bp, Zea Mays
gctcgcgaagtcgctggctcaggcgctgctaccgttcgagacaagtctcgccgcccacaccgccactaggaaaccttcttctctcctcgccgcccgcggccggccccttctccagaaccttctagaacccatcggggctccgggatggagcccagaagacgagagcgcagggtcatcgccatcgccggtgcggcagcgctcgttgccgtgggcctcaatatcgccttctccgccgtcgtcgcccaccgtcggaggaagcgacgagagcttccagggtttactgctcaagtcaacctatcagcagctgcgattaaaagaacgaccgaccgtatcatctctaagtcaagggaaacttatgattcagtggctgcagtgcccctagataaaaattagatgcgctgcaattccctctggttcaagcttgtgttcttcctaggatggtatcaccatctgaggatgttcgcaaggcaagtgctgaagcagagaagctattggattcccactttgtgctttgcaggcagcgtgaagatgtttatcgtgtcataaaagcatttacagtgaaaggcgagagaataggtcctgaagcaacaagatttcttcagtttttggtgaaagagtttgagcgcaatggagtaaaactatctcaaagcaagagaaaagaaatggagaaattgaaatctcatatagatgcattaaacttgaagtatctccaaaatttgaatgatttcaccaaattccttcttttaggtgaagatgaactagctggaatgccctttgagttccttaaggatctggaaaaggctgatgggaagtttaaggttccgttgactagttaccatgttactccagttcttgagcactgcaaggttggctctaccaggaagcagattgctgttgcttatggacaaaaaggtgggaaggataatgtagccatcctagaaaatttggtccagctaagacacaagtttgctaaattgctggggtacaccaactatgctgattttgctattgagcccagaatgccaaagacttcgaggaagatcttagagtttttggaagagatgtctgaacaattaagtgatgtggctaatagagagctcaacatactcaaagacctcaagatcaaggaggaaggaaatgctcagtttggaatggaagatttgttgtactacatcaaaagagctgaagaattcaaggttgatcttgacgttggtgaaattaaacaatacttccctgttggcctggtcatatctggaatgctgaagatatttcaggatctatttgcactacgattcgacgaaattaaggatgttgatgtttggcatgatacagttcgtgtgttttctgtttgggatgcaagttcaagtgatcttttgggttacttttttcttgatatcttttccagggaaggaaagtatgcccacacttgtgttgtgacccttcagaatggatgcttatgttctaatggtacacgtaaggttccggctgctgtgatattatctcagtgtccaaaagagtttgatggtaattcagcattgctgcggttccctgaagttgtgaggctattccatgaatttagccatgtggtccatcacgtatccaacagagccaccttttcaagattttcaggccttcgactggagggtgactttgctgaaattccaagcctgctactcgagaattggtgctatgagagtatttctctgaaaatgatgtccggcttccatcaggacattacgaaatccataagtagtgaagcttgccaatctctgaaaagaaggcgtgatttgtttgctggcctgaaaatgaaacaagagatacttttgtgccttgttgatcagataatacattcaagtgagaatgtggacattgatgacttaatcaaggatcttcaccccaaggtaatgttgggtatacctttattggaagggaccagtccagcttcaagttttcctcgtattgcctttggctatgatgctgtgtgctacagttacatatggagtgaggtgtttgctgctgatctttttgtatcaaaatttaaagatgacttgctcaatcagcatgctggattgcggttcagaaataaggtgttggctccaggaggctcaaaagatcccctggagataataacggactacctaggaagagaaccatcactccaaccttttattcagagcagaacaaggaacagtctgtgagggatcatttatgatgtaaccgttgagttttttctttcttttttcctttttgaatttagctatagaaggcctgctgactgtctcgagttatttttttcgtaacggactgacaagtctgatctttgtgccattctgttttccgacgtcatttgtttgaccatttagttaagctggaatacaaaagatgtcgctagattctgctgtgttttcctaaccttagcatgctttcaagctcccatcaaaacgtctgagcacgtgaatcaagattgcacagaaagttagaaataagaacttcaagtctgttggtgtaagcacgaagcacgtctttttacaggttttgcgtgaagacttcggaaaattaaagttgatttctggatgaaaacttgtcatacaaacaattcactttcactaaacatttctgaagcttgcaaaacaaattaccagagttcagtgcacaccgaccatccaacaaaaagatgcacgctgatgcaag

SEQ ID NO: 35728 - DNA, 2818 bp, Zea Mays
gctcgcgaagtcgctggctcaggcgctgctaccgttcgagacaagtctcgccgcccacaccgccactaggaaaccttcttctctcctcgccgcccgcggccggccccttctccagaaccttctagaacccatcggggctccgggatggagcccagaagacgagagcgcagggtcatcgccatcgccggtgcggcagcgctcgttgccgtgggcctcaatatcgccttctccgccgtcgtcgcccaccgtcggaggaagcgacgagagcttccagggtttactgctcaagtcaacctatcagcagctgcgattaaaagaacgaccgaccgtatcatctctaagtcaagggaaacttatgattcagtggctgcagtgcccctagataaagtcagttttgctaatgtcattgcaccattggcagaattagatgcgctgcaattccctctggttcaagcttgtgttcttcctaggatggtatcaccatctgaggatgttcgcaaggcaagtgctgaagcagagaagctattggattcccactttgtgctttgcaggcagcgtgaagatgtttatcgtgtcataaaagcatttacagtgaaaggcgagagaataggtcctgaagcaacaagatttcttcagtttttggtgaaagagtttgagcgcaatggagtaaaactatctcaaagcaagagaaaagaaatggagaaattgaaatctcatatagatgcattaaacttgaagtatctccaaaatttgaatgatttcaccaaattccttcttttaggtgaagatgaactagctggaatgccctttgagttccttaaggatctggaaaaggctgatgggaagtttaaggttccgttgactagttaccatgttactccagttcttgagcactgcaaggttggctctaccaggaagcagattgctgttgcttatggacaaaaaggtgggaaggataatgtagccatcctagaaaatttggtccagctaagacacaagtttgctaaattgctggggtacaccaactatgctgattttgctattgagcccagaatgccaaagacttcgaggaagatcttagagtttttggaagagatgtctgaacaattaagtgatgtggctaatagagagctcaacatactcaaagacctcaagatcaaggaggaaggaaatgctcagtttggaatggaagatttgttgtactacatcaaaagagctgaagaattcaaggttgatcttgacgttggtgaaattaaacaatacttccctgttggcctggtcatatctggaatgctgaagatatttcaggatctatttgcactacgattcgacgaaattaaggatgttgatgtttggcatgatacagttcgtgtgttttctgtttgggatgcaagttcaagtgatcttttgggttacttttttcttgatatcttttccagggaaggaaagtatgcccacacttgtgttgtgacccttcagaatggatgcttatgttctaatggtacacgtaaggttccggctgctgtgatattatctcagtgtccaaaagagtttgatggtaattcagcattgctgcggttccctgaagttgtgaggctattccatgaatttagccatgtggtccatcacgtatccaacagagccaccttttcaagattttcaggccttcgactggagggtgactttgctgaaattccaagcctgctactcgagaattggtgctatgagagtatttctctgaaaatgatgtccggcttccatcaggacattacgaaatccataagtagtgaagcttgccaatctctgaaaagaaggcgtgatttgtttgctggcctgaaaatgaaacaagagatacttttgtgtgagtcattttgctacctatcaaatgaggtggagtgagattattggtccttaaatgttatccagctcagaaactccgacaaaaaataatgaggccttgttgatcagataatacattcaagtgagaatgtggacattgatgacttaatcaaggatcttcaccccaaggtaatgttgggtatacctttattggaagggaccagtccagcttcaagttttcctcgtattgcctttggctatgatgctgtgtgctacagttacatatggagtgaggtgtttgctgctgatctttttgtatcaaaatttaaagatgacttgctcaatcagcatgctggattgcggttcagaaataaggtgttggctccaggaggctcaaaagatcccctggagataataacggactacctaggaagagaaccatcactccaaccttttattcagagcagaacaaggaacagtctgtgagggatcatttatgatgtaaccgttgagttttttctttcttttttcctttttgaatttagctatagaaggcctgctgactgtctcgagttatttttttcgtaacggactgacaagtctgatctttgtgccattctgttttccgacgtcatttgtttgaccatttagttaagctggaatacaaaagatgtcgctagattctgctgtgttttcctaaccttagcatgctttcaagctcccatcaaaacgtctgagcacgtgaatcaagattgcacagaaagttagaaataagaacttcaagtctgttggtgtaagcacgaagcacgtctttttacaggttttgcgtgaagacttcggaaaattaaagttgatttctggatgaaaacttgtcatacaaacaattcactttcactaaacatttctgaagcttgcaaaacaaattaccagagttcagtgcacaccgaccatccaacaaaaagatgcacgctgatgcaag

SEQ ID NO: 35729 - DNA, 3221 bp, Zea Mays
gctcgcgaagtcgctggctcaggcgctgctaccgttcgagacaagtctcgccgcccacaccgccactaggaaaccttcttctctcctcgccgcccgcggccggccccttctccagaaccttctagaacccatcggggctccgggatggagcccagaagacgagagcgcagggtcatcgccatcgccggtgcggcagcgctcgttgccgtgggcctcaatatcgccttctccgccgtcgtcgcccaccgtcggaggaagcgacgagagcttccagggtttactgctcaagtcaacctatcagcagctgcgattaaaagaacgaccgaccgtatcatctctaagtcaagggaaacttatgattcagtggctgcagtgcccctagataaagtcagttttgctaatgtcattgcaccattggcagaattagatgcgctgcaattccctctggttcaagcttgtgttcttcctaggatggtatcaccatctgaggatgttcgcaaggcaagtgctgaagcagagaagctattggattcccactttgtgctttgcaggcagcgtgaagatgtttatcgtgtcataaaagcatttacagtgaaaggcgagagaataggtcctgaagcaacaagatttcttcagtttttggtgcagaattctttcgctacatataaatttgatcgtaatgttctgattctgaccgacaactgaatgtttatacatgtgatgatttattgtcaatgctttaaccctgaatatcatttttccataactgttgtatacttgtattcttatctatttcaatatgaacatacctaatggctaatgtaggtataatctggctcctgagtggtctcgtaaggttctcatactgcatgttcttttacggtgatgtgtctttgcatcctcagtaccatcgcctcattcatcttgaacttgaatttctgaattatttgttagcataaaatattaatatgatctttttaaattcattaaggtgcatcaaagctcaaaaaaaccatagaattaattgactgtaaacatactgaaagatatgtgatgtgtcttgctattgtattatttgcaatttgtattaagatgattttgcaaattgatttgactatcgttttgctgaattgtctaattatggttgaacaggtgaaagagtttgagcgcaatggagtaaaactatctcaaagcaagagaaaagaaatggagaaattgaaatctcatatagatgcattaaacttgaagtatctccaaaatttgaatgatttcaccaaattccttcttttaggtgaagatgaactagctggaatgccctttgagttccttaaggatctggaaaaggctgatgggaagtttaaggttccgttgactagttaccatgttactccagttcttgagcactgcaaggaagcagattgctgttgcttatggacaaaaaggtgggaaggataatgtagccatcctagaaaatttggtccagctaagacacaagtttgctaaattgctggggtacaccaactatgctgattttgctattgagcccagaatgccaaagacttcgaggaagatcttagagtttttggaagagatgtctgaacaattaagtgatgtggctaatagagagctcaacatactcaaagacctcaagatcaaggaggaaggaaatgctcagtttggaatggaagatttgttgtactacatcaaaagagctgaagaattcaaggttgatcttgacgttggtgaaattaaacaatacttccctgttggcctggtcatatctggaatgctgaagatatttcaggatctatttgcactacgattcgacgaaattaaggatgttgatgtttggcatgatacagttcgtgtgttttctgtttgggatgcaagttcaagtgatcttttgggttacttttttcttgatatcttttccagggaaggaaagtatgcccacacttgtgttgtgacccttcagaatggatgcttatgttctaatggtacacgtaaggttccggctgctgtgatattatctcagtgtccaaaagagtttgatggtaattcagcattgctgcggttccctgaagttgtgaggctattccatgaatttagccatgtggtccatcacgtatccaacagagccaccttttcaagattttcaggccttcgactggagggtgactttgctgaaattccaagcctgctactcgagaattggtgctatgagagtatttctctgaaaatgatgtccggcttccatcaggacattacgaaatccataagtagtgaagcttgccaatctctgaaaagaaggcgtgatttgtttgctggcctgaaaatgaaacaagagatacttttgtgccttgttgatcagataatacattcaagtgagaatgtggacattgatgacttaatcaaggatcttcaccccaaggtaatgttgggtatacctttattggaagggaccagtccagcttcaagttttcctcgtattgcctttggctatgatgctgtgtgctacagttacatatggagtgaggtgtttgctgctgatctttttgtatcaaaatttaaagatgacttgctcaatcagcatgctggattgcggttcagaaataaggtgttggctccaggaggctcaaaagatcccctggagataataacggactacctaggaagagaaccatcactccaaccttttattcagagcagaacaaggaacagtctgtgagggatcatttatgatgtaaccgttgagttttttctttcttttttcctttttgaatttagctatagaaggcctgctgactgtctcgagttatttttttcgtaacggactgacaagtctgatctttgtgccattctgttttccgacgtcatttgtttgaccatttagttaagctggaatacaaaagatgtcgctagattctgctgtgttttcctaaccttagcatgctttcaagctcccatcaaaacgtctgagcacgtgaatcaagattgcacagaaagttagaaataagaacttcaagtctgttggtgtaagcacgaagcacgtctttttacaggttttgcgtgaagacttcggaaaattaaagttgatttctggatgaaaacttgtcatacaaacaattcactttcactaaacatttctgaagcttgcaaaacaaattaccagagttcagtgcacaccgaccatccaacaaaaagatgcacgctgatgcaag

SEQ ID NO: 35730 - DNA, 3201 bp, Zea Mays
gctcgcgaagtcgctggctcaggcgctgctaccgttcgagacaagtctcgccgcccacaccgccactaggaaaccttcttctctcctcgccgcccgcggccggccccttctccagaaccttctagaacccatcggggctccgggatggagcccagaagacgagagcgcagggtcatcgccatcgccggtgcggcagcgctcgttgccgtgggcctcaatatcgccttctccgccgtcgtcgcccaccgtcggaggaagcgacgagagcttccagggtttactgctcaagtcaacctatcagcagctgcgattaaaagaacgaccgaccgtatcatctctaagtcaagggaaacttatgattcagtggctgcagtgcccctagataaaaattagatgcgctgcaattccctctggttcaagcttgtgttcttcctaggatggtatcaccatctgaggatgttcgcaaggcaagtgctgaagcagagaagctattggattcccactttgtgctttgcaggcagcgtgaagatgtttatcgtgtcataaaagcatttacagtgaaaggcgagagaataggtcctgaagcaacaagatttcttcagtttttggtgcagaattctttcgctacatataaatttgatcgtaatgttctgattctgaccgacaactgaatgtttatacatgtgatgatttattgtcaatgctttaaccctgaatatcatttttccataactgttgtatacttgtattcttatctatttcaatatgaacatacctaatggctaatgtaggtataatctggctcctgagtggtctcgtaaggttctcatactgcatgttcttttacggtgatgtgtctttgcatcctcagtaccatcgcctcattcatcttgaacttgaatttctgaattatttgttagcataaaatattaatatgatctttttaaattcattaaggtgcatcaaagctcaaaaaaaccatagaattaattgactgtaaacatactgaaagatatgtgatgtgtcttgctattgtattatttgcaatttgtattaagatgattttgcaaattgatttgactatcgttttgctgaattgtctaattatggttgaacaggtgaaagagtttgagcgcaatggagtaaaactatctcaaagcaagagaaaagaaatggagaaattgaaatctcatatagatgcattaaacttgaagtatctccaaaatttgaatgatttcaccaaattccttcttttaggtgaagatgaactagctggaatgccctttgagttccttaaggatctggaaaaggctgatgggaagtttaaggttccgttgactagttaccatgttactccagttcttgagcactgcaaggttggctctaccaggaagcagattgctgttgcttatggacaaaaaggtgggaaggataatgtagccatcctagaaaatttggtccagctaagacacaagtttgctaaattgctggggtacaccaactatgctgattttgctattgagcccagaatgccaaagacttcgaggaagatcttagagtttttggaagagatgtctgaacaattaagtgatgtggctaatagagagctcaacatactcaaagacctcaagatcaaggaggaaggaaatgctcagtttggaatggaagatttgttgtactacatcaaaagagctgaagaattcaaggttgatcttgacgttggtgaaattaaacaatacttccctgttggcctggtcatatctggaatgctgaagatatttcaggatctatttgcactacgattcgacgaaattaaggatgttgatgtttggcatgatacagttcgtgtgttttctgtttgggatgcaagttcaagtgatcttttgggttacttttttcttgatatcttttccagggaaggaaagtatgcccacacttgtgttgtgacccttcagaatggatgcttatgttctaatggtacacgtaaggttccggctgctgtgatattatctcagtgtccaaaagagtttgatggtaattcagcattgctgcggttccctgaagttgtgaggctattccatgaatttagccatgtggtccatcacgtatccaacagagccaccttttcaagattttcaggccttcgactggagggtgactttgctgaaattccaagcctgctactcgagaattggtgctatgagagtatttctctgaaaatgatgtccggcttccatcaggacattacgaaatccataagtagtgaagcttgccaatctctgaaaagaaggcgtgatttgtttgctggcctgaaaatgaaacaagagatacttttgtgccttgttgatcagataatacattcaagtgagaatgtggacattgatgacttaatcaaggatcttcaccccaaggtaatgttgggtatacctttattggaagggaccagtccagcttcaagttttcctcgtattgcctttggctatgatgctgtgtgctacagttacatatggagtgaggtgtttgctgctgatctttttgtatcaaaatttaaagatgacttgctcaatcagcatgctggattgcggttcagaaataaggtgttggctccaggaggctcaaaagatcccctggagataataacggactacctaggaagagaaccatcactccaaccttttattcagagcagaacaaggaacagtctgtgagggatcatttatgatgtaaccgttgagttttttctttcttttttcctttttgaatttagctatagaaggcctgctgactgtctcgagttatttttttcgtaacggactgacaagtctgatctttgtgccattctgttttccgacgtcatttgtttgaccatttagttaagctggaatacaaaagatgtcgctagattctgctgtgttttcctaaccttagcatgctttcaagctcccatcaaaacgtctgagcacgtgaatcaagattgcacagaaagttagaaataagaacttcaagtctgttggtgtaagcacgaagcacgtctttttacaggttttgcgtgaagacttcggaaaattaaagttgatttctggatgaaaacttgtcatacaaacaattcactttcactaaacatttctgaagcttgcaaaacaaattaccagagttcagtgcacaccgaccatccaacaaaaagatgcacgctgatgcaag

SEQ ID NO: 35731 - DNA, 2912 bp, Zea Mays
gctcgcgaagtcgctggctcaggcgctgctaccgttcgagacaagtctcgccgcccacaccgccactaggaaaccttcttctctcctcgccgcccgcggccggccccttctccagaaccttctagaacccatcggggctccgggatggagcccagaagacgagagcgcagggtcatcgccatcgccggtgcggcagcgctcgttgccgtgggcctcaatatcgccttctccgccgtcgtcgcccaccgtcggaggaagcgacgagagcttccagggtttactgctcaagtcaacctatcagcagctgcgattaaaagaacgaccgaccgtatcatctctaagtcaagggaaacttatgattcagtggctgcagtgcccctagataaagtcagttttgctaatgtcattgcaccattggcagaattagatgcgctgcaattccctctggttcaagcttgtgttcttcctaggatggtatcaccatctgaggatgttcgcaaggcaagtgctgaagcagagaagctattggattcccactttgtgctttgcaggcagcgtgaagatgtttatcgtgtcataaaagcatttacagtgaaaggcgagagaataggtcctgaagcaacaagatttcttcagtttttggtgaaagagtttgagcgcaatggagtaaaactatctcaaagcaagagaaaagaaatggagaaattgaaatctcatatagatgcattaaacttgaagtatctccaaaatttgaatgatttcaccaaattccttcttttaggtgaagatgaactagctggaatgccctttgagttccttaaggatctggaaaaggctgatgggaagtttaaggttccgttgactagttaccatgttactccagttcttgagcactgcaaggttggctctaccaggaagcagattgctgttgcttatggacaaaaaggtgggaaggataatgtagccatcctagaaaatttggtccagctaagacacaagtttgctaaattgctggggtacaccaactatgctgattttgctattgagcccagaatgccaaagacttcgaggaagatcttagagtttttggaagagatgtctgaacaattaagtgatgtggctaatagagagctcaacatactcaaagacctcaagatcaaggaggaaggaaatgctcagtttggaatggaagatttgttgtactacatcaaaagagctgaagaattcaaggttgatcttgacgttggtgaaattaaacaatacttccctgttggcctggtcatatctggaatgctgaagatatttcaggatctatttgcactacgattcgacgaaattaaggatgttgatgtttggcatgatacagttcgtgtgttttctgtttgggatgcaagttcaagtgatcttttgggttacttttttcttgatatcttttccagggaaggaaagtatgcccacacttgtgttgtgacccttcagaatggatgcttatgttctaatggtacacgtaaggttccggctgctgtgatattatctcagtgtccaaaagagtttgatggtaattcagcattgctgcggttccctgaagttgtgaggctattccatgaatttagccatgtggtccatcacgtatccaacagagccaccttttcaagattttcaggccttcgactggagggtgactttgctgaaattccaagcctgctactcgagaattggtgctatgagagtatttctctgaaaatgatgtccggcttccatcaggacattacgaaatccataagtagtgaagcttgccaatctctgaaaagaaggcgtgatttgtttgctggcctgaaaatgaaacaagagatacttttgtgtgagtcattttgctacctatcaaatgaggtggagtgagattattggtccttaaatgttatccagctcagaaactccgacaaaaaataatgaggttgaggtcctaatacagtttgactgacaccagccacctgaatttggctggcttttcatgtcctcaacacttaattctcttacttcagtaaacagccttgttgatcagataatacattcaagtgagaatgtggacattgatgacttaatcaaggatcttcaccccaaggtaatgttgggtatacctttattggaagggaccagtccagcttcaagttttcctcgtattgcctttggctatgatgctgtgtgctacagttacatatggagtgaggtgtttgctgctgatctttttgtatcaaaatttaaagatgacttgctcaatcagcatgctggattgcggttcagaaataaggtgttggctccaggaggctcaaaagatcccctggagataataacggactacctaggaagagaaccatcactccaaccttttattcagagcagaacaaggaacagtctgtgagggatcatttatgatgtaaccgttgagttttttctttcttttttcctttttgaatttagctatagaaggcctgctgactgtctcgagttatttttttcgtaacggactgacaagtctgatctttgtgccattctgttttccgacgtcatttgtttgaccatttagttaagctggaatacaaaagatgtcgctagattctgctgtgttttcctaaccttagcatgctttcaagctcccatcaaaacgtctgagcacgtgaatcaagattgcacagaaagttagaaataagaacttcaagtctgttggtgtaagcacgaagcacgtctttttacaggttttgcgtgaagacttcggaaaattaaagttgatttctggatgaaaacttgtcatacaaacaattcactttcactaaacatttctgaagcttgcaaaacaaattaccagagttcagtgcacaccgaccatccaacaaaaagatgcacgctgatgcaag

SEQ ID NO: 35732 - DNA, 3244 bp, Zea Mays
gctcgcgaagtcgctggctcaggcgctgctaccgttcgagacaagtctcgccgcccacaccgccactaggaaaccttcttctctcctcgccgcccgcggccggccccttctccagaaccttctagaacccatcggggctccgggatggagcccagaagacgagagcgcagggtcatcgccatcgccggtgcggcagcgctcgttgccgtgggcctcaatatcgccttctccgccgtcgtcgcccaccgtcggaggaagcgacgagtggttgcagagcttccagggtttactgctcaagtcaacctatcagcagctgcgattaaaagaacgaccgaccgtatcatctctaagtcaagggaaacttatgattcagtggctgcagtgcccctagataaagtcagttttgctaatgtcattgcaccattggcagaattagatgcgctgcaattccctctggttcaagcttgtgttcttcctaggatggtatcaccatctgaggatgttcgcaaggcaagtgctgaagcagagaagctattggattcccactttgtgctttgcaggcagcgtgaagatgtttatcgtgtcataaaagcatttacagtgaaaggcgagagaataggtcctgaagcaacaagatttcttcagtttttggtgcagaattctttcgctacatataaatttgatcgtaatgttctgattctgaccgacaactgaatgtttatacatgtgatgatttattgtcaatgctttaaccctgaatatcatttttccataactgttgtatacttgtattcttatctatttcaatatgaacatacctaatggctaatgtaggtataatctggctcctgagtggtctcgtaaggttctcatactgcatgttcttttacggtgatgtgtctttgcatcctcagtaccatcgcctcattcatcttgaacttgaatttctgaattatttgttagcataaaatattaatatgatctttttaaattcattaaggtgcatcaaagctcaaaaaaaccatagaattaattgactgtaaacatactgaaagatatgtgatgtgtcttgctattgtattatttgcaatttgtattaagatgattttgcaaattgatttgactatcgttttgctgaattgtctaattatggttgaacaggtgaaagagtttgagcgcaatggagtaaaactatctcaaagcaagagaaaagaaatggagaaattgaaatctcatatagatgcattaaacttgaagtatctccaaaatttgaatgatttcaccaaattccttcttttaggtgaagatgaactagctggaatgccctttgagttccttaaggatctggaaaaggctgatgggaagtttaaggttccgttgactagttaccatgttactccagttcttgagcactgcaaggttggctctaccaggaagcagattgctgttgcttatggacaaaaaggtgggaaggataatgtagccatcctagaaaatttggtccagctaagacacaagtttgctaaattgctggggtacaccaactatgctgattttgctattgagcccagaatgccaaagacttcgaggaagatcttagagtttttggaagagatgtctgaacaattaagtgatgtggctaatagagagctcaacatactcaaagacctcaagatcaaggaggaaggaaatgctcagtttggaatggaagatttgttgtactacatcaaaagagctgaagaattcaaggttgatcttgacgttggtgaaattaaacaatacttccctgttggcctggtcatatctggaatgctgaagatatttcaggatctatttgcactacgattcgacgaaattaaggatgttgatgtttggcatgatacagttcgtgtgttttctgtttgggatgcaagttcaagtgatcttttgggttacttttttcttgatatcttttccagggaaggaaagtatgcccacacttgtgttgtgacccttcagaatggatgcttatgttctaatggtacacgtaaggttccggctgctgtgatattatctcagtgtccaaaagagtttgatggtaattcagcattgctgcggttccctgaagttgtgaggctattccatgaatttagccatgtggtccatcacgtatccaacagagccaccttttcaagattttcaggccttcgactggagggtgactttgctgaaattccaagcctgctactcgagaattggtgctatgagagtatttctctgaaaatgatgtccggcttccatcaggacattacgaaatccataagtagtgaagcttgccaatctctgaaaagaaggcgtgatttgtttgctggcctgaaaatgaaacaagagatacttttgtgccttgttgatcagataatacattcaagtgagaatgtggacattgatgacttaatcaaggatcttcaccccaaggtaatgttgggtatacctttattggaagggaccagtccagcttcaagttttcctcgtattgcctttggctatgatgctgtgtgctacagttacatatggagtgaggtgtttgctgctgatctttttgtatcaaaatttaaagatgacttgctcaatcagcatgctggattgcggttcagaaataaggtgttggctccaggaggctcaaaagatcccctggagataataacggactacctaggaagagaaccatcactccaaccttttattcagagcagaacaaggaacagtctgtgagggatcatttatgatgtaaccgttgagttttttctttcttttttcctttttgaatttagctatagaaggcctgctgactgtctcgagttatttttttcgtaacggactgacaagtctgatctttgtgccattctgttttccgacgtcatttgtttgaccatttagttaagctggaatacaaaagatgtcgctagattctgctgtgttttcctaaccttagcatgctttcaagctcccatcaaaacgtctgagcacgtgaatcaagattgcacagaaagttagaaataagaacttcaagtctgttggtgtaagcacgaagcacgtctttttacaggttttgcgtgaagacttcggaaaattaaagttgatttctggatgaaaacttgtcatacaaacaattcactttcactaaacatttctgaagcttgcaaaacaaattaccagagttcagtgcacaccgaccatccaacaaaaagatgcacgctgatgcaag

SEQ ID NO: 35733 - DNA, 3167 bp, Zea Mays
ctccgctcgcgaagtcgctggctcaggcgctgctaccgttcgagacaagtctcgccgcccacaccgccactaggaaaccttcttctctcctcgccgcccgcggccggccccttctccagaaccttctagaacccatcggggctccgggatggagcccagaagacgagagcgcagggtcatcgccatcgccggtgcggcagcgctcgttgccgtgggcctcaatatcgccttctccgccgtcgtcgcccaccgtcggaggaagcgacgagagcttccagggtttactgctcaagtcaacctatcagcagctgcgattaaaagaacgaccgaccgtatcatctctaagtcaagggaaacttatgattcagtggctgcagtgcccctagataaagtcagttttgctaatgtcattgcaccattggcagaattagatgcgctgcaattccctctggttcaagcttgtgttcttcctaggatggtatcaccatctgaggatgttcgcaaggcaagtgctgaagcagagaagctattggattcccactttgtgctttgcaggcagcgtgaagatgtttatcgtgtcataaaagcatttacagtgaaaggcgagagaataggtcctgaagcaacaagatttcttcagtttttggtgcagaattctttcgctacatataaatttgatcgtaatgttctgattctgaccgacaactgaatgtttatacatgtgatgatttattgtcaatgctttaaccctgaatatcatttttccataactgttgtatacttgtattcttatctatttcaatatgaacatacctaatggctaatgtaggtataatctggctcctgagtggtctcgtaaggttctcatactgcatgttcttttacggtgaaagagtttgagcgcaatggagtaaaactatctcaaagcaagagaaaagaaatggagaaattgaaatctcatatagatgcattaaacttgaagtatctccaaaatttgaatgatttcaccaaattccttcttttaggtgaagatgaactagctggaatgccctttgagttccttaaggatctggaaaaggctgatgggaagtttaaggttccgttgactagttaccatgttactccagttcttgagcactgcaagttccatctcttcaaggttggctctaccaggaagcagattgctgttgcttatggacaaaaaggtgggaaggataatgtagccatcctagaaaatttggtccagctaagacacaagtttgctaaattgctggggtacaccaactatgctgattttgctattgagcccagaatgccaaagacttcgaggaagatcttagagtttttggaagagatgtctgaacaattaagtgatgtggctaatagagagctcaacatactcaaagacctcaaggtttgaagaaagctcctttctgctctgctaatttttccatcgatgaaactcttccattactaattaaattattgctaccgattttctgatttcagatcaaggaggaaggaaatgctcagtttggaatggaagatttgttgtactacatcaaaagagctgaagaattcaaggttgatcttgacgttggtgaaattaaacaatacttccctgttggcctggtcatatctggaatgctgaagatatttcaggatctatttgcactacgattcgacgaaattaaggatgttgatgtttggcatgatacagttcgtgtgttttctgtttgggatgcaagttcaagtgatcttttgggttacttttttcttgatatcttttccagggaaggaaagtatgcccacacttgtgttgtgacccttcagaatggatgcttatgttctaatggtacacgtaaggttccggctgctgtgatattatctcagtgtccaaaagagtttgatggtaattcagcattgctgcggttccctgaagttgtgaggctattccatgaatttagccatgtggtccatcacgtatccaacagagccaccttttcaagattttcaggccttcgactggagggtgactttgctgaaattccaagcctgctactcgagaattggtgctatgagagtatttctctgaaaatgatgtccggcttccatcaggacattacgaaatccataagtagtgaagcttgccaatctctgaaaagaaggcgtgatttgtttgctggcctgaaaatgaaacaagagatacttttgtgccttgttgatcagataatacattcaagtgagaatgtggacattgatgacttaatcaaggatcttcaccccaaggtaatgttgggtatacctttattggaagggaccagtccagcttcaagttttcctcgtattgcctttggctatgatgctgtgtgctacagttacatatggagtgaggtttgggcaatacaaatcctaagccatatttcttccatcatatatttggagatagtaggaaaaaaactcttttatctgaactatgtaggtgtttgctgctgatctttttgtatcaaaatttaaagatgacttgctcaatcagcatgctggattgcggttcagaaataaggtgttggctccaggaggctcaaaagatcccctggagataataacggactacctaggaagagaaccatcactccaaccttttattcagagcagaacaaggaacagtctgtgagggatcatttatgatgtaaccgttgagttttttctttcttttttcctttttgaatttagctatagaaggcctgctgactgtctcgagttatttttttcgtaacggactgacaagtctgatctttgtgccattctgttttccgacgtcatttgtttgaccatttagttaagctggaatacaaaagatgtcgctagattctgctgtgttttcctaaccttagcatgctttcaagctcccatcaaaacgtctgagcacgtgaatcaagattgcacagaaagttagaaataagaacttcaagtctgttggtgtaagcacgaagcacgtctttttacaggttttgcgtgaagacttcggaaaattaaagttgatttctggatgaaaacttgtcatacaaacaattcactttcactaaacatttctgaagcttgcaaaacaaattaccagagttcagtgcacaccgaccatccaacaaaaagatgcacgctgatgcaag

SEQ ID NO: 35734 - DNA, 3272 bp, Zea Mays
gttccctcaaaatccagccgtccacgcggaaactaccggccagatctcgcatatcttcgtgagtcgtgacctccgctcgcgaagtcgctggctcaggcgctgctaccgttcgagacaagtctcgccgcccacaccgccactaggaaaccttcttctctcctcgccgcccgcggccggccccttctccagaaccttctagaacccatcggggctccgggatggagcccagaagacgagagcgcagggtcatcgccatcgccggtgcggcagcgctcgttgccgtgggcctcaatatcgccttctccgccgtcgtcgcccaccgtcggaggaagcgacgagagcttccagggtttactgctcaagtcaacctatcagcagctgcgattaaaagaacgaccgaccgtatcatctctaagtcaagggaaacttatgattcagtggctgcagtgcccctagataaagtcagttttgctaatgtcattgcaccattggcagaattagatgcgctgcaattccctctggttcaagcttgtgttcttcctaggatggtatcaccatctgaggatgttcgcaaggcaagtgctgaagcagagaagctattggattcccactttgtgctttgcaggcagcgtgaagatgtttatcgtgtcataaaagcatttacagtgaaaggcgagagaataggtcctgaagcaacaagatttcttcagtttttggtgcagaattctttcgctacatataaatttgatcgtaatgttctgattctgaccgacaactgaatgtttatacatgtgatgatttattgtcaatgctttaaccctgaatatcatttttccataactgttgtatacttgtattcttatctatttcaatatgaacatacctaatggctaatgtaggtataatctggctcctgagtggtctcgtaaggttctcatactgcatgttcttttacggtgatgtgtctttgcatcctcagtaccatcgcctcattcatcttgaacttgaatttctgaattatttgttagcataaaatattaatatgatctttttaaattcattaaggtgcatcaaagctcaaaaaaaccatagaattaattgactgtaaacatactgaaagatatgtgatgtgtcttgctattgtattatttgcaatttgtattaagatgattttgcaaattgatttgactatcgttttgctgaattgtctaattatggttgaacaggtgaaagagtttgagcgcaatggagtaaaactatctcaaagcaagagaaaagaaatggagaaattgaaatctcatatagatgcattaaacttgaagtatctccaaaatttgaatgatttcaccaaattccttcttttaggtgaagatgaactagctggaatgccctttgagttccttaaggatctggaaaaggctgatgggaagtttaaggttccgttgactagttaccatgttactccagttcttgagcactgcaaggttggctctaccaggaagcagattgctgttgcttatggacaaaaaggtgggaaggataatgtagccatcctagaaaatttggtccagctaagacacaagtttgctaaattgctggggtacaccaactatgctgattttgctattgagcccagaatgccaaagacttcgaggaagatcttagagtttttggaagagatgtctgaacaattaagtgatgtggctaatagagagctcaacatactcaaagacctcaagatcaaggaggaaggaaatgctcagtttggaatggaagatttgttgtactacatcaaaagagctgaagaattcaaggttgatcttgacgttggtgaaattaaacaatacttccctgttggcctggtcatatctggaatgctgaagatatttcaggatctatttgcactacgattcgacgaaattaaggatgttgatgtttggcatgatacagttcgtgtgttttctgtttgggatgcaagttcaagtgatcttttgggttacttttttcttgatatcttttccagggaaggaaagtatgcccacacttgtgttgtgacccttcagaatggatgcttatgttctaatggtacacgtaaggttccggctgctgtgatattatctcagtgtccaaaagagtttgatggtaattcagcattgctgcggttccctgaagttgtgaggctattccatgaatttagccatgtggtccatcacgtatccaacagagccaccttttcaagattttcaggccttcgactggagggtgactttgctgaaattccaagcctgctactcgagaattggtgctatgagagtatttctctgaaaatgatgtccggcttccatcaggacattacgaaatccataagtagtgaagcttgccaatctctgaaaagaaggcgtgatttgtttgctggcctgaaaatgaaacaagagatacttttgtgccttgttgatcagataatacattcaagtgagaatgtggacattgatgacttaatcaaggatcttcaccccaaggtaatgttgggtatacctttattggaagggaccagtccagcttcaagttttcctcgtattgcctttggctatgatgctgtgtgctacagttacatatggagtgagatgacttgctcaatcagcatgctggattgcggttcagaaataaggtgttggctccaggaggctcaaaagatcccctggagataataacggactacctaggaagagaaccatcactccaaccttttattcagagcagaacaaggaacagtctgtgagggatcatttatgatgtaaccgttgagttttttctttcttttttcctttttgaatttagctatagaaggcctgctgactgtctcgagttatttttttcgtaacggactgacaagtctgatctttgtgccattctgttttccgacgtcatttgtttgaccatttagttaagctggaatacaaaagatgtcgctagattctgctgtgttttcctaaccttagcatgctttcaagctcccatcaaaacgtctgagcacgtgaatcaagattgcacagaaagttagaaataagaacttcaagtctgttggtgtaagcacgaagcacgtctttttacaggttttgcgtgaagacttcggaaaattaaagttgatttctggatgaaaacttgtcatacaaacaattcactttcactaaacatttctgaagcttgcaaaacaaattaccagagttcagtgcacaccgaccatccaacaaaaagatgcacgctgatgcaag

SEQ ID NO: 35735 - DNA, 3360 bp, Zea Mays
gaaaaggcctgaaagggaaatgacgtggattttcataaaacggctacgcgtgttccctcaaaatccagccgtccacgcggaaactaccggccagatctcgcatatcttcgtgagtcgtgacctccgctcgcgaagtcgctggctcaggcgctgctaccgttcgagacaagtctcgccgcccacaccgccactaggaaaccttcttctctcctcgccgcccgcggccggccccttctccagaaccttctagaacccatcggggctccgggatggagcccagaagacgagagcgcagggtcatcgccatcgccggtgcggcagcgctcgttgccgtgggcctcaatatcgccttctccgccgtcgtcgcccaccgtcggaggaagcgacgagagcttccagggtttactgctcaagtcaacctatcagcagctgcgattaaaagaacgaccgaccgtatcatctctaagtcaagggaaacttatgattcagtggctgcagtgcccctagataaagtcagttttgctaatgtcattgcaccattggcagaattagatgcgctgcaattccctctggttcaagcttgtgttcttcctaggatggtatcaccatctgaggatgttcgcaaggcaagtgctgaagcagagaagctattggattcccactttgtgctttgcaggcagcgtgaagatgtttatcgtgtcataaaagcatttacagtgaaaggcgagagaataggtcctgaagcaacaagatttcttcagtttttggtgcagaattctttcgctacatataaatttgatcgtaatgttctgattctgaccgacaactgaatgtttatacatgtgatgatttattgtcaatgctttaaccctgaatatcatttttccataactgttgtatacttgtattcttatctatttcaatatgaacatacctaatggctaatgtaggtataatctggctcctgagtggtctcgtaaggttctcatactgcatgttcttttacggtgatgtgtctttgcatcctcagtaccatcgcctcattcatcttgaacttgaatttctgaattatttgttagcataaaatattaatatgatctttttaaattcattaaggtgcatcaaagctcaaaaaaaccatagaattaattgactgtaaacatactgaaagatatgtgatgtgtcttgctattgtattatttgcaatttgtattaagatgattttgcaaattgatttgactatcgttttgctgaattgtctaattatggttgaacaggtgaaagagtttgagcgcaatggagtaaaactatctcaaagcaagagaaaagaaatggagaaattgaaatctcatatagatgcattaaacttgaagtatctccaaaatttgaatgatttcaccaaattccttcttttaggtgaagatgaactagctggaatgccctttgagttccttaaggatctggaaaaggctgatgggaagtttaaggttccgttgactagttaccatgttactccagttcttgagcactgcaaggttggctctaccaggaagcagattgctgttgcttatggacaaaaaggtgggaaggataatgtagccatcctagaaaatttggtccagctaagacacaagtttgctaaattgctggggtacaccaactatgctgattttgctattgagcccagaatgccaaagacttcgaggaagatcttagagtttttggaagagatgtctgaacaattaagtgatgtggctaatagagagctcaacatactcaaagacctcaagatcaaggaggaaggaaatgctcagtttggaatggaagatttgttgtactacatcaaaagagctgaagaattcaaggttgatcttgacgttggtgaaattaaacaatacttccctgttggcctggtcatatctggaatgctgaagatatttcaggatctatttgcactacgattcgacgaaattaaggatgttgatgtttggcatgatacagttcgtgtgttttctgtttgggatgcaagttcaagtgatcttttgggttacttttttcttgatatcttttccagggaaggaaagtatgcccacacttgtgttgtgacccttcagaatggatgcttatgttctaatggtacacgtaaggttccggctgctgtgatattatctcagtgtccaaaagagtttgatggtaattcagcattgctgcggttccctgaagttgtgaggctattccatgaatttagccatgtggtccatcacgtatccaacagagccaccttttcaagattttcaggccttcgactggagggtgactttgctgaaattccaagcctgctactcgagaattggtgctatgagagtatttctctgaaaatgatgtccggcttccatcaggacattacgaaatccataagtagtgaagcttgccaatctctgaaaagaaggcgtgatttgtttgctggcctgaaaatgaaacaagagatacttttgtgccttgttgatcagataatacattcaagtgagaatgtggacattgatgacttaatcaaggatcttcaccccaaggtaatgttgggtatacctttattggaagggaccagtccagcttcaagttttcctcgtattgcctttggctatgatgctgtgtgctacagttacatatggagtgaggtgtttgctgctgatctttttgtatcaaaatttaaagatgacttgctcaatcagcatgctggattgcggttcagaaataaggtgttggctccaggaggctcaaaagatcccctggagataataacggactacctaggaagagaaccatcactccaaccttttattcagagcagaacaaggaacagtctgtgagggatcatttatgatgtaaccgttgagttttttctttcttttttcctttttgaatttagctatagaaggcctgctgactgtctcgagttatttttttcgtaacggactgacaagtctgatctttgtgccattctgttttccgacgtcatttgtttgaccatttagttaagctggaatacaaaagatgtcgctagattctgctgtgttttcctaaccttagcatgctttcaagctcccatcaaaacgtctgagcacgtgaatcaagattgcacagaaagttagaaataagaacttcaagtctgttggtgtaagcacgaagcacgtctttttacaggttttgcgtgaagacttcggaaaattaaagttgatttctggatgaaaacttgtcatacaaacaattcactttcactaaacatttctgaagcttgcaaaacaaattaccagagttcagtgcacaccgaccatccaacaaaaagatgcacgctgatgcaag

SEQ ID NO: 35736 - DNA, 1932 bp, Zea Mays
gagcattcgaccgagaatcgccagtcgccaacccagcccagccataagaaagcttaaatacagaagagaaagcgagggttggacctcagggtgaaaagaagaggcggcggcggcggcaatgacgcgccgcagcgacgcgcgcctgaggagggtcgtcatggagccggcttcgcctccaaccgctgcaagtcgcgcggatgagggcggaggcgagagttttgcagtttctactgctgtcttcgctccgaaatccaaccgaaatctcagaggtcagaggaaagtaggaaacctcgttcgggaacctgctttgagtgagactccaatccttgggcgccattgccgcctgttttttgtgctcggaaaggtgcgtttatttccctgtccggggcgctttcccttctcttcccgttgcttatccacgtggggttgccgtgaatccaccgtcttctccgcctacaatctctcagcaaaaccaccaaagccagctgctcatttgggggaagaccttctttgagtgaggtccaacccttgggggccatttcaaccttcgtcctccgcaataaaagttgggcaatcctatgtcagtcacttctcttctagcccaacccattccatcgctgtttgctccttctcccgcgccttcgagagctcgccgaaaccgaacctcccggcggcgtttcttagctgcaacaaaactaaccatggatggcactagctttgacctgacagagcacgaaggttcaaatttgtctccttttctactcaaactttttaatgagtgggatgatcgcaagacaaggggcttgtttcaccatgacatcagttcctgtgaaacaaaggtgctacctggagtacataattttgtggcaacattaattgaaggacgtgaccaaaagaagcggccaactgagttcacaatgaaccaagttctccagccatttgttagtgagaagttcaatttcacaaaagtcagcccgttggaggtgatctttagattcaatgacactgagaaagattctgcacaatattttgatggtgttcctgatactgtttcagcttcttctagtgccatcttgattaatgtgagcccaattggctactgccatgtgctattgactcccaagatccaggactgtttgccgcaaaggattgatcaagagagcttcttaatagccatgtatgttgcaagagaagcaaggactcccttcttcagagttggttataacagcctgggcggctttgcaactatcaaccaccttcacttccaggcatactacctgaaagtacagtatccagttgaaaaggcaatcacggagaagctcaagaccctagggaatagcgtgagcatttttcacctggtggattacccagtcaatggctttgtgttcgaaggtggtgcgagcctggaagatttgtcagatgtggtctccaaagtctgcatcttcctgcaagagaacaacagacctttcaatgtcctcatctctgaatctggcaagagaattttccttctaccacagtgctatgcggagaagcagctcctcggaaaggcgagccaagagttcctggacatgagaatcaatccagcaatctgggagctcagtggccatctggtactgaagcggaggaaggactacgaggaggcctctgaagcaaacatatgcaggtttttggttgaagcagctctttctgaaacagaatttcaggagctgaacctatgcgtgctcgacttcctgaccagctctcttggttgaaactcggatgtaggttcctatagatagtaacagttctgaggttccagttaaaacagttgtgctggtactgttactttatgatggtatatcatgtagtagtatttctgatttgactcgtcacctctgcgatgaaataatatgtcttctccggcttcaatttcgtaaagagcccacataatcc

SEQ ID NO: 35737 - DNA, 1876 bp, Zea Mays
gagcattcgaccgagaatcgccagtcgccaacccagcccagccataagaaagcttaaatacagaagagaaagcgagggttggacctcagggtgaaaagaagaggcggcggcggcggcaatgacgcgccgcagcgacgcgcgcctgaggagggtcgtcatggagccggcttcgcctccaaccgctgcaagtcgcgcggatgagggcggaggcgagagttttgcagtttctactgctgtcttcgctccgaaatccaaccgaaatctcagaggtcagaggaaagtaggaaacctcgttcgggaacctgctttgagtgagactccaatccttgggcgccattgccgcctgttttttgtgctcggaaaggtgcgtttatttccctgtccggggcgctttcccttctcttcccgttgcttatccacgtggggttgccgtgaatccaccgtcttctccgcctacaatctctcagcaaaaccaccaaagccagctgctcatttgggggaagaccttctttgagtgaggtccaacccttgggggccatttcaaccttcgtcctccgcaataaaagttgggcaatcctatgtcagtcacttctcttctagcccaacccattccatcgctgtttgctccttctcccgcgccttcgagagctcgccgaaaccgaacctcccggcggcgtttcttaggcgctgtctgattcctgtatatttattttggcaatgctttcagctgcaacaaaactaaccatggatggcactagctttgacctgacagagcacgaaggttcaaatttgtctccttttctactcaaactttttaatgagtgggatgatcgcaagacaaggggcttgtttcaccatgacatcagttcctgtgaaacaaaggtgctacctggagtacataattttgtggcaacattaattgaaggacgtgaccaaaagaagcggccaactgagttcacaatgaaccaagttctccagccatttgttagtgagaagttcaatttcacaaaagtcagcccgttggaggtgagcccaattggctactgccatgtgctattgactcccaagatccaggactgtttgccgcaaaggattgatcaagagagcttcttaatagccatgtatgttgcaagagaagcaaggactcccttcttcagagttggttataacagcctgggcggctttgcaactatcaaccaccttcacttccaggcatactacctgaaagtacagtatccagttgaaaaggcaatcacggagaagctcaagaccctagggaatagcgtgagcatttttcacctggtggattacccagtcaatggctttgtgttcgaaggtggtgcgagcctggaagatttgtcagatgtggtctccaaagtctgcatcttcctgcaagagaacaacagacctttcaatgtcctcatctctgaatctggcaagagaattttccttctaccacagtgctatgcggagaagcagctcctcggaaaggcgagccaagagttcctggacatgagaatcaatccagcaatctgggagctcagtggccatctggtactgaagcggaggaaggactacgaggaggcctctgaagcaaacatatgcaggtttttggttgaagcagctctttctgaaacagaatttcaggagctgaacctatgcgtgctcgacttcctgaccagctctcttggttgaaactcggatgtaggttcctatagatagtaacagttctgaggttccagttaaaacagttgtgctggtactgttactttatgatggtatatcatgtagtagtatttctgatttgactcgtcacctctgcgatgaaataatatgtcttctccggcttcaatttcgtaaagagcccacataatcc

SEQ ID NO: 35738 - DNA, 4395 bp, Zea Mays
aactgttgtgtgtattccatagatcattacacttatatacaagtgaaggggtgtatcccaagaggtatgtcccttgagaaaaactgtcgcaccccttagattgatcatatatgtaatattttgtaacaagatttttaatagagcagtataataactaagtgtgatactagtagaaaatataaagccgcaagtatactagtgtcctgaataatatctgatcctgatgcagcgtcagcagccagcaaggcatccgatctgatcccatccccaccgaacagtatccgtctcgcgagggcaaagggtcagggagaaagtgaaagagacagtcacaggaacgggccttcgacccaggcccggaaaagcccaacagagagctaagagcagagtagcagtccggtcagcttcgcgattgtgaacgcacgcacacgctgcaagcatgtcggctggcctggcacgcacatgaccgtctcctgcggctgacttggcgcccaggtctcggtccacctgtaacccccgccgcatcttccgtcttccctgtgttgtccatctcgggtgggccccacgcccgaaaccggtgcgtgcacccgcccatccacgaacgaccatgagacctctgatccatcccccctggccctgccccccggacgccgcgctcaaaagcagcagcgcacgcaccaccaccaccaccgcaccaccatccgcctcgctcgcactgacagacaggcaggcagagagagagagagagcgcgagccggattgattgccgagggcagagcagcggcagagggagcagcaacagcaacagtccacgaccgatcgcccggcccgcgcgcaggcaggcagcagccatgaaccacctgacgccggcgctccacggggcgatgcggccgccctcggcgcaggggcaggggctggcccggtacggctccgcgccgggctcgctcctggccgccatcgccgactccgtcacccgcggcgaccccgcgccgccgccgccgcccgtgagccggttctactccgccgagtcctcggggctcacctcctgcgactccagctgccgcaccgactgcggacgcccgcccctcgagcgggcgtacggcggctccggcgagatccgcgtgccgccgccgctgcagcagcagcagcaccacctgctggctccccccgcggcctccccgctgttccgccacagcagctcccccgccgggctgctctcccgcctcatgaccgacccgcacggaatggcggcgagcggaggagcgatggggagctacacgcaggcgggcagcgacgccgcgctgggccccggccacggccacggccacgcgcagctcagctcgcagtggagcttctccaggcaggacctgccgcagatctcggagatggggatgataccggccgacatcggggagagcatcgtgggcgccggcgggtgcaacagctccagcgacgccgcgcagtcctcctcctacctctccaggaccttctccgtcggctcctgggacgacaccaactccatcatgttctcgtctgccccctgcaagaagcccaaggtggaccccgccgccggcgccgacgacatggtcaccaacttcagcaccattgacccgcagttcggcctgtccaactcgtccctggagctgcccggcatggacgactacctgcagctgcagcaggactccgtcgcctgcagagtgcgtgcgaggcgtggctgcgcgactcacccacggagcattgccgagagggaaagaaggacgaggatcagcaagaggctgaagaagctgcaagacctcgtgcccaacatggacaagcaaacgaatacgtcggacatgttggaccttgctgtggagtacatcaaagagctcaaggaccaagttgagaagctaaaacacgaccaagcaaactgctgttgcctaggcaacaagagctgctgctgatgctggagaagcagacggaggagggtttttacgccgtaacaatgtgactgttaaaccagagctgttgcttcaggagaccaggccgcgggcagaagtgcgtgacatgtggagcggcttccatgactcagcttcctcttttcttggttgttccacggactagcgaccggggtgccaacggcttgaagactaggagataacaagtaggacgatgttgtaatttagttaccgcgacgcggtggctctggctttcgtgtaaagaagtcctccctttcaacgcgactgggattgttgttgctggtaaaattgttgtaggaatatcatctgtgctccatttttcatcgagctcatctttttttttgtgtgtcactggattttgacaagaccgtaactcagaaaccgagcactgaccgagcgttcatgccaccccatacgaagtccaagagaattttagtatgacaacttgagcattattcagcttttttttttctatgcagcattcttgttgagcaaaaacgatcgaagaaactttacacggtcggtcactcgatgctgggcatggtaccaggtagtagctcaactgattttctgactcgggtgacgagtttttttttgtgtgtgtgtgtgtttatttatacatcaaacgttgaagaacagaaaaggctggtacagtcaaagccgccaggcatagtttcgtattggctatacggctgtgtggaactggagtaaaaaaatagcgtcgtcaaatcttgagctgctcgcagttacgcagctgtcctgtagaagaagcttaggcagcgcagcccccggtgacctacacacctcgcctgcagattccacagggccaggggaggggggtgtgttactggttccgagctagatgagagcactgaagccaaaagagcaatctagtagtgcaaaaaagcctgcctattgtcggattctgttcagtgcagaatacttacagtctcgatgattgtgttcttacgagagatggctggagtgcgtcgtagtgcccgtagccgtcgtagagaacgcggactggatcgtcctttccgtattcctggccgtattccgctatgatccttgggccgtcggagctgcccgtatacatgtagacggtgatgggcatcctgcaacgcagcgttttctcagtctcagtcctcgctgaccaaagtgaccataacgatgtgtacaaaagaaaagggttacacttagcacggacaggttggccaccataccgacctgagaacgtgggaacacatgaacagctcaggttcccctccccaagcatgaggctttctcatctgtctcacataactctcaaagctgccttcaaggaacctaagattggaaaggagttaataagacatagtcgtctttgtatattgggagctggagcatgttcttttgacattagatctttattaaggatggaaggacatctatcaacaaattaaatgtgtaaagttgctgtatgggaatatatagtctgtatgcagaaacagatagtacgtccatggaaactaataatacatatatcataaaagcagtaatggaaagaggatggaaccattcggtgtctcctcttcgcttgacgaactcatcagctacctggaacagatcaacggcaggttattagcaccaacaaagacggtgagattattccattctgtcgagatgcacggaacaaggacgcgcttagtaataatcaagaagcccaggtgtaacggacactcactttggctcggagctcgtcggccagttccttctgggcgctgtcgctgggcgcatgctttcctctcctcaggcaggcgccgtaggcgacggacctgaacaggcatcgaccgtcccctgtgattcctgcagttaaacgtgaggggcggcgtcagtgaaattgataacgcgtgttctgtcgaccagaaagaacctctcgatgatgaacacctccatgggagccatcagatgtatggcgttgcccgcacataaagaaaacatgcagtgttgctttcggcttataagattggtagcgtggattgttaggaggagattatattatctggtttctgattttagcaaaggatctctgaaggtgcagctttagaactgctaccatagtaccattatatacagacatgcatacgaaagcagaaggatgtggtggaattagaaaaggcatcttgctgctacgccattggtagcttatcattgttacggtgtctttttgtatgatgcaggcacttttattcccgatcgcgtccaagaccaaaccatctctgataaacaagccaggaaccgctactagaaggagcaaggaatcaccctgcctgcctttcgatcgccgatcgccaccagaagaaaattaaaagaagcccatcttttttaccgctgctagaaacggacggcgtttggaacgtactgatggagcgcagggggcggagctcccgatccgacatccgcc

SEQ ID NO: 35739 - DNA, 1596 bp, Zea Mays
gaaatttatggctgctgctatacggacgcttcccaaaattacatgtgtatgcgtatggagctgcaccatgtgtggattatgtggtagcagatgcctgctcactatttgttaccagtatagtccataatgatgaattctctgcacggttatccatgaattcagtaattagattgcgtagctcagctgtgaaagctctttcaaagggtacttcccccaattcagctaaagttggtaaactagttggtggaatcatgagtgcccaaacagatgataaagacgcactagatcattgtgcttccgctgatgctctgcagacggttagtgaggctgagctaagtaatgatcaagcgcatggaaggaatccagtgcatacaattaaaggtggtttatttctctttgggcaagcaatatcttgcttgataaatactccaaagcatcgagttaactccacagcagcaattaactatgagttgggcagatctagaattactactgttagtgacggaaggaaatccgtggttgcttcctgtggttttatggatgtttcgcaccgtggagaaggtaatccgcacataaacagtcactttctagaagatggtttgtttgaatgtggtgggggacacatatcacctcattcaaatgatggtcctggactcacgtctgcttctgatggttgcatcattacgataagctcatctgaagggcagtcaccagaggtttatcttcctggtcttgttgttcatgttgttccagtaaagaaaggtgcttctccattgcagaatacaattgtaacacgccaaaagaacaagagttacaaagcgctaattgctcgtcgaagagattttatggaccttgttgtgacacatcacatgttccttgatcatctcccttggaggtgccactatgccatgcaaaaggtcatagaaacacgaaaacgggatcagctcgccagtgatctgtccaccgcagaggaagctgtataattctattagtgcatttcttctttgttgtacatacgttaagaaattgagatcacatggattatgggtcaatgcgggttgatggttacatataacattattgtctgtatcagtagagctttaggagagtttaggacgatcgaaacaggacgtttgcccatctgatgaggattatctgaatctcagcattgttgtacgcagcctttgacataggctggctctctgtgagatcaacccagatgccgttgttgtttatggaaccagtgtggtagatggcagagcctatggtaaattggtaatctccaagtagtgttgtaagttggtacctatccgcagccacgcatgtgcctgttgatgaagtttccttgacactctgctggtccgaagtctgaaagaattccagcctttttcttccaatgaaagtcatgctagcagtatgcatttgaattcattgacgaggaggagcattttgacttgtttgtgttgagtttgtgatccaaattctgaagaaggcggccaagttagcgagcgaagcggaggcccgtcgccgggaggcttgggccggagcgcagcgaggccaactggccttcccgcggcccagggacgcctggggggg

SEQ ID NO: 35740 - DNA, 3788 bp, Zea Mays
gccggcctcgtgcgcccccgcctcgtcgcctccgctagccacctgcccgcttccgccctctctgcctcgcagcagcagcggcatggccgccggcgtgctgtctaccgtccggtggtccaccgcttgcgcggtgctgctcaacgccatcgccgcctccacgggcgccgccgtcgcggccgtcgcgttcggccgctgcggcgggggcgccataggcccggccgccgccgccgcgtccgccgcgttggcagctaggctccttgcttccgcggtggcgggattcgcgcagggcgctgccgcctccgctatcgccgccggtgctatcggggcccacgtcgacagcgagcgcgaccttcgccaactctctcggctacgatacaagagatggctttggtggacaagatttggaatgatcattacagtgctacaatttgtgttggcaatttatttgatgtgtatcatcttaagggatgtcttggctggagggtctccaacacagtgcttttcaggtcaaaatcaaaagagtgatgggaggcgcatcttgttaatagcttttcttgtcactatgtgggtgtcaactatagttcagtgtgctactggttctgatgtactaaggtggagatcattttatgcatcccatgattttgcgtggagggctcactaccgggaggtgtttgatcatggaatccgtgaggtcttatgctgcctagggcgtgttaaatattcgagtgtgttggaagatgatgatatatgtattgtggcaaagttattgggtgatcttatggcttatcgcgcatctggaactggccatcttgaactcgtagcaggactttcactactgcagaaatccaagtcatccacaattatttcaaaagaactagtggaggctcctcaaaatctcatccaagaggctcttctctttcatccatttgctgaagctgcctatacaggcccactgcttgattttggaaggaatcctcttatgtttccctgtgtgtggctcaataggcaaggtgttttgaccccatggactcgtgctagacgaccagttcttgaaggcgataactggtggagagggcatgcagctgctttcctaaaatatgccaatgtggccccagaagtccttcgaaaaggtcgtgttaaccagacaaaacgcgagaccgcctattttgttgttgtcttacactatttgagtacagtagtcattgctgtccgtggaactgagacaccagaagatgttataacagatggcttgtgtaaggaatgttcccttaatatagatgatctggatgggttgatcaattctgatcatctgtctcctcaagtgaagaatgctgttctctcatctccacactatggacatgcaggaattgttgaatcagctcgagagctgtacacagaacttgagggtcatcccatacatgaagataagtcaggtacaatgaaaactggattcttatcttctcttcttggggatggttgtgagtgccatggatacaatattcaaattgttggacattctttaggaggttctgtagctgcacttcttggtattaaggtaagtttatttttttcaatgtacagggaaattgtcttaagtcacctgatgaggtttgacgtatttagttataacatttagtgtgtccttttatgtgtttcacttgaatatagacacatgcccgttgggaatattcactgttgagttcaccttggaaatttatggctgctggtatgagcccactgctaatttgaaattatctcaagccacctgatgaggtttgtcgtatttagttataaaattgagtgtccttgcccattggaaatatggaccgttaagttcaccatgggaatttatgtctgctgggatgaattcactgctaataatgttttaggatactttcttggatgaggtgacggaattgcagggaaactagatgaggtaacaccagaacaggaaaattctataggggtttcgtgtggtttcttctactgaaatgcatattagattagacaaaaaagccttgcttgtcagaacaaaatagcccctcaagtttaaacgtttaggtaaaatatgcaaaattctcggtgattgggcagtaaatgaagcatggaattctgaaggtgtttctggaatgtgtagcttggttcttgtattatttcctgaaatatatttttcatctaaatgagtcatttcttgatcataaaaacacagctatacggacgcttcccaaaattacatgtgtatgcgtatggagctgcaccatgtgtggattatgtggtagcagatgcctgctcactatttgttaccagtatagtccataatgatgaattctctgcacggttatccatgaattcagtaattagattgcgtagctcagctgtgaaagctctttcaaagggtacttcccccaattcagctaaagttggtaaactagttggtggaatcatgagtgcccaaacagatgataaagacgcactagatcattgtgcttccgctgatgctctgcagacggttagtgaggctgagctaagtaatgatcaagcgcatggaaggaatccagtgcatacaattaaaggtggtttatttctctttgggcaagcaatatcttgcttgataaatactccaaagcatcgagttaactccacagcagcaattaactatgagttgggcagatctagaattactactgttagtgacggaaggaaatccgtggttgcttcctgtggttttatggatgtttcgcaccgtggagaaggtaatccgcacataaacagtcactttctagaagatggtttgtttgaatgtggtgggggacacatatcacctcattcaaatgatggtcctggactcacgtctgcttctgatggttgcatcattacgataagctcatctgaagggcagtcaccagaggtttatcttcctggtcttgttgttcatgttgttccagtaaagaaaggtgcttctccattgcagaatacaattgtaacacgccaaaagaacaagagttacaaagcgctaattgctcgtcgaagagattttatggaccttgttgtgacacatcacatgttccttgatcatctcccttggaggtgccactatgccatgcaaaaggtcatagaaacacgaaaacgggatcagctcgccagtgatctgtccaccgcagaggaagctgtataattctattagtgcatttcttctttgttgtacatacgttaagaaattgagatcacatggattatgggtcaatgcgggttgatggttacatataacattattgtctgtatcagtagagctttaggagagtttaggacgatcgaaacaggacgtttgcccatctgatgaggattatctgaatctcagcattgttgtacgcagcctttgacataggctggctctctgtgagatcaacccagatgccgttgttgtttatggaaccagtgtggtagatggcagagcctatggtaaattggtaatctccaagtagtgttgtaagttggtacctatccgcagccacgcatgtgcctgttgatgaagtttccttgacactctgctggtccgaagtctgaaagaattccagcctttttcttccaatgaaagtcatgctagcagtatgcatttgaattcattgacgaggaggagcattttgacttgtttgtgttgagtttgtgatccaaattctgaagaaggcggccaagttagcgagcgaagcggaggcccgtcgccgggaggcttgggccggagcgcagcgaggccaactggccttcccgcggcccagggacgcctggggggg

SEQ ID NO: 35741 - DNA, 3148 bp, Zea Mays
gccggcctcgtgcgcccccgcctcgtcgcctccgctagccacctgcccgcttccgccctctctgcctcgcagcagcagcggcatggccgccggcgtgctgtctaccgtccggtggtccaccgcttgcgcggtgctgctcaacgccatcgccgcctccacgggcgccgccgtcgcggccgtcgcgttcggccgctgcggcgggggcgccataggcccggccgccgccgccgcgtccgccgcgttggcagctaggctccttgcttccgcggtggcgggattcgcgcagggcgctgccgcctccgctatcgccgccggtgctatcggggcccacgtcgacagcgagcgcgaccttcgccaactctctcggctttatgtgaacagctacgatacaagagatggctttggtggacaagatttggaatgatcattacagtgctacaatttgtgttggcaatttatttgatgtgtatcatcttaagggatgtcttggctggagggtctccaacacagtgcttttcaggtcaaaatcaaaagagtgatgggaggcgcatcttgttaatagcttttcttgtcactatgtgggtgtcaactatagttcagtgtgctactggttctgatgtactaaggtggagatcattttatgcatcccatgattttgcgtggagggctcactaccgggaggtgtttgatcatggaatccgtgaggtcttatgctgcctagggcgtgttaaatattcgagtgtgttggaagatgatgatatatgtattgtggcaaagttattgggtgatcttatggcttatcgcgcatctggaactggccatcttgaactcgtagcaggactttcactactgcagaaatccaagtcatccacaattatttcaaaagaactagtggaggctcctcaaaatctcatccaagaggctcttctctttcatccatttgctgaagctgcctatacaggcccactgcttgattttggaaggaatcctcttatgtttccctgtgtgtggctcaataggcaaggtgttttgaccccatggactcgtgctagacgaccagttcttgaaggcgataactggtggagagggcatgcagctgctttcctaaaatatgccaatgtggccccagaagtccttcgaaaaggtcgtgttaaccagacaaaacgcgagaccgcctattttgttgttgtcttacactatttgagtacagtagtcattgctgtccgtggaactgagacaccagaagatgttataacagatggcttgtgtaaggaatgttcccttaatatagatgatctggatgggttgatcaattctgatcatctgtctcctcaagtgaagaatgctgttctctcatctccacactatggacatgcaggaattgttgaatcagctcgagagctgtacacagaacttgagggtcatcccatacatgaagataagtcaggtacaatgaaaactggattcttatcttctcttcttggggatggttgtgagtgccatggatacaatattcaaattgttggacattctttaggaggttctgtagctgcacttcttggtattaagctatacggacgcttcccaaaattacatgtgtatgcgtatggagctgcaccatgtgtggattatgtggtagcagatgcctgctcactatttgttaccagtatagtccataatgatgaattctctgcacggttatccatgaattcagtaattagattgcgtagctcagctgtgaaagctctttcaaagggtacttcccccaattcagctaaagttggtaaactagttggtggaatcatgagtgcccaaacagatgataaagacgcactagatcattgtgcttccgctgatgctctgcagacggttagtgaggctgagctaagtaatgatcaagcgcatggaaggaatccagtgcatacaattaaaggtggtttatttctctttgggcaagcaatatcttgcttgataaatactccaaagcatcgagttaactccacagcagcaattaactatgagttgggcagatctagaattactactgttagtgacggaaggaaatccgtggttgcttcctgtggttttatggatgtttcgcaccgtggagaaggtaatccgcacataaacagtcactttctagaagatggtttgtttgaatgtggtgggggacacatatcacctcattcaaatgatggtcctggactcacgtctgcttctgatggttgcatcattacgataagctcatctgaagggcagtcaccagaggtttatcttcctggtcttgttgttcatgttgttccagtaaagaaaggtgcttctccattgcagaatacaattgtaacacgccaaaagaacaagagttacaaagcgctaattgctcgtcgaagagattttatggaccttgttgtgacacatcacatgttccttgatcatctcccttggaggtgccactatgccatgcaaaaggtcatagaaacacgaaaacgggatcagctcgccagtgatctgtccaccgcagaggaagctgtataattctattagtgcatttcttctttgttgtacatacgttaagaaattgagatcacatggattatgggtcaatgcgggttgatggttacatataacattattgtctgtatcagtagagctttaggagagtttaggacgatcgaaacaggacgtttgcccatctgatgaggattatctgaatctcagcattgttgtacgcagcctttgacataggctggctctctgtgagatcaacccagatgccgttgttgtttatggaaccagtgtggtagatggcagagcctatggtaaattggtaatctccaagtagtgttgtaagttggtacctatccgcagccacgcatgtgcctgttgatgaagtttccttgacactctgctggtccgaagtctgaaagaattccagcctttttcttccaatgaaagtcatgctagcagtatgcatttgaattcattgacgaggaggagcattttgacttgtttgtgttgagtttgtgatccaaattctgaagaaggcggccaagttagcgagcgaagcggaggcccgtcgccgggaggcttgggccggagcgcagcgaggccaactggccttcccgcggcccagggacgcctggggggg

SEQ ID NO: 35742 - DNA, 3088 bp, Zea Mays
gccggcctcgtgcgcccccgcctcgtcgcctccgctagccacctgcccgcttccgccctctctgcctcgcagcagcagcggcatggccgccggcgtgctgtctaccgtccggtggtccaccgcttgcgcggtgctgctcaacgccatcgccgcctccacgggcgccgccgtcgcggccgtcgcgttcggccgctgcggcgggggcgccataggcccggccgccgccgccgcgtccgccgcgttggcagctaggctccttgcttccgcggtggcgggattcgcgcagggcgctgccgcctccgctatcgccgccggtgctatcggggcccacgtcgacagcgagcgcgaccttcgccaactctctcggctacgatacaagagatggctttggtggacaagatttggaatgatcattacagtgctacaatttgtgttggcaatttatttgatgtgtatcatcttaagggatgtcttggctggagggtctccaacacagtgcttttcaggtcaaaatcaaaagagtgatgggaggcgcatcttgttaatagcttttcttgtcactatgtgggtgtcaactatagttcagtgtgctactggttctgatgtactaaggtggagatcattttatgcatcccatgattttgcgtggagggctcactaccgggaggtgtttgatcatggaatccgtgaggtcttatgctgcctagggcgtgttaaatattcgagtgtgttggaagatgatgatatatgtattgtggcaaagttattgggtgatcttatggcttatcgcgcatctggaactggccatcttgaactcgtagcaggactttcactactgcagaaatccaagtcatccacaattatttcaaaagaactagtggaggctcctcaaaatctcatccaagaggctcttctctttcatccatttgctgaagctgcctatacaggcccactgcttgattttggaaggaatcctcttatgtttccctgtgtgtggctcaataggcaaggtgttttgaccccatggactcgtgctagacgaccagttcttgaaggcgataactggtggagagggcatgcagctgctttcctaaaatatgccaatgtggccccagaagtccttcgaaaaggtcgtgttaaccagacaaaacgcgagaccgcctattttgttgttgtcttacactatttgagtacagtagtcattgctgtccgtggaactgagacaccagaagatgttataacagatggcttgtttctgatcatctgtctcctcaagtgaagaatgctgttctctcatctccacactatggacatgcaggaattgttgaatcagctcgagagctgtacacagaacttgagggtcatcccatacatgaagataagtcaggtacaatgaaaactggattcttatcttctcttcttggggatggttgtgagtgccatggatacaatattcaaattgttggacattctttaggaggttctgtagctgcacttcttggtattaagctatacggacgcttcccaaaattacatgtgtatgcgtatggagctgcaccatgtgtggattatgtggtagcagatgcctgctcactatttgttaccagtatagtccataatgatgaattctctgcacggttatccatgaattcagtaattagattgcgtagctcagctgtgaaagctctttcaaagggtacttcccccaattcagctaaagttggtaaactagttggtggaatcatgagtgcccaaacagatgataaagacgcactagatcattgtgcttccgctgatgctctgcagacggttagtgaggctgagctaagtaatgatcaagcgcatggaaggaatccagtgcatacaattaaaggtggtttatttctctttgggcaagcaatatcttgcttgataaatactccaaagcatcgagttaactccacagcagcaattaactatgagttgggcagatctagaattactactgttagtgacggaaggaaatccgtggttgcttcctgtggttttatggatgtttcgcaccgtggagaaggtaatccgcacataaacagtcactttctagaagatggtttgtttgaatgtggtgggggacacatatcacctcattcaaatgatggtcctggactcacgtctgcttctgatggttgcatcattacgataagctcatctgaagggcagtcaccagaggtttatcttcctggtcttgttgttcatgttgttccagtaaagaaaggtgcttctccattgcagaatacaattgtaacacgccaaaagaacaagagttacaaagcgctaattgctcgtcgaagagattttatggaccttgttgtgacacatcacatgttccttgatcatctcccttggaggtgccactatgccatgcaaaaggtcatagaaacacgaaaacgggatcagctcgccagtgatctgtccaccgcagaggaagctgtataattctattagtgcatttcttctttgttgtacatacgttaagaaattgagatcacatggattatgggtcaatgcgggttgatggttacatataacattattgtctgtatcagtagagctttaggagagtttaggacgatcgaaacaggacgtttgcccatctgatgaggattatctgaatctcagcattgttgtacgcagcctttgacataggctggctctctgtgagatcaacccagatgccgttgttgtttatggaaccagtgtggtagatggcagagcctatggtaaattggtaatctccaagtagtgttgtaagttggtacctatccgcagccacgcatgtgcctgttgatgaagtttccttgacactctgctggtccgaagtctgaaagaattccagcctttttcttccaatgaaagtcatgctagcagtatgcatttgaattcattgacgaggaggagcattttgacttgtttgtgttgagtttgtgatccaaattctgaagaaggcggccaagttagcgagcgaagcggaggcccgtcgccgggaggcttgggccggagcgcagcgaggccaactggccttcccgcggcccagggacgcctggggggg

SEQ ID NO: 35743 - DNA, 2919 bp, Zea Mays
gtgccggcctcgtgcgcccccgcctcgtcgcctccgctagccacctgcccgcttccgccctctctgcctcgcagcagcagcggcatggccgccggcgtgctgtctaccgtccggtggtccaccgcttgcgcggtgctgctcaacgccatcgccgcctccacgggcgccgccgtcgcggccgtcgcgttcggccgctgcggcgggggcgccataggcccggccgccgccgccgcgtccgccgcgttggcagctaggctccttgcttccgcggtggcgggattcgcgcagggcgctgccgcctccgctatcgccgccggtgctatcggggcccacgtcgacagcgagcgcgaccttcgccaactctctcggctacgatacaagagatggctttggtggacaagatttggaatgatcattacagtgctacaatttgtgttggcaatttatttgatgtgtatcatcttaagggatgtcttggctggagggtctccaacacagtgcttttcaggagtgtgttggaagatgatgatatatgtattgtggcaaagttattgggtgatcttatggcttatcgcgcatctggaactggccatcttgaactcgtagcaggactttcactactgcagaaatccaagtcatccacaattatttcaaaagaactagtggaggctcctcaaaatctcatccaagaggctcttctctttcatccatttgctgaagctgcctatacaggcccactgcttgattttggaaggaatcctcttatgtttccctgtgtgtggctcaataggcaaggtgttttgaccccatggactcgtgctagacgaccagttcttgaaggcgataactggtggagagggcatgcagctgctttcctaaaatatgccaatgtggccccagaagtccttcgaaaaggtcgtgttaaccagacaaaacgcgagaccgcctattttgttgttgtcttacactatttgagtacagtagtcattgctgtccgtggaactgagacaccagaagatgttataacagatggcttgtgtaaggaatgttcccttaatatagatgatctggatgggttgatcaattctgatcatctgtctcctcaagtgaagaatgctgttctctcatctccacactatggacatgcaggaattgttgaatcagctcgagagctgtacacagaacttgagggtcatcccatacatgaagataagtcaggtacaatgaaaactggattcttatcttctcttcttggggatggttgtgagtgccatggatacaatattcaaattgttggacattctttaggaggttctgtagctgcacttcttggtattaagctatacggacgcttcccaaaattacatgtgtatgcgtatggagctgcaccatgtgtggattatgtggtagcagatgcctgctcactatttgttaccagtatagtccataatgatgaattctctgcacggttatccatgaattcagtaattagattgcgtagctcagctgtgaaagctctttcaaagggtacttcccccaattcagctaaagttggtaaactagttggtggaatcatgagtgcccaaacagatgataaagacgcactagatcattgtgcttccgctgatgctctgcagacggttagtgaggctgagctaagtaatgatcaagcgcatggaaggaatccagtgcatacaattaaaggtggtttatttctctttgggcaagcaatatcttgcttgataaatactccaaagcatcgagttaactccacagcagcaattaactatgagttgggcagatctagaattactactgttagtgacggaaggaaatccgtggttgcttcctgtggttttatggatgtttcgcaccgtggagaaggtaatccgcacataaacagtcactttctagaagatggtttgtttgaatgtggtgggggacacatatcacctcattcaaatgatggtcctggactcacgtctgcttctgatggttgcatcattacgataagctcatctgaagggcagtcaccagaggtttatcttcctggtcttgttgttcatgttgttccagtaaagaaaggtgcttctccattgcagaatacaattgtaacacgccaaaagaacaagagttacaaagcgctaattgctcgtcgaagagattttatggaccttgttgtgacacatcacatgttccttgatcatctcccttggaggtgccactatgccatgcaaaaggtcatagaaacacgaaaacgggatcagctcgccagtgatctgtccaccgcagaggaagctgtataattctattagtgcatttcttctttgttgtacatacgttaagaaattgagatcacatggattatgggtcaatgcgggttgatggttacatataacattattgtctgtatcagtagagctttaggagagtttaggacgatcgaaacaggacgtttgcccatctgatgaggattatctgaatctcagcattgttgtacgcagcctttgacataggctggctctctgtgagatcaacccagatgccgttgttgtttatggaaccagtgtggtagatggcagagcctatggtaaattggtaatctccaagtagtgttgtaagttggtacctatccgcagccacgcatgtgcctgttgatgaagtttccttgacactctgctggtccgaagtctgaaagaattccagcctttttcttccaatgaaagtcatgctagcagtatgcatttgaattcattgacgaggaggagcattttgacttgtttgtgttgagtttgtgatccaaattctgaagaaggcggccaagttagcgagcgaagcggaggcccgtcgccgggaggcttgggccggagcgcagcgaggccaactggccttcccgcggcccagggacgcctggggggg

SEQ ID NO: 35744 - DNA, 2257 bp, Zea Mays
tggaggccagctgctcgctgaaacgccgcggatgaaacagatgtccgtccgtcggtttgcgtgctaggctactgtgccgcttgacagaagcgggcactcacctctctctctctccccgcacacgttgctgtcggcagcctcaccaatctcggcgccagactgggaccgcgaagggactggtggtcgccggttcctcccgctactccggctgcttttcctcctctctccgtcgccttccccttccgggctgcccatatttcattcggtgccaacaagtgccaagtgctcgtgtccggatgcgccagcgccgcctggctggggaggaggaagcggcggcggcggcgctctcagaagagagggtgagatgaagactcggagctcagcgagaggggagccgaggcgtctcggaaatgcggctcttctggcgctcatgctctgctccgtcgtcgcgctctccctcatccgggggagattcgccccaattggagatgccatcaaatccgaggacgacgctgcggcggctgcgctcagtgtcagcaaggcggccgtcaacgttgacaccggcgacagcgccgacgaggccgccgccgaagctgctgctgaggagaaagagaaggaggaagtccagccgaagcccgctgacagttccggctccggttccggtggcagcgcagccaagccggtgtgctacgagacgagccgccgctccgacacctgcgaggcagctggcgacgtgcgcgtcgtggggagcacccagacggtgtacgtggactcgctggaccgggagtggaagaccaagccgtactgccggaagcacgacaacttcgcgctcgcccacgtcaaggagtggtccctgaagccgctcccctccggcgcggcgccgcagtgcacggtcaacagctcggccaccgcgttcgtgctgtccacgggcgggttcaccggcaacccgttccacgactacacggacgtgctcatcccggccttcatcacggcgcacccgctccgcggcgaggtccagttcctggtgagcagctacaagtcgtggtggatgaaccgctacatccagatcttccagcagatgagccggcacgaggtggtggacatcgacgcggacgacgaggtccggtgctaccgcagcgtggtggtgggggcgacgttccaccgggagctgggcgtggacgcgtccaaatcgccgccggggtactccacggccgacttccgcaagatgctgcgcgacgcgttcgggctggagcgtgccacggccacgcccagcggcgaccggtgggacatccggcgccgcccccggctgctcatcatctcgcgccgcccgtcccgcgggcgcgccttcatgaacgagcgcgccatggcggacatggcggccagcctggggttcgacgtgcggatcggggagccagacaccagcaccgacacgtccaagttcgcgcggctggtgaactcgtgcgacgtgatggtgggcgtccacggcgccgggctcaccaacatggtgttcctgcctgccggcgccgtggtggtgcaggtggtgccgtacgggcggctggagtggctggcgcggaacacgttcgcggagccgtcggcggggatggaggtccactacctggagtacgtggtgcagctggacgagacgacgctgagcgagcagtacccgagcgatcacccggtgctgagggaccccatggccatccacaagcaggggtggaacgcgctcaagaccacgtacctggacaagcagaacgtgcggccgcacctgggccgcctcaagaacaccttcctccaggcgctcaagatgctgccgcacggccgggacgattgataagtcaaattagttgattcacctggatctcagcctcagttatttagagggagtaaatgtataggttaatggtagctactacttttttcggcttatttgttttttttttgcctttatttgtttgtacgagtaagaggatgcaccagcgtagctgtgaatggcttcacagttctcagagacgaactagtagtgttaaccgttgatattttattattatatatgttgctttggtagcatggaacgtgattgcagtgatgtgctttgactaaggccctgtttgggtccgctagtttattagaaactggtttttaaaagttaaaagttcttcaaacaggtcaatttttttattcactttcctaaaatatagtttcagttttttattcaaaaacagaccagtttcttcagctaaaactagtttataagaaa

SEQ ID NO: 35745 - DNA, 2276 bp, Zea Mays
tggaggccagctgctcgctgaaacgccgcggatgaaacagatgtccgtccgtcggtttgcgtgctaggctactgtgccgcttgacagaagcgggcactcacctctctctctctccccgcacacgttgctgtcggcagcctcaccaatctcggcgccagactgggaccgcgaagggactggtggtcgccggttcctcccgctactccggctgcttttcctcctctctccgtcgccttccccttccgggctgcccatatttcattcggtgccaacaagtgccaagtgctcgtgtccggatgcgccagcgccgcctgaataaaggctggggaggaggaagcggcggcggcggcgctctcagaagagagggtgagatgaagactcggagctcagcgagaggggagccgaggcgtctcggaaatgcggctcttctggcgctcatgctctgctccgtcgtcgcgctctccctcatccgggggagattcgccccaattgtcactaccgcaggagatgccatcaaatccgaggacgacgctgcggcggctgcgctcagtgtcagcaaggcggccgtcaacgttgacaccggcgacagcgccgacgaggccgccgccgaagctgctgctgaggagaaagagaaggaggaagtccagccgaagcccgctgacagttccggctccggttccggtggcagcgcagccaagccggtgtgctacgagacgagccgccgctccgacacctgcgaggcagctggcgacgtgcgcgtcgtggggagcacccagacggtgtacgtggactcgctggaccgggagtggaagaccaagccgtactgccggaagcacgacaacttcgcgctcgcccacgtcaaggagtggtccctgaagccgctcccctccggcgcggcgccgcagtgcacggtcaacagctcggccaccgcgttcgtgctgtccacgggcgggttcaccggcaacccgttccacgactacacggacgtgctcatcccggccttcatcacggcgcacccgctccgcggcgaggtccagttcctggtgagcagctacaagtcgtggtggatgaaccgctacatccagatcttccagcagatgagccggcacgaggtggtggacatcgacgcggacgacgaggtccggtgctaccgcagcgtggtggtgggggcgacgttccaccgggagctgggcgtggacgcgtccaaatcgccgccggggtactccacggccgacttccgcaagatgctgcgcgacgcgttcgggctggagcgtgccacggccacgcccagcggcgaccggtgggacatccggcgccgcccccggctgctcatcatctcgcgccgcccgtcccgcgggcgcgccttcatgaacgagcgcgccatggcggacatggcggccagcctggggttcgacgtgcggatcggggagccagacaccagcaccgacacgtccaagttcgcgcggctggtgaactcgtgcgacgtgatggtgggcgtccacggcgccgggctcaccaacatggtgttcctgcctgccggcgccgtggtggtgcaggtggtgccgtacgggcggctggagtggctggcgcggaacacgttcgcggagccgtcggcggggatggaggtccactacctggagtacgtggtgcagctggacgagacgacgctgagcgagcagtacccgagcgatcacccggtgctgagggaccccatggccatccacaagcaggggtggaacgcgctcaagaccacgtacctggacaagcagaacgtgcggccgcacctgggccgcctcaagaacaccttcctccaggcgctcaagatgctgccgcacggccgggacgattgataagtcaaattagttgattcacctggatctcagcctcagttatttagagggagtaaatgtataggttaatggtagctactacttttttcggcttatttgttttttttttgcctttatttgtttgtacgagtaagaggatgcaccagcgtagctgtgaatggcttcacagttctcagagacgaactagtagtgttaaccgttgatattttattattatatatgttgctttggtagcatggaacgtgattgcagtgatgtgctttgactaaggccctgtttgggtccgctagtttattagaaactggtttttaaaagttaaaagttcttcaaacaggtcaatttttttattcactttcctaaaatatagtttcagttttttattcaaaaacagaccagtttcttcagctaaaactagtttataagaaa

SEQ ID NO: 35746 - DNA, 1774 bp, Zea Mays
tggaggccagctgctcgctgaaacgccgcggatgaaacagatgtccgtccgtcggtttgcgtgctaggctactgtgccgcttgacagaagcgggcactcacctctctctctctccccgcacacgttgctgtcggcagcctcaccaatctcggcgccagactgggaccgcgaagggactggtggtcgccggttcctcccgctactccggctgcttttcctcctctctccgtcgccttccccttccgggctgcccatatttcattcggtgccaacaagtgccaagtgctcgtgtccggatgcgccagcgccgcctggtcaacagatttttgccctgcgctgtcactccaccacgctgcttgtactgaaagctttttcccagaataaaggctggggaggaggaagcggcggcggcggcgctctcagaagagagggtgagatgaagactcggagctcagcgagaggggagccgaggcgtctcggaaatgcggctcttctggcgctcatgctctgctccgtcgtcgcgctctccctcatccgggggagattcgccccaattggagatgccatcaaatccgaggacgacgctgcggcggctgcgctcagtgtcagcaaggcggccgtcaacgttgacaccggcgacagcgccgacgaggccgccgccgaagctgctgctgaggagaaagagaaggaggaagtccagccgaagcccgctgacagttccggctccggttccggtggcagcgcagccaagccggtgtgctacgagacgagccgccgctccgacacctgcgaggcagctggcgacgtgcgcgtcgtggggagcacccagacggtgtacgtggactcgctggaccgggagtggaagaccaagccgtactgccggaagcacgacaacttcgcgctcgcccacgtcaaggagtggtccctgaagccgctcccctccggcgcggcgccgcagtgcacggtcaacagctcggccaccgcgttcgtgctgtccacgggcgggttcaccggcaacccgttccacgactacacggacgtgctcatcccggccttcatcacggcgcacccgctccgcggcgaggtccagttcctggtgagcagctacaagtcgtggtggatgaaccgctacctggagtacgtggtgcagctggacgagacgacgctgagcgagcagtacccgagcgatcacccggtgctgagggaccccatggccatccacaagcaggggtggaacgcgctcaagaccacgtacctggacaagcagaacgtgcggccgcacctgggccgcctcaagaacaccttcctccaggcgctcaagatgctgccgcacggccgggacgattgataagtcaaattagttgattcacctggatctcagcctcagttatttagagggagtaaatgtataggttaatggtagctactacttttttcggcttatttgttttttttttgcctttatttgtttgtacgagtaagaggatgcaccagcgtagctgtgaatggcttcacagttctcagagacgaactagtagtgttaaccgttgatattttattattatatatgttgctttggtagcatggaacgtgattgcagtgatgtgctttgactaaggccctgtttgggtccgctagtttattagaaactggtttttaaaagttaaaagttcttcaaacaggtcaatttttttattcactttcctaaaatatagtttcagttttttattcaaaaacagaccagtttcttcagctaaaactagtttataagaaa

SEQ ID NO: 35747 - DNA, 2366 bp, Zea Mays
cgacggcgttggaaagcggagtggaggccagctgctcgctgaaacgccgcggatgaaacagatgtccgtccgtcggtttgcgtgctaggctactgtgccgcttgacagaagcgggcactcacctctctctctctccccgcacacgttgctgtcggcagcctcaccaatctcggcgccagactgggaccgcgaagggactggtggtcgccggttcctcccgctactccggctgcttttcctcctctctccgtcgccttccccttccgggctgcccatatttcattcggtgccaacaagtgccaagtgctcgtgtccggatgcgccagcgccgcctggtcaacagatttttgccctgcgctgtcactccaccacgctgcttgtactgaaagctttttcccagaataaaggctggggaggaggaagcggcggcggcggcgctctcagaagagagggtgagatgaagactcggagctcagcgagaggggagccgaggcgtctcggaaatgcggctcttctggcgctcatgctctgctccgtcgtcgcgctctccctcatccgggggagattcgccccaattgtcactaccgcaggagatgccatcaaatccgaggacgacgctgcggcggctgcgctcagtgtcagcaaggcggccgtcaacgttgacaccggcgacagcgccgacgaggccgccgccgaagctgctgctggtagaggagaaagagaaggaggaagtccagccgaagcccgctgacagttccggctccggttccggtggcagcgcagccaagccggtgtgctacgagacgagccgccgctccgacacctgcgaggcagctggcgacgtgcgcgtcgtggggagcacccagacggtgtacgtggactcgctggaccgggagtggaagaccaagccgtactgccggaagcacgacaacttcgcgctcgcccacgtcaaggagtggtccctgaagccgctcccctccggcgcggcgccgcagtgcacggtcaacagctcggccaccgcgttcgtgctgtccacgggcgggttcaccggcaacccgttccacgactacacggacgtgctcatcccggccttcatcacggcgcacccgctccgcggcgaggtccagttcctggtgagcagctacaagtcgtggtggatgaaccgctacatccagatcttccagcagatgagccggcacgaggtggtggacatcgacgcggacgacgaggtccggtgctaccgcagcgtggtggtgggggcgacgttccaccgggagctgggcgtggacgcgtccaaatcgccgccggggtactccacggccgacttccgcaagatgctgcgcgacgcgttcgggctggagcgtgccacggccacgcccagcggcgaccggtgggacatccggcgccgcccccggctgctcatcatctcgcgccgcccgtcccgcgggcgcgccttcatgaacgagcgcgccatggcggacatggcggccagcctggggttcgacgtgcggatcggggagccagacaccagcaccgacacgtccaagttcgcgcggctggtgaactcgtgcgacgtgatggtgggcgtccacggcgccgggctcaccaacatggtgttcctgcctgccggcgccgtggtggtgcaggtggtgccgtacgggcggctggagtggctggcgcggaacacgttcgcggagccgtcggcggggatggaggtccactacctggagtacgtggtgcagctggacgagacgacgctgagcgagcagtacccgagcgatcacccggtgctgagggaccccatggccatccacaagcaggggtggaacgcgctcaagaccacgtacctggacaagcagaacgtgcggccgcacctgggccgcctcaagaacaccttcctccaggcgctcaagatgctgccgcacggccgggacgattgataagtcaaattagttgattcacctggatctcagcctcagttatttagagggagtaaatgtataggttaatggtagctactacttttttcggcttatttgttttttttttgcctttatttgtttgtacgagtaagaggatgcaccagcgtagctgtgaatggcttcacagttctcagagacgaactagtagtgttaaccgttgatattttattattatatatgttgctttggtagcatggaacgtgattgcagtgatgtgctttgactaaggccctgtttgggtccgctagtttattagaaactggtttttaaaagttaaaagttcttcaaacaggtcaatttttttattcactttcctaaaatatagtttcagttttttattcaaaaacagaccagtttcttcagctaaaactagtttataagaaa

SEQ ID NO: 35748 - DNA, 1785 bp, Zea Mays
aagaacagtcgtgcaatagatacgtgcccgtactctgtactagtggtactccagacctctacaccggatccgaatccaagccgaagctgctgttcggggaagcacacgacaagcacatcgctgctaccagaggagaaagagaaggaggaagtccagccgaagcccgctgacagttccggctccggttccggtggcagcgcagccaagccggtgtgctacgagacgagccgccgctccgacacctgcgaggcagctggcgacgtgcgcgtcgtggggagcacccagacggtgtacgtggactcgctggaccgggagtggaagaccaagccgtactgccggaagcacgacaacttcgcgctcgcccacgtcaaggagtggtccctgaagccgctcccctccggcgcggcgccgcagtgcacggtcaacagctcggccaccgcgttcgtgctgtccacgggcgggttcaccggcaacccgttccacgactacacggacgtgctcatcccggccttcatcacggcgcacccgctccgcggcgaggtccagttcctggtgagcagctacaagtcgtggtggatgaaccgctacatccagatcttccagcagatgagccggcacgaggtggtggacatcgacgcggacgacgaggtccggtgctaccgcagcgtggtggtgggggcgacgttccaccgggagctgggcgtggacgcgtccaaatcgccgccggggtactccacggccgacttccgcaagatgctgcgcgacgcgttcgggctggagcgtgccacggccacgcccagcggcgaccggtgggacatccggcgccgcccccggctgctcatcatctcgcgccgcccgtcccgcgggcgcgccttcatgaacgagcgcgccatggcggacatggcggccagcctggggttcgacgtgcggatcggggagccagacaccagcaccgacacgtccaagttcgcgcggctggtgaactcgtgcgacgtgatggtgggcgtccacggcgccgggctcaccaacatggtgttcctgcctgccggcgccgtggtggtgcaggtggtgccgtacgggcggctggagtggctggcgcggaacacgttcgcggagccgtcggcggggatggaggtccactacctggagtacgtggtgcagctggacgagacgacgctgagcgagcagtacccgagcgatcacccggtgctgagggaccccatggccatccacaagcaggggtggaacgcgctcaagaccacgtacctggacaagcagaacgtgcggccgcacctgggccgcctcaagaacaccttcctccaggcgctcaagatgctgccgcacggccgggacgattgataagtcaaattagttgattcacctggatctcagcctcagttatttagagggagtaaatgtataggttaatggtagctactacttttttcggcttatttgttttttttttgcctttatttgtttgtacgagtaagaggatgcaccagcgtagctgtgaatggcttcacagttctcagagacgaactagtagtgttaaccgttgatattttattattatatatgttgctttggtagcatggaacgtgattgcagtgatgtgctttgactaaggccctgtttgggtccgctagtttattagaaactggtttttaaaagttaaaagttcttcaaacaggtcaatttttttattcactttcctaaaatatagtttcagttttttattcaaaaacagaccagtttcttcagctaaaactagtttataagaaa

SEQ ID NO: 35749 - DNA, 148 bp, Zea Mays
gccggtgcacgcgaaccgtcgtcgagatgagaattgtccacatgaaagaatggcggcgacggatcgtgtctccaattctccatgtgccgatgtgcgtggctgtacctgctgtgcgcctatactactggatatggagagatgccacatt

SEQ ID NO: 35750 - DNA, 1897 bp, Zea Mays
actgtaatgggcacaataccgagaatatgtagtcatatgatatactgaagcaacattacctgctttccatacatggaaaacagttcaattgtcattatctccagcttgtagatcattgaatcagttctagtttcagcatgattgaagtcaaatcttgatttatcatcatctgaatatttgcttagtactagtaaaataaaaattggagtaaagtggatagctgacgtgcaagatttcaaccaactaaattaccaatgaggcgattggttccagaaactggccgagtttctctgttgtattcatcggtttcatttactacatccaaaaaggcattggattgatgaataagattgagacaaggaaataatcttcttagccaatattgctacgggagtacctttccagtcagatgaataaccaccattgtcaccatgaaacatgctcctcaagtaagactcttcctctatgaaagcaggtctcagatatcctacaatagagagaccgtttgatggactatccatcttctccccattattattatgaatggcctgtgcagtaaaagagcaggtaacgtgattgcctagttctctgcaacttgagagatttgatgagggacacatttagagctatgctcttgtgaccacttatgctcggagaaatgctttggtaaagtttttactctacaacagactggcacatgaaagttcagaacaaattaaaaagttcggattggcatatatacaaaagctaaatatattctagttttagcagagtttttatcaaatactaattgatgggaaaagggatactccgagaaagacatcaaactgttgccaatctttcttttgttttactgatatttgctatccctcctgaaagataccatattctgaagctaacatgagaccatcttgattttctatctttgccttttttttcagaacttgatatgggcaaccggagtggtctggagactgcaatctaaagtgcatgatttgaaggttcacattcaaatcgtgcatgatgtaagctgaattcaatgaatcattaatagcatctttattgaagggcaagcctggtgcagtggtgcgaagccttctcactgagccaaaggtcctagttcaatgcagcctctctgcaaaatgcaggagtaaagcttgccttgattattccttgtctagaccctactcatgtgggagccaccagaacgggccactgcccactgggtctgtcctttcgttaatagcatctttatcagcttgaccattttcactattccaagtgctgctggtttgtggtgtctgcactcttcaaataattatttatcgcttacctttgtcaaacatttggcaaagtaaatcggatgtattgcacgcattgttgcaggcatcccccactctatgagaatatcagttatttctgtatcaatctggacatttcacaaaggaaacatcaataatgatagcgctacttgctactaagaagaatgacccatagtacctgatgaaagcagggaaaataacttgttagcaaaccttggtgtggtgctcatcaggaacgtccataaaattttcaccatccatgtaatcactgaaatcactaatcgccacactactttctccaataatgggtccatccattccaatcaaaactgtctgcaatagtgcaattagtaaatcatcatttcaagcaattaaatgatcgattcaagcactggtgcataattttttttacttcagagtaacacttttatagcaagataatggcatgttaactgcagaactaaacttccaagctgcaaaaactccacaaatacaacccattaacatcaccttactaccatagaatgcatctgtgctagcttacatagaaaaaagagggggaaatgatattgtat

SEQ ID NO: 35751 - DNA, 410 bp, Zea Mays
aatcgcagttgcgttgcatgacatttatgtctacatgaaaagagacaacaaagttagttacaggttgtgggtaagaaactaagaactgatttaggccaacgagaccttattactctgccctttcacctcgcagctcgttattattactgggaatttgtagctgacaaagcttggtcagctaatcagtttccgccagcataaagtcgcagttcatcttttatacatgaactggcaccttattcgttttttttttattatctgtcagaaaccaaactatattcttggaagcatgttagagaccatgcatggcaaaccttattactctgatgtttttggtcattctcatagtcgacaggttgtgcgctatctcctagcaaactcgcataagatgatattgtgttgattccctt

SEQ ID NO: 35752 - DNA, 300 bp, Zea Mays
gacaattctttccaaaagatgccactagaaatggggaaatgctgaaatgtttgctttagtccatgcacacatagcaatgaaggggacaccaaaatttaatgaggaggatgccaaggtgaaggtcagtctgatgcccgagaaggaagccaacaccattgttgttccaggaccctgagctcgctggaggctcgcaatttatgttctataacatcgcacgggcgcgtacctagtctagcaacatggctactccatgacacggaggtaaagagtatttttagctggtatttaacctgattgtct

SEQ ID NO: 35753 - DNA, 606 bp, Zea Mays
gtccatcagaaaaaaactgaaggtgacgatccagaagaagtgaaggcgaggttgaagtattgggctcaagctgttgcatgcactgtcaagctctgcagctaaactaaaggtcggatagaggctgaagaatctggttatatggttttgggatacagggagcggaagggggtgcttctgctctctggcatggaagcgacatgagtgatctcatctgcttctacaaaaaaacttgggaagggggaggaaccatgatacggaacagcgacagacctcgattcagaatttgagatccatggtctgagcttctacgaaagggttcggaagccttgccattcctcagggtgggtggtccgcatagtgcagcgtttccaaatgcatgacctgctggttctttttgctgtttccttgtaatgatcaataggtgctctaattgtcgcactcttgtaataatgtactgaatcgaattttgagttttggccttttgggtactgatccaagggttgattagttccaacattggtttattttgtgctactctgatattgccatgtgcattatgctgttctacacgttcgtagaagttaatagcgcgtttggtttcagtaa

SEQ ID NO: 35754 - DNA, 1874 bp, Zea Mays
attaattcacaaaagctgagaagacggggggtcacacatcatacttcttttgccattgcaatggaaaacaactacgcatgcccaccacccagcaagggaaacctgatcacagtcttgagcatcgatggtggtggggtcaagggcgtcatccctgctaccttccttgcattccttgagtctaaactccaggagcttgatgggagcagcgcgcgcatagctaactactttgatgtcatcgctggcacaagcacaggtggtcttattgctgcaatgctggcagctccgtcgctgagcaatgccaagcaaccatgctatgaggccaaggacatcgtgccattctacctcgagcacagtcctcgcatcttcccatgcaggtttgtatggctagctgtttaacgaatatctgtacgatttcccatctgagactgctcagttttatctatctctaaattgtttatgtacaaggtaaccagaatttcgcgttttgtctcagtatgtatgtattactatatctataaaactacatggaaaaaaaaatacttcaccttgttattcgttctgatgctgcaagaccagaactgggattttgggctggttcttcaagatcctacaaacagttaaggtgatgatcgggccaaaatatgacgggaagtacctgcacaaagtgaccagtgatctgctgggtggtaccagagtggaagagacgctgacaaatgtcgtcattcctactttcgatgtcaagcaagatctagtgccttgatgaatgctcgtcttgctgatgtgtgcattggcacgtccgcagcaccgacggtcctccctgcgcactactttgaaaccgtggatcaccgcactggcgcatcgcgtagcttcaacgttatcgacgggggcctcgccgcaaacaatccgactctggtggcgatgggtgagataacagaacagatgaggcagaagagcaaggagttccccgagaccaagcccctggactaccacaggtatctggtagtgtcactaggcacaggccttccagagcaggacatcaagttcgacgcgtgccgtgtcgccaagtggggcatcttcggatggctcggccgccgggagaacaccgtgcccttgctgcagatgttcatgcacgcgagctcagacatgacggacagctacgtcgccgaccttttcaaagcgatcgggtgctcggaccaactgctgctgcgtgttcaggaccgcaacatacccatagcggctgtggcagctgacctctcgacggagaagaatctgcgagggctggttaagattgcagagaaccttctgcataagccactaggcgaggacgattataagaccgacgaccgcgtcgagacgacgccgagagatggccgtgccatactaacctatgctggtatgctcgcacggtttgcaaagctcctttctgatgagaggaagcttaggcttcagaacatgggacactgtatgccggtcatagcaaatcgtgaagcttgagaggtcttccgaaacacatattgatacatccatcttataggagttagagagttcgttcgtgtaggctatctgcaagctgttgtgtgtgtattgcaagttgtgacgacgacgtgagtgtgtacgtaaatggataaggcgatatggtttgctttggagccctgtacgtaaatggagaaaatgtgatgccctggcgtctggttgtctagcattctaccagctggctctccgatcctagtcacatccatccagctcctccttttcagaacgccctgtacttctcaatgatgcagcactcctagtactaaacctttaatatatcataaacacttgtttttccccctttcaatatatatatgtatgcagctaaaactatgattgtg

SEQ ID NO: 35755 - DNA, 2736 bp, Zea Mays
cccgcaaacacggagctacagcccgagagccaggctgctcggccatggcggcaaacacactctaaactaccctgccccggtgcccccgctccacgacgccgcggcaccgcacccgcacgtagtccggacggcgagcacttgagctgagtcggccgcgcttcggctttctcgcccgagttactcggtgccgcgtcttccctctttcggcggcgtgatctgcgtctcggcgctaagatagctgtcgtctcccggctcccgcacttgcacaagaccttgagctgatcggccggccttctgcgcgacggtgtatctccgcttctctttttgataatttcccgcaagtcccctcacttcggatttgactgaaggagttggttttcctcctctcgcgctgaagtaggttcagtcaaaagtcagaccggcctgtgagcggaattttcctggcttggatccgaaagcctgtgcattggctacgacaactggtggaaagcggttggtcatcaaatcgccgctgctaaagtttctgctccctgaactcagttggatcatagagttttggttcagtgtaccatcctgaattctgccgtgaattgttggatgtgttgtttgatcccaattgcattaaaaaaaaacttctattttgggctgggggctacaactacaagagagcaacaacaagaaggctcgatcagctcgttctttttgttgaccatctctgtctggcgagtgcttgaggaagaaaacgacttgctcagctcgccttttcgttgttgatccgatcaaagactagggaaatgggggtaatgtcacgacgggttctgccggcctgcagcagcctttgctacttctgcccctctgcgggcgcgctcccggcagcctgtcaagcggtagaagaagatcatagcagatatctaccagcttccaccggatggagagccaaacgatagaagggttgggaaactctgtgattatgtctcgagaaatccaacaagcataccaaaggtcagagttcattcataagtagctcataattaattcacaaaagctgagaagacggggggtcacacatcatacttcttttgccattgcaatggaaaacaactacgcatgcccaccacccagcaagggaaacctgatcacagtcttgagcatcgatggtggtggggtcaagggcgtcatccctgctaccttccttgcattccttgagtctaaactccaggagcttgatgggagcagcgcgcgcatagctaactactttgatgtcatcgctggcacaagcacaggtggtcttattgctgcaatgctggcagctccgtcgctgagcaatgccaagcaaccatgctatgaggccaaggacatcgtgccattctacctcgagcacagtcctcgcatcttcccatgcagaactgggattttgggctggttcttcaagatcctacaaacagttaaggtgatgatcgggccaaaatatgacgggaagtacctgcacaaagtgaccagtgatctgctgggtggtaccagagtggaagagacgctgacaaatgtcgtcattcctactttcgatgtcaagtgcgtaaagccaacaatattcagcacattcaaggcaagatctagtgccttgatgaatgctcgtcttgctgatgtgtgcattggcacgtccgcagcaccgacggtcctccctgcgcactactttgaaaccgtggatcaccgcactggcgcatcgcgtagcttcaacgttatcgacgggggcctcgccgcaaacaatccgactctggtggcgatgggtgagataacagaacagatgaggcagaagagcaaggagttccccgagaccaagcccctggactaccacaggtatctggtagtgtcactaggcacaggccttccagagcaggacatcaagttcgacgcgtgccgtgtcgccaagtggggcatcttcggatggctcggccgccgggagaacaccgtgcccttgctgcagatgttcatgcacgcgagctcagacatgacggacagctacgtcgccgaccttttcaaagcgatcgggtgctcggaccaactgctgctgcgtgttcaggaccgcaacatacccatagcggctgtggcagctgacctctcgacggagaagaatctgcgagggctggttaagattgcagagaaccttctgcataagccactaggcgaggacgattataagaccgacgaccgcgtcgagacgacgccgagagatggccgtgccatactaacctatgctggtatgctcgcacggtttgcaaagctcctttctgatgagaggaagcttaggcttcagaacatgggacactgtatgccggtcatagcaaatcgtgaagcttgagaggtcttccgaaacacatattgatacatccatcttataggagttagagagttcgttcgtgtaggctatctgcaagctgttgtgtgtgtattgcaagttgtgacgacgacgtgagtgtgtacgtaaatggataaggcgatatggtttgctttggagccctgtacgtaaatggagaaaatgtgatgccctggcgtctggttgtctagcattctaccagctggctctccgatcctagtcacatccatccagctcctccttttcagaacgccctgtacttctcaatgatgcagcactcctagtactaaacctttaatatatcataaacacttgtttttccccctttcaatatatatatgtatgcagctaaaactatgattgtg

SEQ ID NO: 35756 - DNA, 2718 bp, Zea Mays
cccgcaaacacggagctacagcccgagagccaggctgctcggccatggcggcaaacacactctaaactaccctgccccggtgcccccgctccacgacgccgcggcaccgcacccgcacgtagtccggacggcgagcacttgagctgagtcggccgcgcttcggctttctcgcccgagttactcggtgccgcgtcttccctctttcggcggcgtgatctgcgtctcggcgctaagatagctgtcgtctcccggctcccgcacttgcacaagaccttgagctgatcggccggccttctgcgcgacggtgtatctccgcttctctttttgataatttcccgcaagtcccctcacttcggatttgactgaaggagttggttttcctcctctcgcgctgaagtaggttcagtcaaaagtcagaccggcctgtgagcggaattttcctggcttggatccgaaagcctgtgcattggctacgacaactggtggaaagcggttggtcatcaaatcgccgctgctaaagtttctgctccctgaactcagttggatcatagagttttggttcagtgtaccatcctgaattctgccgtgaattgttggatgtgttgtttgatcccaattgcattaaaaaaaaacttctattttgggctgggggctacaactacaagagagcaacaacaagaaggctcgatcagctcgttctttttgttgaccatctctgtctggcgagtgcttgaggaagaaaacgacttgctcagctcgccttttcgttgttgatccgatcaaagactagggaaatgggggtaatgtcacgacgggttctgccggcctgcagcagcctttgctacttctgcccctctgcgggcgcgctcccggcagcctgtcaagcggtagaagaagatcatagcagatatctaccagcttccaccggatggagagccaaacgatagaagggttgggaaactctgtgattatgtctcgagaaatccaacaagcataccaaagcgtttcacaggtcagagttcattcataagtagctcataattaattcacaaaagctgagaagacggggggtcacacatcatacttcttttgccattgcaatggaaaacaactacgcatgcccaccacccagcaagggaaacctgatcacagtcttgagcatcgatggtggtggggtcaagggcgtcatccctgctaccttccttgcattccttgagtctaaactccaggagcttgatgggagcagcgcgcgcatagctaactactttgatgtcatcgctggcacaagcacaggtggtcttattgctgcaatgctggcagctccgtcgctgagcaatgccaagcaaccatgctatgaggccaaggacatcgtgccattctacctcgagcacagtcctcgcatcttcccatgcagaactgggattttgggctggttcttcaagatcctacaaacagttaaggtgatgatcgggccaaaatatgacgggaagtacctgcacaaagtgaccagtgatctgctgggtggtaccagagtggaagagacgctgacaaatgtcgtcattcctactttcgatgtcaagtgcgtaaagccaacaatattcagcacattcaaggcaagatctagtgccttgatgaatgctcgtcttgctgatgtgtgcattggcacgtccgcagcaccgacggtcctccctgcgcactactttgaaaccgtggatcaccgcactggcgcatcgcgtagcttcaacgttatcgacgggggcctcgccgcaaacaatccgaacagatgaggcagaagagcaaggagttccccgagaccaagcccctggactaccacaggtatctggtagtgtcactaggcacaggccttccagagcaggacatcaagttcgacgcgtgccgtgtcgccaagtggggcatcttcggatggctcggccgccgggagaacaccgtgcccttgctgcagatgttcatgcacgcgagctcagacatgacggacagctacgtcgccgaccttttcaaagcgatcgggtgctcggaccaactgctgctgcgtgttcaggaccgcaacatacccatagcggctgtggcagctgacctctcgacggagaagaatctgcgagggctggttaagattgcagagaaccttctgcataagccactaggcgaggacgattataagaccgacgaccgcgtcgagacgacgccgagagatggccgtgccatactaacctatgctggtatgctcgcacggtttgcaaagctcctttctgatgagaggaagcttaggcttcagaacatgggacactgtatgccggtcatagcaaatcgtgaagcttgagaggtcttccgaaacacatattgatacatccatcttataggagttagagagttcgttcgtgtaggctatctgcaagctgttgtgtgtgtattgcaagttgtgacgacgacgtgagtgtgtacgtaaatggataaggcgatatggtttgctttggagccctgtacgtaaatggagaaaatgtgatgccctggcgtctggttgtctagcattctaccagctggctctccgatcctagtcacatccatccagctcctccttttcagaacgccctgtacttctcaatgatgcagcactcctagtactaaacctttaatatatcataaacacttgtttttccccctttcaatatatatatgtatgcagctaaaactatgattgtg

SEQ ID NO: 35757 - DNA, 2969 bp, Zea Mays
cccgcaaacacggagctacagcccgagagccaggctgctcggccatggcggcaaacacactctaaactaccctgccccggtgcccccgctccacgacgccgcggcaccgcacccgcacgtagtccggacggcgagcacttgagctgagtcggccgcgcttcggctttctcgcccgagttactcggtgccgcgtcttccctctttcggcggcgtgatctgcgtctcggcgctaagatagctgtcgtctcccggctcccgcacttgcacaagaccttgagctgatcggccggccttctgcgcgacggtgtatctccgcttctctttttgataatttcccgcaagtcccctcacttcggatttgactgaaggagttggttttcctcctctcgcgctgaagtaggttcagtcaaaagtcagaccggcctgtgagcggaattttcctggcttggatccgaaagcctgtgcattggctacgacaactggtggaaagcggttggtcatcaaatcgccgctgctaaagtttctgctccctgaactcagttggatcatagagttttggttcagtgtaccatcctgaattctgccgtgaattgttggatgtgttgtttgatcccaattgcattaaaaaaaaacttctattttgggctgggggctacaactacaagagagcaacaacaagaaggctcgatcagctcgttctttttgttgaccatctctgtctggcgagtgcttgaggaagaaaacgacttgctcagctcgccttttcgttgttgatccgatcaaagactagggaaatgggggtaatgtcacgacgggttctgccggcctgcagcagcctttgctacttctgcccctctgcgggcgcgctcccggcagcctgtcaagcggtagaagaagatcatagcagatatctaccagcttccaccggatggagagccaaacgatagaagggttgggaaactctgtgattatgtctcgagaaatccaacaagcataccaaaggtcagagttcattcataagtagctcataattaattcacaaaagctgagaagacggggggtcacacatcatacttcttttgccattgcaatggaaaacaactacgcatgcccaccacccagcaagggaaacctgatcacagtcttgagcatcgatggtggtggggtcaagggcgtcatccctgctaccttccttgcattccttgagtctaaactccaggagcttgatgggagcagcgcgcgcatagctaactactttgatgtcatcgctggcacaagcacaggtggtcttattgctgcaatgctggcagctccgtcgctgagcaatgccaagcaaccatgctatgaggccaaggacatcgtgccattctacctcgagcacagtcctcgcatcttcccatgcaggtttgtatggctagctgtttaacgaatatctgtacgatttcccatctgagactgctcagttttatctatctctaaattgtttatgtacaagaactgggattttgggctggttcttcaagatcctacaaacagttaaggtgatgatcgggccaaaatatgacgggaagtacctgcacaaagtgaccagtgatctgctgggtggtaccagagtggaagagacgctgacaaatgtcgtcattcctactttcgatgtcaagtgcgtaaagccaacaatattcagcacattcaaggcaagatctagtgccttgatgaatgctcgtcttgctgatgtgtgcattggcacgtccgcagcaccgacggtcctccctgcgcactactttgaaaccgtggatcaccgcactggcgcatcgcgtagcttcaacgttatcgacgggggcctcgccgcaaacaatccggtgcttatttattgcttgcttggttatagtagtagttttttttctttcttctggctgggttttgacgactagcatgaaatcatgtgcgtattttgttatgatctttttgtccctgtccctgtcctgtcctctgatctgacagactctggtggcgatgggtgagataacagaacagatgaggcagaagagcaaggagttccccgagaccaagcccctggactaccacaggtatctggtagtgtcactaggcacaggccttccagagcaggacatcaagttcgacgcgtgccgtgtcgccaagtggggcatcttcggatggctcggccgccgggagaacaccgtgcccttgctgcagatgttcatgcacgcgagctcagacatgacggacagctacgtcgccgaccttttcaaagcgatcgggtgctcggaccaactgctgctgcgtgttcaggaccgcaacatacccatagcggctgtggcagctgacctctcgacggagaagaatctgcgagggctggttaagattgcagagaaccttctgcataagccactaggcgaggacgattataagaccgacgaccgcgtcgagacgacgccgagagatggccgtgccatactaacctatgctggtatgctcgcacggtttgcaaagctcctttctgatgagaggaagcttaggcttcagaacatgggacactgtatgccggtcatagcaaatcgtgaagcttgagaggtcttccgaaacacatattgatacatccatcttataggagttagagagttcgttcgtgtaggctatctgcaagctgttgtgtgtgtattgcaagttgtgacgacgacgtgagtgtgtacgtaaatggataaggcgatatggtttgctttggagccctgtacgtaaatggagaaaatgtgatgccctggcgtctggttgtctagcattctaccagctggctctccgatcctagtcacatccatccagctcctccttttcagaacgccctgtacttctcaatgatgcagcactcctagtactaaacctttaatatatcataaacacttgtttttccccctttcaatatatatatgtatgcagctaaaactatgattgtg

SEQ ID NO: 35758 - DNA, 3075 bp, Zea Mays
cccgcaaacacggagctacagcccgagagccaggctgctcggccatggcggcaaacacactctaaactaccctgccccggtgcccccgctccacgacgccgcggcaccgcacccgcacgtagtccggacggcgagcacttgagctgagtcggccgcgcttcggctttctcgcccgagttactcggtgccgcgtcttccctctttcggcggcgtgatctgcgtctcggcgctaagatagctgtcgtctcccggctcccgcacttgcacaagaccttgagctgatcggccggccttctgcgcgacggtgtatctccgcttctctttttgataatttcccgcaagtcccctcacttcggatttgactgaaggagttggttttcctcctctcgcgctgaagtaggttcagtcaaaagtcagaccggcctgtgagcggaattttcctggcttggatccgaaagcctgtgcattggctacgacaactggtggaaagcggttggtcatcaaatcgccgctgctaaagtttctgctccctgaactcagttggatcatagagttttggttcagtgtaccatcctgaattctgccgtgaattgttggatgtgttgtttgatcccaattgcattaaaaaaaaacttctattttgggctgggggctacaactacaagagagcaacaacaagaaggctcgatcagctcgttctttttgttgaccatctctgtctggcgagtgcttgaggaagaaaacgacttgctcagctcgccttttcgttgttgatccgatcaaagactagggaaatgggggtaatgtcacgacgggttctgccggcctgcagcagcctttgctacttctgcccctctgcgggcgcgctcccggcagcctgtcaagcggtagaagaagatcatagcagatatctaccagcttccaccggatggagagccaaacgatagaagggttgggaaactctgtgattatgtctcgagaaatccaacaagcataccaaagagttcattcataagtagctcataattaattcacaaaagctgagaagacggggggtcacacatcatacttcttttgccattgcaatggaaaacaactacgcatgcccaccacccagcaagggaaacctgatcacagtcttgagcatcgatggtggtggggtcaagggcgtcatccctgctaccttccttgcattccttgagtctaaactccaggagcttgatgggagcagcgcgcgcatagctaactactttgatgtcatcgctggcacaagcacaggtggtcttattgctgcaatgctggcagctccgtcgctgagcaatgccaagcaaccatgctatgaggccaaggacatcgtgccattctacctcgagcacagtcctcgcatcttcccatgcaggtttgtatggctagctgtttaacgaatatctgtacgatttcccatctgagactgctcagttttatctatctctaaattgtttatgtacaaggtaaccagaatttcgcgttttgtctcagtatgtatgtattactatatctataaaactacatggaaaaaaaaatacttcaccttgttattcgttctgatgctgcaagaccagaactgggattttgggctggttcttcaagatcctacaaacagttaaggtgatgatcgggccaaaatatgacgggaagtacctgcacaaagtgaccagtgatctgctgggtggtaccagagtggaagagacgctgacaaatgtcgtcattcctactttcgatgtcaagtgcgtaaagccaacaatattcagcacattcaaggcaagatctagtgccttgatgaatgctcgtcttgctgatgtgtgcattggcacgtccgcagcaccgacggtcctccctgcgcactactttgaaaccgtggatcaccgcactggcgcatcgcgtagcttcaacgttatcgacgggggcctcgccgcaaacaatccggtgcttatttattgcttgcttggttatagtagtagttttttttctttcttctggctgggttttgacgactagcatgaaatcatgtgcgtattttgttatgatctttttgtccctgtccctgtcctgtcctctgatctgacagactctggtggcgatgggtgagataacagaacagatgaggcagaagagcaaggagttccccgagaccaagcccctggactaccacaggtatctggtagtgtcactaggcacaggccttccagagcaggacatcaagttcgacgcgtgccgtgtcgccaagtggggcatcttcggatggctcggccgccgggagaacaccgtgcccttgctgcagatgttcatgcacgcgagctcagacatgacggacagctacgtcgccgaccttttcaaagcgatcgggtgctcggaccaactgctgctgcgtgttcaggaccgcaacatacccatagcggctgtggcagctgacctctcgacggagaagaatctgcgagggctggttaagattgcagagaaccttctgcataagccactaggcgaggacgattataagaccgacgaccgcgtcgagacgacgccgagagatggccgtgccatactaacctatgctggtatgctcgcacggtttgcaaagctcctttctgatgagaggaagcttaggcttcagaacatgggacactgtatgccggtcatagcaaatcgtgaagcttgagaggtcttccgaaacacatattgatacatccatcttataggagttagagagttcgttcgtgtaggctatctgcaagctgttgtgtgtgtattgcaagttgtgacgacgacgtgagtgtgtacgtaaatggataaggcgatatggtttgctttggagccctgtacgtaaatggagaaaatgtgatgccctggcgtctggttgtctagcattctaccagctggctctccgatcctagtcacatccatccagctcctccttttcagaacgccctgtacttctcaatgatgcagcactcctagtactaaacctttaatatatcataaacacttgtttttccccctttcaatatatatatgtatgcagctaaaactatgattgtg

SEQ ID NO: 35759 - DNA, 3217 bp, Zea Mays
gccaggtttccgaacagacccgcaaacacggagctacagcccgagagccaggctgctcggccatggcggcaaacacactctaaactaccctgccccggtgcccccgctccacgacgccgcggcaccgcacccgcacgtagtccggacggcgagcacttgagctgagtcggccgcgcttcggctttctcgcccgagttactcggtgccgcgtcttccctctttcggcggcgtgatctgcgtctcggcgctaagatagctgtcgtctcccggctcccgcacttgcacaagaccttgagctgatcggccggccttctgcgcgacggtgtatctccgcttctctttttgataatttcccgcaagtcccctcacttcggatttgactgaaggagttggttttcctcctctcgcgctgaagtaggttcagtcaaaagtcagaccggcctgtgagcggaattttcctggcttggatccgaaagcctgtgcattggctacgacaactggtggaaagcggttggtcatcaaatcgccgctgctaaagtttctgctccctgaactcagttggatcatagagttttggttcagtgtaccatcctgaattctgccgtgaattgttggatgtgttgtttgatcccaattgcattaaaaaaaaacttctattttgggctgggggctacaactacaagagagcaacaacaagaaggctcgatcagctcgttctttttgttgaccatctctgtctggcgagtgcttgaggaagaaaacgacttgctcagctcgccttttcgttgttgatccgatcaaagactagggaaatgggggtaatgtcacgacgggttctgccggcctgcagcagcctttgctacttctgcccctctgcgggcgcgctcccggcagcctgtcaagcggtagaagaagatcatagcagatatctaccagcttccaccggatggagagccaaacgatagaagggttgggaaactctgtgattatgtctcgagaaatccaacaagcataccaaagatgacagcagaggactctaggttcacaccaaaggagcagagttttgagtttatcagcaatgatgttgagctgatgatttttcgagggctccgaggttccatttactcaacatctatttttttgcctcaaagaaagtaaaagctaaaataaagtagcgtttgtaaatcataaagaacatactagctttacaaggtgtgaacatttacttgcccagctatgcctcaacatgactgttgcaggataaccaagcttgtactcatatgtgatttctattagaagtaaagctaatataacacacacacacaaaaagacagggtcttgaagctgccagacatatgagcaatccctaaataaagtgtaaatgggacaagcacataaagatacttgcatagaaacaatgccgaaatcatctcggataagcttgccagcagtttagcatgctttgagtgtaaaatgtatgcgacattccttgtactactatacaaaaccaaaacttctttaccttttcagcatgagttgtcttttgtctccacgcctataaatagcgtttcacaggtcagagttcattcataagtagctcataattaattcacaaaagctgagaagacggggggtcacacatcatacttcttttgccattgcaatggaaaacaactacgcatgcccaccacccagcaagggaaacctgatcacagtcttgagcatcgatggtggtggggtcaagggcgtcatccctgctaccttccttgcattccttgagtctaaactccaggtggtcttattgctgcaatgctggcagctccgtcgctgagcaatgccaagcaaccatgctatgaggccaaggacatcgtgccattctacctcgagcacagtcctcgcatcttcccatgcagaactgggattttgggctggttcttcaagatcctacaaacagttaaggtgatgatcgggccaaaatatgacgggaagtacctgcacaaagtgaccagtgatctgctgggtggtaccagagtggaagagacgctgacaaatgtcgtcattcctactttcgatgtcaagtgcgtaaagccaacaatattcagcacattcaaggcaagatctagtgccttgatgaatgctcgtcttgctgatgtgtgcattggcacgtccgcagcaccgacggtcctccctgcgcactactttgaaaccgtggatcaccgcactggcgcatcgcgtagcttcaacgttatcgacgggggcctcgccgcaaacaatccgaacagatgaggcagaagagcaaggagttccccgagaccaagcccctggactaccacaggtatctggtagtgtcactaggcacaggccttccagagcaggacatcaagttcgacgcgtgccgtgtcgccaagtggggcatcttcggatggctcggccgccgggagaacaccgtgcccttgctgcagatgttcatgcacgcgagctcagacatgacggacagctacgtcgccgaccttttcaaagcgatcgggtgctcggaccaactgctgctgcgtgttcaggaccgcaacatacccatagcggctgtggcagctgacctctcgacggagaagaatctgcgagggctggttaagattgcagagaaccttctgcataagccactaggcgaggacgattataagaccgacgaccgcgtcgagacgacgccgagagatggccgtgccatactaacctatgctggtatgctcgcacggtttgcaaagctcctttctgatgagaggaagcttaggcttcagaacatgggacactgtatgccggtcatagcaaatcgtgaagcttgagaggtcttccgaaacacatattgatacatccatcttataggagttagagagttcgttcgtgtaggctatctgcaagctgttgtgtgtgtattgcaagttgtgacgacgacgtgagtgtgtacgtaaatggataaggcgatatggtttgctttggagccctgtacgtaaatggagaaaatgtgatgccctggcgtctggttgtctagcattctaccagctggctctccgatcctagtcacatccatccagctcctccttttcagaacgccctgtacttctcaatgatgcagcactcctagtactaaacctttaatatatcataaacacttgtttttccccctttcaatatatatatgtatgcagctaaaactatgattgtg

SEQ ID NO: 35760 - DNA, 3281 bp, Zea Mays
gccaggtttccgaacagacccgcaaacacggagctacagcccgagagccaggctgctcggccatggcggcaaacacactctaaactaccctgccccggtgcccccgctccacgacgccgcggcaccgcacccgcacgtagtccggacggcgagcacttgagctgagtcggccgcgcttcggctttctcgcccgagttactcggtgccgcgtcttccctctttcggcggcgtgatctgcgtctcggcgctaagatagctgtcgtctcccggctcccgcacttgcacaagaccttgagctgatcggccggccttctgcgcgacggtgtatctccgcttctctttttgataatttcccgcaagtcccctcacttcggatttgactgaaggagttggttttcctcctctcgcgctgaagtaggttcagtcaaaagtcagaccggcctgtgagcggaattttcctggcttggatccgaaagcctgtgcattggctacgacaactggtggaaagcggttggtcatcaaatcgccgctgctaaagtttctgctccctgaactcagttggatcatagagttttggttcagtgtaccatcctgaattctgccgtgaattgttggatgtgttgtttgatcccaattgcattaaaaaaaaacttctattttgggctgggggctacaactacaagagagcaacaacaagaaggctcgatcagctcgttctttttgttgaccatctctgtctggcgagtgcttgaggaagaaaacgacttgctcagctcgccttttcgttgttgatccgatcaaagactagggaaatgggggtaatgtcacgacgggttctgccggcctgcagcagcctttgctacttctgcccctctgcgggcgcgctcccggcagcctgtcaagcggtagaagaagatcatagcagatatctaccagcttccaccggatggagagccaaacgatagaagggttgggaaactctgtgattatgtctcgagaaatccaacaagcataccaaagatgacagcagaggactctaggttcacaccaaaggagcagagttttgagtttatcagcaatgatgttgagctgatgatttttcgagggctccgaggttccatttactcaacatctatttttttgcctcaaagaaagtaaaagctaaaataaagtagcgtttgtaaatcataaagaacatactagctttacaaggtgtgaacatttacttgcccagctatgcctcaacatgactgttgcaggataaccaagcttgtactcatatgtgatttctattagaagtaaagctaatataacacacacacacaaaaagacagggtcttgaagctgccagacatatgagcaatccctaaataaagtgtaaatgggacaagcacataaagatacttgcatagaaacaatgccgaaatcatctcggataagcttgccagcagtttagcatgctttgagtgtaaaatgtatgcgacattccttgtactactatacaaaaccaaaacttctttaccttttcagcatgagttgtcttttgtctccacgcctataaatagcgtttcacaggtcagagttcattcataagtagctcataattaattcacaaaagctgagaagacggggggtcacacatcatacttcttttgccattgcaatggaaaacaactacgcatgcccaccacccagcaagggaaacctgatcacagtcttgagcatcgatggtggtggggtcaagggcgtcatccctgctaccttccttgcattccttgagtctaaactccaggagcttgatgggagcagcgcgcgcatagctaactactttgatgtcatcgctggcacaagcacaggtggtcttattgctgcaatgctggcagctccgtcgctgagcaatgccaagcaaccatgctatgaggccaaggacatcgtgccattctacctcgagcacagtcctcgcatcttcccatgcagaactgggattttgggctggttcttcaagatcctacaaacagttaaggtgatgatcgggccaaaatatgacgggaagtacctgcacaaagtgaccagtgatctgctgggtggtaccagagtggaagagacgctgacaaatgtcgtcattcctactttcgatgtcaagtgcgtaaagccaacaatattcagcacattcaaggcaagatctagtgccttgatgaatgctcgtcttgctgatgtgtgcattggcacgtccgcagcaccgacggtcctccctgcgcactactttgaaaccgtggatcaccgcactggcgcatcgcgtagcttcaacgttatcgacgggggcctcgccgcaaacaatccgaacagatgaggcagaagagcaaggagttccccgagaccaagcccctggactaccacaggtatctggtagtgtcactaggcacaggccttccagagcaggacatcaagttcgacgcgtgccgtgtcgccaagtggggcatcttcggatggctcggccgccgggagaacaccgtgcccttgctgcagatgttcatgcacgcgagctcagacatgacggacagctacgtcgccgaccttttcaaagcgatcgggtgctcggaccaactgctgctgcgtgttcaggaccgcaacatacccatagcggctgtggcagctgacctctcgacggagaagaatctgcgagggctggttaagattgcagagaaccttctgcataagccactaggcgaggacgattataagaccgacgaccgcgtcgagacgacgccgagagatggccgtgccatactaacctatgctggtatgctcgcacggtttgcaaagctcctttctgatgagaggaagcttaggcttcagaacatgggacactgtatgccggtcatagcaaatcgtgaagcttgagaggtcttccgaaacacatattgatacatccatcttataggagttagagagttcgttcgtgtaggctatctgcaagctgttgtgtgtgtattgcaagttgtgacgacgacgtgagtgtgtacgtaaatggataaggcgatatggtttgctttggagccctgtacgtaaatggagaaaatgtgatgccctggcgtctggttgtctagcattctaccagctggctctccgatcctagtcacatccatccagctcctccttttcagaacgccctgtacttctcaatgatgcagcactcctagtactaaacctttaatatatcataaacacttgtttttccccctttcaatatatatatgtatgcagctaaaactatgattgtg

SEQ ID NO: 35761 - DNA, 3314 bp, Zea Mays
gccaggtttccgaacagacccgcaaacacggagctacagcccgagagccaggctgctcggccatggcggcaaacacactctaaactaccctgccccggtgcccccgctccacgacgccgcggcaccgcacccgcacgtagtccggacggcgagcacttgagctgagtcggccgcgcttcggctttctcgcccgagttactcggtgccgcgtcttccctctttcggcggcgtgatctgcgtctcggcgctaagatagctgtcgtctcccggctcccgcacttgcacaagaccttgagctgatcggccggccttctgcgcgacggtgtatctccgcttctctttttgataatttcccgcaagtcccctcacttcggatttgactgaaggagttggttttcctcctctcgcgctgaagtaggttcagtcaaaagtcagaccggcctgtgagcggaattttcctggcttggatccgaaagcctgtgcattggctacgacaactggtggaaagcggttggtcatcaaatcgccgctgctaaagtttctgctccctgaactcagttggatcatagagttttggttcagtgtaccatcctgaattctgccgtgaattgttggatgtgttgtttgatcccaattgcattaaaaaaaaacttctattttgggctgggggctacaactacaagagagcaacaacaagaaggctcgatcagctcgttctttttgttgaccatctctgtctggcgagtgcttgaggaagaaaacgacttgctcagctcgccttttcgttgttgatccgatcaaagactagggaaatgggggtaatgtcacgacgggttctgccggcctgcagcagcctttgctacttctgcccctctgcgggcgcgctcccggcagcctgtcaagcggtagaagaagatcatagcagatatctaccagcttccaccggatggagagccaaacgatagaagggttgggaaactctgtgattatgtctcgagaaatccaacaagcataccaaagatgacagcagaggactctaggttcacaccaaaggagcagagttttgagtttatcagcaatgatgttgagctgatgatttttcgagggctccgaggttccatttactcaacatctatttttttgcctcaaagaaagtaaaagctaaaataaagtagcgtttgtaaatcataaagaacatactagctttacaaggtgtgaacatttacttgcccagctatgcctcaacatgactgttgcaggataaccaagcttgtactcatatgtgatttctattagaagtaaagctaatataacacacacacacaaaaagacagggtcttgaagctgccagacatatgagcaatccctaaataaagtgtaaatgggacaagcacataaagatacttgcatagaaacaatgccgaaatcatctcggataagcttgccagcagtttagcatgctttgagtgtaaaatgtatgcgacattccttgtactactatacaaaaccaaaacttctttaccttttcagcatgagttgtcttttgtctccacgcctataaatagcgtttcacaggtcagagttcattcataagtagctcataattaattcacaaaagctgagaagacggggggtcacacatcatacttcttttgccattgcaatggaaaacaactacgcatgcccaccacccagcaagggaaacctgatcacagtcttgagcatcgatggtggtggggtcaagggcgtcatccctgctaccttccttgcattccttgagtctaaactccaggagcttgatgggagcagcgcgcgcatagctaactactttgatgtcatcgctggcacaagcacaggtggtcttattgctgcaatgctggcagctccgtcgctgagcaatgccaagcaaccatgctatgaggccaaggacatcgtgccattctacctcgagcacagtcctcgcatcttcccatgcagaccagaactgggattttgggctggttcttcaagatcctacaaacagttaaggtgatgatcgggccaaaatatgacgggaagtacctgcacaaagtgaccagtgatctgctgggtggtaccagagtggaagagacgctgacaaatgtcgtcattcctactttcgatgtcaagtgcgtaaagccaacaatattcagcacattcaaggcaagatctagtgccttgatgaatgctcgtcttgctgatgtgtgcattggcacgtccgcagcaccgacggtcctccctgcgcactactttgaaaccgtggatcaccgcactggcgcatcgcgtagcttcaacgttatcgacgggggcctcgccgcaaacaatccgactctggtggcgatgggtgagataacagaacagatgaggcagaagagcaaggagttccccgagaccaagcccctggactaccacaggtatctggtagtgtcactaggcacaggccttccagagcaggacatcaagttcgacgcgtgccgtgtcgccaagtggggcatcttcggatggctcggccgccgggagaacaccgtgcccttgctgcagatgttcatgcacgcgagctcagacatgacggacagctacgtcgccgaccttttcaaagcgatcgggtgctcggaccaactgctgctgcgtgttcaggaccgcaacatacccatagcggctgtggcagctgacctctcgacggagaagaatctgcgagggctggttaagattgcagagaaccttctgcataagccactaggcgaggacgattataagaccgacgaccgcgtcgagacgacgccgagagatggccgtgccatactaacctatgctggtatgctcgcacggtttgcaaagctcctttctgatgagaggaagcttaggcttcagaacatgggacactgtatgccggtcatagcaaatcgtgaagcttgagaggtcttccgaaacacatattgatacatccatcttataggagttagagagttcgttcgtgtaggctatctgcaagctgttgtgtgtgtattgcaagttgtgacgacgacgtgagtgtgtacgtaaatggataaggcgatatggtttgctttggagccctgtacgtaaatggagaaaatgtgatgccctggcgtctggttgtctagcattctaccagctggctctccgatcctagtcacatccatccagctcctccttttcagaacgccctgtacttctcaatgatgcagcactcctagtactaaacctttaatatatcataaacacttgtttttccccctttcaatatatatatgtatgcagctaaaactatgattgtg

SEQ ID NO: 35762 - DNA, 3286 bp, Zea Mays
gccaggtttccgaacagacccgcaaacacggagctacagcccgagagccaggctgctcggccatggcggcaaacacactctaaactaccctgccccggtgcccccgctccacgacgccgcggcaccgcacccgcacgtagtccggacggcgagcacttgagctgagtcggccgcgcttcggctttctcgcccgagttactcggtgccgcgtcttccctctttcggcggcgtgatctgcgtctcggcgctaagatagctgtcgtctcccggctcccgcacttgcacaagaccttgagctgatcggccggccttctgcgcgacggtgtatctccgcttctctttttgataatttcccgcaagtcccctcacttcggatttgactgaaggagttggttttcctcctctcgcgctgaagtaggttcagtcaaaagtcagaccggcctgtgagcggaattttcctggcttggatccgaaagcctgtgcattggctacgacaactggtggaaagcggttggtcatcaaatcgccgctgctaaagtttctgctccctgaactcagttggatcatagagttttggttcagtgtaccatcctgaattctgccgtgaattgttggatgtgttgtttgatcccaattgcattaaaaaaaaacttctattttgggctgggggctacaactacaagagagcaacaacaagaaggctcgatcagctcgttctttttgttgaccatctctgtctggcgagtgcttgaggaagaaaacgacttgctcagctcgccttttcgttgttgatccgatcaaagactagggaaatgggggtaatgtcacgacgggttctgccggcctgcagcagcctttgctacttctgcccctctgcgggcgcgctcccggcagcctgtcaagcggtagaagaagatcatagcagatatctaccagcttccaccggatggagagccaaacgatagaagggttgggaaactctgtgattatgtctcgagaaatccaacaagcataccaaagatgacagcagaggactctaggttcacaccaaaggagcagagttttgagtttatcagcaatgatgttgagctgatgatttttcgagggctccgaggttccatttactcaacatctatttttttgcctcaaagaaagtaaaagctaaaataaagtagcgtttgtaaatcataaagaacatactagctttacaaggtgtgaacatttacttgcccagctatgcctcaacatgactgttgcaggataaccaagcttgtactcatatgtgatttctattagaagtaaagctaatataacacacacacacaaaaagacagggtcttgaagctgccagacatatgagcaatccctaaataaagtgtaaatgggacaagcacataaagatacttgcatagaaacaatgccgaaatcatctcggataagcttgccagcagtttagcatgctttgagtgtaaaatgtatgcgacattccttgtactactatacaaaaccaaaacttctttaccttttcagcatgagttgtcttttgtctccacgcctataaatagcgtttcacaggtcagagttcattcataagtagctcataattaattcacaaaagctgagaagacggggggtcacacatcatacttcttttgccattgcaatggaaaacaactacgcatgcccaccacccagcaagggaaacctgatcacagtcttgagcatcgatggtggtggggtcaagggcgtcatccctgctaccttccttgcattccttgagtctaaactccaggagcttgatgggagcagcgcgcgcatagctaactactttgatgtcatcgctggcacaagcacaggtggtcttattgctgcaatgctggcagctccgtcgctgagcaatgccaagcaaccatgctatgaggccaaggacatcgtgccattctacctcgagcacagtcctcgcatcttcccatgcagaccagaactgggattttgggctggttcttcaagatcctacaaacagttaaggtgatgatcgggccaaaatatgacgggaagtacctgcacaaagtgaccagtgatctgctgggtggtaccagagtggaagagacgctgacaaatgtcgtcattcctactttcgatgtcaagtgcgtaaagccaacaatattcagcacattcaaggcaagatctagtgccttgatgaatgctcgtcttgctgatgtgtgcattggcacgtccgcagcaccgacggtcctccctgcgcactactttgaaaccgtggatcaccgcactggcgcatcgcgtagcttcaacgttatcgacgggggcctcgccgcaaacaatccgaacagatgaggcagaagagcaaggagttccccgagaccaagcccctggactaccacaggtatctggtagtgtcactaggcacaggccttccagagcaggacatcaagttcgacgcgtgccgtgtcgccaagtggggcatcttcggatggctcggccgccgggagaacaccgtgcccttgctgcagatgttcatgcacgcgagctcagacatgacggacagctacgtcgccgaccttttcaaagcgatcgggtgctcggaccaactgctgctgcgtgttcaggaccgcaacatacccatagcggctgtggcagctgacctctcgacggagaagaatctgcgagggctggttaagattgcagagaaccttctgcataagccactaggcgaggacgattataagaccgacgaccgcgtcgagacgacgccgagagatggccgtgccatactaacctatgctggtatgctcgcacggtttgcaaagctcctttctgatgagaggaagcttaggcttcagaacatgggacactgtatgccggtcatagcaaatcgtgaagcttgagaggtcttccgaaacacatattgatacatccatcttataggagttagagagttcgttcgtgtaggctatctgcaagctgttgtgtgtgtattgcaagttgtgacgacgacgtgagtgtgtacgtaaatggataaggcgatatggtttgctttggagccctgtacgtaaatggagaaaatgtgatgccctggcgtctggttgtctagcattctaccagctggctctccgatcctagtcacatccatccagctcctccttttcagaacgccctgtacttctcaatgatgcagcactcctagtactaaacctttaatatatcataaacacttgtttttccccctttcaatatatatatgtatgcagctaaaactatgattgtg

SEQ ID NO: 35763 - DNA, 2741 bp, Zea Mays
ctacagccgaggacagccaggtttccgaacagacccgcaaacacggagctacagcccgagagccaggctgctcggccatggcggcaaacacactctaaactaccctgccccggtgcccccgctccacgacgccgcggcaccgcacccgcacgtagtccggacggcgagcacttgagctgagtcggccgcgcttcggctttctcgcccgagttactcggtgccgcgtcttccctctttcggcggcgtgatctgcgtctcggcgctaagatagctgtcgtctcccggctcccgcacttgcacaagaccttgagctgatcggccggccttctgcgcgacggtgtatctccgcttctctttttgataatttcccgcaagtcccctcacttcggatttgactgaaggagttggttttcctcctctcgcgctgaagtaggttcagtcaaaagtcagaccggcctgtgagcggaattttcctggcttggatccgaaagcctgtgcattggctacgacaactggtggaaagcggttggtcatcaaatcgccgctgctaaagtttctgctccctgaactcagttggatcatagagttttggttcagtgtaccatcctgaattctgccgtgaattgttggatgtgttgtttgatcccaattgcattaaaaaaaaacttctattttgggctgggggctacaactacaagagagcaacaacaagaaggctcgatcagctcgttctttttgttgaccatctctgtctggcgagtgcttgaggaagaaaacgacttgctcagctcgccttttcgttgttgatccgatcaaagactagggaaatgggggtaatgtcacgacgggttctgccggcctgcagcagcctttgctacttctgcccctctgcgggcgcgctcccggcagcctgtcaagcggtagaagaagatcatagcagatatctaccagcttccaccggatggagagccaaacgatagaagggttgggaaactctgtgattatgtctcgagaaatccaacaagcataccaaaggtcagagttcattcataagtagctcataattaattcacaaaagctgagaagacggggggtcacacatcatacttcttttgccattgcaatggaaaacaactacgcatgcccaccacccagcaagggaaacctgatcacagtcttgagcatcgatggtggtggggtcaagggcgtcatccctgctaccttccttgcattccttgagtctaaactccaggagcttgatgggagcagcgcgcgcatagctaactactttgatgtcatcgctggcacaagcacaggtggtcttattgctgcaatgctggcagctccgtcgctgagcaatgccaagcaaccatgctatgaggccaaggacatcgtgccattctacctcgagcacagtcctcgcatcttcccatgcagaactgggattttgggctggttcttcaagatcctacaaacagttaaggtgatgatcgggccaaaatatgacgggaagtacctgcacaaagtgaccagtgatctgctgggtggtaccagagtggaagagacgctgacaaatgtcgtcattcctactttcgatgtcaagtgcgtaaagccaacaatattcagcacattcaaggcaagatctagtgccttgatgaatgctcgtcttgctgatgtgtgcattggcacgtccgcagcaccgacggtcctccctgcgcactactttgaaaccgtggatcaccgcactggcgcatcgcgtagcttcaacgttatcgacgggggcctcgccgcaaacaatccgaacagatgaggcagaagagcaaggagttccccgagaccaagcccctggactaccacaggtatctggtagtgtcactaggcacaggccttccagagcaggacatcaagttcgacgcgtgccgtgtcgccaagtggggcatcttcggatggctcggccgccgggagaacaccgtgcccttgctgcagatgttcatgcacgcgagctcagacatgacggacagctacgtcgccgaccttttcaaagcgatcgggtgctcggaccaactgctgctgcgtgttcaggaccgcaacatacccatagcggctgtggcagctgacctctcgacggagaagaatctgcgagggctggttaagattgcagagaaccttctgcataagccactaggcgaggacgattataagaccgacgaccgcgtcgagacgacgccgagagatggccgtgccatactaacctatgctggtatgctcgcacggtttgcaaagctcctttctgatgagaggaagcttaggcttcagaacatgggacactgtatgccggtcatagcaaatcgtgaagcttgagaggtcttccgaaacacatattgatacatccatcttataggagttagagagttcgttcgtgtaggctatctgcaagctgttgtgtgtgtattgcaagttgtgacgacgacgtgagtgtgtacgtaaatggataaggcgatatggtttgctttggagccctgtacgtaaatggagaaaatgtgatgccctggcgtctggttgtctagcattctaccagctggctctccgatcctagtcacatccatccagctcctccttttcagaacgccctgtacttctcaatgatgcagcactcctagtactaaacctttaatatatcataaacacttgtttttccccctttcaatatatatatgtatgcagctaaaactatgattgtg

SEQ ID NO: 35764 - DNA, 2750 bp, Zea Mays
ggagctacagccgaggacagccaggtttccgaacagacccgcaaacacggagctacagcccgagagccaggctgctcggccatggcggcaaacacactctaaactaccctgccccggtgcccccgctccacgacgccgcggcaccgcacccgcacgtagtccggacggcgagcacttgagctgagtcggccgcgcttcggctttctcgcccgagttactcggtgccgcgtcttccctctttcggcggcgtgatctgcgtctcggcgctaagatagctgtcgtctcccggctcccgcacttgcacaagaccttgagctgatcggccggccttctgcgcgacggtgtatctccgcttctctttttgataatttcccgcaagtcccctcacttcggatttgactgaaggagttggttttcctcctctcgcgctgaagtaggttcagtcaaaagtcagaccggcctgtgagcggaattttcctggcttggatccgaaagcctgtgcattggctacgacaactggtggaaagcggttggtcatcaaatcgccgctgctaaagtttctgctccctgaactcagttggatcatagagttttggttcagtgtaccatcctgaattctgccgtgaattgttggatgtgttgtttgatcccaattgcattaaaaaaaaacttctattttgggctgggggctacaactacaagagagcaacaacaagaaggctcgatcagctcgttctttttgttgaccatctctgtctggcgagtgcttgaggaagaaaacgacttgctcagctcgccttttcgttgttgatccgatcaaagactagggaaatgggggtaatgtcacgacgggttctgccggcctgcagcagcctttgctacttctgcccctctgcgggcgcgctcccggcagcctgtcaagcggtagaagaagatcatagcagatatctaccagcttccaccggatggagagccaaacgatagaagggttgggaaactctgtgattatgtctcgagaaatccaacaagcataccaaaggtcagagttcattcataagtagctcataattaattcacaaaagctgagaagacggggggtcacacatcatacttcttttgccattgcaatggaaaacaactacgcatgcccaccacccagcaagggaaacctgatcacagtcttgagcatcgatggtggtggggtcaagggcgtcatccctgctaccttccttgcattccttgagtctaaactccaggagcttgatgggagcagcgcgcgcatagctaactactttgatgtcatcgctggcacaagcacaggtggtcttattgctgcaatgctggcagctccgtcgctgagcaatgccaagcaaccatgctatgaggccaaggacatcgtgccattctacctcgagcacagtcctcgcatcttcccatgcagaccagaactgggattttgggctggttcttcaagatcctacaaacagttaaggtgatgatcgggccaaaatatgacgggaagtacctgcacaaagtgaccagtgatctgctgggtggtaccagagtggaagagacgctgacaaatgtcgtcattcctactttcgatgtcaagtgcgtaaagccaacaatattcagcacattcaaggcaagatctagtgccttgatgaatgctcgtcttgctgatgtgtgcattggcacgtccgcagcaccgacggtcctccctgcgcactactttgaaaccgtggatcaccgcactggcgcatcgcgtagcttcaacgttatcgacgggggcctcgccgcaaacaatccgaacagatgaggcagaagagcaaggagttccccgagaccaagcccctggactaccacaggtatctggtagtgtcactaggcacaggccttccagagcaggacatcaagttcgacgcgtgccgtgtcgccaagtggggcatcttcggatggctcggccgccgggagaacaccgtgcccttgctgcagatgttcatgcacgcgagctcagacatgacggacagctacgtcgccgaccttttcaaagcgatcgggtgctcggaccaactgctgctgcgtgttcaggaccgcaacatacccatagcggctgtggcagctgacctctcgacggagaagaatctgcgagggctggttaagattgcagagaaccttctgcataagccactaggcgaggacgattataagaccgacgaccgcgtcgagacgacgccgagagatggccgtgccatactaacctatgctggtatgctcgcacggtttgcaaagctcctttctgatgagaggaagcttaggcttcagaacatgggacactgtatgccggtcatagcaaatcgtgaagcttgagaggtcttccgaaacacatattgatacatccatcttataggagttagagagttcgttcgtgtaggctatctgcaagctgttgtgtgtgtattgcaagttgtgacgacgacgtgagtgtgtacgtaaatggataaggcgatatggtttgctttggagccctgtacgtaaatggagaaaatgtgatgccctggcgtctggttgtctagcattctaccagctggctctccgatcctagtcacatccatccagctcctccttttcagaacgccctgtacttctcaatgatgcagcactcctagtactaaacctttaatatatcataaacacttgtttttccccctttcaatatatatatgtatgcagctaaaactatgattgtg

SEQ ID NO: 35765 - DNA, 1722 bp, Zea Mays
cggggatgcacagttaggagattgaaggagcgagaagggagggaggcaaaggagacagcatatgggatgtatttacagatgacaaagaacatgtcttagacagaagcaatggagaaattgcagttgatcactaccatcgatacaaggaagacattgagctcatggcaagtctaggttttagcgcatacagattttctatatcttgggcgcgtatatttcctgatggcttggggggaaatgtcaatgatcaaggagtcgccttctataatgacctcatcaattttatgatttcgaaaggtattgagccttacgcaactctatatcattgggatcttccaaacaatcttcagaagactctggggggctggatttctgacaagattgtggagtactttgcattgtatgcagaagcttgctttgcaaattttggagacagggtaaagcattggataacgatcaatgaacctctccaaactgcaatcaatggttatgggattggaatttttgcacctggaggatgccaaggtgaaactgctagatgttacttggctgcccatcaccaaatcttggctcatgctgctgctgttgatgtttatagaagaaaattcaaggttgcacaaggtggtgaagtagggttggttgttgattgtgaatgggcagagccattttctgaaaatgtggaagaccaaattgctgcacagcggaggcttgactttcaacttggatggtacctagatccaatatattttggtgattacccagaaagcatgcgtcagcgactgggcagtgatcttccaaccttttcagagaaagataaagagttcatgaggaacaaaattgattttgttggagtaaatcattatacttcaagactcattgctcatctccaaaatccaaatgatgtttatttctaccaagtgcaacaaatggagcgaatagaaaaatggaatagtggtgaaaaaattggtgaaagggctgcatctgaatggcttttcatagttccttggggccttcataagtcacttaattatatagcgaagaagtacaataatccagcaatttatgttactgagaatggcatggatgaagaggacgatcaatccgcaacgcttgaccaggtcctaaacgacacgacgagggtcggttacttcaaagggtacctcaattcagttgcgcaagcgatcaaggacggagctgatgtccgcgggtactttgcgtggtcgttcctggacaacttcgagtgggcaatgggctacaccaagaggttcggcatagtctacgtggactacaagaacgggctgtccaggcacccgaaagcatcggcgctgtggttctcgcgcttgctcaggggcgaggctggcactggcacaagctgagcgaactgcacgcaggaagcaagcacagaacgtcgttattacaatataaatattccacacaactagacgtttttctcctgttgttgtatcgtactactgtacagtaagcgccaataagctagcctcagatgtgtgctgcctgcctatacctctagtgactgccattgatccagcactagctgaaatgtacccggcctccaagaatcagcaccagaatatatgctttgaattgaactcatgcatgctatgctaggcgggggcggcacggcactctggttacagatagcaccaataactgttgtactattcacctgcaggtaggtaaggttgtgctgtcattactgat

SEQ ID NO: 35766 - DNA, 2258 bp, Zea Mays
caaccaacgtccgatcggggatcgctccaatggtcttggttcgttttttcatctcacggttcggcttttgagcaacactggagctgctgtcagaaaggctacctgcatgacaaacaagtagggccaatcccttctggaagactggaacggacgaactgccacagtagactgaacactggcacacagcgccctcggatctgccgctctcgtctcgctcgctcgcgtgcattggccgacaagggacgccacgccggcgtggctgctcacgtgttctcagttcttaccctgcgctctcgccgcccggggcaactggcgagcgagtgtggctgccgcttcctctccgagtcaggcgccatttaataattcaattctacccccaagcccacgcttccgaattcaccgactcctcctccacgccgcgtcgagatcgctcaggccttcgcttccagcaactccaccactcagcccacccgccggagcaatggggagcacggggcgcgagccggaggtgacccgcgccgacttccccgacggcttcgtcttcggcgtcgctacctccgcgtaccagattgaaggagcgagaagggagggaggcaaaggagacagcatatgggatgtatttacagatgacaaagacagaagcaatggagaaattgcagttgatcactaccatcgatacaaggaagacattgagctcatggcaagtctaggttttagcgcatacagattttctatatcttgggcgcgtatatttcctgatggcttggggggaaatgtcaatgatcaaggagtcgccttctataatgacctcatcaattttatgatttcgaaaggtattgagccttacgcaactctatatcattgggatcttccaaacaatcttcagaagactctggggggctggatttctgacaagattgtggagtactttgcattgtatgcagaagcttgctttgcaaattttggagacagggtaaagcattggataacgatcaatgaacctctccaaactgcaatcaatggttatgggattggaatttttgcacctggaggatgccaaggtgaaactgctagatgttacttggctgcccatcaccaaatcttggctcatgctgctgctgttgatgtttatagaagaaaattcaaggttgcacaaggtggtgaagtagggttggttgttgattgtgaatgggcagagccattttctgaaaatgtggaagaccaaattgctgcacagcggaggcttgactttcaacttggatggtacctagatccaatatattttggtgattacccagaaagcatgcgtcagcgactgggcagtgatcttccaaccttttcagagaaagataaagagttcatgaggaacaaaattgattttgttggagtaaatcattatacttcaagactcattgctcatctccaaaatccaaatgatgtttatttctaccaagtgcaacaaatggagcgaatagaaaaatggaatagtggtgaaaaaattggtgaaagggctgcatctgaatggcttttcatagttccttggggccttcataagtcacttaattatatagcgaagaagtacaataatccagcaatttatgttactgagaatggcatggatgaagaggacgatcaatccgcaacgcttgaccaggtcctaaacgacacgacgagggtcggttacttcaaagggtacctcaattcagttgcgcaagcgatcaaggacggagctgatgtccgcgggtactttgcgtggtcgttcctggacaacttcgagtgggcaatgggctacaccaagaggttcggcatagtctacgtggactacaagaacgggctgtccaggcacccgaaagcatcggcgctgtggttctcgcgcttgctcaggggcgaggctggcactggcacaagctgagcgaactgcacgcaggaagcaagcacagaacgtcgttattacaatataaatattccacacaactagacgtttttctcctgttgttgtatcgtactactgtacagtaagcgccaataagctagcctcagatgtgtgctgcctgcctatacctctagtgactgccattgatccagcactagctgaaatgtacccggcctccaagaatcagcaccagaatatatgctttgaattgaactcatgcatgctatgctaggcgggggcggcacggcactctggttacagatagcaccaataactgttgtactattcacctgcaggtaggtaaggttgtgctgtcattactgat

SEQ ID NO: 35767 - DNA, 1967 bp, Zea Mays
acctccctcctccacgtctccaccacgaggcacgcaacaattagaacacatctcgccgccgccgaggacgacggcgatgatgtggcgttcgcgagctcgtgcgctgctcctactccgctcgaccattacccggccaccgccaccacctccacaaccatatcccactcgaaccctaacccgagtcccacctccccgcttcctgtcctcctccccggatcccatccccgattcctcctccgccgccgccgcggatcccttccctgaagccttctcctccccgaccaaggcttctcaagatgccgctgaggccggagaggacaacctgagctcgatgtgggaggaagctggccacgccgacgacatctttgcctcccctggcagcgccgacgccgtagccgacgatgaggaggtcgcccgcgtctgcgccgccgtggagtccacccccgaggacgagatcgcgtccaccctcgctgacatgaccgtggacttcaacgagccactcctagccgcagtcctccttgctgctgaacaatgctcctgttgagaagtcgaaagcagcgttggaggtgttctccaagttcgatgagtttggttgcactccggacagtgacagctattatcttgtgattgaagcagcacgaaagaagtccttgttccgctctgcttgtgaagtctgtgagaagatgattggctctgcctgcttccctaatggtgagaaggttggcaggattttgatttacctttgtgaggggaagaaggtgaagatggcacactcattatatcttgcagtgaaggaaaaaaagattccagtcccaaaactagccttggatttccttgttggtgctttggcaaggaatgatgagaccattggtactgctctggagctgctggaagagtaccaaggggagtcgcttaagcatgcaggcaagtcctttgccacagttgtacatgctttgtgtaggctaaacaaaatggaggatgcaaataatttgttgatgaggatggtgcagcttgaagagtacaaaggggaatctcttaagaatgcaggcaagacatttgccacagttatacatggtttgtgtaggaaaaagaaattggaggatgcaaaagcattgttgatgaggatggtaaatgttgggccagctcctggtaatgcagtgtttaattttgtcatcacagcattgtcaaaacagggagaaatggaggatgcaaaaggtttgatgagaatgatggagagccaagggatcagccctgatatctatacttacagtgtgctcatgagtggctacgcgaaaggaggcatgattgatgaagcccatgatctacttcgtgaagctaagaaaattcatccgaagctaaacagggttgcttatcacatacttatccgtggatactgcaagatggaggacttcgagaaggccaatgagtgcctaaaggagatgaagaaagatgggttgcagccaaatgtggatgagtatgacaaactgattcagtcattgtgtctcaaggctatggactggagaagagctgagaaactcctggaggaaatggaggatagtggtttatgcctaaggggtataagtcgcagcctcataactgcagttaaggagttggaaggggaggaaatgcagtcaaaggcgagccaagaagcatagtttctctaggatactcaaatccatatgtctgctaattaacttttggatagaacctttctttttgagcttttcagctctggtgagcttgcaagaaacatcatctttgtacctgtttttgtttgttgttatttactacaataattttgcatttatatttaaatgctagactgacaaagaagaatatttagttttggtctggacttctggagcttctgtttaggatttccatgcgccattctacatgtcgataatttattttcatgtcttatttaagaacacgaatgaattttggctgccagtggaattcaagtt

SEQ ID NO: 35768 - DNA, 302 bp, Zea Mays
tttttttttttttggctcagaaaaaacagcaggcaaacagagccaaagaggaggaagatgctaagaatgccgcagcggaggtcactgcataggctcctgatgtggatttgcatgctgccaatttttttgcttggtagcatttcgagtggaataggcactaaaagctgggaatgtgccaacttcgttctgaatttattttgtattctattacaatttgtaactggaaccctgcctgtcacagctgcttgaaggttagaaagttgaaatatcacttttgcatcatattaagtaagctgaaataa

SEQ ID NO: 35769 - DNA, 978 bp, Zea Mays
attcatcaagccggccctagaatggttaaaccctagtagagagaaaggaagagaagggggcggagaagcacgtacgtcgtacatcgcccaccgccctttgcctcgcctcgcctcgcctcgcctgcatatctaacagccggagccggagccggagccggcgccgacaatcgttccaactgatatggctacgacgccgccaggattcacgggcaacctgaaggtctgagaagaatcagtttagatgggttgcgatggcgcgtatttgatgctaagggtcaggtgctcgggcgattggcttcccaaatagctgttgtgcttcaaggcaaggataaacctacctatgcaccacatgtagaaaatggagacatgtgcattgtacttaatgcaaaggatatcagtgttacaggaaggaaaatgacagataagatttactattggcatacagggtatgttggccatttgaaggaaaggaggctcaaggaccagatggagaaagacccaactgaagtgattcgcaaagctgtgctgcgcatgcttccccgcaacaaactgcgtgatgatagggatcgcaagctgaggatattttctggaaacgaacatccattccatgaccgccctctggaaccttttgtgatgccgccacggcaagtacgcgagatgcgcccccgtgcaaggcgtgcaatgataagggctcagaaaaaacagcaggcaaacagagccaaagaggaggaagatgctaagaatgccgcagcggaggtcactgcataggctcctgatgtggatttgcatgctgccaatttttttgcttggtagcatttcgagtggaataggcactaaaagctgggaatgtgccaacttcgttctgaatttattttgtattctattacaatttgtaactggaaccctgcctgtcacagctgcttgaaggttagaaagttgaaatatcacttttgcatcatattaagtaagctgaaataa

SEQ ID NO: 35770 - DNA, 613 bp, Zea Mays
attcatcaagccggccctagaatggttaaaccctagtagagagaaaggaagagaagggggcggagaagcacgtacgtcgtacatcgcccaccgccctttgcctcgcctcgcctcgcctcgcctgcatatctaacagccggagccggagccggagccggcgccgacaatcgttccaactgatatggctacgacgccgccaggattcacgggcaacctgaagaaagcacttgcaggtctgagaagaatcagtttagatgggttgcgatggcgcgtatttgatgctaagggtcaggtgctcgggcgattggcttcccaaatagctgttgtgcttcaaggcaaggataaacctacctatgcaccacatgtagaaaatggagacatgtgcattgtacttaatgcaaaggatatcagtgttacaggaaggaaaatgacagataagatttactattggcatacagggtatgttggccatttgaaggaaaggaggctcaaggaccagatggagaaagacccaactgaagtgattcgcaaagctgtgctgcgcatgcttccccgcaacaaactgcgtgataggaggggcggtggctctgcagcagggggagaccggctgctg

SEQ ID NO: 35771 - DNA, 2601 bp, Zea Mays
gatacgatggttagaccttagtggaaaaccgttcccatagctcagtgttgtgcacctttgccactggttcattttttttctccgctcgaagccctcctatctcgatcgattttctctctgctctgacggctcttgggaaaccctagccgtcgggcgccctgggcaagcccaccggaggacgccggagccgaaggggagtcgcaaacgcagagatccggctacaacgtggctttcccgaccggttgtggcggcgatttcgcatcacatagatccgctcgtggccttcccttctgcgcggtcggtggatcctctggagctccgctggcgccccgagcagggctctctcggcgtggagggcggaggcaagggacgggtgtggcagcggcttcggccagcccacggctcccagcccctggcgggcagcactcagtccctggcggcgagctcgtattcccagaccttgcctccactttctggtggttctagcagcaattcgatttctggtgagaaatttcactccgaagatggttcaactctttttgcaagtgccggcagaatgcggcagtgttaatacagttgtcgtggaagggaggagatctctttttcacaatgttgagtccataatcaagtcattgacaaaatcagcaggcaggtatgaagctcggctgtggctctgtgccactgtctcgttggtccattcgctcagtgactgtggccagagggacctgtttcttgatctcttagagaggaagaattccaggcgtgatgtcgctgctcgcttgctgcgtatgattttcgataagaaacccagaatggttgggtctattctagcaagaaaaggccatatactggaggatttcttccgaggaaatccaaacaggataatgcagtggtttggccactttgctgttactggggaatccacacatagaaagggagctaaggcactttcgcagtttgcgtttgtaaatcgtgacaggtgctgggaagaacttgagtggaaaggcaagcatgggcaatctccggctgtagttgctaccaagcctcactattttcgtgatcttgatgttctcgagacagtggagaatttcttagagtatgtcccagatttctggtcttctgatgagcttgctaattctatcaaagatggtgaaatactgcaaatcgatgaagaatattttgtagatcaatttttatacttaatgtatgaggagaattccaaagatgcatggcatgtggttgaagattttttgatggacgagcagttctcttctctttgccagcatcttcttatccatctggatgaggaaaggcttcttggtttcttaaattctttaggcaagctcatcaatcctactatgcagtgcaaggaattgacattcccgtgttgttggcttgaagttcttttatcaggacattatgatcacatatctcttgatgatcttgtctttttgaactgtgtcattgccaagggtagacaactttggcggctcatgaacgatgaagaacaacacgaagaatgggggcaaatggaagaacttttgaagggcggaaaccatttgactgatgctgatcattttgctctcatgaaggaacttgtggagacagaattacctggtgtgcttaagtgggtaggcattcagtcctggataattttctgtgaattgtcgaaagaatgcaaatcaggagattcttgtgaatcttttttctctcataacaaaatagaatttcacaaggctgatgattactcattggttcggaattatgggttctcaatttcacatatgcctgatattgatgttgaagatctaactagaagcagccataaaaggagaaagaggaataggagaaagcgccataggtacgagtctgatgaggacaagtttgatgaactgcttgaacttggatcatctgatggaaagaatggtgttgagtcacagcgtggaagctggcgcctttcaactgatggtttctctgcttcttgggacattacataccagatcacctttctacttgttatttcacaatttgggtaaagtgggcttgctttagatgattgtctacacagtatgtgtagtatatcaatctgggtgccttttcagctacagaatctatgagcatggagctcaggcaggcatatttctgcactaattctgcaacattttggtgatgggttctgatgatgcattctgggattgctgaacgctgcatgagatccaggacaactctctttagttgggatgctgaaggttgacacctgttgaagaattttggttgcataggcattgaatatggtccaggcatttccttgaaacccatttggactttggagttagttgtagagaactcaggtattgactaagctaagcaaaaacgagtttgtaattgtgttgtctagtgctagcgacattttgccaactacacctgttgtaaatataccagattgttgctgtgaatttgattggaattgggttgaattggaatttaattcttgggctgacctgtttggcaagttatagaattggaaactaactttccatccatttcatgggctgaaatcagaattcagaagcctgcaaaactttcctaccctaaaacgag

SEQ ID NO: 35772 - DNA, 2085 bp, Zea Mays
gtgccactttggagtcttgcaacagaattcgttcagctctatcttgctcaaaggatcttccatcagctgtacttacagaagatgaagttcctgacaaatgatctgttccatttcctccaatttgagatgtatttgaatttgttgttgtatctttaagtctttgacttcttcgaggcattgcatcgctattaaacaaccttccagaaacctgaaaaacgtcttcaattctaatatcaccaacagtggcagagccagaatgatgcatcagggtaaaaagggggcagacccagtgttggagactcccacaagtgggatctagggaaaaataaaccaagtcaatctttccccgcaaatgtggagagactgctgtgaatctgcgacctggtgactcagtgagacagctctcaccactgcacaaggcctgcccttcagaatgatgcatcaaggatattccatataaatacaattgtccaatgtaaatatgcaataatgcataggaccatgtaaatgcgtaggcaaagaggatttggtgtcaatgtgagagcctttttctttatctttgtagctttattccataatgtaatgcaggtaatcctaatacttgtaacatatatactaggtatgtgcccgtgtgttgccactaagcaggggagtgacgcctaggctacaaatatattttttatttatttctaaatactaaggtatgtgtggtctggtggttagccccaaatttctggagcagaggggtgtgtgggttcgagtgctcgttctgcactactttttgcggacgctgggtgtggggagggtgaagtcgtggtagcaccaggtgcccacattaggttcttaatagagtagaatatagatttgttcctgtcaccataagaaaatatcaacagaaaagagtacaaaggaggatttacaaacagatctcaaatgagttaaacctacagaacaatcaaatgcatcctttgtcaatccaacaaaaccaataagaaaaggaagaccttcaatgtaagtaaagattaaatagttttactgccattgtgtattatatcacaagatgaactttgtgactacaagaaacaatacaaaaatagacttgggattatatcaatcgttttcagtgccttgtactccctccaataaaacataaatgatgcttttgacattagcagttcagcacggtctctaaaaaacacacaaaaacactttcttacaaaatatttattaaacatggaaaaagtatttttatgaaactgcattttgattcaaatatctacttgtatcattaccaaatatctaaagttgacatatggaaagcaattaacaaaaatttagaatggttggtttcaggcaaccccaaaacaccccactatttttgtgtgcaacactgctgagatagtatgcaacaagaatgacacactgatctaaccattatgtaaacatcatcaagacgaatggtattataaggcattctgagtttttgagaccatgtgtttgatgctggtacacaattggcacactagtactcaagaacgaagatacttgcagacaaactcaagattattaagtttatgaacaacaaaaatcatgtaacagcaaaaaatgaaagacatgactgatcctgacactatgtattactattgtaatatgataacaacgaatccaacactatgaatcctgatacaagggaccatcaatgttagcttacagaaatttcaagggaatttatatttaagacattttgtgctcaagggagtatgagcaaatagaaaatatcaacatgccataaaataaaataaatataaaccaacccatatgtcacactgacatcctttacagataaaggtcaggggagaaatgcgaactctagggatagacaggccattaaaagtcatgagcaaaccatggaagttctaaagatcgggaaacaggcaggtacagaagttacaagtagtggcatccagtaatagcaatcaaatgaaagaacctaaccttctttagccttgcttcatccatgtatttccttctgagtggctggcttactccattagctttctgcttagtgggagcatcgccacttat

SEQ ID NO: 35773 - DNA, 535 bp, Zea Mays
acctgcgcgacgagcgagtcggcgtaggacctgagcgcggcgccgacgtccaccctccgcgccacccgcgcgacgacgtgcgaggccgtcacctgccgagcaacaagggcagtcagcgcccgggaaagcggcaaattggataagaccggtgcggaccggctgatcgccggcggatgtgggtttgggtctggtcacgtgaagggcgaggccgcaccgggcagaggggggagcagctgggcgcggcggagcagacgggcagcagcatggcgggcgggctcatcgcgtcagggtcaggctgctgctcccatccggccgcttcgttgcctcgagtcgatgaggggggacggtcgcggcggccggggcgagctggttctggttgggttggagctggttctggctgcggcgagcgggagggcgggtgtggttgtggttgcggaccgaggaggtggttgatccgggacgagtggaggcggtgcgacgacgaggcagggtttgggattttgccgggattgcgcagattggtgttcagagaatc

SEQ ID NO: 35774 - DNA, 4122 bp, Zea Mays
acatccactcaaaaagatagaacaagtgtttaggacagtactgaacgtttaggaacacaacgactagttctttaggttggtctcaggagagcctactgttctggtatcatgcaggcatctcaattcttagtcttaactgttagtgtatatgtgtagtctcttcatcttaatgtattttctctgggttatagggtgcttcttgtaaagttaccacatgtacttttgcccttccgaccctcttgaatagtaaacttgctattttccactcttcctaacagagccaggctaggtttggctccacccagccgccgccgccagccacacgcgtgcctcggagtccgcgctcgtccctgtcccgaccgacggctcgccctgtgccgctgcgcccccctcgtctctgcccgaatgcaccccccccccccccccgccgctggcggctagccctgcgccgccgcgccccctcgcctacgcgcgcgccttggcgagttggcgaccgtgtgagctctgctcggaccacgactcgccctgcgctgccgcgcgtgctcctacctccaccagctccgagcaccacccgctgtgccgccggtggtgcagctctgcggcgctccatctcccttgttgttggtgctcgagctcgacccagctgtttcgctctctcaacccagcagcagctcttccgccttctgtcgtgtactccatatctctaaacatggttgctcctcgttccaacccacttgtgcaacttccatctgtcaccttccatggcaccaacttccaggagtggtccattgtgccgagcccactgccggggccgatggtgttcctcccgctgaggtcatggaggcgtaagcaggggtgggcacttttttaccataaaccgaaaaccgaaccgtcccgaaccgaaccgaaatttcggttttttcggtagttcggtttcggtttttatatctcagaagttcggttttcggtatcgtaatcggttttcaccgtataccgaaccgaaataccaaaaaaaccaaataccaaactttattaattctaaaatttgacttttcgattatgtgaactaaatgtgtgaagtaattaaattgttatccacttatttatatgtgatgtatgatatatctctaaatatttgtacctatataatttttacttttaaaaattatgtgtaatctatcatataaaattgttgtatgtgttgtcttgagtataagtttggtattcggtttttgccgaaaaatcgaagtaaaaaaccgaaaccgaagttttcggttttcattttctagaaaaccgattggtttctaatgtctagaaaaccgaagttttttaaaaccgaaaaacctaaccgaagttttaaaaaaaccgaatgcccagccctaggcgtaagggatatcgttgttgggaccctatcgatcgccgcattcgagtatctcgggatgtgacctttgatgagtcacgtcctttctttcctactgatttgtcatcttcttcctcttcctctgaatctgttgattttgttcgattggtcccctctgtcacgtccaccgccacctccaccccacccccaccatcccctctgtcacgtcctccaattcttttccactacactcgacatccacgtcctccaccatcccctccatcatcatctagctcgtctcctttgcttggtgtgcctccttcacgatatgaccttcgcgatcgacgtacgctttgtcgtccgactcgtcttggttttgttgcttctgcttctattctttttaagcctacttcctaccgtgatgcgctttctcgtcctgagtggcaattagctatggccgaggagattgctgctcttgaacgcactagcacttgggatcttgtcccacttcttccctctgcttctcctatcacgcgcaagtgggtctataagattaagacccgctctgatggctcaattgagtgctacaaagcgtgatttgttgcacatggttttcaacaggagtatgggcatgactatgagtagacctttgctcctgttgcccattgtaccactgttcatactcttgttgatgttgcctctgttcgtcggtgcgctatctcacaacttgatgtgaagaatgccttccttcatggtgagttgtgtgaggaagtctacatgcatccttcgcctggttaccttgttcctgatggtcacatatgtcgacttcgtcgttctctctatggcctcaaacaggctcctcgtgcctagtttgagcgcttcacctctgttgtcactgctgccggtttcgttgccagccaacatgatcctgctctctttgttcacacttcatctcaaggttgcaccctcattcttctctatgtcgatgatatgttgatcacctgtgacgatcttgattatattgctttcgtcaaggcacgactcaatgcgcagtttcacatgtatgacttgggtcctcttagcttctttcttgggattgaggtcacctccacacccatggttattacctctctcaacgcaaatacatgcaggacatccttgattgtgctggtcttactgatcagcattttgtggacactcccatggatcttcaccttcgtcttcgtgccacagatggtattcctattgaggatcctactcgctatcgtcatcttgttggcagtcttgtctaccttgacataactcgttctgatatctcctatgctgtccacattctaagtcagttcatgtctgcacccactagcatccactatggtcaccttcttcgtgtccttcggtaccttcgtggtaccattgaccgtctcttgttcttttctagcaccacctatctttagctctctgcttattatgatgcaacttgggataccgatccttcggatttcacgtccatctctgcttattgtgtcttccttgggtcctccttggtttcctagaagaccaagaagcagactgttattgctcgttccaatgctgaggctaagttgcgtgccttggcttgtgtcatggctgaggtgacatggcttcgatggctgttggctgaatttgggatttgtcttactacttctacgcctgtgcactgtgatagtactgacaccattagtattgctcaggatccgatgaagcatcagctcactaaacacattggcattgattgtttttatgttcggtctgcagttcaggatcatgtggtttcccttcagtatttgccttcagagttacaacttgctgatttgcttaccaaggcccatactagagctcaacatagttttcttctctacaaactcagtgttgttgacccatcatgagttcaaggggggtgttagtgtatatgtatgtgtagtctcttcaccttagtgtattttctctaggttatagggttcttcttgtaaagttaccacatgtacttttgccctttgggccatatggaatagtaaacttgctattttccactcttccctaacattaaccaagcaatatacaaagtagaaatcagacaacatcttacacacttacccagtaaagcataggaaagtgctgagaggccctgttacaaaaaagagggacaacactgtcaagaaacaaaatgcatccaacaatttccatgaaaaaataatgcatctatgggctaaaaaacaacaaaaaggtaaaaaagaagcttgtgttgtatgtacacatgaacttttaaaggcacaagctcttaccgaatataatagaaaattagttgcaaaattttcagaggcagcaatacagtgtgccaacatgagcaaaaaggtaatacatgagaataagactagtgacctaccagaagagatccaaacacaagagttggggtgggctttatttgttctaggatttcctcaacatcctgcatatttcgatacaagaatgtgggtgatcgagaataaagaggtacaattttgtagatcattaagttatgaagaatgttaagcccacaagagctaacatctatgaactattcaaatgatactggtcgagtgataaatgctacaaacatgacctcaaaacaatataagaactaaacaagtttgccgtaaccggcaaaatcctttggttcacacgtgagtttctggtttcgattctttttacctcatttattgacgttaatgcagtctcaggtttca

SEQ ID NO: 35775 - DNA, 4199 bp, Zea Mays
gctgcttgttcctagagtagcacccgcaagatccaagtcttcccgcgatggaaagcggcgccatggtactcggtgttgttcgtcccgaggagtcccctgaccgcaacggcggtgggccacgggacgatttgggcccatcgcagatgcaggtcgatggtcccgttgttctcaaccaatccgctgagctcgtctcggatgattcgatggccgtcgatgacgtcccagttcaacaaccatcaggccagccggtggaggcaacacaacagtctcctgcgacgctgattgatactatcatggaggtgcagaagcagctgaagcggaagagggcttctaatagcccagtgattgatgccgccgataaggacgctcttgttgctgggtgccggcaggagctcgaggggctcttccagtattacaaggaggtttctgaccgcaagatgcagcttgacggcgggaacctgtccttcaacgggatggttggctgtttgcttgaggagagcagtctcgggctgactaggttggtggacgaaatatatcaacagctgaagggattggagggtgtgtctgtggcttcagtccgcagctctgtgctgctcgctggccagaggatgatgtacgggaattcttcactggacgctgatgtgttagaagatgaatcggagtcggctctttggtgctgggagataagagatctgcgattgttgcctgtgaaagtacgcagcattctgagtacacggagatctgtcagaaagaaaatccatgagagaatcactgccatatattcgactttgtcggttcttgaaaattcaggagcttacatccaagtaaatgatctaaaaaaagcatcattgaaattaaacaaatcactgaacctggaagggatcagatcaatggtggaaagagcgacacaaaagaacacagaacggggtgtgaaagatgctgtatcagcagttaaggaattgatgcaagagacagataaaaatgaccaaaatgttagaaggcttgaggatactagtgtctctgagccgcagaatgggaactcacttggtaatgagaaagagattcagaaagcacaaaaacaagtggagaaggaaataaagcgccaggagaaagaagaagctcagatgagaaaacttcaaaagaaacagcaagaagaggccctaagagaacagaagagacatgaaaaggaggaggctgaagccaagaagcaacaaaagaagcaggaagatgaagctctgaaagaacagaagagacgtgaaaaggaggaggctgaagctaagaaacaacaaaagaagcaggaagaggaagttctgaaagaacagaagcgtcgtgaaaaggaagaagctgaaatgaagaaacaacagaaaaaacagcaagatgaagctgagaaagaacagaagcgccttgagaaggaagctgcacaactcaagaagcaactggtcattcaaaaacaagcttctatgatggaacgctttttcaaaagtaagaaagacaatggaaaacatcaaaaacctggagagaacaactcagctgaagatccatgcaatgacaacaaagagacaataccagcaaccacatcaaaaattgattcttcattgtatcaacaagagggatgggttttagatgatcttcggaggttgcaggtcactggttggaagaagctatctagctacaataggtcctccagatggggtacaagatgcaagcccaagatggaggcatttaaagagctgaagcttcagaaatcctcagatgatatggttgatgaaatactttccactccaaatgaagatggtggccgcaatccaattcaggagaacgaacatgataagcttgaaagtgatattgacatgatacaggctagtgaaatgcaatgccatggtgctagtaaccctaaacctctgcaaacgagattaattagaatgaagcttctgcaatttgacaaaagtaacaggccagcatattatggatcctggaggaagaaaagtgctgctattagtccaaggtgtccatttaagatggatcctgatcttgactacgaggttgatagtgatgatgaatgggaagaggtatttgctgatattctagcatctttttttctttattggtaagaaattcatattttgttttccgcacaggaggatcctggtgagagtctttctgactgtgagaaggataatgatgaatttatggaggaagattccaaaattacagatgaagaggatgaagatagctttgttgtgcctgatggctatctctcagacaacgaggggatacaaattgaaagcctattggacgataaagaagaggaggccaatagctccccaaatggtcagtgtacagaagttgaagagttcaggtctctgctccgccaacaaagagtcctgaacactttgactgagcaagctctccggaagagccaacctcttattatatgcaacctaaatcacgaaaaagctgaattactgactgctgaagacctcaagggaacggaaaagattgagcagctatgcttgcaagttctttcaatgcgcatctgtccaggaggtgcaattgttgatgtgcctctaactgacagctcatctgcaactgttgaggaaattaaccaacccaatgtgaagaatggctctcctgaggctgcatctgctataccagaaacagacctccggaagaggctgtcaatgctctggctgcttctcctgagttgcggttgaaatctagaaatggtggccgcgaagctccccagatcaatctgttcccctcagagcagtaaagtttctaataaaggtcccctgaaagttggattaggggtcaatgaagctacgaacccagatgagcagaaagctcagctatccatgtaaaggctaggaagtgcaactcggttttgcatcgtcaccaatggaagatggtcttagtgcaacatgggtttttgtcaacatctggattatgttttcagtgctggacatgtaattttagcctgaaagtaggtttttattcaattatttggccttgatgtgattaacatgtatgtgtcctgttgttagcgcaaggaattgctacaaagttggccatctgccgcttgtgtgttgttaacattattctgattctggcaaggcaaataagcaaacatgtcttgtgactgctcaattgacagctttgggcagaaattaatttttgcaacctgtttgcatcaaatctgatgaatgcacatgttaatagtagcaaaggtaacaaaagcaataatatatatttgctttggtatttatttattttggttgaacagtcataacagtacaccgtagtacaaaagaatgacagcaatagtacaataatagaatagacatcaaagaatctcattttgaaggagcccaggccagcagtggatgggatcagacatggtacgattgccagttcttggcctggaggtcgtcgtcgtcgtcatcctcgtcgaggcggagggagaaggcaagcgcgagcgcggcccactcgaggacgaagatggcggtgccgagccctccgaccatcttgaggatgacggcgccgtcctcgtcgcggacgtaggactggagctcggcgaggaagtcggaggtgcgggtgaacgcgagcagcgcgatggcgccctggaagatggcggtgagcgcggctcccgcggtgtgcgcgttgtgccactgcgcgggcgtggcgggcgccgtgaaggagcccgagcagccggccgcggagaagacggcggtgagggcgtggaggaagagcaggagcaggccgcacggggacggcagcaggcgcagcgacagcgtgaggaagatgcagctggaggaggcgcccaggaggacgtagttgcagaggaggaacgccttgcgtgtgtgcgacttggccgccatcgtcgccgccgccgtactcgctcggaagctgttgggttgggtcttggaagcctgccgaggaagcgggatgccgctggcttgcggggctttgcgggcgaggggtcgaggtcgagagagggaggtttggagtggggtgggagcggcggagtggcgggtacttatgcggggtggcgcggaggatttggccgttgaggctgggggcgcggcggtggcgcggcggtggtgaggactgaggagtgaccgagtgagtccgacagggcaacgggcaacggctagtctggtggtggggctcgtgggggcccgcccgctcgctcgcatgag

SEQ ID NO: 35776 - DNA, 4419 bp, Zea Mays
gtagacaagtgtttgagcaaggactggatagaggaatgcgctgcttgttcctagagtagcacccgcaagatccaagtcttcccgcgatggaaagcggcgccatggtactcggtgttgttcgtcccgaggagtcccctgaccgcaacggcggtgggccacgggacgatttgggcccatcgcagatgcaggtcgatggtcccgttgttctcaaccaatccgctgagctcgtctcggatgattcgatggccgtcgatgacgtcccagttcaacaaccatcaggccagccggtggaggcaacacaacagtctcctgcgacgctgattgatactatcatggaggtgcagaagcagctgaagcggaagagggcttctaatagcccagtgattgatgccgccgataaggacgctcttgttgctgggtgccggcaggagctcgaggggctcttccagtattacaaggaggtttctgaccgcaagatgcagcttgacggcgggaacctgtccttcaacgggatggttggctgtttgcttgaggagagcagtctcgggctgactaggttggtggacgaaatatatcaacagctgaagggattggagggtgtgtctgtggcttcagtccgcagctctgtgctgctcgctggccagaggatgatgtacgggaattcttcactggacgctgatgtgttagaagatgaatcggagtcggctctttggtgctgggagataagagatctgcgattgttgcctgtgaaagtacgcagcattctgagtacacggagatctgtcagaaagaaaatccatgagagaatcactgccatatattcgactttgtcggttcttgaaaattcaggagcttacatccaagtaaatgatctaaaaaaagcatcattgaaattaaacaaatcactgaacctggaagggatcagatcaatggtggaaagagcgacacaaaagaacacagaacggggtgtgaaagatgctgtatcagcagttaaggaattgatgcaagagacagataaaaatgaccaaaatgttagaaggcttgaggatactagtgtctctgagccgcagaatgggaactcacttggtaatgagaaagagattcagaaagcacaaaaacaagtggagaaggaaataaagcgccaggagaaagaagaagctcagatgagaaaacttcaaaagaaacagcaagaagaggccctaagagaacagaagagacatgaaaaggaggaggctgaagccaagaagcaacaaaagaagcaggaagatgaagctctgaaagaacagaagagacgtgaaaaggaggaggctgaagctaagaaacaacaaaagaagcaggaagaggaagttctgaaagaacagaagcgtcgtgaaaaggaagaagctgaaatgaagaaacaacagaaaaaacagcaagatgaagctgagaaagaacagaagcgccttgagaaggaagctgcacaactcaagaagcaactggtcattcaaaaacaagcttctatgatggaacgctttttcaaaagtaagaaagacaatggaaaacatcaaaaacctggagagaacaactcagctgaagatccatgcaatgacaacaaagagacaataccagcaaccacatcaaaaattgattcttcattgtatcaacaagagggatgggttttagatgatcttcggaggttgcaggtcactggttggaagaagctatctagctacaataggtcctccagatggggtacaagatgcaagcccaagatggaggcatttaaagagctgaagcttcagaaatcctcagatgatatggttgatgaaatactttccactccaaatgaagatggtggccgcaatccaattcaggagaacgaacatgataagcttgaaagtgatattgacatgatacaggctagtgaaatgcaatgccatggtgctagtaaccctaaacctctgcaaacgagattaattagaatgaagcttctgcaatttgacaaaagtaacaggccagcatattatggatcctggaggaagaaaagtgctgctattagtccaaggtgtccatttaagatggatcctgatcttgactacgaggttgatagtgatgatgaatgggaagaggaggatcctggtgagagtctttctgactgtgagaaggataatgatgaatttatggaggaagattccaaaattacagatgaagaggatgaagatagctttgttgtgcctgatggctatctctcagacaacgaggggatacaaattgaaagcctattggacgataaagaagaggaggccaatagctccccaaatggtcagtgtacagaagttgaagagttcaggtctctgctccgccaacaaagagtcctgaacactttgactgagcaagctctccggaagagccaacctcttattatatgcaacctaaatcacgaaaaagctgaattactgactgctgaagacctcaagggaacggaaaagattgagcagctatgcttgcaagttctttcaatgcgcatctgtccaggaggtgcaattgttgatgtgcctctaactgacagctcatctgcaactgttgaggaaattaaccaacccaatgtgaagaatggctctcctgaggctgcatctgctataccagaaacagacctgccagaatttgtacaggtgataagatcatgtcgagatggtatccacaaggtggtggaattactgcagcacaagtttccaaatgttccaaagactcaactgaatcgtaaagtgagggagatatctgacttcattgacaatcattggaaggtaaagaaagagattcttgacaagctagggttggattcgtcaccagtgaaacccaagaagaataaaagcatagctatgtacttctcgaagagatgtttacctccggaagaggctgtcaatgctctggctgcttctcctgagttgcggttgaaatctagaaatggtggccgcgaagctccccagatcaatctgttcccctcagagcagtaaagtttctaataaaggtcccctgaaagttggattaggggtcaatgaagctacgaacccagatgagcagaaagctcagctatccatgtaaaggctaggaagtgcaactcggttttgcatcgtcaccaatggaagatggtcttagtgcaacatgggtttttgtcaacatctggattatgttttcagtgctggacatgtaattttagcctgaaagtaggtttttattcaattatttggccttgatgtgattaacatgtatgtgtcctgttgttagcgcaaggaattgctacaaagttggccatctgccgcttgtgtgttgttaacattattctgattctggcaaggcaaataagcaaacatgtcttgtgactgctcaattgacagctttgggcagaaattaatttttgcaacctgtttgcatcaaatctgatgaatgcacatgttaatagtagcaaaggtaacaaaagcaataatatatatttgctttggtatttatttattttggttgaacagtcataacagtacaccgtagtacaaaagaatgacagcaatagtacaataatagaatagacatcaaagaatctcattttgaaggagcccaggccagcagtggatgggatcagacatggtacgattgccagttcttggcctggaggtcgtcgtcgtcgtcatcctcgtcgaggcggagggagaaggcaagcgcgagcgcggcccactcgaggacgaagatggcggtgccgagccctccgaccatcttgaggatgacggcgccgtcctcgtcgcggacgtaggactggagctcggcgaggaagtcggaggtgcgggtgaacgcgagcagcgcgatggcgccctggaagatggcggtgagcgcggctcccgcggtgtgcgcgttgtgccactgcgcgggcgtggcgggcgccgtgaaggagcccgagcagccggccgcggagaagacggcggtgagggcgtggaggaagagcaggagcaggccgcacggggacggcagcaggcgcagcgacagcgtgaggaagatgcagctggaggaggcgcccaggaggacgtagttgcagaggaggaacgccttgcgtgtgtgcgacttggccgccatcgtcgccgccgccgtactcgctcggaagctgttgggttgggtcttggaagcctgccgaggaagcgggatgccgctggcttgcggggctttgcgggcgaggggtcgaggtcgagagagggaggtttggagtggggtgggagcggcggagtggcgggtacttatgcggggtggcgcggaggatttggccgttgaggctgggggcgcggcggtggcgcggcggtggtgaggactgaggagtgaccgagtgagtccgacagggcaacgggcaacggctagtctggtggtggggctcgtgggggcccgcccgctcgctcgcatgag

SEQ ID NO: 35777 - DNA, 577 bp, Zea Mays
ggactcttgaatgataagcccagcgcagtgttatggcgatggaatcccaagcagaggcactcggccagttagcaactgatgatttagaaggaaagtttgcactgcttgagacttcatctgttgatgatgatctttcacaactgaaaaaggaattgtctggaagctctttgaaaggagagcttcctccaggcagaacagcagtcagcaactcaggtgctgggcgccctttccccgacctagagattgagagcgagctaaacgagctgcggaggaaagccaaggaatattaggttcattccttgtcgattcagcaggcctgacggaatctcatttccaagaaaatatagtgcagctgcagattgctccattgcgcgtttcgaaagttgaaacacaagtgcgcattgactgtttgttaaagagtatggaatcggctaatttctcggcattttccccctcgagtgacatttgtacagctatccataaaattgttgtaaatcactactctctctagagcctttttttcatactatatataaagtcaaagttcgaagttcccacgccgtggtttttgccccct

SEQ ID NO: 35778 - DNA, 2370 bp, Zea Mays
cgctacggcccaagagacgcgcaatgggaatccgactcgagatcgctttccattcccatcgcttctcatctcttctccacacgaactcgccctctcgactctcgagagatagagcgaggcaccaagaagggaaaaaaaaagagggacaggaaaaaaaatcattctcgtttcgctctccgctagaccccgcccgaatcaatggagattagggctccgccgacgagcctgaggctcgcgccgccgcccgccgccgccagcttccgccgaaccccgcttaggacctccttccttcgcggcagcgtgtcacttaaagttgtgcaagtacggcagtcaaatgtcaacagatttaagtgcaatagcatacgaagtaacctctttgataggctaacaagggttgtcaggtcctacgcaaatgcagttctaagttcgtttgaagaccctgagaagattctagaccaggcagttctggagatgaatgatgacttgacaaagatgcggcaggccactgcacaggtcttggcatctcaaaagcggcttgagaataaatataaagctgcagaacaagcttctgctgattggtatcggagggctcaacttgctcttcaaaagggtgacgaggatcttgctcgtgaagcccttaagcggcgtaaatcatatgctgacaatgcaagctccttaagatcccagcttgatcagcagaagggtgtagttgaaaatctgatttcaaatacccggcttcttgagagcaagatagcagaggccaagcagaaaaaggataccctaaaagctcgtgctcaatcagcaaagactgctacaaaagtgagtgaaatgttgggcaacgtgaatacaagtagcgccctttctgcatttgagaaaatggaggaaaaagttatggcgatggaatcccaagcagaggcactcggccagttagcaactgatgatttagaaggaaagtttgcactgcttgagacttcatctgttgatgatgatctttcacaactgaaaaaggaattgtctggaagctctttggtatgtattcttatctgggttatcaaattagaattctaacgattgaagctaatgagatacctgctgtctatttatttcagtaaatgttcattctagctgctgacctttcatctgatgatttatttcagtaacagttaacaattgaagctaatgcgatatctgcttgttcacgaaatagaacaacatgatgttattttggtgcacatttactggatatatttttgttctaaaaaagacattgattaaatgtacagagtatgaagtacaatctgtagacagccagcaatttttttgtccttccacaatattttactctattcatctgctatagtccccattgattcagagttacttttgctgttttggtcaatccccatgaggtggagttcacctttagaatttattccttttgagttcatgttatactgggtcataacctaatgcttaattgggtgtttggttgggcggaactaaatttaagtctaactagtccatgattcaatcatttaatgctacagtaaatatttgctaatcatggcttaattaggcttaaaaatttgtctcgccgtttaatctttatctaagtaattagttttataattagattatatttaatactcgtaataatcattcaaacatacaatgtgacccagtttatactttagtccttagaagcaaacacctagtatgtaaggccgtctccggcagctcccctatctcatccactactattttaaacgtcactgtgtgtcgtctacagtcagatattcggtggacaaagtccatgttagcctgctgacattacacccattatctttatttctttattagagcaaaggcagttgaagaatgataagcatatgtactgccttacaaatgaattgattgctcatctattcaatacaaaatgaatttatttgcttgacaccgacagaaaggagagcttcctccaggcagaacagcagtcagcaactcaggtgctgggcgccctttccccgacctagagattgagagcgagctaaacgagctgcggaggaaagccaaggaatattaggttcattccttgtcgattcagcaggcctgacggaatctcatttccaagaaaatatagtgcagctgcagattgctccattgcgcgtttcgaaagttgaaacacaagtgcgcattgactgtttgttaaagagtatggaatcggctaatttctcggcattttccccctcgagtgacatttgtacagctatccataaaattgttgtaaatcactactctctctagagcctttttttcatactatatataaagtcaaagttcgaagttcccacgccgtggtttttgccccct

SEQ ID NO: 35779 - DNA, 1435 bp, Zea Mays
cgctacggcccaagagacgcgcaatgggaatccgactcgagatcgctttccattcccatcgcttctcatctcttctccacacgaactcgccctctcgactctcgagagatagagcgaggcaccaagaagggaaaaaaaaagagggacaggaaaaaaaatcattctcgtttcgctctccgctagaccccgcccgaatcaatggagattagggctccgccgacgagcctgaggctcgcgccgccgcccgccgccgccagcttccgccgaaccccgcttaggacctccttccttcgcggcagcgtgtcacttaaagttgtgcaagtacggcagtcaaatgtcaacagatttaagtgcaatagcatacgaagtaacctctttgataggctaacaagggttgtcaggtcctacgcaaatgcagttctaagttcgtttgaagaccctgagaagattctagaccaggcagttctggagatgaatgatgacttgacaaagatgcggcaggccactgcacaggtcttggcatctcaaaagcggcttgagaataaatataaagctgcagaacaagcttctgctgattggtatcggagggctcaacttgctcttcaaaagggtgacgaggatcttgctcgtgaagcccttaagcggcgtaaatcatatgctgacaatgcaagctccttaagatcccagcttgatcagcagaagggtgtagttgaaaatctgatttcaaatacccggcttcttgagagcaagatagcagaggccaagcagaaaaaggataccctaaaagctcgtgctcaatcagcaagactgctacaaaagtgagtgaaatgttgggcaacgtgaatacaagtagcgccctttctgcatttgagaaaatggaggaaaaagttatggcgatggaatcccaagcagaggcactcggccagttagcaactgatgatttagaaggaaagtttgcactgcttgagacttcatctgttgatgatgatctttcacaactgaaaaaggaattgtctggaagctctttgaaaggagagcttcctccaggcagaacagcagtcagcaactcaggtgctgggcgccctttccccgacctagagattgagagcgagctaaacgagctgcggaggaaagccaaggaatattaggttcattccttgtcgattcagcaggcctgacggaatctcatttccaagaaaatatagtgcagctgcagattgctccattgcgcgtttcgaaagttgaaacacaagtgcgcattgactgtttgttaaagagtatggaatcggctaatttctcggcattttccccctcgagtgacatttgtacagctatccataaaattgttgtaaatcactactctctctagagcctttttttcatactatatataaagtcaaagttcgaagttcccacgccgtggtttttgccccct

SEQ ID NO: 35780 - DNA, 505 bp, Zea Mays
ggcggattgcagactcgtggtgttggtgccacgcgcgaggatgcggtggcggcggccaatggaaggcggatgcaacgtccctttgccgacaatgagccaccgcgtggcgtgagtcggtgtctgtcgcctgacgaagacgcagcgttcaagaacaagaacaatagtatttcagattagcaacacttcatcttcagagaacacttcttcgtcaatagggagtatttcgagactcgagagggctttagaagaggaagaaaggatatggcagccgaagaaacgtttgacaggttgctgctaaatgaattgtgtggcaacatgttgtgttcccgataaaagagatggacgtggaagagctctgtacctgaactttttgctttgagagagagcaatttgtgtatctgaactttgacgcagatatggcagaataaaaatggagaggcgtattattaatctttccatgttgtgcattttgaaatatctctacgatggagtctctaatatgttg

SEQ ID NO: 35781 - DNA, 653 bp, Zea Mays
ggcggattgcagactcgtggtgttggtgccacgcgcgaggatgcggtggcggcggccaatggaaggcggatgcaacgtccctttgccgacaatgagccaccgcgtggcgtgagtcggtgtctgtcgcctgacgaagacgcagcgttcaagaacaagaacaatagccacccgaatgagctggcccatacactcgtctagctggattattacaatctcctactattacacctcacaacctgggagtatttcgagactcgagagggctttagaagaggaagaaaggatatggcagccgaagaaacgtttgacaggttgctgctaaatgaattgtgtggtgagttctggaggcaatcgttctcatcaattgaaaataactaaaacgatctccggtactgaggatcctgctgtttagcggagatcctttgtaaaattgttttttgttttgtctctttgttcaggcaacatgttgtgttcccgataaaagagatggacgtggaagagctctgtacctgaactttttgctttgagagagagcaatttgtgtatctgaactttgacgcagatatggcagaataaaaatggagaggcgtattattaatctttccatgttgtgcattttgaaatatctctacgatggagtctctaatatgttg

SEQ ID NO: 35782 - DNA, 475 bp, Zea Mays
ggcggattgcagactcgtggtgttggtgccacgcgcgaggatgcggtggcggcggccaatggaaggcggatgcaacgtccctttgccgacaatgagccaccgcgtggcgtgagtcggtgtctgtcgcctgacgaagacgcagcgttcaagaacaagaacaatagagaacacttcttcgtcaatagggagtatttcgagactcgagagggctttagaagaggaagaaaggatatggcagccgaagaaacgtttgacaggttgctgctaaatgaattgtgtggcaacatgttgtgttcccgataaaagagatggacgtggaagagctctgtacctgaactttttgctttgagagagagcaatttgtgtatctgaactttgacgcagatatggcagaataaaaatggagaggcgtattattaatctttccatgttgtgcattttgaaatatctctacgatggagtctctaatatgttg

SEQ ID NO: 35783 - DNA, 308 bp, Zea Mays
atggcgtggacggcaaagaaaaatagacaatccgataacagctaacacagtcaaaacctcattgtcaatacaagagtttggtcattcttatttcttgttgcagcaaataggtctcaagggaaaagcaaaatcaccgaaacaatcatataactcttttaagcatgcaccagctcctgaaggtgtgctaatcagggctcagtggtggtccttcgtctcaaacaagccatcagggcctgcattacacaattgtatgatggatcagaaatggaaaagcaaaattcataatcgatagcctgaagtctgaaatc

SEQ ID NO: 35784 - DNA, 3103 bp, Zea Mays
atgcatgtggaggatggaagggagcagcgagatttggagcgtggatggcgggcgcggttcccgtggattttgggcgaggttgggcacgtcggagtggtggcgagaaaaggaaggaaggagcgtgcagtcggcgggattggaggcgaggttgggcgcgtcgaagcagttgcgaggaaggcgtgcacggcgtggttggagacaggggctcgggtgggggcaggcatggcgcggctttggttctcgccaaggtcgatgctcgcctccgccgtcgacgcggaagcgggaataggagaggagctggaggacgcaacctccacagtgggctcaccgcagcttttcgccattccgacgccgaggagagaggaggggcttaaggcgaacttccactccagtgctgcaaacgtaaagatgcgggttgggggactgccggactggggagtgggacgagacgaccagacaaatccagaatcgcagtcgcgttctgctcctggaggcccccgcctggccgcctgcgccttcgccatggaatcgcgcggcaagcggatcctcccctttctgttggtcattatcgccgctgcggcggctccgtccgccatgccccgtgacgagagagaggtggtggtagtttccggtgcgccggacggggttgtgtgggtggcccagctctcggatctccacttcagcgtgcaccacccggagcgcgcctacgacttccggcggtatgtcggcccggcgctggccatggtcaaccccgacctcgtgctgatcactggagaccttactgatggtaaaagcaaagatctgttaacaatgaagcaaaacgaggtcgaatgggtagaatatgaaagtacaatgaaggaaataattgaaaatagcaagcttccaagaagaattttctatgatatgagaggaaaccatgatagctttggtgtaccagcatctggtgaggactatgacttttatagtaagtatagcatcaacgccaaactaagacgacaggggcgtgtccaaagcattactttggagaatagtggtcggaagcatctgtttgttggctttgatagcacaatggagattggtcttagaggtccaaccaatctatttggacatccaactgacaagcagatgattgaattggatcaagcattatcacagtggaatactgactttgacaaggttccagtgacaaaaatcgcatttgggcacttcccgttgtctttctcagcattaacagagtcaggaaaaagtatcaaggatgtttttctaaagcaatcattggcagcatatttgtgtggtcatcttcatacaaggttcgggaagaacttgaaacgatactaccatcgggcagtccaggaaccatcattatcagagcattactaccaacataacatgcaccaaggagatgcattccagggtaataaggaaaactgttctgaagaagcttctcatgttgaagagttctgggaatgggagatgggtgattggagaaagagcagaagcatgaggatactagcaattgatgatggttatgtttcctataccgatatagatttcagattaggttcaaagagcataatcatactacctacctttccccttgattcaagattcatgcagagagcctctgcttttcgtgattttaaatgtcatgtcatgggggcatcatcttttgataccgtgagagctcttgtattctctaaacatgagatagtatctgtttctgtaaaaatatacgactcaaggccaggaactcttgaaatagtcttcgactctgaaatgaaaagagtggattccaatgaaactcgaggaaatatgtatttgataccatggaactggagggcatttgaagattcctctcccagccgatattggctccaaattgaagtgatggatataacaggtgacacaagtgtcagccagttgaggccattctctgttaacggcttgctggcaagagtgaactggacatggaaagagttttttgtgattggtattcagtgggcttcaatatatcatcctgcactgtggtgtgccttttctctaatcttttcgttgcttcttgtaccacaagttttagcagtggtattcaaagatcggttcacatataaatctctatgcgcatatggtgggcagaggacactgttgaagtctctagttggtggtttcatctgttgttttgttgaactcgccaggctggttcttgtatggttattgctactgttatatgctatctatttagtttttataccttggttattcggtcaccctattactgaagatggtagcctgacttacatgacacataaaggctggattctaaaaggacccagtagtagcaacgaagtagtccatgctgggattccagatgtcatggtcattgttctacctcacctttgctttgtgttagtacccaccattgtgattttagctgccatggctgctgagagaacagcatatcgagagcattatctttctcgatcaggaaagaagaaagatgactaccgtaagagcaggagacagatagaacatgaaaacttttggaacggtcgctggattagcaaatttctgtgtcttctctgcgtggtggttctatgcaaacattggaagctttgcagagcgctcgtgaaggcttatgctatgaaccccttgctccatgcgccagtacttttcttcttcgttcctttactcatggtgtttgccatctacaagacacggtccatttagctgttcgggagttctgaagatgtgctgcactggactgtccaataaatggtgcttcaactgtgaagactgaagactaacccacaactgaaggtgtgctacttcgatttgtcactttctctctctttcagagagcagatttgttagattgtttaacaggcatgtatagctttcagcgttgtgctccgtataaatgagggactgcacggcatttcattagaatggaatggttaggatttgaaccaaggaagaagagactaaactgctcaatatagtttttcctctttcttttgagaaagttctttttccctcctctgtttttgacctgccggttttgtttttgtacatttatccttcttgtgagactttgaccatctacagt

SEQ ID NO: 35785 - DNA, 1617 bp, Zea Mays
ctggcagctgcttttaaagaacagtgcagtaaccagcacacagcccagagcaggaggcagttgatggaatgcgtggagctgctggattctcccgatctcttcttcctggacggcggcgatgcgcatgcgaccgacttctcactggagaaccatctcgagtcaagtagctcggcaggtgccaaaaacaaagctgcgccgggtcatagtcatattcatagtcatagtcatagccggcgtgctcagcttcatcggagtaacgcgcctgttccaccgccgctgcctggaacctcttattatggcgcgcggaggaaggcgaaggccgcctgtcgccgtgtccccgaaggcgtcctggattcctgggacaggttgttcttggagggataccagtctgacctccgtgtctccacagacggcggcgctgagatttcgtcgcattcctgcgttctcgtgagtttcagctctggcgtcaaatcccctgtcctgagagctatgctggaggaagctagactgagagatgggtttcggtgtatccgtgtctctggcgcgccttcggaagcagtccgtgtcttcatcagatttctctactcttcacggtttgagcaggaacagatgaaggagcacgctctgcatttgcttgtgctctcccacgtcttctcggtgccgtctctgaagacggtctgcgtcgaccaactcgagaggggcttcctcgctactgacaacgtggtagacatgctgcagcttgccaggctgtgtgacgcgccccgcctcgcgctcgcctgtgcccggatggtcatcggggatttcaagaccatctctctgacggatgggtggaaagtgatgagacggaccaatccaagtatggaacaggagctgctcgagtctcttgtcgaagctgatacgagaaggcaggaaagagctaaaaggatggaagaaaagaaagtgtatctgcaactgtacgaagcaatggaggcgctggtccacatctgccgggacggatgcaggacgatcgggcctcgagatcaagcgctcaagggcagcctagcagccgcctgcaagtttcgcgcctgcaagggcattgagctgctcgtgcgccacttctcggcctgcggagtccgggtgcccggcggctgtgccaactgcaggcggatgtggcagctcctcgagctgcattcccgcatgtgcttcctcccggacacctgcaaggttcctctctgcaggcattttaaggagaagatgcggaatctggggaggaaggaagagaccaaatggaaccttttggtgtgcaaggtgctggagcgcggaggaaccatgggttttatgcccggaaggagaaaaaatttcatcaaccctaaggccagctgggtgttgccacgtggctcctcttgtatttgaaacactcaaacctcgcaggggtacttttatgttagacgagaaggggaccaggaggagcaggaacaaaaaagaaaaacgtcagaacagctgttgcgtgaatcgtgatgatactttaaaaaggaaaaagcatctaattttgaccatccatccatagctcgagcaaattttgttccaccaattactagtcatattggaaaaaaaattactattcaaattggaaaaatg

SEQ ID NO: 35786 - DNA, 1654 bp, Zea Mays
cccgaacggccggcgtccaatcgctcaaacccaaagctggatccctttgatttcttcttttcttcccccccggaatccggcccagagcaggaggcagttgatggaatgcgtggagctgctggattctcccgatctcttcttcctggacggcggcgatgcgcatgcgaccgacttctcactggagaaccatctcgagtcaagtagctcggcaggtgccaaaaacaaagctgcgccgggtcatagtcatattcatagtcatagtcatagccggcgtgctcagcttcatcggagtaacgcgcctgttccaccgccgctgcctggaacctcttattatggcgcgcggaggaaggcgaaggccgcctgtcgccgtgtccccgaaggcgtcctggattcctgggacaggttgttcttggagggataccagtctgacctccgtgtctccacagacggcggcgctgagatttcgtcgcattcctgcgttctcgtgagtttcagctctggcgtcaaatcccctgtcctgagagctatgctggaggaagctagactgagagatgggtttcggtgtatccgtgtctctggcgcgccttcggaagcagtccgtgtcttcatcagatttctctactcttcacggtttgagcaggaacagatgaaggagcacgctctgcatttgcttgtgctctcccacgtcttctcggtgccgtctctgaagacggtctgcgtcgaccaactcgagaggggcttcctcgctactgacaacgtggtagacatgctgcagcttgccaggctgtgtgacgcgccccgcctcgcgctcgcctgtgcccggatggtcatcggggatttcaagaccatctctctgacggatgggtggaaagtgatgagacggaccaatccaagtatggaacaggagctgctcgagtctcttgtcgaagctgatacgagaaggcaggaaagagctaaaaggatggaagaaaagaaagtgtatctgcaactgtacgaagcaatggaggcgctggtccacatctgccgggacggatgcaggacgatcgggcctcgagatcaagcgctcaagggcagcctagcagccgcctgcaagtttcgcgcctgcaagggcattgagctgctcgtgcgccacttctcggcctgcggagtccgggtgcccggcggctgtgccaactgcaggcggatgtggcagctcctcgagctgcattcccgcatgtgcttcctcccggacacctgcaaggttcctctctgcaggcattttaaggagaagatgcggaatctggggaggaaggaagagaccaaatggaaccttttggtgtgcaaggtgctggagcgcggaggaaccatgggttttatgcccggaaggagaaaaaatttcatcaaccctaaggccagctgggtgttgccacgtggctcctcttgtatttgaaacactcaaacctcgcaggggtacttttatgttagacgagaaggggaccaggaggagcaggaacaaaaaagaaaaacgtcagaacagctgttgcgtgaatcgtgatgatactttaaaaaggaaaaagcatctaattttgaccatccatccatagctcgagcaaattttgttccaccaattactagtcatattggaaaaaaaattactattcaaattggaaaaatg

SEQ ID NO: 35787 - DNA, 1927 bp, Zea Mays
cacctttctgtttcattctttcctctgctgccttcaaatcttctctgtgatagcccgaacggccggcgtccaatcgctcaaacccaaagctggatccctttgatttcttcttttcttcccccccggaatccggcccagagcaggaggcagttgatggaatgcgtggagctgctggattctcccgatctcttcttcctggacggcggcgatgcgcatgcgaccgacttctcactggagaaccatctcgagtcaagtagctcggcaggtgccaaaaacaaagctgcgccgggtcatagtcatattcatagtcatagtcatagccggcgtgctcagcttcatcggagtaacgcgcctgttccaccgccgctgcctggaacctcttattatggcgcgcggaggaaggcgaaggccgcctgtcgccgtgtccccgaaggcgtcctggattcctgggacaggttgttcttggagggataccagtctgacctccgtgtctccacagacggcggcgctgagatttcgtcgcattcctgcgttctcgtgagtttcagctctggcgtcaaatcccctgtcctgagagctatgctggaggaagctagactgagagatgggtttcggtgtatccgtgtctctggcgcgccttcggaagcagtccgtgtcttcatcagatttctctactcttcacggtatggatgctatctactcattcatatagatagttcactactcattcgtatagatagttcactgtcctctaattctctaaagatcagatttcagcccaaacagtttacagtgactgaagctgatgaagacagtgcagattcttcttcttcttctgacttttgatgcgtgcgtgcatctttcagtgagaaacagacgcgctgaattatttgtttggtgaaggtttgagcaggaacagatgaaggagcacgctctgcatttgcttgtgctctcccacgtcttctcggtgccgtctctgaagacggtctgcgtcgaccaactcgagaggggcttcctcgctactgacaacgtggtagacatgctgcagcttgccaggctgtgtgacgcgccccgcctcgcgctcgcctgtgcccggatggtcatcggggatttcaagaccatctctctgacggatgggtggaaagtgatgagacggaccaatccaagtatggaacaggagctgctcgagtctcttgtcgaagctgatacgagaaggcaggaaagagctaaaaggatggaagaaaagaaagtgtatctgcaactgtacgaagcaatggaggcgctggtccacatctgccgggacggatgcaggacgatcgggcctcgagatcaagcgctcaagggcagcctagcagccgcctgcaagtttcgcgcctgcaagggcattgagctgctcgtgcgccacttctcggcctgcggagtccgggtgcccggcggctgtgccaactgcaggcggatgtggcagctcctcgagctgcattcccgcatgtgcttcctcccggacacctgcaaggttcctctctgcaggcattttaaggagaagatgcggaatctggggaggaaggaagagaccaaatggaaccttttggtgtgcaaggtgctggagcgcggaggaaccatgggttttatgcccggaaggagaaaaaatttcatcaaccctaaggccagctgggtgttgccacgtggctcctcttgtatttgaaacactcaaacctcgcaggggtacttttatgttagacgagaaggggaccaggaggagcaggaacaaaaaagaaaaacgtcagaacagctgttgcgtgaatcgtgatgatactttaaaaaggaaaaagcatctaattttgaccatccatccatagctcgagcaaattttgttccaccaattactagtcatattggaaaaaaaattactattcaaattggaaaaatg

SEQ ID NO: 35788 - DNA, 1638 bp, Zea Mays
cgccataggaaggggaggaggcctccaaaagtttctgtggagcgacgaggacgaggacgccgtgcccagagcaggaggcagttgatggaatgcgtggagctgctggattctcccgatctcttcttcctggacggcggcgatgcgcatgcgaccgacttctcactggagaaccatctcgagtcaagtagctcggcaggtgccaaaaacaaagctgcgccgggtcatagtcatattcatagtcatagtcatagccggcgtgctcagcttcatcggagtaacgcgcctgttccaccgccgctgcctggaacctcttattatggcgcgcggaggaaggcgaaggccgcctgtcgccgtgtccccgaaggcgtcctggattcctgggacaggttgttcttggagggataccagtctgacctccgtgtctccacagacggcggcgctgagatttcgtcgcattcctgcgttctcgtgagtttcagctctggcgtcaaatcccctgtcctgagagctatgctggaggaagctagactgagagatgggtttcggtgtatccgtgtctctggcgcgccttcggaagcagtccgtgtcttcatcagatttctctactcttcacggtttgagcaggaacagatgaaggagcacgctctgcatttgcttgtgctctcccacgtcttctcggtgccgtctctgaagacggtctgcgtcgaccaactcgagaggggcttcctcgctactgacaacgtggtagacatgctgcagcttgccaggctgtgtgacgcgccccgcctcgcgctcgcctgtgcccggatggtcatcggggatttcaagaccatctctctgacggatgggtggaaagtgatgagacggaccaatccaagtatggaacaggagctgctcgagtctcttgtcgaagctgatacgagaaggcaggaaagagctaaaaggatggaagaaaagaaagtgtatctgcaactgtacgaagcaatggaggcgctggtccacatctgccgggacggatgcaggacgatcgggcctcgagatcaagcgctcaagggcagcctagcagccgcctgcaagtttcgcgcctgcaagggcattgagctgctcgtgcgccacttctcggcctgcggagtccgggtgcccggcggctgtgccaactgcaggcggatgtggcagctcctcgagctgcattcccgcatgtgcttcctcccggacacctgcaaggttcctctctgcaggcattttaaggagaagatgcggaatctggggaggaaggaagagaccaaatggaaccttttggtgtgcaaggtgctggagcgcggaggaaccatgggttttatgcccggaaggagaaaaaatttcatcaaccctaaggccagctgggtgttgccacgtggctcctcttgtatttgaaacactcaaacctcgcaggggtacttttatgttagacgagaaggggaccaggaggagcaggaacaaaaaagaaaaacgtcagaacagctgttgcgtgaatcgtgatgatactttaaaaaggaaaaagcatctaattttgaccatccatccatagctcgagcaaattttgttccaccaattactagtcatattggaaaaaaaattactattcaaattggaaaaatg

SEQ ID NO: 35789 - DNA, 1843 bp, Zea Mays
cgccataggaaggggaggaggcctccaaaagtttctgtggagcgacgaggacgaggacgccgtgcccagagcaggaggcagttgatggaatgcgtggagctgctggattctcccgatctcttcttcctggacggcggcgatgcgcatgcgaccgacttctcactggagaaccatctcgagtcaagtagctcggcaggtgccaaaaacaaagctgcgccgggtcatagtcatattcatagtcatagtcatagccggcgtgctcagcttcatcggagtaacgcgcctgttccaccgccgctgcctggaacctcttattatggcgcgcggaggaaggcgaaggccgcctgtcgccgtgtccccgaaggcgtcctggattcctgggacaggttgttcttggagggataccagtctgacctccgtgtctccacagacggcggcgctgagatttcgtcgcattcctgcgttctcggcgtcaaatcccctgtcctgagagctatgctggaggaagctagactgagagatgggtttcggtgtatccgtgtctctggcgcgccttcggaagcagtccgtgtcttcatcagatttctctactcttcacggtatggatgctatctactcattcatatagatagttcactactcattcgtatagatagttcactgtcctctaattctctaaagatcagatttcagcccaaacagtttacagtgactgaagctgatgaagacagtgcagattcttcttcttcttctgacttttgatgcgtgcgtgcatctttcagtgagaaacagacgcgctgaattatttgtttggtgaaggtttgagcaggaacagatgaaggagcacgctctgcatttgcttgtgctctcccacgtcttctcggtgccgtctctgaagacggtctgcgtcgaccaactcgagaggggcttcctcgctactgacaacgtggtagacatgctgcagcttgccaggctgtgtgacgcgccccgcctcgcgctcgcctgtgcccggatggtcatcggggatttcaagaccatctctctgacggatgggtggaaagtgatgagacggaccaatccaagtatggaacaggagctgctcgagtctcttgtcgaagctgatacgagaaggcaggaaagagctaaaaggatggaagaaaagaaagtgtatctgcaactgtacgaagcaatggaggcgctggtccacatctgccgggacggatgcaggacgatcgggcctcgagatcaagcgctcaagggcagcctagcagccgcctgcaagtttcgcgcctgcaagggcattgagctgctcgtgcgccacttctcggcctgcggagtccgggtgcccggcggctgtgccaactgcaggcggatgtggcagctcctcgagctgcattcccgcatgtgcttcctcccggacacctgcaaggttcctctctgcaggcattttaaggagaagatgcggaatctggggaggaaggaagagaccaaatggaaccttttggtgtgcaaggtgctggagcgcggaggaaccatgggttttatgcccggaaggagaaaaaatttcatcaaccctaaggccagctgggtgttgccacgtggctcctcttgtatttgaaacactcaaacctcgcaggggtacttttatgttagacgagaaggggaccaggaggagcaggaacaaaaaagaaaaacgtcagaacagctgttgcgtgaatcgtgatgatactttaaaaaggaaaaagcatctaattttgaccatccatccatagctcgagcaaattttgttccaccaattactagtcatattggaaaaaaaattactattcaaattggaaaaatg

SEQ ID NO: 35790 - DNA, 1631 bp, Zea Mays
cgccataggaaggggaggaggcctccaaaagtttctgtggagcgacgaggacgaggacgccgtggtgagtgacccagagcaggaggcagttgatggaatgcgtggagctgctggattctcccgatctcttcttcctggacggcggcgatgcgcatgcgaccgacttctcactggagaaccatctcgagtcaagtagctcggcaggtgccaaaaacaaagctgcgccgggtcatagtcatattcatagtcatagtcatagccggcgtgctcagcttcatcggagtaacgcgcctgttccaccgccgctgcctggaacctcttattatggcgcgcggaggaaggcgaaggccgcctgtcgccgtgtccccgaaggcgtcctggattcctgggacaggttgttcttggagggataccagtctgacctccgtgtctccacagacggcggcgctgagatttcgtcgcattcctgcgttctcggcgtcaaatcccctgtcctgagagctatgctggaggaagctagactgagagatgggtttcggtgtatccgtgtctctggcgcgccttcggaagcagtccgtgtcttcatcagatttctctactcttcacggtttgagcaggaacagatgaaggagcacgctctgcatttgcttgtgctctcccacgtcttctcggtgccgtctctgaagacggtctgcgtcgaccaactcgagaggggcttcctcgctactgacaacgtggtagacatgctgcagcttgccaggctgtgtgacgcgccccgcctcgcgctcgcctgtgcccggatggtcatcggggatttcaagaccatctctctgacggatgggtggaaagtgatgagacggaccaatccaagtatggaacaggagctgctcgagtctcttgtcgaagctgatacgagaaggcaggaaagagctaaaaggatggaagaaaagaaagtgtatctgcaactgtacgaagcaatggaggcgctggtccacatctgccgggacggatgcaggacgatcgggcctcgagatcaagcgctcaagggcagcctagcagccgcctgcaagtttcgcgcctgcaagggcattgagctgctcgtgcgccacttctcggcctgcggagtccgggtgcccggcggctgtgccaactgcaggcggatgtggcagctcctcgagctgcattcccgcatgtgcttcctcccggacacctgcaaggttcctctctgcaggcattttaaggagaagatgcggaatctggggaggaaggaagagaccaaatggaaccttttggtgtgcaaggtgctggagcgcggaggaaccatgggttttatgcccggaaggagaaaaaatttcatcaaccctaaggccagctgggtgttgccacgtggctcctcttgtatttgaaacactcaaacctcgcaggggtacttttatgttagacgagaaggggaccaggaggagcaggaacaaaaaagaaaaacgtcagaacagctgttgcgtgaatcgtgatgatactttaaaaaggaaaaagcatctaattttgaccatccatccatagctcgagcaaattttgttccaccaattactagtcatattggaaaaaaaattactattcaaattggaaaaatg

SEQ ID NO: 35791 - DNA, 2230 bp, Zea Mays
cttaactttagcttctttccttcgccggccgggaaacgaggcctttgcccgctcttcactctcctccgctcgccgcctcctctttctcctcttctcctctcctctctcacgagggcccaagacctcaccgctaaggtcccggtctccgcggggctctccgtcgcactttctcgtgcctcggggaccccgatccgccaccgcgcgaccgatcgtcccggatgcacgggccgtacccgacggctgctgctgctgctgcttcttcttcggacgacatggcggcgaacggcatgaaggtggcgctgcaccggcaggtctcggggggctcgatgaagcagaacgcggagctccggcgccaggcgtcgctcgagtccccgcggacggggcgggccaccagccggttcctgttcgggcggcagtcgtccatggacccgaaccggaggcgcggccggagccagagccccgtgcgcgcgccggaggacctgggcgtgccggacaacctggacgccaccatgcagctgctcttcttcgcgtgccagggcgacgcgctggggatcgagggcctgctgcgcagcggcgtcgacgtcaacagcatcaacctcgacggccgcaccgcgctgcacatcgccgcgtgcgagggccaccgcgacgtcgtcagggtgttgatcagctggaaggccaacatcgacgcgcgcgaccgctggggaagcacggcagtagctgatgccaagttctacggccactccagggtctacgatctcttgaaattccatggcgcaaaggttccgagaaccaagaggacgccgatgatggtgtcggccccagccgagataccggagtacgagctgaaccccggagaggtccagttccggcgaggctgtgacgttacaccgggtgtgtaccacatcgcgaaatggaatggcacaaaggtttccgtaaaaatacttgacagagacggttgctccgatcaagaagccgcaaactctttcaggcatgaactgactgtactggagaaggtccgacaccctaacgtcgttcagttcgtcggagccgtcactcagagcatacctatgatgattgtgtctgaactccatgaagagaaagacttatcagtctgtatccagaagaaaggaaagttaaagcctcagaaggtgctaagatacggccttgatattgccaggggcatgacctacctccaccagtgcaagccggaccccatcatccactgcgacctaaagccaaagtgccagacatatcttcctggatagcggaggccagctgaagatcgcggggttcggagtgacaaggatgtccaaggtcgggaccgacaaggtgaggttgatctaccatggcgctctcgtcgacagcttcagctaccacaccgcgcctgagctgtacaggaacgacgcgttcgactcgagtgtggactcctactccttcggcttcatcctctacgagatggtcgaagggtcggtaagagcgccggaggattcagggcactcgatccggttcgagggactgcggccatccctcaagggcaggctcaagggctatcctcccgacttcaaagcgctggtggaggaatgctggcacccgcaagccatggcgcggccgacgttctcggagatcatcatccggctcgacaagatctacgcccacttcgacaagcatgggagctggaaggactcgctcaagctttggtccgtatcccggcggcttaagcgaattgttaagcgtcgctccgtcaggagcagaatccacaatgagccgtgaaaatgttcggccaaaaaatagagagggagagagagatctttgcgtccggtgatcgaatattttatcctttttttcttctcaaccttcgaaatcaaacacactgagaatgtgctctgcgttgtttgtcccgttgttttttacaggaaatgatcgatggcatggcctgcactgcacgccgccttctttgtgtacatacataccgcgctgcaaacgcgtctctttcccggggaagattgagtactggttgtaccttgtataaggtggagactggagaatcatgtggcatggtgattggttttttgttttttgctacgaattgtaacagattgtgagtaaaattgggcagaacaacacgtatacgtcccccccccccccccccctgcagtgtcaaaaaaagaatgcacatttgctgttgttttttctgctggagtcgtacatacaaaagcaaactgtaagagat

SEQ ID NO: 35792 - DNA, 7236 bp, Zea Mays
ctaattatcacctgtaagccagctgaaccacatctcgtcgtgcacatccggagcccgggaacacacacacacattgtcatggccatgcccaagcccgtcctgagcctgctcgtgcacctacacgccgccgtcctgttccttcccgccccggccggcggcgcggtctacaacgtgctgcgctacggcgcgcgccccgacggcgtgacggacgcggcggggcccttcctccgcgcgtgggcggacgcctgccgctcgcccctcccggccgccgtgtacgtgccgccagggaggtacctggtgcggagcgccacgttcaccggcccgtgccacacccgcgccgtgacgttcgccgtcgccggcacggtcgtcgcccccgcggcctacggcgcgcgcggctcgtcggggaggtggatcacgttcgagaacatggacggcctcgtcgtcgccggcggcggcacgctggacggccgcggcagggcactctgggcctgcagacagcgcgggcagcgcgactgtccgacccccacgtccactctgacgatcgccaactccaaggacgtggtggtggccgggctccggtcggtggacagcgagctgttccacgtggtggtgctgcagtgccacggcgtgacggtgcgcggggtgacggtggaggcgccggcggacagccccaacaccgacggcatccacctgcacatgtccacccacgtgtcggtgtacgacgccaggatcagcaccggcgacgactgcatctccatcggccccggcaactctcacctctggatcgagcgcgtcgcctgcggccccggccacggcatcagcatcgggagcctgggcaagcagcagggcacggaggtggaggcggtgcagaacgtgacggtgaagacgacgtggttcaccggcaccatgaacgggctgcggatcaagacgtggggcggctccaagcgcggcttcgtcacgggcgtcaccttcgccgactccaccatgtccggcgtggacaaccccatcatcatcgaccagaactactgccccaccagcagcggctgccccggcgccggccggagctccagcatcaggatcagcgacgtgcggtacgtgggcatccggggctcgtcggccacgccggtggccgtcaacttcgactgcagccggagctacccctgcagtggcatcagcctgcaggacgtggcgctgacgtaccagaaccgggccgccgccaagtcctactgccggaacgtgcaggggaccgcgctcggcctcgtgctgccgccgagctgcctctgatcagacgatcgaccttgcaacttacattgccggccggacgcagcagttagctgcatgcgttgtcacgtgtatatagatgcatatgtcgagtgtattatgtacggagtatgtggggagtgcttactgcttagactaggagaacattacgagcttcttctgacagtagatggttatatagtcgatatctgttggttcttttctttaacccttcgcctttttcgcagcacgattattgtatgagcaagttttttaaataatttttattttattctggtctaggtacaagttatgcacataataccgtaatctggctctttgacgagtgctcgacgctttatcaagtgctttttgtcgggtacttggcacagttagacattcggcaaagaccgctttcccgagtgtcaaacacttacgaacgtcgacgttcggcaaaggaccgtcagcgaccatctatagccctaggaacacaatgtaagccctaggagcacaacgtaatactaacaccaaactaagttgaaaacatcgtaaaagatagcaaacctattttttcaagatcctttagaaacatgtgtaatttcaactaatttatatggtcaaaataaggtacttagtactagttatattctttttgtctagtgttccgtccatcacccacaaataaaggtgactttacatacttctgatttctattgatacatacatacatctgatctctactgctagttgactgtgcactactacgatttctatatattacataagtagaccttgtttgaatgtaatggttgttcaaacacgctctaaacttctacaatgatttgtgctctatttaaattggtttgttaacttcgatctcaacaggtctaccatgtaacttatataaatgcatttcatataccaagtgagaaaccacaatttcaatactcatgtcgtctcccgtgaggtggcttgaacgacaccaaaccctagtcgtcgttgtcccttacccctccactctccgccttgccgccaccacagtaagcagacaaaagttccgagcgacttgcgagtacggtggtgaaatcctcgtgtgacctagcaaggtttagcccgacacgagcatgtcctggcctgttgtccaccgggtctgtgctggcccgacccgaccaccgtgtcgtgcatatgccttaggcacgacatggtgggttagtcttcatacgatctgttttaattttttccatattttcataaaattatctatattatactttcatatagaatataaaacacaaaaaatatgagttctcttggctctagaagtgtaggaatgtggttttggagcaacaaccatgatttcaaccccccatttgtgcataagtttagaaactcttgcattatattataggaggagaaattgcataattttataaattattgaacatacgtcttatcgtggaacatatatttgctttctatttgaaaacgacattattatattctgttattttaaaaccgtttcattgaacttacattccggctcataatatgattgttcgccttggaatataagaaggcccaacactatccttgccaaggccaactctatccagcgggccaacaccgagccacaccgtgcactttgggcctacaacatcgttccataccgggaaagggaaaaaggaaagtgcatacgatatcctcaactatcggacaaagtttaatctgtgtcgtttaaagacttaattctttgagaaaatcccttcaatgccatccaaacttatactaatctcttcaatgtcatccaaacttatagctttccttcaatgccattaaatttaaattttaatcccttaaataccattaccgttagtttgagctaacgtcgttagttcaatttaaagtcaatctctccaatgccattaaaatctatattgatcctttcaatgccactagaagttgatcgatctatttggaatttaaaaattccagaataaaaaaatatagatcaaaattttaaaattccacgatttttaaaaattttagtccatactttttaaaactccaaaattacttcgatatactaattcgatctatttgcttcctaataattttgaaaaaaatatgaaaatatatgatagaatttttaaaaattatttaaatatttgtagaacttcaatccacatttttagaacccatttttttgaaacgcgaatatatcacattgatttttaaaatttagctcccttgttatcattagtgtttgttgttagtttgaaaaaatatttggaatcaaataaaccgaagtgatatagcagagtaatttttggggtttacaaaaaacatgtacttaagtttttaaaaatcgtggaattttaaaattctgatccatatttttttattctgaaatttttaaaccccaaatagatcgaaccaatttcgagtggcattgaagggatcaatatagattttaatggtattagagagactgactttaaattgaactaacggcgttagctccaaactaacagtaatggcattcaagggattaaaatttaaatttgatggcattgaaggaaagttataaattttgatggcattgaagggattggtataattttggatggtattgaagggattttctctaattcgttttgctttcaaaagtttgtggagtctaaaagttcggttttctaatttagtaaggtatgtttcataatttagaaagataaactgagagatcgtagtaataatagctgaaatagatgagatcaggggcggatttgggctccgggccacctaggccgtggctcggggcgtagcccaaaaatactcttgtatataggtctttttcaaccaaaaaatcttacctaaaatacatttcagctaaaaaatatggtctaaaagacctcctgcttacactgattgagccatgcgctagcagcctccctcagtcgcatcttccaattattttgtaaacctgcacggctgcgtttcctatgtttccagcggcgcgccgcctccattcaaccctctatcgctctccacgccttcagactctacgaatccggcaagggcacaaggcagcaacttccgagtcggtcgggcgggctctgactcaggcatccgccaccgccagtccgacctccacctccgccagcctgcctccggcgtccctgcgaccctattcacccaaatccgcccctggcattacatcttctcataaactatacaacttgctcaatccgattcacttccttttcttattcatagttgagggtggagcgcctcccaggccaatgggcagcgaccacctgagcggcgagcgatgtgtgctgagtgttgactgcctgctgccatgtgtccgtgattctcctctactatgagtaattgtttccgaatgtctgattctcttttcctatctgtcacagttccactgaattgttttaaatgtttctacccctaaagtgcgaaaaattaaaagataagtagtacatcgttatatttgtagaatggctcagggtgttatttttatggagctccgccactagatgagatggactaagattatccgcactcattctactctaaatttttactctaaaaggaatattctattctagtcatcaatattttaaaatacagtagccaaacttccgcatccacaactactctatatctcaaccctatacaaactaccatatttttttataaaaaatacccactgtgggcccaccacccatctcctttgcgtctgcagcaaacccaccgtgggcctcaccacccatgctctacacagcgtcacagtgagttgcgggcagcaaacgctaagactatctgcaccgcctcccgcttcacctccccctcccctcggttagcggcgccaatgttactctatgtgctgcatcggtagcctctatatacacccctaccagctacagtactagaggagtctacaggtacccaccagatatagcgtgaggacgccggcccccttctctgcatgcacagcgacgtgacagtgcaagttgaagtttggtagttagaaaaaaatgatgttggataataaataggtgtaaaaaataatattttatagttgtagtgggttatagggggagtatttagggggaaccgctgcgagagatgaaaaaataggggatgaaatgttgatgatgtgacgcaaaaaagtgatatagggggaaaaatttagagagaatcgctgcggatagcctaaaatagaatatgccatccagtcaatcgctgcagccatccacttcactgtaaatttttagagttggcttcacagtccgcgactgcgggcagcctaatcgtggtagaaagaaggcaacacacatggtgacatggacaacaacaagcagcctgcctgacaatcagcctagagcagagcctacggggtcccctcagctcacagtcgcaccgcagccgtcctgcacgaacgtgccgtgggacgtgggtggcctccaaggctccaactggaatccaaggcgcgggccgtctctcccgcagtcccgctgtccgcctgttccaacgcgctccgcgcacgcgcgcacacctacctaccccctgcgcttgcacaaaatccttcttgatccgcacaggaaggtcccggcagaagaacttggcgggcgaaaggcgaaaccgacgtgctcccgggcgggcggcgacagcggcatggagcgagagcggcaggcagtggcgaggaacaggaaggtggtgctgcgcgggtacatcgaccgcgcgcccagggaggaagacatggagctcgtcgacggcggcgccgtggagctgcgcgtccccgagggcggcggcggccccgcggtgctggtgaagaacctctacctatcctgcgacccttacatgcgcggcaggatgcgggacttccgcaactcctacatcccgcccttcaaacctggatcacctattgaagggtttggcgtggggagggtggtcgactccactcatccaggattcagtgctggtgacgttgtttccgggatgactggatgggaggactacagtctgatcaccaagcctgaacagctcaggaagatccagcaaagcgacataccactctcctatcatctgggccttcttggcatgcctggctttacagcttatgttggattctatgagatctgttcaccaaagaaaggggagtttgtttttgtttctgctgcatcgggagcagttgggcaaattgttggtcaacttgcgaagctccatggttgctatgttgttggaagcgctgggacagatcagaaggttgagctcttaaaggaaaaattcggatttgatgcggctttcaattataaggaagagcctgacttgactgctgccctgaaaaggcacttccctgaaggcatagacatctacttcgagaacgtaggcgggccgatgcttgatgctgtactactcaacatgcgagtacatggccgcattgcggtatgtggcatggtttcccagcacggggtgactgctcctgccggaatccacaacctgttctccttgataagcaagaggatagagatgaaggggttcatccagagcgattacgtgcacctgttcccgcagttcgtcgatgacatcaccaggcattacagagacgggaagatcgtgtatgtggaagacatgagcgttgggctggagagtgggccggcttccttcgtcggtctgttcagcggtaaaaatgttggcaagcaggtcgtctgtgtgtcgcgggattgaaaggcctggattttgttccctactggccagtacccttaaataaaatcaggaaaacattattttcaactccgagaaggaccccactagccagtaccacggtcgtaaatctcaaggtcatgtttattttttctcctgtattatataagttagattacagtgaaaaagtagaaagataaaatactaatttaggataataaataatctaaaataagctatctaatgctaaattat

SEQ ID NO: 35793 - DNA, 3316 bp, Zea Mays
cccctcatttactgtgctgaaattgcttctccggtctgccgcctgcccgccactctcacacatagcttcccttctcgctcgaaatcaccactcaattcgatcgcaagctgccgaatcctgaaccctatgaagatctccgagctctctcccgagtaccggcagccgccgccgccgccgcaatccgccctccttaccgacctcaacagggtcgtcgccgacgtcgaggcgctcgacgcctccgattcctcttccccggagaagctcgcagccgatctccgctgcctcctcaccaacctcgcatccgctgcttcctcctcctcctcgggtctcaatggggcgttcaggctcaaggtatggaacctcgccttccgcctctggaacgcgtgcgtcgaccgcgccaaccacttcgctgcgaggggtgccgaggccgcggtcgcggagacggagatccgacaggcggcgccggagctcctcctcgtagctggcctcccggaaggcgtccccaacgccgctgcgaaggcggcgtcccttttccaccgcaccggcctgttctggcttgacctcggccgcgccgacctcgcttccgcctgcttcgagaaggccacgccgctggtctgcgccgctgacacggaggaggatcgggacatcctgttggacctcaacctcgcgcgtgcccgcgcggcgtcgagcgaggggaaacaagccctcgccgtcgcgttgctaagccggtccaagcccctcgccgcggcgtcttccgtgggggtgaaagccctcgccgaggggtaccttctcctcggcaaggctgctctcgccactaaatccccggatcccgccatcgacgcgtcgagcctcctaaccgaagcgcttgatctctgtgagagggccgcggcctccccctgctgcaccactccgacgagcccgagatccagtcctgcaaccccaaatctccaagtgatcaaggatcaatgcctccgctgcctcgccgcagagcgtctccaagccaacgactatgagggcaccctgcgctgtatcatggtctcgagagcctcaccagggctggggaaggagcactctagcattgcgttcatggcgctccgtgcgtgtctcagcagtgggaaattgttggaagccgagagggagctcgataggctcatggccaacgctgaagcgccggagtttgtgtgtgtgtcggcagccgagctgtacgtagccagtgtggggctggacgctgcccttaaggtgcttgttgcacttgctgcacggtgtcgcgccagtgcttcagctgttgcagtgagggtgttgaaaacggtggttcagggtgcaggcggcgaggctgggcatgcaagagcgatcgctgaactcgtgtcagatgagagggtggttgcacttttcaatggccctgctaacgcccatgagcgtggcacgatgcatgcactgctatggacatgtggcactgtgcatttccatgcaaagaattacgagattagtgcggatttgattgagaggtcgatgctttatgtttcccgtgacgaggaaagcagatcccgccgtgcaaactgcttccgagtactttgcctttgccatatggcacttcgtcatctcgatcgagcccaagagttcataattgaggctgaaaaggttgaacccagtatccactgtgcctttctgaagtttaagattcttctgcagaagaaggaggaggaggatgctatcaagctgatgaaggccatgatgggctatgttgacttcaaccctcagttcctgatactctcgattcatgaagctattggttgcaagtctttctgcctctactctgctggaaaaccaatgccaatgagtgaggccaccgtcctccgcaacctgataactctcctccttcgtgagccaggatctgaggctgagattcttaagtactcaagacgtgccaagctacggatgggtgagcttggtttggaagcctttttcggaaaggaaactgtgctaaaagaggacaatatgctcctggctgacgacctaaacaagtctcaattatcagattctgaccttaaaaggggcattgagatgctcagaagagctgggaagctattacccttgactttgtcttcagctctggtgacctctgatcaattggagaacaacttgccctttcttcatacattcagcttctaccagcttctcagtagactggacactaacgcacaccctcagcagctccaattagccaagaactttgcggcatctaaagcatgtacaccaggtcatcttctcatacttggagacatggcttctaaaggtaaccaaccaaatctcgaggctgctgagtttctcctgaaggccagcatcagtactgcccttgcctctcactcaccaaactatggggtaatcagtgctgcccttagaaagctagtatgccttgctggtctccatgatttcagtggtagcatgagtgatgcagcctatgacgtatttcgacaagcttaccagattgtggttggacttaaagatggtgaatatccatttgaggaagggaggtggcttagtataactgcatggaacaagtcatatttacctgtgcggcttggacaacattctgttgctagaaaatggatgaagatgggtctagatcttgctcggcattttgacaggatgaagctgtatatatcagggatggaggaatgctttgagaactttcggaaattaactggtaaagaacctgatgaatgtagccagcaagatggggaaccaagtactggcatgtctggtactggtagtatgtctcagcctgtcctagtttagaaatttgtgggtggtggaggttcatagctagagaaaaatagaacatctgtttgaaccatacatacctatattcttcattgattgatgtgcactcaaatgctcttccattttctgatgagaattttgcgcacgttccgtgatttgtagagaactatgtgatgattttgttggccgtataatgtcctagaatatagtatgcccatgtgcaaggagaagtcaatatttgtcttatattgggtgactcttctataagtatgatgatctttgtatcggcagtaagggtctgtttgttggttcctcggggctcaggaagagttgccttgggttggatttcaactgcttgggtttcacatctctgcctggcagggtcgcaagcaaacaaccccaagcgtccctcgattttaatatcatcatgtgcaacaaatgttcattattttcgttaaaaaacattttgacaggaaactggttttccgaggtgattttttttgttaagacaactaattgaactccgtagggagct

SEQ ID NO: 35794 - DNA, 3274 bp, Zea Mays
cccctcatttactgtgctgaaattgcttctccggtctgccgcctgcccgccactctcacacatagcttcccttctcgctcgaaatcaccactcaattcgatcgcaagctgccgaatcctgaaccctatgaagatctccgagctctctcccgagtaccggcagccgccgccgccgccgcaatccgccctccttaccgacctcaacagggtcgtcgccgacgtcgaggcgctcgacgcctccgattcctcttccccggagaagctcgcagccgatctccgctgcctcctcaccaacctcgcatccgctgcttcctcctcctcctcgggtctcaatggggcgttcaggctcaaggtatggaacctcgccttccgcctctggaacgcgtgcgtcgaccgcgccaaccacttcgctgcgaggggtgccgaggccgcggtcgcggagacggagatccgacaggcggcgccggagctcctcctcgtagctggcctcccggaaggcgtccccaacgccgctgcgaaggcggcgtcccttttccaccgcaccggcctgttctggcttgacctcggccgcgccgacctcgcttccgcctgcttcgagaaggccacgccgctggtctgcgccgctgacacggaggaggatcgggacatcctgttggacctcaacctcgcgcgtgcccgcgcggcgtcgagcgaggggaaacaagccctcgccgtcgcgttgctaagccggtccaagcccctcgccgcggcgtcttccgtgggggtgaaagccctcgccgaggggtaccttctcctcggcaaggctgctctcgccactaaatccccggatcccgccatcgacgcgtcgagcctcctaaccgaagcgcttgatctctgtgagagggccgcggcctccccctgctgcaccactccgacgagcccgagatccagtcctgcaaccccaaatctccaagtgatcaaggatcaatgcctccgctgcctcgccgcagagcgtctccaagccaacgactatgagggcaccctgcgctgtatcatggtctcgagagcctcaccagggctggggaaggagcactctagcattgcgttcatggcgctccgtgcgtgtctcagcagtgggaaattgttggaagccgagagggagctcgataggctcatggccaacgctgaagcgccggagtttgtgtgtgtgtcggcagccgagctgtacgtagccagtgtggggctggacgctgcccttaaggtgcttgttgcacttgctgcacggtgtcgcgccagtgcttcagctgttgcagtgagggtgttgaaaacggtggttcagggtgcaggcggcgaggctgggcatgcaagagcgatcgctgaactcgtgtcagatgagagggtggttgcacttttcaatggccctgctaacgcccatgagcgtggcacgatgcatgcactgctatggacatgtggcactgtgcatttccatgcaaagaattacgagattagtgcggatttgattgagaggtcgatgctttatgtttcccgtgacgaggaaagcagatcccgccgtgcaaactgcttccgagtactttgcctttgccatatggcacttcgtcatctcgatcgagcccaagagttcataattgaggctgaaaaggttgaacccagtatccactgtgcctttctgaagtttaagattcttctgcagaagaaggaggaggaggatgctatcaagctgatgaaggccatgatgggctatgttgacttcaaccctcagttcctgatactctcgattcatgaagctattggttgcaagtctttctgcctctactctgctggaaaaccaatgccaatgagtgaggccaccgtcctccgcaacctgataactctcctccttcgtgagccaggatctgaggctgagattcttaagtactcaagacgtgccaagctacggatgggtgagcttggtttggaagcctttttcggaaaggaaacttatgctcctggctgacgacctaaacaagtctcaattatcagattctgaccttaaaaggggcattgagatgctcagaagagctgggaagctctggtgacctctgatcaattggagaacaacttgccctttcttcatacattcagcttctaccagcttctcagtagactggacactaacgcacaccctcagcagctccaattagccaagaactttgcggcatctaaagcatgtacaccaggtcatcttctcatacttggagacatggcttctaaaggtaaccaaccaaatctcgaggctgctgagtttctcctgaaggccagcatcagtactgcccttgcctctcactcaccaaactatggggtaatcagtgctgcccttagaaagctagtatgccttgctggtctccatgatttcagtggtagcatgagtgatgcagcctatgacgtatttcgacaagcttaccagattgtggttggacttaaagatggtgaatatccatttgaggaagggaggtggcttagtataactgcatggaacaagtcatatttacctgtgcggcttggacaacattctgttgctagaaaatggatgaagatgggtctagatcttgctcggcattttgacaggatgaagctgtatatatcagggatggaggaatgctttgagaactttcggaaattaactggtaaagaacctgatgaatgtagccagcaagatggggaaccaagtactggcatgtctggtactggtagtatgtctcagcctgtcctagtttagaaatttgtgggtggtggaggttcatagctagagaaaaatagaacatctgtttgaaccatacatacctatattcttcattgattgatgtgcactcaaatgctcttccattttctgatgagaattttgcgcacgttccgtgatttgtagagaactatgtgatgattttgttggccgtataatgtcctagaatatagtatgcccatgtgcaaggagaagtcaatatttgtcttatattgggtgactcttctataagtatgatgatctttgtatcggcagtaagggtctgtttgttggttcctcggggctcaggaagagttgccttgggttggatttcaactgcttgggtttcacatctctgcctggcagggtcgcaagcaaacaaccccaagcgtccctcgattttaatatcatcatgtgcaacaaatgttcattattttcgttaaaaaacattttgacaggaaactggttttccgaggtgattttttttgttaagacaactaattgaactccgtagggagct

SEQ ID NO: 35795 - DNA, 452 bp, Zea Mays
ctcactcatatatagccagcatatatagttactgaattgaaacgagaaaaaaaatccataaagttctgaagactaagtggatcgagcctgcgcgcgcgagggttgtcgtaaaatgtccaccgctattaggagggctaatgatgaattccccgtcgattgtagctacatgcatgaaggagtacacacgcatgcctatgttgtttgaattaatcaaattgcttgtttgttagtaattatattaccgcctccaactaggctccgatccgtacgtccacatgatcatcagctatttcatgcaagtgtcctactatatgttgttgctgttactgaaacgcatgcatgcttgtcccgaaccctctttttcttttttttctttttctttttttggtctcgcactcggacggacggacgactagcgcccgtgtgtttctagttttctgcgcgctcgcttc

SEQ ID NO: 35796 - DNA, 1393 bp, Zea Mays
acccaaccctgccttctcttcttccttattcccagtttcccacagcttgcgcggtctcactctctctcggcgacgactacgccaaggcccaagtgtgccgaggtattttttaggctcaggtcgctaccgccctacggccccggtcttcttccggcccttcgccggcgacgagaaccagcagggcagcagacggatggcttcgtcggtgccggcgccatcggggtcggtgatcaccgtggcgtcgtcttcttcctcagcagccgcggccgcggtgtgcggcacgggctccccatgcgctgcgtgcaagttcctgcgtcgcaagtgccagccggactgcgtgttcgcgccctacttcccaccggacaacccgcagaagttcgtgcacgtgcaccgcgtcttcggcgcgagcaacgtgaccaagctgctgaacgagctccaccccttccagcgcgaggacgccgtgaactccctcgcctacgaggccgacatgcgcctccgcgaccccgtctacggctgcgtcggcgtcatctccatcctccagcacaacctacgacagctccagcaggacctcgcccgcgccaagtacgaactctccaagtaccaggcggcagcggcagcttctgcgtccacggcgccgacagggccgcaagcgatggcagagttcatcggcaacgcgatgccgaacggcgcgcacaacttcatcaacattggacactcggcggcgctcgggtccctcggaggctccgcctccgtgttcgggcaggagcagttcggcaacgcgcagatgctgtccaggagctatgacggcggcgagcccatcgcgaggctggggatcaacggcggcggctacgagttcggctactcgaccgcgatgggcgggtctggcgctgtctccggcctcgggacgctcggcatcagcccgttcttgaagtctggtaccgccggcggcgacgagaagcccaacggcggttactgaattgaaacgagaaaaaaaatccataaagttctgaagactaagtggatcgagcctgcgcgcgcgagggttgtcgtaaaatgtccaccgctattaggagggctaatgatgaattccccgtcgattgtagctacatgcatgaaggagtacacacgcatgcctatgttgtttgaattaatcaaattgcttgtttgttagtaattatattaccgcctccaactaggctccgatccgtacgtccacatgatcatcagctatttcatgcaagtgtcctactatatgttgttgctgttactgaaacgcatgcatgcttgtcccgaaccctctttttcttttttttctttttctttttttggtctcgcactcggacggacggacgactagcgcccgtgtgtttctagttttctgcgcgctcgcttc

SEQ ID NO: 35797 - DNA, 1592 bp, Zea Mays
acccaaccctgccttctcttcttccttattcccagtttcccacagcttgcgcggtctcactctctctcggcgacgactacgccaaggcccaagtgtgccgaggtattttttaggctcaggtcgctaccgccctacggccccggtcttcttccggcccttcgccggcgacgagaaccagcagcagacggatggcttcgtcggtgccggcgccatcggggtcggtgatcaccgtggcgtcgtcttcttcctcagcagccgcggccgcggtgtgcggcacgggctccccatgcgctgcgtgcaagttcctgcgtcgcaagtgccagccggactgcgtgttcgcgccctacttcccaccggacaacccgcagaagttcgtgcacgtgcaccgcgtcttcggcgcgagcaacgtgaccaagctgctgaacgagctccaccccttccagcgcgaggacgccgtgaactccctcgcctacgaggccgacatgcgcctccgcgaccccgtctacggctgcgtcggcgtcatctccatcctccagcacaacctacgacagctccagcaggacctcgcccgcgccaagtacgaactctccaagtaccaggcggcagcggcagcttctgcgtccacggcgccgacagggccgcaagcgatggcagagttcatcggcaacgcgatgccgaacggcgcgcacaacttcatcaacattggacactcggcggcgctcgggtccctcggaggctccgcctccgtgttcgggcaggagcagttcggcaacgcgcagatgctgtccaggagctatgacggcggcgagcccatcgcgaggctggggatcaacggcggcggctacgagttcggctactcgaccgcgatgggcgggtctggcgctgtctccggcctcgggacgctcggcatcagcccgttcttgaagtctggtaccgccggcggcgacgagaagcccaacggcggtcagtaggcggatcgatccatccactcccatcaatcttgtcaggtttggtttgttttggttttgcatgctgcctgcacgcgcggtgttttattttgccttccctttttctgattaattcgcggagtttggtggactacggttagtcggtttattttctaggtagaggaacaattatgcatgactaataataattaagggtttcatttcatggttaaatataccatttgcatgatgctagttggagctaacgtccttgttcaaacaaagtatcgtagaattgtttggatctacatattaaattgatggctaggtgcatgcatatgtacttgaacagcagggcttttccgaacttctgatcagcagaatccagcatctgcttttgtcaaactgttttgcttttagatcgagggtacttgttagtatccatgcacagcacacggtgtggccgtatggtgaacaaatctattttcagatttgcgctcagctcatcgtgtgtggtgtacctaattaagcttccgtttttttgtattctttcttttttataaggacgctcctgttaaatcgtttgaaacagaagcaacatcattgattattagcaaatcctgaagaatgcatgcaagttcttct

SEQ ID NO: 35798 - DNA, 3991 bp, Zea Mays
gcccagccatttccctataaatcttcggccgtctgccttgctgctcagctttctcatctcctcagctcaccttgccgcagccaggcttgttagccgagcccctccaactagcgtgctagacctttgacgctgtttccccatcgtccaagctccaccatgcccacacgtccgtcctgctcctccgtgcacacgcccatgcatcctaatctccctggaaacttcacacgtgtacggctccctgtggtgataatattcagcgctgcttggccagggtaccgttcccctgcgcgctcgccggacgccgccgcacatgctccctgctcggcctccccggcgtgctgctccctcgccttgctcctacgcgtcgtgcgcgttttgtgttcgggtcgagccccaggattttgaggaaaaggaagcttcagtacatcggccggtgaaaagaataaactggtggtagtcatggtccttgcaaaatccgagatcagcttagtcgcggtatgtgaattaaccacgtgatgcggagaacccgagccaagtcgaccccaagcgcagactgattcgcgaggtgatgcgaatgatgaacctgaagatggatagactgaacgagtggcagaacaaaagctgctcgccaaaggatcgccgtctaacaacactaacctagtgttactcaggcaagccccggtgcatttgccacccccttgtgttttaaaaatcattttcacttgcttgatacattaggtgataggcgttgattgctaaaacaatttttgcattaccttccttggatttgattaccttccttgaaatccctgttttacaaaagatttttgatgcttagccttgctttagaaaaacaaatattttgtttttacaaaagatgatgtggcaaaagtgggtgggatgtttttgaaaacaaaacttgatggtggatccatcatggccgtgatgggttcaacatcggaaaagatgtacctctgtcaggtaccaagctttgagttttaaataattaagctgagaccgggcgggtgacttgcacgagaagagagtctcggtgtagtgtctccgtctgagtcgattaaggaccgtgtcgatgtaggcttgatgaccgaggaccctttaactggtcacatgcctcgtcatgggtaagccttgcctcgggcagactaaggccagaataagataacacggaatgggcgtggagcggtggcgggagtagtgtgtaccctccgtggcaagaggctggacggtggtgtatctgtgctctcggttcgcgtgaacctgatctggtcttaaaaaccccggtggcgggttgacatatgcaagggttaagtgctacatatgtcgtgtgattggagatcctcagctgagtataattgattcggatcgccgtaccttcgcggttatgaagacttggtcactgccctatacgtagaactccagtaaagatgaatgaaaggtttgctaagaaattggctagtgcaggtcaagtgtttgaactagggtagaaagaactctagatgcaggtaattttacctaacctgacaataaaattggattttaaggatccactcctagtaagcttttctgcaaaacagagtctttgattcttgataagccataccttgaatccctctagccagcatacccttgagagtcttttctttagtcaggtaagtcttgctgagtaattccgtactcagggttttattccctgttgtttttcaggttctaaccttgtgctgctgtgatggtgttaagtgccggtgggctcggccttcttataagtctaagtaactcccttatatttcttattgaggatggtcatttgagctagcatatatttcaaacttatacttttgtaatcactccgataaaataatataaaatttttgtaacttgtaaaatttggtagtaagattttccgctgcaaaaatattggtgtgtgtgatttgtattacttaatccgcggttctggttgaaagtggtttatccgatgtccttggggcaatcggacagatcctgttaagctatctggtgcacatgcatggccgtctgaggtctttggaagaaagacaggtacatgtgggcccaataacttggaggttctgccacagttcgaaccccaggttttgcatcagatatactaaatgatatcatagtaaaaaataatagtaattattatttttttaataagataaactagtaaaaaattggggtaaaaaagtcaaacgatttatatattgaaacggatgaagtaatatatagagaactatagttaggtgatggtacattgttacgatctatatatattgtgtaaataaatcttgttttaataagcaaattaggtacccttgtgttgcaacaatacacaatcaatttgataaaatattaatgcacaatgaataataactacagcttttttctagaaagtatgtatataaattcgaatagtttataattgcaaaatgaaaatgaatacatgtcatagagtacaagtcactttgcttgcagacatacacacagaaagcaaaccatatagattgcctcacatggtagtgctcaatctaatgatcttctgcaaccaaattatacatgtactcgcgtttgtttgtaaaagatcgtgatgttatatataaataacaagtagctaagaataatcccaacaaatacgaatgtaatcatttgcagcttccagaaatagatggagcactgacaagataaacttacagagaaagatcagtcagccaaatcaaatgatctagggattgccttgtaccatgaatctgccctcttcttcatgtgcgcttcatgcagtttcaggcggaagactgtcatgttctccttatgcaaacctacaaatacctgctccttggtccaaactcttgcagctaacccagcagcatatgcagctccaagggctcttgtctctatatcagctggtctaaaagattttgtactacttgagtctaacagtctactgctaacagcatgcataatttgccacgccagattgatcattccttttattgaagactatgttctgaattgaccataataggagagagaagcatggggagttagcatctcggcctcatccatttccaacaagccaaaagcactaactgaaagtctggcacttttaagcaaaaataacatgtcctaaaagcacagtagtataattgatcacaattcagttcataaaatacatggataagtcataagtgcttgtatgtgagtacaaagaagaggtgattgtatttacctagatctgcaaacgctacatgttagttgtgtaatctccttttgtttctctctcatccgctcgatgagcacagatgaaatgtatatgtttacaacgtcctcataaccatccctcaccatatcctctgacaaaactgaccaaatcaagataagaacaatatcaggtggctgctgggtgatgagatattgaagaccctaggggttcatttgttgggttccataaactttgtagaagcttgttctctctaaaatgagcaatcaggaatcactgaaaggtatcacggaattagctgcaggtttcagcttgtacatgtgtgtctataatgactatgtaagcaagttacaacgacgtgccaatgcaataaactgagtatatcacagtggaccaaggtcaagagtgtatcgtgatgtttgccagtattccttcatgttgtctcctacacttccatataatgtacaagagaagtgtatatttatgtgtgtttatacttctgatcttgttacaacaagaaaattagtccagactacttgctctggaatactcaatttaacctgcattacgatttaagttatactctaagctgtaaaattatataggtgaaggaccagttagacgaccagagagggtgaatgggagccactaaaaattctcgaacagtgagaacactgtgacttaattccctggcctaatctaacctctagggacaccaaacacactccgcaaaagaac

SEQ ID NO: 35799 - DNA, 1275 bp, Zea Mays
gacgggggctccccgtcgcagatcgccttcttcagctcctcagcagacggcttctctactccgggcacaagggagagtcgccccaagaagagctccaggatggtgacgccgatgccccagacatccgccttcatggcgccgacggcccagcacaagctttaggcgcgaaccgctcggggctgtagcacatcttagtgccgccggtgatgggcacctagagccggcctcgccggaggggccgcgtagaaccctggaaaggttgaagtcgctcatcttgatttccccgcgggagttggcgaggatgttgtcctgctttacgtccaggtgcgccacgccgttgtagtggagctggagtaggccccggacgcactggaaggccacctcggcgacggctgcctccgggattcgtagccccccgcgccggcgccggcgcaggagactgccgagagatccagcgtccatgtactcgagcacgagcgcggccttgccgccgggctcgcggagcagggcagcaggccgtataagtcgatgacgtgcgtcgccccagcagcgattttgagcacctcggcctccttctctacgacgagcgggtcctggtcgaacgatatcttgatcgcgaagaccgcgctggtgcggcagtggtgtgccttgcagacgctggctatgccgccagcgccgagctcgcagatccaatcgaggtccgacagccgcagcttctctgacgcctccggcacggaggccgtcatcctggcccggtcctggtggcacatctcgtgaggccgcgtcgggatggccatctgacgcgccgtggttcactggaaggagacgagacgagacgagcaggaagcgagatggaatggaactatgggaagaagaagcgggggccgcaggccgggattaagagaaagctgcgatcaccttggccctacatcaccctcttcttcaggcaggtgtagtgtaaagtatgctgatgatgggaaggatgccaatcactgcattcgagtatttcctgaagaatgaggttcaaggcaagattttccttgtgaccctcccaaggaatggttggctaagttcttttctagctttctcttttctgcagcaatttgttcttttcagtaaccattcttgatttatttgtattgagaaccacacattttactagtagatgcaatgataaaaggagataggacgacgtgatttttattagggttttttaaattagtgcactcagttttggttaaactgatggtgtgctcacctatacttacatgtttt

SEQ ID NO: 35800 - DNA, 276 bp, Zea Mays
aaaaccttggctctgttaccatgtttggttaggcgtaatgtcttgcttctcagggctgtgctattcctttatataggcaatgtacagggagaattacatgtctgcatatctggtaggcagtctagctatcgtaggaaataaagtatgcacgagattacaggaatgcggtctagctatctaaggaaggagtgcatgcaggtattccatgtacagataatttacttctatgtttaacagcctccaccgctccacgtcgcgccgcgctatgaacggttg

SEQ ID NO: 35801 - DNA, 1236 bp, Zea Mays
aacaaagtggctttgtttatggccctttccatcgtgctcttgcaaggaaacatgaacttgatggcagcaataaacggagaaggcgcatgactggagagcctttctgctttatttcgaccacaatcccagaaacaaggtgggttcagtacttcaatccttttttgttccttaggacaaaactataatgtttctacttaagcataggaagtatgtgtatagcatgtttttctagctgtggttttatataattaggcttaagctaatagtggcatatggggatgtattttattctttattggaacgtgatgggttttctgcagcgctgatgttttcctttggtttgatagctacaaattttaatacctaatccttggtgctctgcatgagtcgcattcaagataagcaaggtgtagctgctgcctaggttcctcgtccaacgcttgcagctgcatccctctgtcagccaggcggtggtgggtttaaggtttagggttcctatacaactgggatggagcacgggccgagtggctgcctgcgttcccggatctgctcacctatgtgagcatgcaagtgtgggttgagccttcggcgaccaaggacatgatggacaaggtgaagcaggtatgacaacggaggaagaccgagaagtccctgctcagcttgcaacgaaggttggctacgacaagcgcagaagaattgaagaataatggctgtcagaagacatatgcgagcgctggaaaaagtggtgatacatcatctgctaatgcatccatgatgaatatgcagcagattattacgaaattaacaactcagtgtagtgagaaggcttttgagttagagttaaagttagctgataatcgtgtcctccaggagcagctactacagaaggaagctaaaattgaaaagatgaaatatgagcatttgacaagggaggctgctttgaccaagaatgagcttcttgaagaggagtacaagaaaaagttagatgaggcaaataaggaactatctctggagaatgatctagcaggcatgtgagttcttgttgctaagttgaaaagaggggctttagatatatctgatttgagtgttgatgatggaactaaagtttaagggcgtagcgatcgcaacactgttgcctcataattggtgttaatgaaaaataacatggtgctgcacggaacctctactttctcttgtaagaaggattgttatgtcgacataatttgatttgcatgt

SEQ ID NO: 35802 - DNA, 1134 bp, Zea Mays
ctgctgccaaccgaacactatcgtcgcctccacctccgcgtttgggccaccgcaagagttcagggctcctctagggttcgagatcaaatccgaccagcagagcagcatcctcagcaccacgctcgccatccccctctacctcggcaccggcgtcttcgccctcgggtacacaccacaccttttctcaccatctgagcattgccaaggagctcctctccatccccaatggcaccctcgcctcgccaccgacgacgaatgggtgcttcagattcctgatcagcaggagagtcgttgaggctgagacgatgacgcgtatgcggcaaggagcttcagattcactgccattagaaacttaccggtgaggaaggagagggtccaagttcctgacctctgcatggactgagaagttattggccggatgaagggcggaggccattatcagatcctcgtccacctttgggctactgctgataagaggacgagtgtcatacacctatccaattccccccttcaatgtggtcagtgttgaatcatctacgtcatacagtgaacaagggcatactgatgagagaagggatgacatggattttctcattcgagcatcaggttttgtgtgctgattatggtgtggtcgttggtgagactgcgacgtcctctgtaatcatctctctgacaagttagattatgtgctgaaatttctgttatctttgctggattatattgttgtgaaaggggcatagtacgatgaattggggactgaaagagcataacagagcagagggcctatgtaatataattttatatgtataaattgtgcaaaaacaaattacctcttttgggtttcaatcatttgacaacccttggaccctgacattatattagtttgcttaccttgaccttgtgatgagttttggaatatttggaggaggttcacatgacctaacaacctgtttagtagctttgcttcagcacagtaaactatatttagaacatttggatggtaaactatttcaaccgttgttgttatacatacaaaggatttcatttgaaattatcatttatatttagtggtgccacaatcatattttcactagcgtttggcaataatgtcgcgagttagcagtaagaaaccag

SEQ ID NO: 35803 - DNA, 2352 bp, Zea Mays
aagagataatttatgtttagtatttatttatcggtcctaacattccctagtttaactattgttcgtatcagatctatccatgtagctaaacacaccttgacaaggccaacccttttaattccatacctccacacgttaaatttatggtctataatacctgtgtgaattctttagtctgattctgttgcattttgaacagtaattttgtatgctgaagttgacgtatgattaggctcattctctattcggtgctgttccttgcttttcgttgaagttaattacttctgtagtgtttgtttggtgtaagtagaagtttgaattataatgtagtgttgtaggaccatgtgcttactttcttttttccaaatctgaccttggacattattttgttatttataatcaattttgtgatcaagctaattattattatcattcaggcctactgctgctacaggcaaaacaaactgcatgaggctcttgagcttttaagaggccaagaagaaacttcagctgttctccagctggaatcccagatcttttaccgactaggaagaatgaatgattgcatgagtagctatgagaagcttaaaaaatttaaaattgactcaatggatctgaagataaatatcattgctgctctagttgctgctggaagggcttctgaggtacaggcagctatgaaggcgcttaaggttgatcttaccacgagagcactcagggatactcgtagttttgagctcgcatacaattctgcttgctccttgatagaaaacaagaagtactctgaagccaaggagcaattggacttggctaaaagaattgggaaagaagagcttatggtggaagactacggcgaggcggatattgaatatgaattagctcctgtttctgctcagcttgcttatgtgcagcagctacaaggacaatctcaagaagctatgcaaacatatgttaatatgataaatgggcagtcagctgatttatcatcacttgctgtggcaacaacaaatcttatttcaataaaagaaagaagctctgtattctgcacgtgttcttttactgctccatgcaaataaaactgaacaggcacatgagttggtcagggggctgcttggtatgtttccagatagtgtattccctgttttacttcaagccgctgttcatgttaaagaaaagaagattcacaaagctgaagatgttcttagccagtacgctgagaagcgtcctgagaattctaaagggctcctccttgcacttgcccagattgctgctaatgccaaccattttcagcttgctgctgactcactatccagaatacctgacattcagcacatgcctgcaacagttgctacattagtggcccttaaagagcgcctaggtgactccaatgctgcagcttctgtacttgattctgctatcaactggtggaagaattccatgaccgaggataacaaattagatatattaacacgggaggctgctgcatttaagctcagccatggacgtgatgaagaggcttgtttgttgtatgaggaacttgtgaagagccatggaagcatagaagctttggctgggttagtaatgacttcagcgcgcactaacttggagaaggcagaacaatacgagaagaaactgaagccattgccaggcctcaaaggagttaatgttgagagcttggagaagacatctggtgcaaggcatgtggaagggccccaagacatgaaggtagatgttcccgaggaagtgaagaagcaaaaggcaaagaagaggaagcggaagcctagatacccgaaaggcttcgatccagcaaacccggggccgccaccagatcccgagagatggctgccaaggagagagcggtccagttaccgtccaaagaggaaggataagagggctcaggtcagaggtgctcaaggagctgtgtctagggaaacatcggccaccaatgtcggtgcttcctcaaaaggaagccaaaccaccaattcatcaaagacaccggcggtaaatgctgaacagccaaaaactagcaacaaatctaggaagaagaagtccaggcattagatgagaattttatgttacattaccgtacaaaagaatatgttcgtttatcttctggatgacttgcaattttggactggattgcattcaattgcagatttgctttgcttttacactaacgtttgaagcgactgagactattgattttttttttgccaagatgtgattgatgggttgctccagtaacattctattttttatgagttaatagttcttttgattccattcgagaatattggtaactcttattgctcctagcttccgcgttaccttgcccttgtgactgtttactct

SEQ ID NO: 35804 - DNA, 2211 bp, Zea Mays
gggtgctgctctggtactctcttctctctccctgctgacccaagtcccacgcctgcgtctcgtgatgccgccgaaatcgaaggcgtccgccgccgcggagccggtggccgtcgaggacctcttcgcctcgctccaccgccacatcgagttctcaaggcagcgccgggagatgaggacgcggcctactgctgctacaggcaaaacaaactgcatgaggctcttgagcttttaagaggccaagaagaaacttcagctgttctccagctggaatcccagatcttttaccgactaggaagaatgaatgattgcatgagtagctatgagaagcttaaaaaatttaaaattgactcaatggatctgaagataaatatcattgctgctctagttgctgctggaagggcttctgaggtacaggcagctatgaaggcgcttaaggttgatcttaccacgagagcactcagggatactcgtagttttgagctcgcatacaattctgcttgctccttgatagaaaacaagaagtactctgaagccaaggagcaattggacttggctaaaagaattgggaaagaagagcttatggtggaagactacggcgaggcggatattgaatatgaattagctcctgtttctgctcagcttgcttatgtgcagcagctacaaggacaatctcaagaagctatgcaaacatatgttaatatgataaatgggcagtcagctgatttatcatcacttgctgtggcaacaacaaatcttatttcaataaaaggtacaaaagataccgcagatagcttgaagaagctcgatcggcttattggaacaactacagctccaaaccagttgcatcttgttgaaaaccttgactacaagttatccccatggcagaaagaagctctgtattctgcacgtgttcttttactgctccatgcaaataaaactgaacaggcacatgagttggtcagggggctgcttggtatgtttccagatagtgtattccctgttttacttcaagccgctgttcatgttaaagaaaagaagattcacaaagctgaagatgttcttagccagtacgctgagaagcgtcctgagaattctaaagggctcctccttgcacttgcccagattgctgctaatgccaaccattttcagcttgctgctgactcactatccagaatacctgacattcagcacatgcctgcaacagttgctacattagtggcccttaaagagcgcctaggtgactccaatgctgcagcttctgtacttgattctgctatcaactggtggaagaattccatgaccgaggataacaaattagatatattaacacgggaggctgctgcatttaagctcagccatggacgtgatgaagaggcttgtttgttgtatgaggaacttgtgaagagccatggaagcatagaagctttggctgggttagtaatgacttcagcgcgcactaacttggagaaggcagaacaatacgagaagaaactgaagccattgccaggcctcaaaggagttaatgttgagagcttggagaagacatctggtgcaaggcatgtggaagggccccaagacatgaaggtagatgttcccgaggaagtgaagaagcaaaaggcaaagaagaggaagcggaagcctagatacccgaaaggcttcgatccagcaaacccggggccgccaccagatcccgagagatggctgccaaggagagagcggtccagttaccgtccaaagaggaaggataagagggctcaggtcagaggtgctcaaggagctgtgtctagggaaacatcggccaccaatgtcggtgcttcctcaaaaggaagccaaaccaccaattcatcaaagacaccggcggtaaatgctgaacagccaaaaactagcaacaaatctaggaagaagaagtccaggcattagatgagaattttatgttacattaccgtacaaaagaatatgttcgtttatcttctggatgacttgcaattttggactggattgcattcaattgcagatttgctttgcttttacactaacgtttgaagcgactgagactattgattttttttttgccaagatgtgattgatgggttgctccagtaacattctattttttatgagttaatagttcttttgattccattcgagaatattggtaactcttattgctcctagcttccgcgttaccttgcccttgtgactgtttactct

SEQ ID NO: 35805 - DNA, 2157 bp, Zea Mays
ctattttcttgcagcgcgtgctgggtgctgctctggtactctcttctctctccctgctgacccaagtcccacgcctgcgtctcgtgatgccgccgaaatcgaaggcgtccgccgccgcggagccggtggccgtcgaggacctcttcgcctcgctccaccgccacatcgaggcaggtgctttcaaacaggccgccaaggtcgccgaccaagttctcaaggcagcgccgggagatgaggacgcggcctactgctgctacaggcaaaacaaactgcatgaggctcttgagcttttaagaggccaagaagaaacttcagctgttctccagctggaatcccagatcttttaccgactaggaagaatgaatgattgcatgagtagctatgagaagcttaaaaaatttaaaattgactcaatggatctgaagataaatatcattgctgctctagttgctgctggaagggcttctgaggtacaggcagctatgaaggcgcttaaggttgatcttaccacgagagcactcagggatactcgtagttttgagctcgcatacaattctgcttgctccttgatagaaaacaagaagtactctgaagccaaggagcaattggacttggctaaaagaattgggaaagaagagcttatggtggaagactacggcgaggcggatattgaatatgaattagctcctgtttctgctcagcttgcttatgtgcagcagctacaaggacaatctcaagaagctatgcaaacatatgttaatatgataaatgggcagtcagctgatttatcatcacttgctgtggcaacaacaaatcttatttcaataaaagaaagaagctctgtattctgcacgtgttcttttactgctccatgcaaataaaactgaacaggcacatgagttggtcagggggctgcttggtatgtttccagatagtgtattccctgttttacttcaagccgctgttcatgttaaagaaaagaagattcacaaagctgaagatgttcttagccagtacgctgagaagcgtcctgagaattctaaagggctcctccttgcacttgcccagattgctgctaatgccaaccattttcagcttgctgctgactcactatccagaatacctgacattcagcacatgcctgcaacagttgctacattagtggcccttaaagagcgcctaggtgactccaatgctgcagcttctgtacttgattctgctatcaactggtggaagaattccatgaccgaggataacaaattagatatattaacacgggaggctgctgcatttaagctcagccatggacgtgatgaagaggcttgtttgttgtatgaggaacttgtgaagagccatggaagcatagaagctttggctgggttagtaatgacttcagcgcgcactaacttggagaaggcagaacaatacgagaagaaactgaagccattgccaggcctcaaaggagttaatgttgagagcttggagaagacatctggtgcaaggcatgtggaagggccccaagacatgaaggtagatgttcccgaggaagtgaagaagcaaaaggcaaagaagaggaagcggaagcctagatacccgaaaggcttcgatccagcaaacccggggccgccaccagatcccgagagatggctgccaaggagagagcggtccagttaccgtccaaagaggaaggataagagggctcaggtcagaggtgctcaaggagctgtgtctagggaaacatcggccaccaatgtcggtgcttcctcaaaaggaagccaaaccaccaattcatcaaagacaccggcggtaaatgctgaacagccaaaaactagcaacaaatctaggaagaagaagtccaggcattagatgagaattttatgttacattaccgtacaaaagaatatgttcgtttatcttctggatgacttgcaattttggactggattgcattcaattgcagatttgctttgcttttacactaacgtttgaagcgactgagactattgattttttttttgccaagatgtgattgatgggttgctccagtaacattctattttttatgagttaatagttcttttgattccattcgagaatattggtaactcttattgctcctagcttccgcgttaccttgcccttgtgactgtttactct

SEQ ID NO: 35806 - DNA, 583 bp, Zea Mays
attgtccatgatgcagcatgattatatcatcgtcttagaagatgctgcagtacatggagcagctgttcttggtgtgcctgttaaagctacaataaaggaggccaatagtgattcttttgtcataaaaactcttgaccggaaaactctatgggaaatgcaaactccacaggtcatgaagccaaatttactcaaagatggttttgagcttgttaaacgggataaccatgaagtcactgatgatgtatccattgtagaatatctaaaacaccctgtctatatcacggaaggctcctatacaaacattaaggtcactactcctgaagacttgctactggctgagcgcctgatgaatgagaaatagagctgacatgcaaaattaactgtttgcttgattttatagacatacgattttgtagcagtacagcattcacccgcacttctacaggttttgaaaaccctcatgcacgagataactgactgctttgtaaactttctgtcattctttctagatatatcaataaaaaatggaacaattgtataattgactttgctcacgactcttaactccacaattgcatagttg

SEQ ID NO: 35807 - DNA, 1270 bp, Zea Mays
ggcgatactgcagtctccgcgtccattccggccgggcgtccagacgtccaccctttctcgcttctcagaccatcgtcaccatccctcccctcggcctcgcgttcgcagcggtcagcgcctccgagatggagctccacctctgcctccgtctccacgtgcgcctcactcctgccgcgaagccaccgccggcgcccgcggtgcttccagttccagcctcccgccgccttcggatgggtggaagctacggggttgctcttaggcggcacacaaggcgttcgaatcgggcaatccacacttccctagccgacggcgagcagggtgtcgctgtcgacgctgtgaaggagaggagcgtctcggtgatcctgttgtctggaggccagggaaagagaatgggggcaagtatgccaaagcagtatctacctctactgggactaccaattgcattgcacagtttaaaaacattctgtcaactgaaggaagtcaaagaagtcgtggtggtgtgtgatccagactacattgatgtatttgaaggttctattaagaacttgcaactacctcttaaatttgcacgcccgggaaaagagagacaggactccgtttttaatggacttcagagatcctgtgtgttgtttgtttgcaggaaattgatggggattcggaactagtttgtgtccatgattctgcaaggcccttagtttcttctgaagatgtaaaaaaggtcttagaagatgctgcagtacatggagcagctgttcttggtgtgcctgttaaagctacaataaaggaggccaatagtgattcttttgtcataaaaactcttgaccggaaaactctatgggaaatgcaaactccacaggtcatgaagccaaatttactcaaagatggttttgagcttgttaaacgggataaccatgaagtcactgatgatgtatccattgtagaatatctaaaacaccctgtctatatcacggaaggctcctatacaaacattaaggtcactactcctgaagacttgctactggctgagcgcctgatgaatgagaaatagagctgacatgcaaaattaactgtttgcttgattttatagacatacgattttgtagcagtacagcattcacccgcacttctacaggttttgaaaaccctcatgcacgagataactgactgctttgtaaactttctgtcattctttctagatatatcaataaaaaatggaacaattgtataattgactttgctcacgactcttaactccacaattgcatagttg

SEQ ID NO: 35808 - DNA, 1303 bp, Zea Mays
ggcgatactgcagtctccgcgtccattccggccgggcgtccagacgtccaccctttctcgcttctcagaccatcgtcaccatccctcccctcggcctcgcgttcgcagcggtcagcgcctccgagatggagctccacctctgcctccgtctccacgtgcgcctcactcctgccgcgaagccaccgccggcgcccgcggtgcttccagttccagcctcccgccgccttcggatgggtggaagctacggggttgctcttaggcggcacacaaggcgttcgaatcgggcaatccacacttccctagccgacggcgagcagggtgtcgctgtcgacgctgtgaaggagaggagcgtctcggtgatcctgttgtctggaggccagggaaagagaatgggggcaagtatgccaaagcagtatctacctctactgggactaccaattgcattgcacaggaagtcaaagaagtcgtggtggtgtgtgatccagactacattgatgtatttgaaggttctattaagaacttgcaactacctcttaaatttgcacgcccgggaaaagagagacaggactccgtttttaatggacttcaggaaattgatggggattcggaactagtttgtgtccatgattctgcaaggcccttagtttcttctgaagatgtaaaaaaggtcttagaagatgctgcagtacatggagcagctgttcttggtgtgcctgttaaagctacaataaaggaggccaatagtgattcttttgtcataaaaactcttgaccggaaaactctatgggaaatgcaaactccacaggtcatgaagccaaatttactcaaagatggttttgagcttgttaaacggttagctttagctctgagcaaatgaaaattatgatactgttatactgctcagttctctagccgatttaatttttgccatcgcagggataaccatgaagtcactgatgatgtatccattgtagaatatctaaaacaccctgtctatatcacggaaggctcctatacaaacattaaggtcactactcctgaagacttgctactggctgagcgcctgatgaatgagaaatagagctgacatgcaaaattaactgtttgcttgattttatagacatacgattttgtagcagtacagcattcacccgcacttctacaggttttgaaaaccctcatgcacgagataactgactgctttgtaaactttctgtcattctttctagatatatcaataaaaaatggaacaattgtataattgactttgctcacgactcttaactccacaattgcatagttg

SEQ ID NO: 35809 - DNA, 1235 bp, Zea Mays
ggcgatactgcagtctccgcgtccattccggccgggcgtccagacgtccaccctttctcgcttctcagaccatcgtcaccatccctcccctcggcctcgcgttcgcagcggtcagcgcctccgagatggagctccacctctgcctccgtctccacgtgcgcctcactcctgccgcgaagccaccgccggcgcccgcggtgcttccagttccagcctcccgccgccttcggatgggtggaagctacggggttgctcttaggcggcacacaaggcgttcgaatcgggcaatccacacttccctagccgacggcgagcagggtgtcgctgtcgacgctgtgaaggagaggagcgtctcggtgatcctgttgtctggaggccagggaaagagaatgggggcaagtatgccaaagcagtatctacctctactgggactaccaattgcattgcacagtttaaaaacattctgtcaactgaaggaagtcaaagaagtcgtggtggtgtgtgatccagactacattgatgtatttgaaggttctattaagaacttgcaactacctcttaaatttgcacgcccgggaaaagagagacaggactccgtttttaatggacttcaggaaattgatggggattcggaactagtttgtgtccatgattctgcaaggcccttagtttcttctgaagatgtcttagaagatgctgcagtacatggagcagctgttcttggtgtgcctgttaaagctacaataaaggaggccaatagtgattcttttgtcataaaaactcttgaccggaaaactctatgggaaatgcaaactccacaggtcatgaagccaaatttactcaaagatggttttgagcttgttaaacgggataaccatgaagtcactgatgatgtatccattgtagaatatctaaaacaccctgtctatatcacggaaggctcctatacaaacattaaggtcactactcctgaagacttgctactggctgagcgcctgatgaatgagaaatagagctgacatgcaaaattaactgtttgcttgattttatagacatacgattttgtagcagtacagcattcacccgcacttctacaggttttgaaaaccctcatgcacgagataactgactgctttgtaaactttctgtcattctttctagatatatcaataaaaaatggaacaattgtataattgactttgctcacgactcttaactccacaattgcatagttg

SEQ ID NO: 35810 - DNA, 1278 bp, Zea Mays
ggcgatactgcagtctccgcgtccattccggccgggcgtccagacgtccaccctttctcgcttctcagaccatcgtcaccatccctcccctcggcctcgcgttcgcagcggtcagcgcctccgagatggagctccacctctgcctccgtctccacgtgcgcctcactcctgccgcgaagccaccgccggcgcccgcggtgcttccagttccagcctcccgccgccttcggatgggtggaagctacggggttgctcttaggcggcacacaaggcgttcgaatcgggcaatccacacttccctagccgacggcgagcagggtgtcgctgtcgacgctgtgaaggagaggagcgtctcggtgatcctgttgtctggaggccagggaaagagaatgggggcaagtatgccaaagcagtatctacctctactgggactaccaattgcattgcacaggttactctctctagcataaaagatttcgaactcatcaagtcagcaaggttatgtaggcacaggcatgcttacattctgtgtgcagtttaaaaacattctgtcaactgaaggaagtcaaagaagtcgtggtggtgtgtgatccagactacattgatgtatttgaagagagacaggactccgtttttaatggacttcaggaaattgatggggattcggaactagtttgtgtccatgattctgcaaggcccttagtttcttctgaagatgtaaaaaaggtcttagaagatgctgcagtacatggagcagctgttcttggtgtgcctgttaaagctacaataaaggaggccaatagtgattcttttgtcataaaaactcttgaccggaaaactctatgggaaatgcaaactccacaggtcatgaagccaaatttactcaaagatggttttgagcttgttaaacgggataaccatgaagtcactgatgatgtatccattgtagaatatctaaaacaccctgtctatatcacggaaggctcctatacaaacattaaggtcactactcctgaagacttgctactggctgagcgcctgatgaatgagaaatagagctgacatgcaaaattaactgtttgcttgattttatagacatacgattttgtagcagtacagcattcacccgcacttctacaggttttgaaaaccctcatgcacgagataactgactgctttgtaaactttctgtcattctttctagatatatcaataaaaaatggaacaattgtataattgactttgctcacgactcttaactccacaattgcatagttg

SEQ ID NO: 35811 - DNA, 2236 bp, Zea Mays
atcggtttttgtaaatagaaggcatacatcagattgctggttcgatatttgggaaataatggcattcataagatcatatgtggtgcctgaagggtttccagacagtgttactccttcatatgtaccttacatgacctggagggctctgaagcatttctttggtggagcgatgggagtgtttacgacaagaaccttgctgagttctgttggagtctctcaaagcaaggtaacaccaggtgccattgctatcaactggatcctcaaggatggtgctgggcgtgtcgggaaaatgctttttgcacgtcaaggaaagaagtttgactatgacctaaagcagttgcggttttctagtgatctcttgttggaaataggagctgggatagaattaactactgctgcattccctcagtttttcttgcctatggcttgcgtagccaatgttgtaaagaacgtcgctgctgttacatcaacttcaactcgcactccaatctataaggcctatgctagaggagaaaatattggagatgtcactgctaaaggcgaatctgttgggaacattgcagatctgctcggtactggtttgagtatctttatctcaaaaaggaatccctcactggtgacttcgtttgccttcctttcctgtggatatctcctgagttcatatcaagaggtgaggtctgttgtgctgaataccctaaacagggcaaggtttaccgtcgcagtggattccttcattaaaactggtcacattccctccttgaaggaaggaaactcacaggagacgatatttaatccaccttggcggcatgagccagtcgcaataggttcaaggtttggagaagcatttcaagagccagcttcatttcttgccatacgacctctgtttgaggacgagagatacatggtaacatataacccaacaaaggataaagtatatgctttgctcaaggaccaggcaaaatcagacgacattattaaagctgctttccatgctcatgtgctattgcattttattaatgcatcacatgctcggagactgaagcagaagcagaagcaggcaaaccctgaccgatcagagtatctgtactctagaaacatggatttcctggcacacatcgctgaatcttgcaaaatagtttcctcatcatatggaacattcaagaagaaagctagggaacagggttggataatgtcagaatctctgctcaaccctggcaaggctcgattatgtgcagcaaaaccacaatgaatgtactgtttcagtttagtatcgatgagatgataccaatctcatgtttgtaagaccaacttttctaacgagacgggatggctaagttcttaggagctgaactaacatatgttggtgcctagcactaggcgtgaacctttgatctgaagcttgccaaattccaggaagaggaagagttttacgattttggataagtggtgcgctggttcgcgactcgcgagtaaagggctcaacgagggtgacttcaaacttctaactgcagagactagagcttgtatttatgtttgctgcggtatcagatttggtgtagccattcctgatgtaacctgtttcccttccgtgttggtcggctgcggggcttcttgtttggaagtctttggagttgctacgttttttacccgccacttggccgacttgtggcacttgagtgttcatctccttggcttctagaccccgttagagcatcaccagcagctgcgggagatgctcttagcaagttccagtttatcagtgaagagtcaatcactgatgtcgtccatagctccttcaaaccttgtacatacatgatcggtaataactgcaagccttctttctgttgatatggcgtgctggtgtggacctgtagtatggtatccactgctgtgttattgtgtatgctcttttttacaaaaaaaagaagaagttattgttgtgtatttgtgtttgtcagatgagtgagccccaccgttactgatcagtgtgtgtcggtactgattagtgtatttgtgtttcttacatgcatgctgaggaaagtacgccgaagtttctgttatagtctactcagtggtaacgagattgagagagagacaaaatgacagaaccgttgtctttattgcagagtgtcatgtatttatacagggaatataaagtctcccaaggggtgtgtcccttgggataaactgccagttgatcacaggacaatattttgtaacagtttcacaacaaaac

SEQ ID NO: 35812 - DNA, 3257 bp, Zea Mays
caatttatgtcagatgtttttttatgtctgccattattcttccaatggtcgacaaaatatagcgtaatttatcaaccttaaataaatactcagtgtctagagctgcttttggcagtgagatgagtaccattactctctctgtgtttaaaaagttaaatttattttagaacagaggaagtgattaacaaaaacaagacaagctctaaattatattcgatttctttaggaaacatttcacccccaaaaaatttaattcctgtcaagccaaacgggtccataaaagccgctcgtctcctccccatcttggcattgttcgcgtcgtccgccttctctctctctctaacccactgccagccacctctgcgaccgtcgcgaccactcgccaagtaaattttcttccgcccacctgactacgcctcgacctcggcctcggcgccgcctccgtccgccggacgcggcagccatggcgccagcggtggggctcaagcgctccgccacgcagaccatcactctgccgccgcccgacacgcggctggctgtgcgcgatgtcatgcgctccacgatcccgtcgcagcccgccgtggcgccggcgtccacggagaggcaggcgcccgccgcggcgttgcaggggttcctgtgcctggaggaggtggacgggaggcggtggagctacgtggtggacggtggggccgcgaaggggaggagcaggggcggggccgtccccgctggggccgccgtcagggccgtgccgctgcagtcgccgcttccgcctgccgaggaaataatggcattcataagatcatatgtggtgcctgaagggtttccagacagtgttactccttcatatgtaccttacatgacctggagggctctgaagcatttctttggtggagcgatgggagtgtttacgacaagaaccttgctgagttctgttggagtctctcaaagcaaggtaacaccaggtgccattgctatcaactggatcctcaaggtaaaaacattataccatttcaggagctttcctttctcttgttcacaatactagtctgtacaatgtattcaagtcaataatctaactatccagagtgaaaacccttcattaactactgggcttttttgcacacaagatattagccacgttatcattactacatactctgttctgttgtgccatgctttaatgcttaggaatcatgtagatgtcataacctggcttgtaatgtaatatggttatcatcgcacttgtaccacaggatggtgctgggcgtgtcgggaaaatgctttttgcacgtcaaggaaagaagtttgactatgacctaaagcagttgcggttttctagtgatctcttgttggaaataggagctgggatagaattaactactgctgcattccctcagtttttcttgcctatggcttgcgtagccaatgttgtaaagaacgtcgctgctgttacatcaacttcaactcgcactccaatctataaggcctatgctagaggagaaaatattggagatgtcactgctaaaggcgaatctgttgggaacattgcagatctgctcggtactggtttgagtatctttatctcaaaaaggaatccctcactggtgacttcgtttgccttcctttcctgtggatatctcctgagttcatatcaagaggtgaggtctgttgtgctgaataccctaaacagggcaaggtttaccgtcgcagtggattccttcattaaaactggtcacattccctccttgaaggaaggaaactcacaggagacgatatttaatccaccttggcggcatgagccagtcgcaataggttcaaggtttggagaagcatttcaagagccagcttcatttcttgccatacgacctctgtttgaggacgagagatacatggtaacatataacccaacaaaggataaagtatatgctttgctcaaggaccaggcaaaatcagacgacattattaaagctgctttccatgctcatgtgctattgcattttattaatgcatcacatgctcggagactgaagcagaagcagaagcaggcaaaccctgaccgatcagagtatctgtactctagaaacatggatttcctggcacacatcgctgaatcttgcaaaatagtttcctcatcatatggaacattcaagaagaaagctagggaacagggttggataatgtcagaatctctgctcaaccctggcaaggctcgattatgtgcagcaaaaccacaatgaatgtactgtttcagtttagtatcgatgagatgataccaatctcatgtttgtaagaccaacttttctaacgagacgggatggctaagttcttaggagctgaactaacatatgttggtgcctagcactaggcgtgaacctttgatctgaagcttgccaaattccaggaagaggaagagttttacgatttgaagaatgcctgaacatgtaataaaacatgcagtggataagtggtgcgctggttcgcgactcgcgagtaaagggctcaacgagggtgacttcaaacttctaactgcagagactagagcttgtatttatgtttgctgcggtatcagatttggtgtagccattcctgatgtaacctgtttcccttccgtgttggtcggctgcggggcttcttgtttggaagtctttggagttgctacgttttttacccgccacttggccgacttgtggcacttgagtgttcatctccttggcttctagaccccgttagagcatcaccagcagctgcgggagatgctcttagcaagttccagtttatcagtgaagagtcaatcactgatgtcgtccatagctccttcaaaccttgtacatacatgatcggtaataactgcaagccttctttctgttgatatggcgtgctggtgtggacctgtagtatggtatccactgctgtgttattgtgtatgctcttttttacaaaaaaaagaagaagttattgttgtgtatttgtgtttgtcagatgagtgagccccaccgttactgatcagtgtgtgtcggtactgattagtgtatttgtgtttcttacatgcatgctgaggaaagtacgccgaagtttctgttatagtctactcagtggtaacgagattgagagagagacaaaatgacagaaccgttgtctttattgcagagtgtcatgtatttatacagggaatataaagtctcccaaggggtgtgtcccttgggataaactgccagttgatcacaggacaatattttgtaacagtttcacaacaaaac

SEQ ID NO: 35813 - DNA, 1410 bp, Zea Mays
gttgcctttgccccggtttagagcggcatgcaaaagattttgcgcgcatcttctatggcgcctaaccataactttgttgatcctgagagaattgagcatggtagcccattaaggttacctggccacccagtgaatggtcagccgatggatctggagggctggtcagggattcaaacagaggcttctcagcatatgggggttctacaagcatcatcaatgggctggaatggtgctcctgtacttgctgccactcctgttgtcaagaaagtcatgaggctggatgttccagtagacaagtatcctaactacaactttgttggtcgtttattggggccgcgaggtaactccctgaaaagggttgaagcttcaacccaatgtagagtttacattcgaggacggggttctgtgaaagactctgttaaggaagacaagctgagggataaacctgggtatgaacaccttaatgaacaactgcatgtgcttgtggaagcagagtttccagcagatatggttgatgtgcgtcttaatcaagctgtgtccatcctagaggatcttcttaaaccaattgacgagtccatggactactacaagaagcagcagctgagggagctggcgattctaaatggcacactgagagaggaaagcccaagccctcacctcagccctagtgtgtcccccttcaactccaccgggatgaagcgcgcaaaaacagggcggtaatctctgttccgaaagccttcatccccccaaatcaatcatggttcaatgcccaattattacacaagctactgctggagatgattggtgatgcatatgctgggatcatcagtgatggcctatgcctgtcatgatctgtgcgctttatcgacaagcacacaaacatgcctgtgctgtgcttggacgaatggtctccgggcttgttgtttgactctactattatttattctttgtgcttctgactgcctaagtattattaacattattggtttgggaaagttaacaaggcccggttggccagtcgctgtagaaagcttggggagaggaggggggggggggggggtgtcaatgtgacggacaataataaggtttcgttggtgtacctgagatagttgtaatatgtcatgtgctgatgcttttgtgtggtgctagtacaagacaaccagacagctatagttgaggcaatgattattttgcgttcataaaatgcatatcggtgtgctttcttcatggttcatgtaccggaaccagtgtaaaatagttcctccgtcccaaaatgttttagctcttgatttttatgtctgtatttataatatataacacatacatcaagtctttcgtgaatccactatttgtctaaaatggattttattttggcacacagaggaagtatcctgtttgagctggtctgtg

SEQ ID NO: 35814 - DNA, 2632 bp, Zea Mays
cgcaggcgcaggcgcaggcgcaggcgcagggagacctcaatcatctggatttcggcgacatatactactgcagggagagaatccaaagccctccctcctttgggcttgtctctgcctctctctctcctcccttctcccacccacccctctctcttgctgtgggtgtgctgtggagaggagaaaggaagtagagcaagaacaagaactaataacaccaacaagagctgctgccaactcctgcacagcctgggctctcatcactgattgcccacctattaccttcctcttttgcgatttagaatcacccatatatctacctgctctcggtcctctgtgaactctctcgtcttctaggtttcccaggcctcaagataggcctctggaccaaagcttgaaagcagctgctgttcttgcctctttttttaattcttcatttcgtggttcctggatttttgggttcttaggtttcttgtatcttcccccaaccttgcaaaatcttgtggtgaagtttcttgcgttcgctgtttcgggaccatggacgaaaggattccgccgccgtccctcttgcaatactcgcagtcccctgctcattcttccccccatcccctcaattctatgaggtattcttcctctgaaagagaaaggtgagtgttgttcttgatttttttttatttcttttgtcactattgttctccctgttgttcttggtgagttttgttttgtttttgatcctgccctttcggaatccttctgaggagcacgagatttgatgctgcggtggagatttccgcttaattctaaacttccggatgccatgtttccccttgatcaatgctgccgattgttatggaggagtgatctgtaatcgtagggacttcttttgtgatggctcgctgatagatttgttactgctgtcctaaacggagctgtatggttgactcgctgctaatgggtgtaaactttgtgtgtaacaaatcgctcattggcgatagtcacatgtaaattttaatttgatggatcgttctgtatatatcatatcaaagtttccttttacatttcatttctgcgggattatagctgctttagttttagatcctccaaattatgtttcttcttttgtatcacatggataataaatttagcattggctactgttatcctaacgttgattcttgtttggcagatatctggctgagttgcttgcagagaggcagaaattggccccatttgtgcaagttcttcctttctgtaccaggctcttgaaccaagagattttgcgcgcatcttctatggcgcctaaccataactttgttgatcctgagagaattgagcatggtagcccattaaggttacctggccacccagtgaatggtcagccgatggatctggagggctggtcagggattcaaacagagcatatgggggttctacaagcatcatcaatgggctggaatggtgctcctgtacttgctgccactcctgttgtcaagaaagtcatgaggctggatgttccagtagacaagtatcctaactacaactttgttggtcgtttattggggccgcgaggtaactccctgaaaagggttgaagcttcaacccaatgtagagtttacattcgaggacggggttctgtgaaagactctgttaagacaagctgagggataaacctgggtatgaacaccttaatgaacaactgcatgtgcttgtggaagcagagtttccagcagatatggttgatgtgcgtcttaatcaagctgtgtccatcctagaggatcttcttaaaccaattgacgagtccatggactactacaagaagcagcagctgagggagctggcgattctaaatggcacactgagagaggaaagcccaagccctcacctcagccctagtgtgtcccccttcaactccaccgggatgaagcgcgcaaaaacagggcggtaatctctgttccgaaagccttcatccccccaaatcaatcatggttcaatgcccaattattacacaagctactgctggagatgattggtgatgcatatgctgggatcatcagtgatggcctatgcctgtcatgatctgtgcgctttatcgacaagcacacaaacatgcctgtgctgtgcttggacgaatggtctccgggcttgttgtttgactctactattatttattctttgtgcttctgactgcctaagtattattaacattattggtttgggaaagttaacaaggcccggttggccagtcgctgtagaaagcttggggagaggaggggggggggggggggtgtcaatgtgacggacaataataaggtttcgttggtgtacctgagatagttgtaatatgtcatgtgctgatgcttttgtgtggtgctagtacaagacaaccagacagctatagttgaggcaatgattattttgcgttcataaaatgcatatcggtgtgctttcttcatggttcatgtaccggaaccagtgtaaaatagttcctccgtcccaaaatgttttagctcttgatttttatgtctgtatttataatatataacacatacatcaagtctttcgtgaatccactatttgtctaaaatggattttattttggcacacagaggaagtatcctgtttgagctggtctgtg

SEQ ID NO: 35815 - DNA, 2571 bp, Zea Mays
ccaggcgcaggcgcaggcgcaggcgcaggcgcagggagacctcaatcatctggatttcggcgacatatactactgcagggagagaatccaaagccctccctcctttgggcttgtctctgcctctctctctcctcccttctcccacccacccctctctcttgctgtgggtgtgctgtggagaggagaaaggaagtagagcaagaacaagaactaataacaccaacaagagctgctgccaactcctgcacagcctgggctctcatcactgattgcccacctattaccttcctcttttgcgatttagaatcacccatatatctacctgctctcggtcctctgtgaactctctcgtcttctaggtttcccaggcctcaagataggcctctggaccaaagcttgaaagcagctgctgttcttgcctctttttttaattcttcatttcgtggttcctggatttttgggttcttaggtttcttgtatcttcccccaaccttgcaaaatcttgtggtgaagtttcttgcgttcgctgtttcgggaccatggacgaaaggattccgccgccgtccctcttgcaatactcgcagtcccctgctcattcttccccccatcccctcaattctatgaggtattcttcctctgaaagagaaaggtgagtgttgttcttgatttttttttatttcttttgtcactattgttctccctgttgttcttggtgagttttgttttgtttttgatcctgccctttcggaatccttctgaggagcacgagatttgatgctgcggtggagatttccgcttaattctaaacttccggatgccatgtttccccttgatcaatgctgccgattgttatggaggagtgatctgtaatcgtagggacttcttttgtgatggctcgctgatagatttgttactgctgtcctaaacggagctgtatggttgactcgctgctaatgggtgtaaactttgtgtgtaacaaatcgctcattggcgatagtcacatgtaaattttaatttgatggatcgttctgtatatatcatatcaaagtttccttttacatttcatttctgcgggattatagctgctttagttttagatcctccaaattatgtttcttcttttgtatcacatggataataaatttagcattggctactgttatcctaacgttgattcttgtttggcagatatctggctgagttgcttgcagagaggcagaaattggccccatttgtgcaagttcttcctttctgtaccaggctcttgaaccaagagattttgcgcgcatcttctatggcgcctaaccataactttgttgatcctgagagaattgagcatggtagcccattaaggttacctggccacccagtgaatggtcagccgatggatctggagggctggtcagggattcaaacagagcatatgggggttctacaagcatcatcaatgggctggaatggtgctcctgtacttgctgccactcctgttgtcaagaaagtcatgaggctggatgttccagtagacaagtatcctaactacaactttgttggtcgtttattggggccgcgaggtaactccctgaaaagggttgaagcttcaacccaatgtagagtttacattcgaggacggggttctgtgaaagactctgttaagagtttccagcagatatggttgatgtgcgtcttaatcaagctgtgtccatcctagaggatcttcttaaaccaattgacgagtccatggactactacaagaagcagcagctgagggagctggcgattctaaatggcacactgagagaggaaagcccaagccctcacctcagccctagtgtgtcccccttcaactccaccgggatgaagcgcgcaaaaacagggcggtaatctctgttccgaaagccttcatccccccaaatcaatcatggttcaatgcccaattattacacaagctactgctggagatgattggtgatgcatatgctgggatcatcagtgatggcctatgcctgtcatgatctgtgcgctttatcgacaagcacacaaacatgcctgtgctgtgcttggacgaatggtctccgggcttgttgtttgactctactattatttattctttgtgcttctgactgcctaagtattattaacattattggtttgggaaagttaacaaggcccggttggccagtcgctgtagaaagcttggggagaggaggggggggggggggggtgtcaatgtgacggacaataataaggtttcgttggtgtacctgagatagttgtaatatgtcatgtgctgatgcttttgtgtggtgctagtacaagacaaccagacagctatagttgaggcaatgattattttgcgttcataaaatgcatatcggtgtgctttcttcatggttcatgtaccggaaccagtgtaaaatagttcctccgtcccaaaatgttttagctcttgatttttatgtctgtatttataatatataacacatacatcaagtctttcgtgaatccactatttgtctaaaatggattttattttggcacacagaggaagtatcctgtttgagctggtctgtg

SEQ ID NO: 35816 - DNA, 2599 bp, Zea Mays
gaaaattacagagcaaactccaggcgcaggcgcaggcgcaggcgcaggcgcagggagacctcaatcatctggatttcggcgacatatactactgcagggagagaatccaaagccctccctcctttgggcttgtctctgcctctctctctcctcccttctcccacccacccctctctcttgctgtgggtgtgctgtggagaggagaaaggaagtagagcaagaacaagaactaataacaccaacaagagctgctgccaactcctgcacagcctgggctctcatcactgattgcccacctattaccttcctcttttgcgatttagaatcacccatatatctacctgctctcggtcctctgtgaactctctcgtcttctaggtttcccaggcctcaagataggcctctggaccaaagcttgaaagcagctgctgttcttgcctctttttttaattcttcatttcgtggttcctggatttttgggttcttaggtttcttgtatcttcccccaaccttgcaaaatcttgtggtgaagtttcttgcgttcgctgtttcgggaccatggacgaaaggattccgccgccgtccctcttgcaatactcgcagtcccctgctcattcttccccccatcccctcaattctatgaggtattcttcctctgaaagagaaaggtgagtgttgttcttgatttttttttatttcttttgtcactattgttctccctgttgttcttggtgagttttgttttgtttttgatcctgccctttcggaatccttctgaggagcacgagatttgatgctgcggtggagatttccgcttaattctaaacttccggatgccatgtttccccttgatcaatgctgccgattgttatggaggagtgatctgtaatcgtagggacttcttttgtgatggctcgctgatagatttgttactgctgtcctaaacggagctgtatggttgactcgctgctaatgggtgtaaactttgtgtgtaacaaatcgctcattggcgatagtcacatgtaaattttaatttgatggatcgttctgtatatatcatatcaaagtttccttttacatttcatttctgcgggattatagctgctttagttttagatcctccaaattatgtttcttcttttgtatcacatggataataaatttagcattggctactgttatcctaacgttgattcttgtttggcagatatctggctgagttgcttgcagagaggcagaaattggccccatttgtgcaagttcttcctttctgtaccaggctcttgaaccaagagattttgcgcgcatcttctatggcgcctaaccataactttgttgatcctgagagaattgagcatggtagcccattaaggttacctggccacccagtgaatggtcagccgatggatctggagggctggtcagggattcaaacagaggcttctcagcatatgggggttctacaagcatcatcaatgggctggaatggtgctcctgtacttgctgccactcctgttgtcaagaaagtcatgaggctggatgttccagtagacaagtatcctaactacaactttgttggtcgtttattggggccgcgaggtaactccctgaaaagggttgaagcttcaacccaatgtagagtttacattcgaggacggggttctgtgaaagactctgttaagagtttccagcagatatggttgatgtgcgtcttaatcaagctgtgtccatcctagaggatcttcttaaaccaattgacgagtccatggactactacaagaagcagcagctgagggagctggcgattctaaatggcacactgagagaggaaagcccaagccctcacctcagccctagtgtgtcccccttcaactccaccgggatgaagcgcgcaaaaacagggcggtaatctctgttccgaaagccttcatccccccaaatcaatcatggttcaatgcccaattattacacaagctactgctggagatgattggtgatgcatatgctgggatcatcagtgatggcctatgcctgtcatgatctgtgcgctttatcgacaagcacacaaacatgcctgtgctgtgcttggacgaatggtctccgggcttgttgtttgactctactattatttattctttgtgcttctgactgcctaagtattattaacattattggtttgggaaagttaacaaggcccggttggccagtcgctgtagaaagcttggggagaggaggggggggggggggggtgtcaatgtgacggacaataataaggtttcgttggtgtacctgagatagttgtaatatgtcatgtgctgatgcttttgtgtggtgctagtacaagacaaccagacagctatagttgaggcaatgattattttgcgttcataaaatgcatatcggtgtgctttcttcatggttcatgtaccggaaccagtgtaaaatagttcctccgtcccaaaatgttttagctcttgatttttatgtctgtatttataatatataacacatacatcaagtctttcgtgaatccactatttgtctaaaatggattttattttggcacacagaggaagtatcctgtttgagctggtctgtg

SEQ ID NO: 35817 - DNA, 2674 bp, Zea Mays
aatgaatgagaggagaaaattacagagcaaactccaggcgcaggcgcaggcgcaggcgcaggcgcagggagacctcaatcatctggatttcggcgacatatactactgcagggagagaatccaaagccctccctcctttgggcttgtctctgcctctctctctcctcccttctcccacccacccctctctcttgctgtgggtgtgctgtggagaggagaaaggaagtagagcaagaacaagaactaataacaccaacaagagctgctgccaactcctgcacagcctgggctctcatcactgattgcccacctattaccttcctcttttgcgatttagaatcacccatatatctacctgctctcggtcctctgtgaactctctcgtcttctaggtttcccaggcctcaagataggcctctggaccaaagcttgaaagcagctgctgttcttgcctctttttttaattcttcatttcgtggttcctggatttttgggttcttaggtttcttgtatcttcccccaaccttgcaaaatcttgtggtgaagtttcttgcgttcgctgtttcgggaccatggacgaaaggattccgccgccgtccctcttgcaatactcgcagtcccctgctcattcttccccccatcccctcaattctatgaggtattcttcctctgaaagagaaaggtgagtgttgttcttgatttttttttatttcttttgtcactattgttctccctgttgttcttggtgagttttgttttgtttttgatcctgccctttcggaatccttctgaggagcacgagatttgatgctgcggtggagatttccgcttaattctaaacttccggatgccatgtttccccttgatcaatgctgccgattgttatggaggagtgatctgtaatcgtagggacttcttttgtgatggctcgctgatagatttgttactgctgtcctaaacggagctgtatggttgactcgctgctaatgggtgtaaactttgtgtgtaacaaatcgctcattggcgatagtcacatgtaaattttaatttgatggatcgttctgtatatatcatatcaaagtttccttttacatttcatttctgcgggattatagctgctttagttttagatcctccaaattatgtttcttcttttgtatcacatggataataaatttagcattggctactgttatcctaacgttgattcttgtttggcagatatctggctgagttgcttgcagagaggcagaaattggccccatttgtgcaagttcttcctttctgtaccaggctcttgaaccaagagattttgcgcgcatcttctatggcgcctaaccataactttgttgatcctgagagaattgagcatggtagcccattaaggttacctggccacccagtgaatggtcagccgatggatctggagggctggtcagggattcaaacagagcatatgggggttctacaagcatcatcaatgggctggaatggtgctcctgtacttgctgccactcctgttgtcaagaaagtcatgaggctggatgttccagtagacaagtatcctaactacaactttgttggtcgtttattggggccgcgaggtaactccctgaaaagggttgaagcttcaacccaatgtagagtttacattcgaggacggggttctgtgaaagactctgttaaggaagacaagctgagggataaacctgggtatgaacaccttaatgaacaactgcatgtgcttgtggaagcagagtttccagcagatatggttgatgtgcgtcttaatcaagctgtgtccatcctagaggatcttcttaaaccaattgacgagtccatggactactacaagaagcagcagctgagggagctggcgattctaaatggcacactgagagaggaaagcccaagccctcacctcagccctagtgtgtcccccttcaactccaccgggatgaagcgcgcaaaaacagggcggtaatctctgttccgaaagccttcatccccccaaatcaatcatggttcaatgcccaattattacacaagctactgctggagatgattggtgatgcatatgctgggatcatcagtgatggcctatgcctgtcatgatctgtgcgctttatcgacaagcacacaaacatgcctgtgctgtgcttggacgaatggtctccgggcttgttgtttgactctactattatttattctttgtgcttctgactgcctaagtattattaacattattggtttgggaaagttaacaaggcccggttggccagtcgctgtagaaagcttggggagaggaggggggggggggggggtgtcaatgtgacggacaataataaggtttcgttggtgtacctgagatagttgtaatatgtcatgtgctgatgcttttgtgtggtgctagtacaagacaaccagacagctatagttgaggcaatgattattttgcgttcataaaatgcatatcggtgtgctttcttcatggttcatgtaccggaaccagtgtaaaatagttcctccgtcccaaaatgttttagctcttgatttttatgtctgtatttataatatataacacatacatcaagtctttcgtgaatccactatttgtctaaaatggattttattttggcacacagaggaagtatcctgtttgagctggtctgtg

SEQ ID NO: 35818 - DNA, 2692 bp, Zea Mays
cttgaacgaaatgaatgagaggagaaaattacagagcaaactccaggcgcaggcgcaggcgcaggcgcaggcgcagggagacctcaatcatctggatttcggcgacatatactactgcagggagagaatccaaagccctccctcctttgggcttgtctctgcctctctctctcctcccttctcccacccacccctctctcttgctgtgggtgtgctgtggagaggagaaaggaagtagagcaagaacaagaactaataacaccaacaagagctgctgccaactcctgcacagcctgggctctcatcactgattgcccacctattaccttcctcttttgcgatttagaatcacccatatatctacctgctctcggtcctctgtgaactctctcgtcttctaggtttcccaggcctcaagataggcctctggaccaaagcttgaaagcagctgctgttcttgcctctttttttaattcttcatttcgtggttcctggatttttgggttcttaggtttcttgtatcttcccccaaccttgcaaaatcttgtggtgaagtttcttgcgttcgctgtttcgggaccatggacgaaaggattccgccgccgtccctcttgcaatactcgcagtcccctgctcattcttccccccatcccctcaattctatgaggtattcttcctctgaaagagaaaggtgagtgttgttcttgatttttttttatttcttttgtcactattgttctccctgttgttcttggtgagttttgttttgtttttgatcctgccctttcggaatccttctgaggagcacgagatttgatgctgcggtggagatttccgcttaattctaaacttccggatgccatgtttccccttgatcaatgctgccgattgttatggaggagtgatctgtaatcgtagggacttcttttgtgatggctcgctgatagatttgttactgctgtcctaaacggagctgtatggttgactcgctgctaatgggtgtaaactttgtgtgtaacaaatcgctcattggcgatagtcacatgtaaattttaatttgatggatcgttctgtatatatcatatcaaagtttccttttacatttcatttctgcgggattatagctgctttagttttagatcctccaaattatgtttcttcttttgtatcacatggataataaatttagcattggctactgttatcctaacgttgattcttgtttggcagatatctggctgagttgcttgcagagaggcagaaattggccccatttgtgcaagttcttcctttctgtaccaggctcttgaaccaagagattttgcgcgcatcttctatggcgcctaaccataactttgttgatcctgagagaattgagcatggtagcccattaaggttacctggccacccagtgaatggtcagccgatggatctggagggctggtcagggattcaaacagaggcttctcagcatatgggggttctacaagcatcatcaatgggctggaatggtgctcctgtacttgctgccactcctgttgtcaagaaagtcatgaggctggatgttccagtagacaagtatcctaactacaactttgttggtcgtttattggggccgcgaggtaactccctgaaaagggttgaagcttcaacccaatgtagagtttacattcgaggacggggttctgtgaaagactctgttaaggaagacaagctgagggataaacctgggtatgaacaccttaatgaacaactgcatgtgcttgtggaagcagagtttccagcagatatggttgatgtgcgtcttaatcaagctgtgtccatcctagaggatcttcttaaaccaattgacgagtccatggactactacaagaagcagcagctgagggagctggcgattctaaatggcacactgagagaggaaagcccaagccctcacctcagccctagtgtgtcccccttcaactccaccgggatgaagcgcgcaaaaacagggcggtaatctctgttccgaaagccttcatccccccaaatcaatcatggttcaatgcccaattattacacaagctactgctggagatgattggtgatgcatatgctgggatcatcagtgatggcctatgcctgtcatgatctgtgcgctttatcgacaagcacacaaacatgcctgtgctgtgcttggacgaatggtctccgggcttgttgtttgactctactattatttattctttgtgcttctgactgcctaagtattattaacattattggtttgggaaagttaacaaggcccggttggccagtcgctgtagaaagcttggggagaggaggggggggggggggggtgtcaatgtgacggacaataataaggtttcgttggtgtacctgagatagttgtaatatgtcatgtgctgatgcttttgtgtggtgctagtacaagacaaccagacagctatagttgaggcaatgattattttgcgttcataaaatgcatatcggtgtgctttcttcatggttcatgtaccggaaccagtgtaaaatagttcctccgtcccaaaatgttttagctcttgatttttatgtctgtatttataatatataacacatacatcaagtctttcgtgaatccactatttgtctaaaatggattttattttggcacacagaggaagtatcctgtttgagctggtctgtg

SEQ ID NO: 35819 - DNA, 1503 bp, Zea Mays
gctactccccttctttaaaaggaaaccacgctgcacccgaggcttctccatgcagttgctctatctttttcctcaccccggcccgttccatcaccctcacggcaagccctgatcacatcatcctgcttgtctctccccaacctagctccatctctctttcatctactcttccatcgatcgatccatcgtactgcgtgaggatggggaggggaaagattgagatcaagaggatcgagaacaccaccagccgccaggtgaccttctgcaagcgcaggaatgggctgctgaagaaggcctacgagctctccatcctctgcgacgctgagatcgctttgatcgtcttctctacccgaggccgcctatatgaatattccagtaacagcgtaaggtcgacgatcgagaggtacaagaaagcctctgccagcacttctggaacagctccagtgacagatgtcaactctcttcaagaagcggcaaaactgcgccagcagatacaaaccttgcagaattcaaacaggcacctgatgggtgaatctactggcaatatgactgcaaaggagctaaagggccttgaaagcaggcttgaaagaggcattgggaggatccggtccaaaaagcatgagctgctgctcgcggagatcgaatatatgcagaagagggaagcagatctgcacaatgaaaacatgttcctgcgggccaaggttgcggaggctgagcgagctctggagcaggaggcggcagaagaccagacgatgatggtgccggcggcggtccgcggggctacgacggagctgaaagcgttgccggcgtcgttcgacgcgagtggctactaccagtaccagcagcatcagcatgtggtggccgccgcctccgctgcctcctcgtcgcagtacgcggagcagccccagggtcagcaggagtaccaccaccagactgccctccacctcggctaccacgttaagatcgattccgccgccgacaaaggcttcctctaggcgctcgcgcgcatgcatgcgtgaagcgtctcatctcataatctgacgtacggacgatgggtgccggacagctaaggtaaggcacattgtcatcgcctgaccatggagtggagtggttgttgctatatgtgcttctatatagagagaaaataaggggtagatccgcgagtacctatgtacgcaagctgtatcaaacaatattgtcatgagatatatagattgactatatatgtagtatggtgtggatggatgaatctaaagtcttaaaagacgctcggttttgggtgcctctccgtgttcggtgggctacacgccatccatcacacggcgcgcgtccttcgtgggtccatgcacacggacgcaaaaccttgctttcgacagatgcgaaatttctagacacaccaccacacatgtccacacccctctcctcttggacttctctctcccatgacgtccctcttggcctcccgagcgccaccaccgtgagtctttcgctcctgtctccctc

SEQ ID NO: 35820 - DNA, 1470 bp, Zea Mays
aatgtgcttatgtgcacgccatgacccatgagtgaggagcagcacacagccactagctactccccttctttaaaaggaaaccacgctgcacccgaggcttctccatgcagttgctctatctttttcctcaccccggcccgttccatcaccctcacggcaagccctgatcacatcatcctgcttgtctctccccaacctagctccatctctctttcatctactcttccatcgatcgatccatcgtactgcgtgaggatggggaggggaaagattgagatcaagaggatcgagaacaccaccagccgccaggtgaccttctgcaagcgcaggaatgggctgctgaagaaggcctacgagctctccatcctctgcgacgctgagatcgctttgatcgtcttctctacccgaggccgcctatatgaatattccagtaacagcgtaaggtcgacgatcgagaggtacaagaaagcctctgccagcacttctggaacagctccagtgacagatgtcaactctcttcaatactttcagcaagaagcggcaaaactgcgccagcagatacaaaccttgcagaattcaaacagcatgagctgctgctcgcggagatcgaatatatgcagaagagggaagcagatctgcacaatgaaaacatgttcctgcgggccaaggttgcggaggctgagcgagctctggagcaggaggcggcagaagaccagacgatgatggtgccggcggcggtccgcggggctacgacggagctgaaagcgttgccggcgtcgttcgacgcgagtggctactaccagtaccagcagcatcagcatgtggtggccgccgcctccgctgcctcctcgtcgcagtacgcggagcagccccagggtcagcaggagtaccaccaccagactgccctccacctcggctaccacgttaagatcgattccgccgccgacaaaggcttcctctaggcgctcgcgcgcatgcatgcgtgaagcgtctcatctcataatctgacgtacggacgatgggtgccggacagctaaggtaaggcacattgtcatcgcctgaccatggagtggagtggttgttgctatatgtgcttctatatagagagaaaataaggggtagatccgcgagtacctatgtacgcaagctgtatcaaacaatattgtcatgagatatatagattgactatatatgtagtatggtgtggatggatgaatctaaagtcttaaaagacgctcggttttgggtgcctctccgtgttcggtgggctacacgccatccatcacacggcgcgcgtccttcgtgggtccatgcacacggacgcaaaaccttgctttcgacagatgcgaaatttctagacacaccaccacacatgtccacacccctctcctcttggacttctctctcccatgacgtccctcttggcctcccgagcgccaccaccgtgagtctttcgctcctgtctccctc

SEQ ID NO: 35821 - DNA, 1379 bp, Zea Mays
gtcaagagatacactgaaatttggcttgaggcgcgctgttctgcaaaaacactactgcgtgaggatggggaggggaaagattgagatcaagaggatcgagaacaccaccagccgccaggtgaccttctgcaagcgcaggaatgggctgctgaagaaggcctacgagctctccatcctctgcgacgctgagatcgctttgatcgtcttctctacccgaggccgcctatatgaatattccagtaacagcgtaaggtcgacgatcgagaggtacaagaaagcctctgccagcacttctggaacagctccagtgacagatgtcaactctcttcaatactttcagcaagaagcggcaaaactgcgccagcagatacaaaccttgcagaattcaaacaggcacctgatgggtgaatctactggcaatatgactgcaaaggagctaaagggccttgaaagcaggcttgaaagaggcattgggaggatccggtccaaaaagcatgagctgctgctcgcggagatcgaatatatgcagaagagggaagcagatctgcacaatgaaaacatgttcctgcgggccaaggttgcggaggctgagcgagctctggagcaggaggcggcagaagaccagacgatgatggtgccggcggcggtccgcggggctacgacggagctgaaagcgttgccggcgtcgttcgacgcgagtggctactaccagtaccagcagcatcagcatgtggtggccgccgcctccgctgcctcctcgtcgcagtacgcggagcagccccagggtcagcaggagtaccaccaccagactgccctccacctcggctaccacgttaagatcgattccgccgccgacaaaggcttcctctaggcgctcgcgcgcatgcatgcgtgaagcgtctcatctcataatctgacgtacggacgatgggtgccggacagctaaggtaaggcacattgtcatcgcctgaccatggagtggagtggttgttgctatatgtgcttctatatagagagaaaataaggggtagatccgcgagtacctatgtacgcaagctgtatcaaacaatattgtcatgagatatatagattgactatatatgtagtatggtgtggatggatgaatctaaagtcttaaaagacgctcggttttgggtgcctctccgtgttcggtgggctacacgccatccatcacacggcgcgcgtccttcgtgggtccatgcacacggacgcaaaaccttgctttcgacagatgcgaaatttctagacacaccaccacacatgtccacacccctctcctcttggacttctctctcccatgacgtccctcttggcctcccgagcgccaccaccgtgagtctttcgctcctgtctccctc

SEQ ID NO: 35822 - DNA, 2392 bp, Zea Mays
agcaccagtttggctcgtctcggcctcggcgcgtgcccccgacccgttgctgaccccgctccccggtgatctgatgtcggcggcggcacgcgcgccaccgccgccgcgcgcactctacgcgccgtcgagaagagtccctttcggtgccgtgatcctatccgcgccgcgacccggggctagggttcgcgcggcgcggcctcgcgaggggaatgttcataaccattgcctgctgacatcgtctagtctgaattcaagttctttgctatgtcctccatgcaattgtgctcaaatggctttggccgacacaagaattgcttaccagcctgaagtcgacaagcatgctggagttctggcctatgaactggttcaagggaatcttgttcagtggaattcatttatggacaaatcaatacctgatccaccaacagctgttcttcttcatggcatccttgggagcaggaaaaactggggatcttttgcgaagagattggctcaggaattcccaatgtggcagttcctcttggttgatttgcgctgccatggcgactcaacatcaattaagaagagtggaccacacactgttgcctcaactgctcttgatgttctaaagctgataatgcagctcaggctaacccctcgggttttggttggtcacagctttggtggaaaagtggccttgagtatggtagaacaagctgcaaaaccacttgctcgtcctgttagagtatgggttcttgatgctactcctggcaaagttcgggccgggggagatggtgaagatcaccctgctgaacttattgaatttctcagaagaatgcctgagcaggtttcttcaaaacaggaggttgttgatgctcttgttaaaggacaattttctatggacgttgcacggtgggtggctacaaatctacgtcgaaccagtccattgggtcagcgaccatcttcaagcttctcatggacttttgatctaaatggcatctctgagatgtacaagtcttatgaggatactaacttatggaggattgtagagaatgtaccaaggggtgttcatattaattttctaaaagctgaacgaagtttgcatagatgggctctcgaagacctccaaagaatttatactgcggaggaattagctgcagatgagggtggaggagttgaaatgcacgtgcttgaagacgctggacactgggtattttggcacccgccttttttttctttttttttacaataaagctgcaaaccaaaatatttgattatttgcatgtttccttccaggttcatgcagacaacccagacggtctctttagaattctttcgtcaacctttcgaatcgaaactactataagaggaatgcaggactgaggatcaaacctttatcgatccaatgacaatagaggggaggcatttctgaatcgattctactgtaagaggaatgcaagaggatcaaaccttaattgatccagtgacaatctgagaggaggcgctgacactatcagaagatgtgtacattacaagcagggaggtggagccagcatttttctgaatgataggcgtctttgttcatttgttcattcttttttttacaaaaaaaaagagtatgtaacatgagttatacaactaggctgttcttcgagaaacaacctgtaactgtctgtcatatacttgacgaatgagaagcgttttcgtacctgttttagcctgaacggttcagttgtaagatctcgaattaaactgcctgatttgcagagtctagaaaaaaaatgttcctgatagttgcctagagagggagggggacggggttgaatagacgacagtacttgattcacttagaacaaaatgaacaattgtcaaaatataaaactaagatcttttcttgcagatgtgttgctttcaaataatgcagaataaacttatatggtgtttgaatgcactagagctaatagttggcggctatctaaaaagttgtagtcattttcctaatctttccaaaaagttatgaatcactctttttggtggtttaaatcttcggttatagatatttgaagtatggattctgaatctgtctaaatctagatagatacatctttttcgtgttgattgaccttgataggtacgttagacataccgcataaaggatgtgacgttcgagctaaaccacaagacgatgagttggtggacttatccagaagacaatggactgatcaagggtacgttcatcaagcgggtgtcgtctaaccaaaacactaatctaatgttggattccaggtcgtgctccaccgctgactctagctctggtggcactcctcttacaagattacaacgggcgtcaactagattgcgatgtctcggtgttaaatatggaagggggcaacattggacaacaaaagtgaaa

SEQ ID NO: 35823 - DNA, 2210 bp, Zea Mays
aaacaagcaccagtttggctcgtctcggcctcggcgcgtgcccccgacccgttgctgaccccgctccccggtgatctgatgtcggcggcggcacgcgcgccaccgccgccgcgcgcactctacgcgccgtcgagaagagtccctttcggtgccgtgatcctatccgcgccgcgacccggggctagggttcgcgcggcgcggcctcgcgaggggaatgttcataaccattgcctgctgacatcgtctagtctgaattcaagttctttgctatgtcctccatgcaattgtgctcaaatggctttggccgacacaagaattgcttaccagcctgaagtcgacaagcatgctggagttctggcctatgaactggttcaagggaatctttggaattcatttatggacaaatcaatacctgatccaccaacagctgttcttcttcatggcatccttgggagcaggaaaaactggggatcttttgcgaagagattggctcaggaattcccaatgtggcagttcctcttggttgatttgcgctgccatggcgactcaacatcaattaagaagagtggaccacacactgttgcctcaactgctcttgatgttctaaagctggtttgtagctttttgcgtcagctatttatgtcttcgctctttggcttctcattcttttcaatcttcatttttatcaatagaactagaagtgtagcttgtttgaaaatgaactctatctgtgtccaacgtgcttgcacaatatctgcatattcatcttattgcaaatctagctttatgcatttggagacaagcctaactcttcatgttaggttacatgcatcagcgtcatatgacaaaatgcattatttgaggttcctgtaatctaatagtcatcactatgaagtaaatgacgaagtgatttggtggcatggcacacacctttttcaaaacttctttattatatttggtgctatttgttgtttcttggttgttcactcctttagctgacttatattttgctccatcaaaatccaacagataatgcagctcaggctaacccctcgggttttggttggtcacagctttggtggaaaaggtttttattaatatatgtctttaccgttttgaaatgttatgctttacaacaaaagtaattaaaatggatattggtactcacatatgagctttgcagtggccttgagtatggtagaacaagctgcaaaaccacttgctcgtcctgttagagtatgggttcttgatgctactcctggcaaagttcgggccgggggagatggtgaagatcaccctgctgaacttattgaatttctcagaagaatgcctgagcaggtttcttcaaaacaggaggttgttgatgctcttgttaaaggacaattttctatggacgttgcacggtgggtggctacaaatctacgtcgaaccagtccattgggtcagcgaccatcttcaagcttctcatggacttttgatctaaatggcatctctgagatgtacaagtcttatgaggatactaacttatggaggattgtagagaatgtaccaaggggtgttcatattaattttctaaaagctgaacgaagtttgcatagatgggctctcgaagacctccaaagaatttatactgcggaggaattagctgcagatgagggtggaggagttgaaatgcacgtgcttgaagacgctggacactgggttcatgcagacaacccagacggtctctttagaattctttcgtcaacctttcgaatcgaaactactataagaggaatgcaggactgaggatcaaacctttatcgatccaatgacaatagaggggaggcatttctgaatcgattctactgtaagaggaatgcaagaggatcaaaccttaattgatccagtgacaatctgagaggaggcgctgacactatcagaagatgtgtacattacaagcagggaggtacgttagacataccgcataaaggatgtgacgttcgagctaaaccacaagacgatgagttggtggacttatccagaagacaatggactgatcaagggtacgttcatcaagcgggtgtcgtctaaccaaaacactaatctaatgttggattccaggttgcaggagttgtttggaaataatcgctgcatttactcttgattacctttgtttgtctctacccttgtcacctgggtattttaagtacacttcaatgcttcggcca

SEQ ID NO: 35824 - DNA, 2294 bp, Zea Mays
ggaaaacaagcaccagtttggctcgtctcggcctcggcgcgtgcccccgacccgttgctgaccccgctccccggtgatctgatgtcggcggcggcacgcgcgccaccgccgccgcgcgcactctacgcgccgtcgagaagagtccctttcggtgccgtgatcctatccgcgccgcgacccggggctagggttcgcgcggcgcggcctcgcgaggggaatgttcataaccattgcctgctgacatcgtctagtctgaattcaagttctttgctatgtcctccatgcaattgtgctcaaatggctttggccgacacaagaattgcttaccagcctgaagtcgacaagcatgctggagttctggcctatgaactggttcaagggaatcttgttcagtggaattcatttatggacaaatcaatacctgatccaccaacagctgttcttcttcatggcatccttgggagcaggaaaaactggggatcttttgcgaagagattggctcaggaattcccaatgtggcagttcctcttggttgatttgcgctgccatggcgactcaacatcaattaagaagagtggaccacacactgttgcctcaactgctcttgatgttctaaagctgataatgcagctcaggctaacccctcgggttttggttggtcacagctttggtggaaaagtggccttgagtatggtagaacaagctgcaaaaccacttgctcgtcctgttagagtatgggttcttgatgctactcctggcaaagttcgggccgggggagatggtgaagatcaccctgctgaacttattgaatttctcagaagaatgcctgagcaggtttcttcaaaacaggaggttgttgatgctcttgttaaaggacaattttctatggacgttgcacggtgggtggctacaaatctacgtcgaaccagtccattgggtcagcgaccatcttcaagcttctcatggacttttgatctaaatggcatctctgagatgtacaagtcttatgaggatactaacttatggaggattgtagagaatgtaccaaggggtgttcatattaattttctaaaagctgaacgaagtttgcatagatgggctctcgaagacctccaaagaatttatactgcggaggaattagctgcagatgagggtggaggagttgaaatgcacgtgcttgaagacgctggacactgggttcatgcagacaacccagacggtctctttagaattctttcgtcaacctttcgaatcgaaactactataagaggaatgcaggactgaggatcaaacctttatcgatccaatgacaatagaggggaggcatttctgaatcgattctactgtaagaggaatgcaagaggatcaaaccttaattgatccagtgacaatctgagaggaggcgctgacactatcagaagatgtgtacattacaagcagggaggtggagccagcatttttctgaatgataggcgtctttgttcatttgttcattcttttttttacaaaaaaaaagagtatgtaacatgagttatacaactaggctgttcttcgagaaacaacctgtaactgtctgtcatatacttgacgaatgagaagcgttttcgtacctgttttagcctgaacggttcagttgtaagatctcgaattaaactgcctgatttgcagagtctagaaaaaaaatgttcctgatagttgcctagagagggagggggacggggttgaatagacgacagtacttgattcacttagaacaaaatgaacaattgtcaaaatataaaactaagatcttttcttgcagatgtgttgctttcaaataatgcagaataaacttatatggtgtttgaatgcactagagctaatagttggcggctatctaaaaagttgtagtcattttcctaatctttccaaaaagttatgaatcactctttttggtggtttaaatcttcggttatagatatttgaagtatggattctgaatctgtctaaatctagatagatacatctttttcgtgttgattgaccttgataggtacgttagacataccgcataaaggatgtgacgttcgagctaaaccacaagacgatgagttggtggacttatccagaagacaatggactgatcaagggtacgttcatcaagcgggtgtcgtctaaccaaaacactaatctaatgttggattccaggttgcaggagttgtttggaaataatcgctgcatttactcttgattacctttgtttgtctctacccttgtcacctgggtattttaagtacacttcaatgcttcggcca

SEQ ID NO: 35825 - DNA, 2921 bp, Zea Mays
caaaaaaactgaccattttttattgcaaggaaaacaagcaccagtttggctcgtctcggcctcggcgcgtgcccccgacccgttgctgaccccgctccccggtgatctgatgtcggcggcggcacgcgcgccaccgccgccgcgcgcactctacgcgccgtcgagaagagtccctttcggtgccgtgatcctatccgcgccgcgacccggggctagggttcgcgcggcgcggcctcgcgaggggaatgttcataaccattgcctgctgacatcgtctagtctgaattcaagttctttgctatgtcctccatgcaattgtgctcaaatggctttggccgacacaagaattgcttaccagcctgaagtcgacaagcatgctggagttctggcctatgaactggttcaagggaatcttgttcagtggaattcatttatggacaaatcaatacctgatccaccaacagctgttcttcttcatggcatccttgggagcaggaaaaactggggatcttttgcgaagagattggctcaggaattcccaatgtggcagttcctcttggttgatttgcgctgccatggcgactcaacatcaattaagaagagtggaccacacactgttgcctcaactgctcttgatgttctaaagctggtttgtagctttttgcgtcagctatttatgtcttcgctctttggcttctcattcttttcaatcttcatttttatcaatagaactagaagtgtagcttgtttgaaaatgaactctatctgtgtccaacgtgcttgcacaatatctgcatattcatcttattgcaaatctagctttatgcatttggagacaagcctaactcttcatgttaggttacatgcatcagcgtcatatgacaaaatgcattatttgaggttcctgtaatctaatagtcatcactatgaagtaaatgacgaagtgatttggtggcatggcacacacctttttcaaaacttctttattatatttggtgctatttgttgtttcttggttgttcactcctttagctgacttatattttgctccatcaaaatccaacagataatgcagctcaggctaacccctcgggttttggttggtcacagctttggtggaaaaggtttttattaatatatgtctttaccgttttgaaatgttatgctttacaacaaaagtaattaaaatggatattggtactcacatatgagctttgcagtggccttgagtatggtagaacaagctgcaaaaccacttgctcgtcctgttagagtatgggttcttgatgctactcctggcaaagttcgggccgggggagatggtgaagatcaccctgctgaacttattgaatttctcagaagaatgcctgagcaggtttcttcaaaacaggaggttgttgatgctcttgttaaaggacaattttctatggacgttgcacggtgggtggctacaaatctacgtcgaaccagtccattgggtcagcgaccatcttcaagcttctcatggacttttgatctaaatggcatctctgagatgtacaagtcttatgaggatactaacttatggaggattgtagagaatgtaccaaggggtgttcatattaattttctaaaagctgaacgaagtttgcatagatgggctctcgaagacctccaaagaatttatactgcggaggaattagctgcagatgagggtggaggagttgaaatgcacgtgcttgaagacgctggacactgggtattttggcacccgccttttttttctttttttttacaataaagctgcaaaccaaaatatttgattatttgcatgtttccttccaggttcatgcagacaacccagacggtctctttagaattctttcgtcaacctttcgaatcgaaactactataagaggaatgcaggactgaggatcaaacctttatcgatccaatgacaatagaggggaggcatttctgaatcgattctactgtaagaggaatgcaagaggatcaaaccttaattgatccagtgacaatctgagaggaggcgctgacactatcagaagatgtgtacattacaagcagggaggtggagccagcatttttctgaatgataggcgtctttgttcatttgttcattcttttttttacaaaaaaaaagagtatgtaacatgagttatacaactaggctgttcttcgagaaacaacctgtaactgtctgtcatatacttgacgaatgagaagcgttttcgtacctgttttagcctgaacggttcagttgtaagatctcgaattaaactgcctgatttgcagagtctagaaaaaaaatgttcctgatagttgcctagagagggagggggacggggttgaatagacgacagtacttgattcacttagaacaaaatgaacaattgtcaaaatataaaactaagatcttttcttgcagatgtgttgctttcaaataatgcagaataaacttatatggtgtttgaatgcactagagctaatagttggcggctatctaaaaagttgtagtcattttcctaatctttccaaaaagttatgaatcactctttttggtggtttaaatcttcggttatagatatttgaagtatggattctgaatctgtctaaatctagatagatacatctttttcgtgttgattgaccttgataggtacgttagacataccgcataaaggatgtgacgttcgagctaaaccacaagacgatgagttggtggacttatccagaagacaatggactgatcaagggtacgttcatcaagcgggtgtcgtctaaccaaaacactaatctaatgttggattccaggttgcaggagttgtttggaaataatcgctgcatttactcttgattacctttgtttgtctctacccttgtcacctgggtattttaagtacacttcaatgcttcggcca

SEQ ID NO: 35826 - DNA, 316 bp, Zea Mays
ctgaaatgaaagagggtgcaacgatttacagtaggaatgtaggatcccttacagggtaaaggtcgatggtaatggcgtaatgctatcagctatcattgtcacagaaattcacgacccagctaattagggcttgcatttatttgaaattgacaacaaaacatgcattatatcatgtcagcaagcaagccttaacactggctttgatccaagtccaaatcactggtatcccatcatcagagaagctcaaacaagcactaaatacgagccgaagagcaaagctcgagcagtccattaccgtcaatgaaccctgagaact

SEQ ID NO: 35827 - DNA, 592 bp, Zea Mays
caggaagcaaattgcaaagcaatgtcttgaagtggagtaagatgtctggattgggatatgtgaacatctcaagtattattgcatgatagaacatctaaagaattgtcatgttggtacttctctggaaagtaaagaccatcagcataatgagagactccgaattacatgggatagaaacagttaacttttactaagtcctatataggagagcaggagctacccatatggtaagtaatagcagtgcctagcagctattagaagctgaaaactttgatggcacaataatgtggctattacatagcaatcctcttttgccattttggaagtacattttttaacgaagatggacttaaaatacaggcagtttaagaactcacaattatagctcgcccgaatgcaccagcgctgacgtaagcccatgaacctggaagcattcccaaccaactgcatgggaataacacaaagtggatatcagagcaaacaaggtttttgaagaaaacaactagtgttggcatcatccctcacaaaattaaagtcccaaacataggtaacaagaaagtgatactcgcataagtcataatttttattcctt

SEQ ID NO: 35828 - DNA, 1707 bp, Zea Mays
atggcgttgccggcgggcacggtggtggtggcctacaacgccgccatctcccggtgcgcccgcgcggggctgtacgcgcgcgcgctggcgctgttccgcgagatgcgcgggcggggcctgcgcgccgacgagtacaccctcccgccgctcctcaactccgcggcgcagctgcggggtccgcccgaggcggtggccgcgctgcacgcgctcctcctccgcgcgggcctcgcgccccacctccacgtcgccaacgcgctcgtcgacgcctacgccaggctgccccacgcgggcgccgccgcggcgcgggccgtgttcgacgaaatgccgcgccgggacgtcgtcacctggacctcgctcctcacggggctcgcgcgcgctggcgcccacggcgcggccgtccgcgcgtaccacggcatggtcgcctcgggggtccagcccgacgagttcgccgtcccggcggccctcagctcgtgcgcggcctccaccgcgctcgacctgggccggtcggtgcacgccgccgcggtccgcctcgggctccggccgttccgctccgtcgagaactcgctcgtgtccatgtacgccaagaccggcgcgctgcgcgacgcgcgggcggtgttcgacgcgatgccggcgcggtgcacgatcacgtggacggccctcatcgtcgggtacgcgcagaacggccgtggcagacagtcgctcgaggtctacgccgatatggtccggtccgggtgcaggccggactacgtgaccttcatcggtctgctcttcgcgtgcagccacgccggtcttgtcgacgccggccgggctcacttccgttccatggtgcccgtctacggcatcgctcccggaccggatcactacgcgtgcatggtcgacttgttaggccgggcggggaggctggacgaggccatggacctgctgaaccggagctccacggagctggacgccacggtgtggaagtcgctgctgggcgcgtgtcgggtgcaccagaacgcggagctcgccgagcgcgcggccgagatggtgtggaggctggacccggcggacgccgtgccgtacgtcatgctgtccaacctctactcccgggcgaggagatggggcgacgtcgcgaggatccgcgcgctgatgaaggcgagaggggtcaccaaggagcccgggtgcagctgggtgggcgtgaacggcatcacgcacctgttccacgtcgaggaccgcgatcacccgcgggcggcagagatctaccgcaaagtggaggagatgaccgaaaggatccgggtcgagggttacgtgccggacacggactgggcgctgcaggacgaggtgccggagtggaggcagagggggctggcgtaccatagtgagaggcttgccgtggccttcgggctgctcgctgtgccagcggccgcacccatccgcgtgttcaagaacctccgggtatgtggcgactgccacactgcgatcaagatggtcgccaaggtgtacggcagagagattattttgagggatgcgaactgcttccaccacatgaaagacggagagtgttcttgtggtgattactggtagggagattcggcgaagtcagctctctttaatttcgatagattcttatctggtatatgcaccgtagagcgaattaatggtataggaattttgtgatcaatgagaatcggcaccacatcaagagatcaaattcactcagaaaattgc

SEQ ID NO: 35829 - DNA, 2942 bp, Zea Mays
atcgtcccgtgcagttccttcagcatttgtgatttaggtcaatggaggagtcagtgccaatgtcagtaatcagcagtatttcaaacttccgcacgctgtctaccagcagtgtggtagaaactgagctagttaagagatactgccggaagatcaatgaaatcctgggtcttttgaagctggtcctggatgaagttatcccccagattagtctagatgataggatgcttgagggactagctgctactatcaatgatgcgataaagctagttggaagctgggatttgatgatgagcaaaatctatttcgttatgctggtggagtcccttattaccaagatgcaaaactatgtgcttgaagtgtgccaagttgtcaattctgaagtgacaccaccagaaaccaatcgtatttcagtgtacttggaggtagtgaaagagctttattgtcatatcagtagcactcctttcaattgttctcatcttccaatgatttatgttcttgcaaatttcagaaaataaagcaatttcaatgtgacaaaattatgggtatcatcaaggaggcttccagggatattgccggaaaatttacaccaaagtcagagacattgacaaagatccaggtctctttgagcttatccacaaatcaagagttactgatggaggctgttgcccttgccaagattagaacaagagtcgatgctgaggatagttcagaactagatggtatcaaccatatctctgaattagtcaaccatatgcttgagaaacacgtggaagaaaaacagatgcatagtattaatggagtgccaatacctgctgatttttgttgccccctttcccttgaactaatgtcagatccagtgattgtggcttctggtcaaacatatgaacgggttttcatcagaaaatggcttgacttgggttacaatgtctgccccaagacacgtcaaactttgggacacagtaatttgattcctaactacactgtcaaacagttgattgaaaattggtctgaggtacatggtgtagtgctaccagaccctgtgaaactcttgagtttgaacttttcagtttccctcaagccgattaatggtagaacaagtgataaatctcctttctctgaaaactcttcaagggaaaataagtttggctcaccagatcatatatcatcagatgacagttgtcatcctaacttgctgcatgagaattttgattcagatgatcaaatctccaaggcttcatcttctgaagacacagatgattcagaaacgggtcctccgaagttactagttgcatctactgaagcaaacaaattgatgtgcaatgcatctattgatggttctgatgccattaagcaatcgagaaaggatggtttccatgcttctgatgttgagccacgtctccaaagaaacagtatcagcggtgatattggcacaagcgcttcttccagcagcaaccatctcgaagttgttgagaaggataaggaggaacaggtctcaagtaacagcattgcatcagagactacaagaaatggccgaacggtcacctgctcaaaaccaaattttcagccaaggttgggtggtgttcgttctcgaaatcatttagtctggcagcaacgatcagataaagctgtttcattggattcaagatctgattttgctattgttgataataaagttcgtaaacttattgaggatctaaaaaatgagcgtactgatcccgagagggcagcaataggagagctgctggtcctttcaaggcataacatggagagtagaatttccattgcaaaccacggtgctatacccttcttggtgaatcttctttactctgcagaccccagcatgcaggaaaatgctgtaacagtgatcctgaatttgtcgttagatgacaacaacaagatcaccatcgcaagcgcggacgccatcaagcctctcatccacgtccttgagacgggtaacccagaggcaagagcaaactcagctgcaactctcttcagcctttcagtaaacgaagagaacaaggccaaaatcggacgatctggagcaatcaaacccctggtcgacctgctgcgagatggcagtgcacaggggaagaaggatgcagcaacggctctcttcaacctatcgatatttcacgagaacaaggcccgggttgttgaggccggggctgtaaagcccctggtggagctgatggacccagcagctgggatggttgacaaggccgtcgccgttttggcaatccttgccacggtgcaggagggaaggaacggtattgctcaggcaggtggcatcccggtgctggtcgaggtcgttgagctgggctcggcacgggcgaaggagaacgctgctgctgctctgctgcagctctgcacgaacaacagcaggttctgcagcctggtgctccaggaaggcgccatgcctcctttggtggctctgtcgcaatcgggcacggcgcgtgcacgagagaaggcacaggtccttctgagctattttcgcaaccagcgtcaagtcggcaaggtcaccaggcgctaaattcagacactgttgtggccggggccgggtgtaaatgtagaatgcacaagcaattcagtagcagtagcatcatggtatgacgatgagagattgcatgctactttaattataggcaattcagtacaacaataggggcagttttgcaaagggtgttggtgtctttttacatctaatttaacatcgtcggtggttgttaacgtaatatgggtagacgccagctttggtttcaaaaaagaggtccgattttgcaaagtctggaaaagaggtttatttttacaattggcttgcaaaatgagggcagatttgcaatcgtccctactatttattaaagtgtcgaggccatatttaatagagatttatgtttggcaagtaggagaggccgggtgggagccatataactccacatgatcct

SEQ ID NO: 35830 - DNA, 3104 bp, Zea Mays
gcgtcggtgcatcgggtctagcggagacccgccattcccctccagttggccccaccagtcagtaaaagaaagcacccggaccaccacggacttgcaccatccagctccactttcaaccactccgtccgtcctctccccttcgtcgcgctggtcgctgccgcctccccctcgtgttcacactcctctaggcaccctcaggccccacggtcttcgtcctcgcctcggcgtctcagcctcgcgacccgcgtggagctcacggcggcgaccgccattgtagttcccggaggtcaatggaggagtcagtgccaatgtcagtaatcagcagtatttcaaacttccgcacgctgtctaccagcagtgtggtagaaactgagctagttaagagatactgccggaagatcaatgaaatcctgggtcttttgaagctggtcctggatgaagttatcccccagattagtctagatgataggatgcttgagggactagctgctactatcaatgatgcgataaagctagttggaagctgggatttgatgatgagcaaaatctatttcgttatgctggtggagtcccttattaccaagatgcaaaactatgtgcttgaagtgtgccaagttgtcaattctgaagtgacaccaccagaaaccaatcgtatttcagtgtacttggaaaaataaagcaatttcaatgtgacaaaattatgggtatcatcaaggaggcttccagggatattgccggaaaatttacaccaaagtcagagacattgacaaagatccaggtctctttgagcttatccacaaatcaagagttactgatggaggctgttgcccttgccaagattagaacaagagtcgatgctgaggatagttcagaactagatggtatcaaccatatctctgaattagtcaaccatatgcttgagaaacacgtggaagaaaaacagatgcatagtattaatggagtgccaatacctgctgatttttgttgccccctttcccttgaactaatgtcagatccagtgattgtggcttctggtcaaacatatgaacgggttttcatcagaaaatggcttgacttgggttacaatgtctgccccaagacacgtcaaactttgggacacagtaatttgattcctaactacactgtcaaacagttgattgaaaattggtctgaggtacatggtgtagtgctaccagaccctgtgaaactcttgagtttgaacttttcagtttccctcaagccgattaatggtagaacaagtgataaatctcctttctctgaaaactcttcaagggaaaataagtttggctcaccagatcatatatcatcagatgacagttgtcatcctaacttgctgcatgagaattttgattcagatgatcaaatctccaaggcttcatcttctgaagacacagatgattcagaaacgggtcctccgaagttactagttgcatctactgaagcaaacaaattgatgtgcaatgcatctattgatggttctgatgccattaagcaatcgagaaaggatggtttccatgcttctgatgttgagccacgtctccaaagaaacagtatcagcggtgatattggcacaagcgcttcttccagcagcaaccatctcgaagttgttgagaaggataaggaggaacaggtctcaagtaacagcattgcatcagagactacaagaaatggccgaacggtcacctgctcaaaaccaaattttcagccaaggttgggtggtgttcgttctcgaaatcatttagtctggcagcaacgatcagataaagctgtttcattggattcaagatctgattttgctattgttgataataaagttcgtaaacttattgaggatctaaaaaatgagcgtactgatcccgagagggcagcaataggagagctgctggtcctttcaaggcataacatggagagtagaatttccattgcaaaccacggtgctatacccttcttggtgaatcttctttactctgcagaccccagcatgcaggaaaatgctgtaacagtgatcctgaatttgtcgttagatgacaacaacaagatcaccatcgcaagcgcggacgccatcaagcctctcatccacgtccttgagacgggtaacccagaggcaagagcaaactcagctgcaactctcttcagcctttcagtaaacgaagagaacaaggccaaaatcggacgatctggagcaatcaaacccctggtcgacctgctgcgagatggcagtgcacaggggaagaaggatgcagcaacggctctcttcaacctatcgatatttcacgagaacaaggcccgggttgttgaggccggggctgtaaagcccctggtggagctgatggacccagcagctgggatggttgacaaggccgtcgccgttttggcaatccttgccacggtgcaggagggaaggaacggtattgctcaggcaggtggcatcccggtgctggtcgaggtcgttgagctgggctcggcacgggcgaaggagaacgctgctgctgctctgctgcagctctgcacgaacaacagcaggttctgcagcctggtgctccaggaaggcgccatgcctcctttggtggctctgtcgcaatcgggcacggcgcgtgcacgagagaaggcacaggtccttctgagctattttcgcaaccagcgtcaagtcggcaaggtcaccaggcgctaaattcagacactgttgtggccggggccgggtgtaaatgtagaatgcacaagcaattcagtagcagtagcatcatggtatgacgatgagagattgcatgctactttaattataggcaattcagtacaacaataggggcagttttgcaaagggtgttggtgtctttttacatctaatttaacatcgtcggtggttgttaacgtaatatgggtagacgccagctttggtttcaaaaaagaggtccgattttgcaaagtctggaaaagaggtttatttttacaattggcttgcaaaatgagggcagatttgcaatcgtccctactatttattaaagtgtcgaggccatatttaatagagatttatgtttggcaagtaggagaggccgggtgggagccatataactccacatgatcct

SEQ ID NO: 35831 - DNA, 2995 bp, Zea Mays
aaaccaaggatgctgtccgtgatggtctaagatcagttaagaacacaattgaagatggagcagccgtgctggtcaatggaggagtcagtgccaatgtcagtaatcagcagtatttcaaacttccgcacgctgtctaccagcagtgtggtagaaactgagctagttaagagatactgccggaagatcaatgaaatcctgggtcttttgaagctggtcctggatgaagttatcccccagattagtctagatgataggatgcttgagggactagctgctactatcaatgatgcgataaagctagttggaagctgggatttgatgatgagcaaaatctatttcgtaactcccttatctctcccatttactactgtcattcacataaggcacaacttatagcttgcacaatgctgtcgttatttgatacttgcaagttattatatcaaggttatgctggtggagtcccttattaccaagatgcaaaactatgtgcttgaagtgtgccaagttgtcaattctgaagtgacaccaccagaaaccaatcgtatttcagtgtacttggagaaaataaagcaatttcaatgtgacaaaattatgggtatcatcaaggaggcttccagggatattgccggaaaatttacaccaaagtcagagacattgacaaagatccaggtctctttgagcttatccacaaatcaagagttactgatggaggctgttgcccttgccaagattagaacaagagtcgatgctgaggatagttcagaactagatggtatcaaccatatctctgaattagtcaaccatatgcttgagaaacacgtggaagaaaaacagatgcatagtattaatggagtgccaatacctgctgatttttgttgccccctttcccttgaactaatgtcagatccagtgattgtggcttctggtcaaacatatgaacgggttttcatcagaaaatggcttgacttgggttacaatgtctgccccaagacacgtcaaactttgggacacagtaatttgattcctaactacactgtcaaacagttgattgaaaattggtctgaggtacatggtgtagtgctaccagaccctgtgaaactcttgagtttgaacttttcagtttccctcaagccgattaatggtagaacaagtgataaatctcctttctctgaaaactcttcaagggaaaataagtttggctcaccagatcatatatcatcagatgacagttgtcatcctaacttgctgcatgagaattttgattcagatgatcaaatctccaaggcttcatcttctgaagacacagatgattcagaaacgggtcctccgaagttactagttgcatctactgaagcaaacaaattgatgtgcaatgcatctattgatggttctgatgccattaagcaatcgagaaaggatggtttccatgcttctgatgttgagccacgtctccaaagaaacagtatcagcggtgatattggcacaagcgcttcttccagcagcaaccatctcgaagttgttgagaaggataaggaggaacaggtctcaagtaacagcattgcatcagagactacaagaaatggccgaacggtcacctgctcaaaaccaaattttcagccaaggttgggtggtgttcgttctcgaaatcatttagtctggcagcaacgatcagataaagctgtttcattggattcaagatctgattttgctattgttgataataaagttcgtaaacttattgaggatctaaaaaatgagcgtactgatcccgagagggcagcaataggagagctgctggtcctttcaaggcataacatggagagtagaatttccattgcaaaccacggtgctatacccttcttggtgaatcttctttactctgcagaccccagcatgcaggaaaatgctgtaacagtgatcctgaatttgtcgttagatgacaacaacaagatcaccatcgcaagcgcggacgccatcaagcctctcatccacgtccttgagacgggtaacccagaggcaagagcaaactcagctgcaactctcttcagcctttcagtaaacgaagagaacaaggccaaaatcggacgatctggagcaatcaaacccctggtcgacctgctgcgagatggcagtgcacaggggaagaaggatgcagcaacggctctcttcaacctatcgatatttcacgagaacaaggcccgggttgttgaggccggggctgtaaagcccctggtggagctgatggacccagcagctgggatggttgacaaggccgtcgccgttttggcaatccttgccacggtgcaggagggaaggaacggtattgctcaggcaggtggcatcccggtgctggtcgaggtcgttgagctgggctcggcacgggcgaaggagaacgctgctgctgctctgctgcagctctgcacgaacaacagcaggttctgcagcctggtgctccaggaaggcgccatgcctcctttggtggctctgtcgcaatcgggcacggcgcgtgcacgagagaaggcacaggtccttctgagctattttcgcaaccagcgtcaagtcggcaaggtcaccaggcgctaaattcagacactgttgtggccggggccgggtgtaaatgtagaatgcacaagcaattcagtagcagtagcatcatggtatgacgatgagagattgcatgctactttaattataggcaattcagtacaacaataggggcagttttgcaaagggtgttggtgtctttttacatctaatttaacatcgtcggtggttgttaacgtaatatgggtagacgccagctttggtttcaaaaaagaggtccgattttgcaaagtctggaaaagaggtttatttttacaattggcttgcaaaatgagggcagatttgcaatcgtccctactatttattaaagtgtcgaggccatatttaatagagatttatgtttggcaagtaggagaggccgggtgggagccatataactccacatgatcct

SEQ ID NO: 35832 - DNA, 2341 bp, Zea Mays
cgcgggcgcgcgtccgtccaagaaacctgacgtaagcagtgacagaattggcgccgcctctcggcgtccacgtgtcgtggtcaacctgtcagagtggggctccgtgtgtgcgctaccgcaggggcccggcgcacgggccacacgtgtcgcggtcgaccgcggctataaatgcccggctccgcactcggaacaagtttcaagctctcctcccctcttcctaccattagcagtagccacagccagaacaccagcagacagcagcatcagcagggaggaacacgatgagcggcgccggtccggatctgcagctgccaccggggttccggttccacccgacggacgaggagctggtgatgcactacctctgccgccgctgcgccggcctgcccatcgccgtccccatcatcgccgagatcgacctctacaagttcgacccatggcagctcccaaggatggcgctgtacggcgagaaggagtggtacttcttctccccgcgggaccgcaagtacccgaacgggtccaggcccaaccgcgccgccggggctgggtactggaaggccaccggcgctgacaagcccgtgggcacgcccaagccgctggccatcaagaaggcgctcgtcttctacgccggcaaggcgcccaagggcgagaagaccaactggatcatgcacgagtaccgcctcgccgacgtcgaccgctcggcgcgcaagaagaacagcctcagggtaagaacaagcgctccgccgccgtccgtccgtccgttggcgtcgtcaccgtccaaatcaaacaaaaagaacttggcgataatgtgtcgctttcgtaatgaacgcggggataagcgtggcccatggttttgggccgctgaattttttttacgtgggccatgctaggtggggtggggggctgcaccgtgcccaatgattcgaccgcgtcgcagtcctccgcgcgcaagtattcgatgcccatgggtcatagcgaacagatcattttcgcccgtcgcgccctgcgacggcgacggcgacggagagccagtggggtctcactgggattagacatcgaaatgacgctttgtgattctttagctcatccatttctcgtcagctgcacggacgacaaactaagttctctattgtgttgacgggtgcagttggatgactgggtcctgtgccgcatctacaacaagaagggcggcgggctggagaaggcggcggcgccggcggccggcggcgaccacaagcctgtgttcgccacggcggcggtgagctccccgccggagcagaagccgttcgtggcggcggcgggcgggctgcccccggcgttcccggagctggcggcgtactacgaccggccgtcggactcgatgccgcggctgcacgcggactactccagctgctcggagcaggtgctgtccccggagcagctggcgtgcgaccgggaggtgcagagccagcccaagatcagcgagtgggagcggaccttcgcctccgaccccgtgaaccccgcgggctccatgctcgaccccgtcgtcggccacgccggcggcgacccgctgctgcaggacatcctcatgtactggggcaagccgttctagacgacaccgcccatcatgtcctgaggggaggtgggggtggcgaagcatcctcggctgcggttggttggttgattgatctgtcttgggcagcgcaatgcaatgcaaccgcacggtgtgggctttgactcaggcgagccgccattgttgacttgcaaggaggatataatatgaaactatagctggattacatggagaggcggcaatgagaccgtctggccccgccggaagggagacggagacggagacggatggcgcagtgcatcgggtgtggtggatcgtgcgcggcatgtgtgtgtgtggctgtacatatacatactgtacatgattggttcagtgcagggtttctgttccttcattgattagttattatactaataagtactagtaattttgtaagggcttgtagttgcagtctccgtactggtggtaggtagtgcaggccatattcgtcatcgccaagcttcgagtgtacttactcctacaatatatattttacagtatatattgtagctgtgttggctcttccggaaaaaaaatggaaggggaaaatagggattatgttattttgattattctgctggtctcgtctgaagtgctactgttcgtctgtattctgctatatcgtcagcacaccacttgtagaaaaaaaaaaggagaggggaaaacgtttgaaccgttgcacgactgtggctcgcaatcgcagctatagcacggttgctgtatgcaggagtatacttatcgacgaagaaa

SEQ ID NO: 35833 - DNA, 1829 bp, Zea Mays
cgcgggcgcgcgtccgtccaagaaacctgacgtaagcagtgacagaattggcgccgcctctcggcgtccacgtgtcgtggtcaacctgtcagagtggggctccgtgtgtgcgctaccgcaggggcccggcgcacgggccacacgtgtcgcggtcgaccgcggctataaatgcccggctccgcactcggaacaagtttcaagctctcctcccctcttcctaccattagcagtagccacagccagaacaccagcagacagcagcatcagcagggaggaacacgatgagcggcgccggtccggatctgcagctgccaccggggttccggttccacccgacggacgaggagctggtgatgcactacctctgccgccgctgcgccggcctgcccatcgccgtccccatcatcgccgagatcgacctctacaagttcgacccatggcagctcccaaggatggcgctgtacggcgagaaggagtggtacttcttctccccgcgggaccgcaagtacccgaacgggtccaggcccaaccgcgccgccggggctgggtactggaaggccaccggcgctgacaagcccgtgggcacgcccaagccgctggccatcaagaaggcgctcgtcttctacgccggcaaggcgcccaagggcgagaagaccaactggatcatgcacgagtaccgcctcgccgacgtcgaccgctcggcgcgcaagaagaacagcctcaggttggatgactgggtcctgtgccgcatctacaacaagaagggcggcgggctggagaaggcggcggcgccggcggccggcggcgaccacaagcctgtgttcgccacggcggcggtgagctccccgccggagcagaagccgttcgtggcggcggcgggcgggctgcccccggcgttcccggagctgctggcgtgcgaccgggaggtgcagagccagcccaagatcagcgagtgggagcggaccttcgcctccgaccccgtgaaccccgcgggctccatgctcgaccccgtcgtcggccacgccggcggcgacccgctgctgcaggacatcctcatgtactggggcaagccgttctagacgacaccgcccatcatgtcctgaggggaggtgggggtggcgaagcatcctcggctgcggttggttggttgattgatctgtcttgggcagcgcaatgcaatgcaaccgcacggtgtgggctttgactcaggcgagccgccattgttgacttgcaaggaggatataatatgaaactatagctggattacatggagaggcggcaatgagaccgtctggccccgccggaagggagacggagacggagacggatggcgcagtgcatcgggtgtggtggatcgtgcgcggcatgtgtgtgtgtggctgtacatatacatactgtacatgattggttcagtgcagggtttctgttccttcattgattagttattatactaataagtactagtaattttgtaagggcttgtagttgcagtctccgtactggtggtaggtagtgcaggccatattcgtcatcgccaagcttcgagtgtacttactcctacaatatatattttacagtatatattgtagctgtgttggctcttccggaaaaaaaatggaaggggaaaatagggattatgttattttgattattctgctggtctcgtctgaagtgctactgttcgtctgtattctgctatatcgtcagcacaccacttgtagaaaaaaaaaaggagaggggaaaacgtttgaaccgttgcacgactgtggctcgcaatcgcagctatagcacggttgctgtatgcaggagtatacttatcgacgaagaaa

SEQ ID NO: 35834 - DNA, 1637 bp, Zea Mays
ctctaacttgtacttcctcttgctccaacagacaagctcctttggttggatgagaagacgaatagacgatcaccactcatgccatatcccagatactgaagcgacagcggactagcggtggcggctcctagacgcaccgtgttgccgccgccggcgatgcagtggcggtttgcagaagccaagtgaacttcagtgtttgaagggacgaccaagtcatcatcatctgctaacctacgaccctgaattatttctgattcaataatcactggtttccctacacgtgtatgctcgatgtgggtttcttcgtctatgggatgacgttctgaacttctgcattaccggcacgttttcccaaagtcactggcctgcagaaccatgtttaagaaagtaatcacagtagggagttcctagaaaggtcgtctgtgtacgtagttttgcaagaacatatgctgttttattttgcattccacctttagtaggtcatgctttgagttcgcacattttttttctctctctctcttttgctaacaaccgaacgatttcaccatgcacagtattcagggctattcctttttttttaggataacactatctgttctcatggttaatatatggcatgaactactacgatttaatttatactgttatgatagcatccttgcaaggtagaaccctgcttctttatgtaccgaacttacctatatttttattggttctgaagcttggcatatataataattgattaatcgtttgaaattacaggaaattatttaagtttcagtgctttcgttctttcgtcaaacattttgtagctggatggttacaagtatagtttcgggagcctccgtgagtacctctaggtctactactcctcacttttagactacatatgtttcctattttcgatgatggattagcaatctgtcatgggtcaatctaactttttgctctgtttttcactctttggcttggaggtacacatgcacacaacggttctttaaaaaacatataaatgacttctttattctaatcatggcttctgccacgacatttgatcagttcatcagaagtatatggtgtatccagagaaagttttgagctttccgcctttcccatatcttaattcagttttgggcattcaggtgttgccatatccagcacgcaaacaataatgagatcggtaattgaagagagtggggatgtccaagcacagattgctcatgcttactccaaaaagtctgcgtattccaagagcattttctcgctgagcggacaacgtctctagatcgctgagcagtgagcgcgctaactcacgacaagattttagtttgtttacgtgcggtgtagatcgatcataatttcacatatttatgcacgcttcgctaaccctgatataccgatgaataatctttctgaacgaaatgctacggaagtagtagtagtagtactcctgctattgattcattttctttagagctgtcatgtgttgcttggagtgctgtaaacaaagactcggctagctccaaagcaaaggaaaaggaattcgtggctggaccggccggacaaaaaccatgtcgctggagagagctcggcgatgatggcgccgccgccgtttgttggtatccaaatccatatcc

SEQ ID NO: 35835 - DNA, 1659 bp, Zea Mays
caatttactctaacttgtacttcctcttgctccaacagacaagctcctttggttggatgagaagacgaatagacgatcaccactcatgccatatcccagatactgaagcgacagcggactagcggtggcggctcctagacgcaccgtgttgccgccgccggcgatgcagtggcggtttgcagaagccaattactgactgttcttaccgtggtgctgattcagagggacgaccaagtcatcatcatctgctaacctacgaccctgaattatttctgattcaataatcactggtttccctacacgtgtatgctcgatgtgggtttcttcgtctatgggatgacgttctgaacttctgcattaccggcacgttttcccaaagtcactggcctgcagaaccatgtttaagaaagtaatcacagtagggagttcctagaaaggtcgtctgtgtacgtagttttgcaagaacatatgctgttttattttgcattccacctttagtaggtcatgctttgagttcgcacattttttttctctctctctcttttgctaacaaccgaacgatttcaccatgcacagtattcagggctattcctttttttttaggataacactatctgttctcatggttaatatatggcatgaactactacgatttaatttatactgttatgatagcatccttgcaaggtagaaccctgcttctttatgtaccgaacttacctatatttttattggttctgaagcttggcatatataataattgattaatcgtttgaaattacaggaaattatttaagtttcagtgctttcgttctttcgtcaaacattttgtagctggatggttacaagtatagtttcgggagcctccgtgagtacctctaggtctactactcctcacttttagactacatatgtttcctattttcgatgatggattagcaatctgtcatgggtcaatctaactttttgctctgtttttcactctttggcttggaggtacacatgcacacaacggttctttaaaaaacatataaatgacttctttattctaatcatggcttctgccacgacatttgatcagttcatcagaagtatatggtgtatccagagaaagttttgagctttccgcctttcccatatcttaattcagttttgggcattcaggtgttgccatatccagcacgcaaacaataatgagatcggtaattgaagagagtggggatgtccaagcacagattgctcatgcttactccaaaaagtctgcgtattccaagagcattttctcgctgagcggacaacgtctctagatcgctgagcagtgagcgcgctaactcacgacaagattttagtttgtttacgtgcggtgtagatcgatcataatttcacatatttatgcacgcttcgctaaccctgatataccgatgaataatctttctgaacgaaatgctacggaagtagtagtagtagtactcctgctattgattcattttctttagagctgtcatgtgttgcttggagtgctgtaaacaaagactcggctagctccaaagcaaaggaaaaggaattcgtggctggaccggccggacaaaaaccatgtcgctggagagagctcggcgatgatggcgccgccgccgtttgttggtatccaaatccatatcc

SEQ ID NO: 35836 - DNA, 1612 bp, Zea Mays
atgtggacgtgcccagatgaaattccagcggtagatgccaaccttgtgtccggcgaccggcgtgctccggttgccggggctgggtgggcaacacacaaatctagtgcctggcacctggcagcaacggcggagagacgatgcgcgccaggcgtggcttggcgttcagcgtcggccccaaccgcggccgaccctcgtgcgccggggctacgaccgttcggggccctccctgcctccacgcggaagctcttcttcctccctcaagacgcgaaccccgttgcctctcgggtcatcttcgccacaccgtcctgcccggaccgccgtggcgctctgcctcgatctaccaaatccatggctcggcacgaggatgcggacgcagaacaatcacttccatccgccagcgcgttgtctcgccgtcggatcgcgggatgggagatacgaaaccaaccaggtaccagtggcacatacatcatgagaatgaagagttgaaccaagatgagaagtggtagtgtgctggcatctgaagtatggacccctctgaacttccggagctgtcccgtactgctatgttgatctgctgcaagaagaaaggtgcccaaggggcattgggactgcgaaccctgcaaggagcggagggagaaggagaagaggatactgatgctccacaggaaggattacgatgaagacatcctgaagagtggcgagttccatggaccgaacttgctgcttaaggccgcgaaaaaggtgaagcgcgatgaggaggtgaaggtggctaagactaagagcaccagaaagtaagaggcatggagattgtgagcgagcggattttgtgttctctgccatgatcagctagcgccaagtttctgccctgggaggctcagctctgcccagctgaatgggacgggcggctgagggccgtagaaacctgtgctttctgaactgaatggttagagaacatgaattcgctagaattgctccagtctatttctttacaatcgtttctttcaacccggcagggtcatacttgacaaacttgccagcgcctgaacttgagaaggttgtgatcacccgtgatgcttttaaaccccgtgatgcttttaatggtttatgaaactggatcttggtagacttaattacccgtgatgcttttaatggtttatggaactgaatcttggtagaattaaagtatctgttgctgtgttgagaaatgttatggtttctagttcgttcttgcaggtgcaaatttgcgttcacctttggaaattagcccatgcaattctgcctacatgatcccctccccctcattttttggttagtgcctgaacggtaaggcgttgctattctataatgcagtgtacaagcatggtactaaacccccgtttgaaacccctagagctgagttaactaacaattagctggtgtattagatgatggtttttgaaattttagcagttaactattagttctagatgttgcaaacaaaacctgattttcgcaccaaacatctatgtttgttcaacacaacatatgctgtttaggtttagggtttcttggatgaggatgatcaaaacacaaggatggtatacctgattgcatggatgagtagtcccaaaac

SEQ ID NO: 35837 - DNA, 2297 bp, Zea Mays
atgtggacgtgcccagatgaaattccagcggtagatgccaaccttgtgtccggcgaccggcgtgctccggttgccggggctgggtgggcaacacacaaatctagtgcctggcacctggcagcaacggcggagagacgatgcgcgccaggtagatcctcagcacggtctgaaatctgcaaggaggtgggggcgaaagcatgcgctactatgctagaagctcctcatcccggtcggtaaacgccactgccgccgcgagctcacctccgacgggacggaacgaagccgctgccacccgagggaaccgcgtcgaccaatcccaccctaacgacatcgcctcagcaccagcaagctggccacaccaatcccccggcctcgcgcccctcgagcccccgatccaaatggtgcaggcggaccagtagcggcgcccaccgcgccgccaattggcactgcggccgccactacgtccgaaaaactcgcgatcgtgggacctccgatcccgtcccatggtcccgccggcctgtccgtgccttcccaagttcctagcaccaccgccgcgcgccgcgccggtgccgagggagcggcagcagtaaccggcaggcgaatttgaatccagctgcgcggcggggcgaactcgctctcatgcgcaggcgtggcttggcgttcagcgtcggccccaaccgcggccgaccctcgtgcgccggggctacgaccgttcggggccctccctgcctccacgcggaagctcttcttcctccctcaagacgcgaaccccgttgcctctcgggtcatcttcgccacaccgtcctgcccggaccgccgtggcgctctgcctcgatctaccaaatccatggctcggcacgaggatgcggacgcagaacaatcacttccatccgccagcgcgttgtctcgccgtcggatcgcgggatgggagatacgaaaccaaccaggcatctgaagtatggacccctctgaacttccggagctgtcccgtactgctatgttgatctgctgcaaggtgtgtggaggacctgaagaggtggacaagaggttcctgatctgtgaccactatctttgcctgtacaagtactaccacattagttgcctgactaccgagcagattgcaagtgatgtgcagatgggcagccagcgctggtactgtccatcttgcctctgccgtgtctgcctgtgcgacacggacgatgaccagatcatcctgtgtgactgctgcgatcagggctatcatctctactgcctcagtcctccaagaagaaaggtgcccaaggggcattgggactgcgaaccctgcaaggagcggagggagaaggagaagaggatactgatgctccacaggaaggattacgatgaagacatcctgaagagtggcgagttccatggaccgaacttgctgcttaaggccgcgaaaaaggtgaagcgcgatgaggaggtgaaggtggctaagactaagagcaccagaaagtaagaggcatggagattgtgagcgagcggattttgtgttctctgccatgatcagctagcgccaagtttctgccctgggaggctcagctctgcccagctgaatgggacgggcggctgagggccgtagaaacctgtgctttctgaactgaatggttagagaacatgaattcgctagaattgctccagtctatttctttacaatcgtttctttcaacccggcagggtcatacttgacaaacttgccagcgcctgaacttgagaaggttgtgatcacccgtgatgcttttaaaccccgtgatgcttttaatggtttatgaaactggatcttggtagacttaattacccgtgatgcttttaatggtttatggaactgaatcttggtagaattaaagtatctgttgctgtgttgagaaatgttatggtttctagttcgttcttgcaggtgcaaatttgcgttcacctttggaaattagcccatgcaattctgcctacatgatcccctccccctcattttttggttagtgcctgaacggtaaggcgttgctattctataatgcagtgtacaagcatggtactaaacccccgtttgaaacccctagagctgagttaactaacaattagctggtgtattagatgatggtttttgaaattttagcagttaactattagttctagatgttgcaaacaaaacctgattttcgcaccaaacatctatgtttgttcaacacaacatatgctgtttaggtttagggtttcttggatgaggatgatcaaaacacaaggatggtatacctgattgcatggatgagtagtcccaaaac

SEQ ID NO: 35838 - DNA, 2551 bp, Zea Mays
atgtggacgtgcccagatgaaattccagcggtagatgccaaccttgtgtccggcgaccggcgtgctccggttgccggggctgggtgggcaacacacaaatctagtgcctggcacctggcagcaacggcggagagacgatgcgcgccaggcgtggcttggcgttcagcgtcggccccaaccgcggccgaccctcgtgcgccggggctacgaccgttcggggccctccctgcctccacgcggaagctcttcttcctccctcaagacgcgaaccccgttgcctctcgggtcatcttcgccacaccgtcctgcccggaccgccgtggcgctctgcctcgatctaccaaatccatggctcggcacgaggatgcggacgcagaacaatcacttccatccgccagcgcgttgtctcgccgtcggatcgcgggatgggagatacgaaaccaaccaggtaccagtggcacatacatcatgagaatgaagagttgaaccaagatgagaagtggtagtgtgctggatcctcccctcttttttttggaagaaggcaggagcgttgccttgaacaattaaggaggagcgttcctcccctcttgagctgtatccaatatatatctctctcccgcacatcttccctggataccgtgctcctcttgcactcccccaaaacgcagctccctcagccaatcttccccagagcgcggctaggcacaggttctcaccaaaaccatgttttttctattgatttcccttacttcccgttgtttaggcctcgttttcccccaaaatctttaacgaacttggcgaatcgtttgggaagcaggggctttttggtcggctaagtgttttaggttggagatttaaggaattcagattttgctccatgctagtttcgatgcttctctgttgaatagagttgtttgggcacagccggatttgtagtgtgaagtgtgaactatagagaaacttaaaactgctgaggctgactgcagattttacagatcgagaagtatctgatattgttttccttatttatcttttgatgaggaaaggcatatgacttttcactccatagaatcgagtagggcccagatctgattgattccctgatggtctggtagtactgggttacctgctatggggagaagagctcaacaaagtgcagtaattccccattcgatccaaatggactggccttgcttcaaaggcatctgaagtatggacccctctgaacttccggagctgtcccgtactgctatgttgatctgctgcaaggtgtgtggaggacctgaagaggtggacaagaggttcctgatctgtgaccactatctttgcctgtacaagtactaccacattagttgcctgactaccgagcagattgcaagtgatgtgcagatgggcagccagcgctggtactgtccatcttgcctctgccgtgtctgcctgtgcgacacggacgatgaccagatcatcctgtgtgactgctgcgatcagggctatcatctctactgcctcagtcctccaagaagaaaggtgcccaaggggcattgggactgcgaaccctgcaaggagcggagggagaaggagaagaggatactgatgctccacaggaaggattacgatgaagacatcctgaagagtggcgagttccatggaccgaacttgctgcttaaggccgcgaaaaaggtgaagcgcgatgaggaggtgaaggtggctaagactaagagcaccagaaagtaagaggcatggagattgtgagcgagcggattttgtgttctctgccatgatcagctagcgccaagtttctgccctgggaggctcagctctgcccagctgaatgggacgggcggctgagggccgtagaaacctgtgctttctgaactgaatggttagagaacatgaattcgctagaattgctccagtctatttctttacaatcgtttctttcaacccggcagggtcatacttgacaaacttgccagcgcctgaacttgagaaggttgtgatcacccgtgatgcttttaaaccccgtgatgcttttaatggtttatgaaactggatcttggtagacttaattacccgtgatgcttttaatggtttatggaactgaatcttggtagaattaaagtatctgttgctgtgttgagaaatgttatggtttctagttcgttcttgcaggtgcaaatttgcgttcacctttggaaattagcccatgcaattctgcctacatgatcccctccccctcattttttggttagtgcctgaacggtaaggcgttgctattctataatgcagtgtacaagcatggtactaaacccccgtttgaaacccctagagctgagttaactaacaattagctggtgtattagatgatggtttttgaaattttagcagttaactattagttctagatgttgcaaacaaaacctgattttcgcaccaaacatctatgtttgttcaacacaacatatgctgtttaggtttagggtttcttggatgaggatgatcaaaacacaaggatggtatacctgattgcatggatgagtagtcccaaaac

SEQ ID NO: 35839 - DNA, 5562 bp, Zea Mays
gaccaggttgccattctgtgtcgcaaactcgcaaccaatccgtaccggaatcacgggagatgtggacgtgcccagatgaaattccagcggtagatgccaaccttgtgtccggcgaccggcgtgctccggttgccggggctgggtgggcaacacacaaatctagtgcctggcacctggcagcaacggcggagagacgatgcgcgccaggcgtggcttggcgttcagcgtcggccccaaccgcggccgaccctcgtgcgccggggctacgaccgttcggggccctccctgcctccacgcggaagctcttcttcctccctcaagacgcgaaccccgttgcctctcgggtcatcttcgccacaccgtcctgcccggaccgccgtggcgctctgcctcgatctaccaaatccatggctcggcacgaggatgcggacgcagaacaatcacttccatccgccagcgcgttgtctcgccgtcggatcgcgggatgggagatacgaaaccaaccagagttgcggactgtcgtggcacaaagtgtcttactgggaattcttgacggaacacttatatttttacaagctgagaggacttcatggtttcttccttactatatctgcgatatccgatatgttagttcacaagatgctgacatactaaaggcactgtatttatggccagttctgttcagtaatatcttcctttacagtttaacttgattcggcaagaactctcgtgagaacacaatctacttatttcattattatcttctgctgttctattttttttaaaaaacttgaactgagaacaaaccctatacatttgcattatgtgcaatgggagaaacacaaatgttaacttatattttgctcctcatccctagcaatgtactccctccgtcccagaatagtagtcattctaactcttgatttttatgtttatattcaaatagatgataataaatctagacacatatataaaacatatacatcacatattctatgcatctattaattacctaaaacgaattttaatttgagacagagggagtatatgccaccatctttacctgaattggctatgtgaaaaaagctcatttttcttgaccaaaataaaacaaatgcaaaagggagttattgccataaaattaaccctaactccttcagcatttgttcgtgataaatgcatgccaacaacctgagcatgtctttttttcttaggcttctattcgttgccactacataaaatgcatgctctacaatctgaatagaccttatgatgcagcttgatcttgtgcacaatctcttgaggcatttggacattacatgttcatgctgcaagtcaaattgtaaaaacacacacacaaaattacttctataacctgcaaaatgtatcaaaaccatcataattcataccctgtgagtctatttttttggtcctgaggaagaaaactggagttcatgtgctgatacatttctaacattttctgcagattgctcacttttacggttaaaccctaccagctctagcaatgtgaactgaaatgtatctacctctaaaaaatgataaatttccacgaacagaacaatcaaattttggcattactggaattttcaataggtacctaactacctacacgattgacatatattgcatttatttataactatttgttgaggcaactctacttaacatgtcaaatcagggattcatgcatcacatatattgcatattgaacattacatgtgcaaatagttcaaataacagcacaaaaaacgtgaaaaggtatatatgtattgggatttaagacacctttgtatattctgccatatcaaataacttagaacagtttaatgatttcctaaaagcccagtgaagtagcatgagcattacagtaactcacaatttcccaaaaaaagagacagaagtggagtatgatgaaaagaaactgaggataagaccgttcaagaaggcagtcacaggatgacaacatctgtgaatgtctattctctggtaacttttaaggcagttagcatattccagattggcattgtcacattctaggctgttttctgctaatgcatgcaatgtacacctcacaagcatttttggcacttccaacccaacaagttagtaattaattagtatcttggccttctgtatttactatttttttgaaaaaacatttgtctgtttcttaacttttggtgctggcaggagaggtacccaaaaatattgcatggttgcccctgctcataactcttactccgttttacccatatttttccagaatttgcaccgttgcccccttttttgaaacaaatccttcgtttgctgctattccgttataagcacataacggtgttaactcagcccataaaaagacgttcttactcttgcatcattgtccctcttattatcatctgtttgcaaatttgccctcacttttatataaaactttagagtataagtataacataaatccgaccataaatttggaaatcaattatttcaaatacccggaatttaatgaaaacaaattaaatctaacaactaaaagaaaatagaatgtgaactagaagtggaaaagagttcttaagcatttgaggttcccttgtagttaaatatgtaactgtactatcctatgaatatcttcaacaatttgttgctggatcacacgaactattataccattatgcattcaacttctatcagtaactcatgagtcatgaggtatttttttattgatggtaaatggggaaaaatacaaatacttctcctagatactgctgcaactaaaaatgcagaaaaaacattgcatccaagtgtttgaagagattgccagctagattagaatctgtcatcagatcgcttgagatagttagcatttgaaagtgaaacaaatggaaggcctattagaaaaactgagacaaacaaaatttaattcaccacaagagcttctttatcttttttgttgttgtcctgatcgtgaaagataaccttttcaaactgctattttaggtaccagtggcacatacatcatgagaatgaagagttgaaccaagatgagaagtggtagtgtgctggtaaaaacttgtgcaacctcttacttttaagaaacgaaagtatactacattccacgaaaagtaaggctaaccttagagtgctctccagcctaagaaaataacgtactggaaacttatatttgccttgagtttataaagtactaatcaatatcatcaattttttacttcttcctacagagttgcaacacaaacatatacctgggcaaactatggcttcatttttttagttatcaatacaatggaaataagaatacacagaaatccaggatagtgacaaaaaaaagagagtcaatgcatgcatcagaatttttgagaaacactttccaaattgtgttttacgggggatagaacacaaacacaactcttttgaggagataaaaaaggcaagcagaaaaggaaggcagcaataaactctcacacctatctttgctggaattttgtcaggatcctcccctcttttttttggaagaaggcaggagcgttgccttgaacaattaaggaggagcgttcctcccctcttgagctgtatccaatatatatctctctcccgcacatcttccctggataccgtgctcctcttgcactcccccaaaacgcagctccctcagccaatcttccccagagcgcggctaggcacaggttctcaccaaaaccatgttttttctattgatttcccttacttcccgttgtttaggcctcgttttcccccaaaatctttaacgaacttggcgaatcgtttgggaagcaggggctttttggtcggctaagtgttttaggttggagatttaaggaattcagattttgctccatgctagtttcgatgcttctctgttgaatagagttgtttgggcacagccggatttgtagtgtgaagtgtgaactatagagaaacttaaaactgctgaggctgactgcagattttacagatcgagaagtatctgatattgttttccttatttatcttttgatgaggaaaggcatatgacttttcactccatagaatcgagtagggcccagatctgattgattccctgatggtctggtagtactgggttacctgctatggggagaagagctcaacaaagtgcagtaattccccattcgatccaaatggactggccttgcttcaaaggcatctgaagtatggacccctctgaacttccggagctgtcccgtactgctatgttgatctgctgcaaggtgtgtggaggacctgaagaggtggacaagaggttcctgatctgtgaccactatctttgcctgtacaagtactaccacattagttgcctgactaccgagcagattgcaagtgatgtgcagatgggcagccagcgctggtactgtccatcttgcctctgccgtgtctgcctgtgcgacacggacgatgaccagatcatcctgtgtgactgctgcgatcagggctatcatctctactgcctcagtcctccaagaagaaaggtgcccaaggggcattgggactgcgaaccctgcaaggagcggagggagaaggagaagaggatactgatgctccacaggaaggattacgatgaagacatcctgaagagtggcgagttccatggaccgaacttgctgcttaaggccgcgaaaaaggtgaagcgcgatgaggaggtgaaggtggctaagactaagagcaccagaaagtaagaggcatggagattgtgagcgagcggattttgtgttctctgccatgatcagctagcgccaagtttctgccctgggaggctcagctctgcccagctgaatgggacgggcggctgagggccgtagaaacctgtgctttctgaactgaatggttagagaacatgaattcgctagaattgctccagtctatttctttacaatcgtttctttcaacccggcagggtcatacttgacaaacttgccagcgcctgaacttgagaaggttgtgatcacccgtgatgcttttaaaccccgtgatgcttttaatggtttatgaaactggatcttggtagacttaattacccgtgatgcttttaatggtttatggaactgaatcttggtagaattaaagtatctgttgctgtgttgagaaatgttatggtttctagttcgttcttgcaggtgcaaatttgcgttcacctttggaaattagcccatgcaattctgcctacatgatcccctccccctcattttttggttagtgcctgaacggtaaggcgttgctattctataatgcagtgtacaagcatggtactaaacccccgtttgaaacccctagagctgagttaactaacaattagctggtgtattagatgatggtttttgaaattttagcagttaactattagttctagatgttgcaaacaaaacctgattttcgcaccaaacatctatgtttgttcaacacaacatatgctgtttaggtttagggtttcttggatgaggatgatcaaaacacaaggatggtatacctgattgcatggatgagtagtcccaaaac

SEQ ID NO: 35840 - DNA, 3085 bp, Zea Mays
gtcgattccggggtgaattttgtctgaccaggttgccattctgtgtcgcaaactcgcaaccaatccgtaccggaatcacgggagatgtggacgtgcccagatgaaattccagcggtagatgccaaccttgtgtccggcgaccggcgtgctccggttgccggggctgggtgggcaacacacaaatctagtgcctggcacctggcagcaacggcggagagacgatgcgcgccaggtagatcctcagcacggtctgaaatctgcaaggaggtgggggcgaaagcatgcgctactatgctagaagctcctcatcccggtcggtaaacgccactgccgccgcgagctcacctccgacgggacggaacgaagccgctgccacccgagggaaccgcgtcgaccaatcccaccctaacgacatcgcctcagcaccagcaagctggccacaccaatcccccggcctcgcgcccctcgagcccccgatccaaatggtgcaggcggaccagtagcggcgcccaccgcgccgccaattggcactgcggccgccactacgtccgaaaaactcgcgatcgtgggacctccgatcccgtcccatggtcccgccggcctgtccgtgccttcccaagttcctagcaccaccgccgcgcgccgcgccggtgccgagggagcggcagcagtaaccggcaggcgaatttgaatccagctgcgcggcggggcgaactcgctctcatgcgcaggcgtggcttggcgttcagcgtcggccccaaccgcggccgaccctcgtgcgccggggctacgaccgttcggggccctccctgcctccacgcggaagctcttcttcctccctcaagacgcgaaccccgttgcctctcgggtcatcttcgccacaccgtcctgcccggaccgccgtggcgctctgcctcgatctaccaaatccatggctcggcacgaggatgcggacgcagaacaatcacttccatccgccagcgcgttgtctcgccgtcggatcgcgggatgggagatacgaaaccaaccaggtaccagtggcacatacatcatgagaatgaagagttgaaccaagatgagaagtggtagtgtgctggtaaaaacttgtgcaacctcttacttttaagaaacgaaagtatactacattccacgaaaagtaaggctaaccttagagtgctctccagcctaagaaaataacgtactggaaacttatatttgccttgagtttataaagtactaatcaatatcatcaattttttacttcttcctacagagttgcaacacaaacatatacctgggcaaactatggcttcatttttttagttatcaatacaatggaaataagaatacacagaaatccaggatagtgacaaaaaaaagagagtcaatgcatgcatcagaatttttgagaaacactttccaaattgtgttttacgggggatagaacacaaacacaactcttttgaggagataaaaaaggcaagcagaaaaggaaggcagcaataaactctcacacctatctttgctggaattttgtcaggatcctcccctcttttttttggaagaaggcaggagcgttgccttgaacaattaaggaggagcgttcctcccctcttgagctgtatccaatatatatctctctcccgcacatcttccctggataccgtgctcctcttgcactcccccaaaacgcagctccctcagccaatcttccccagagcgcggctaggcacaggcatctgaagtatggacccctctgaacttccggagctgtcccgtactgctatgttgatctgctgcaaggtgtgtggaggacctgaagaggtggacaagaggttcctgatctgtgaccactatctttgcctgtacaagtactaccacattagttgcctgactaccgagcagattgcaagtgatgtgcagatgggcagccagcgctggtactgtccatcttgcctctgccgtgtctgcctgtgcgacacggacgatgaccagatcatcctgtgtgactgctgcgatcagggctatcatctctactgcctcagtcctccaagaagaaaggtgcccaaggggcattgggactgcgaaccctgcaaggagcggagggagaaggagaagaggatactgatgctccacaggaaggattacgatgaagacatcctgaagagtggcgagttccatggaccgaacttgctgcttaaggccgcgaaaaaggtgaagcgcgatgaggaggtgaaggtggctaagactaagagcaccagaaagtaagaggcatggagattgtgagcgagcggattttgtgttctctgccatgatcagctagcgccaagtttctgccctgggaggctcagctctgcccagctgaatgggacgggcggctgagggccgtagaaacctgtgctttctgaactgaatggttagagaacatgaattcgctagaattgctccagtctatttctttacaatcgtttctttcaacccggcagggtcatacttgacaaacttgccagcgcctgaacttgagaaggttgtgatcacccgtgatgcttttaaaccccgtgatgcttttaatggtttatgaaactggatcttggtagacttaattacccgtgatgcttttaatggtttatggaactgaatcttggtagaattaaagtatctgttgctgtgttgagaaatgttatggtttctagttcgttcttgcaggtgcaaatttgcgttcacctttggaaattagcccatgcaattctgcctacatgatcccctccccctcattttttggttagtgcctgaacggtaaggcgttgctattctataatgcagtgtacaagcatggtactaaacccccgtttgaaacccctagagctgagttaactaacaattagctggtgtattagatgatggtttttgaaattttagcagttaactattagttctagatgttgcaaacaaaacctgattttcgcaccaaacatctatgtttgttcaacacaacatatgctgtttaggtttagggtttcttggatgaggatgatcaaaacacaaggatggtatacctgattgcatggatgagtagtcccaaaac

SEQ ID NO: 35841 - DNA, 523 bp, Zea Mays
atgtggacgtgcccagatgaaattccagcggtagatgccaaccttgtgtccggcgaccggcgtgctccggttgccggggctgggtgggcaacacacaaatctagtgcctggcacctggcagcaacggcggagagacgatgcgcgccaggcgtggcttggcgttcagcgtcggccccaaccgcggccgaccctcgtgcgccggggctacgaccgttcggggccctccctgcctccacgcggaagctcttcttcctccctcaagacgcgaaccccgttgcctctcgggtcatcttcgccacaccgtcctgcccggaccgccgtggcgctctgcctcgatctaccaaatccatggctcggcacgaggatgcggacgcagaacaatcacttccatccgccagcgcgttgtctcgccgtcggatcgcgggatgggagatacgaaaccaaccagattgctcacttttacggttaaaccctaccagctctagcaatgtgaactgaaatgtatctacctctaaaaaatgat

SEQ ID NO: 35842 - DNA, 1022 bp, Zea Mays
atgtggacgtgcccagatgaaattccagcggtagatgccaaccttgtgtccggcgaccggcgtgctccggttgccggggctgggtgggcaacacacaaatctagtgcctggcacctggcagcaacggcggagagacgatgcgcgccaggtagatcctcagcacggtctgaaatctgcaaggaggtgggggcgaaagcatgcgctactatgctagaagctcctcatcccggtcggtaaacgccactgccgccgcgagctcacctccgacgggacggaacgaagccgctgccacccgagggaaccgcgtcgaccaatcccaccctaacgacatcgcctcagcaccagcaagctggccacaccaatcccccggcctcgcgcccctcgagcccccgatccaaatggtgcaggcggaccagtagcggcgcccaccgcgccgccaattggcactgcggccgccactacgtccgaaaaactcgcgatcgtgggacctccgatcccgtcccatggtcccgccggcctgtccgtgccttcccaagttcctagcaccaccgccgcgcgccgcgccggtgccgagggagcggcagcagtaaccggcaggcgaatttgaatccagctgcgcggcggggcgaactcgctctcatgcgcaggcgtggcttggcgttcagcgtcggccccaaccgcggccgaccctcgtgcgccggggctacgaccgttcggggccctccctgcctccacgcggaagctcttcttcctccctcaagacgcgaaccccgttgcctctcgggtcatcttcgccacaccgtcctgcccggaccgccgtggcgctctgcctcgatctaccaaatccatggctcggcacgaggatgcggacgcagaacaatcacttccatccgccagcgcgttgtctcgccgtcggatcgcgggatgggagatacgaaaccaaccagattgctcacttttacggttaaaccctaccagctctagcaatgtgaactgaaatgtatctacctctaaaaaatgat

SEQ ID NO: 35843 - DNA, 3143 bp, Zea Mays
aaaaaataaactaaaataaagggagagaaaaactgtcttttgctacagctgagctagaaaaggaacctttttccgcgcgttattcttcttcttgtattcgaaagcccaagcccaactgataaaaggcccatgctcaagcgataagacgagaataaacaaccaccgatcccccagggcccaggcccacgcgcacacattctgattccgaaggcaagggcgtgtacatggcggtgagacgaggagccaaaacccaacggcgacgagaaatccacggcggctagttcaccccatccggcgcgagcgactccctccgcctgcaccaaaaacgagggcgttttcgtgtcccctcctccaaactccggagcccacatcctccagtccccactcacctgcgccactccccaccacgctcctcaaaaccctaggtccttcgatctaatgccgtgagctctcgaattctcaattcccccagcctctccatggaagaccccgtggcggtaccctcctcgtccttgaccgaccctgccgctgccgccgcagctagggttccgggtgcggtggcagcagcccctggcgtcacctctgcgccgtccgctctcgctccgacgcagccgcctgccaccgcggccgcggtctctgaagccgcgacgccgtgccagaggcagctgttcacagtggagctgcggccaggggagaccacaatcgtgtcgtggaagaagcttctcaaggaggccgggcacaccgccgcggcaccgccagtggcggtggagccagcgttcgccgcacatgcgggcccatctggtccggcacatcctgcagaaaatgacccaaaggatccaacacagccaaatcggttcaatgcagtgattgaaaaaatagagcgcctttacatgggaaaacatagcagcgatgaagaggatcttaatgatgtaccagatgatgatcagtatgacactgaggattctttcattgatgatgccgaattggatgaatatttcgaagttgataatttgaaaactaagcatgatggctattttgtgaacaagggaaaattggaacagattgaacctggtacagcggcaaatgttgctccaaagaaaaggagaagaaaggatgcatcaagttcttatctggagagtaatcaccttggtccaattgattattttgatattggcgatgtacctgaaaaatcctctgcaagaggtactgtgcagacgggaaaacagttagttagtagcaacgtaagttcttatggtcaataccatgaggacaatagagtggtgaagaataaaatcagtggtcctggaggagcccctaaaagaaaatcttctgaattctcgggtgacgctgcagcacgagctaagattattaaggatgtctcgcatgctcctttggagctaagagacatggaaaagcataaagctgcagcactacctgttgactatgcacataagtcaaaaatcagcgaaacatttgattatgcatatccagcttatagggataaaggcacttcagggcaacttgatttccaacaaagaaagataagcagggaaaatcaaggtccatcaaatagaacctatcgcaaagagaaacatggaacaaatgaatatcctggcatcgctatggctactgcggtctattctacacaaacaatgcacccagttgttggtagggagggttcaggaactaaacccaaaggcaccaggcttgagcgagctattcgcgatctccagaagatcgttgcagaatacagaccaccaacaattgatattaatgaggtagatccaaatggccaggtagcagttaaaagacggttgcctcctgaaataaagcaaaagcttgcgaaggcaaataacggaaagatccaagaacatgagctaatgaatcgcctcatgggcatagttggacaccttgttcagcgcaggacactgaagagaaacatgaaagaaatggtagaatctggtatatctgctaaactggagaaggctgacaggtttcagcgtgtaaaattggagatcaatgagatgattaaagagcgtatggctacaaagtccaaggtcaatgaacaggatggttcagctgatgattttcaggttgctaatgatgaaagaagagctttaaaaacaaagtatacaatggatactgcattggaggacaagatgtgtgatctgtatgatatgtatgttgagcctgataaggcgttagcacgaattgttagctttatcatttgcatgttagtgaagggtatggatgaagacaagggccctcaaagcaggaagttatatgtagagcttgccgagttatggcctcatggttgcatggacaatgtcgggatcaaagatgccatttatagatcaaaggagcgaagaagattattgtacagccagcaaaaggttcgcagtgaagagagaatgaagaggaagaggctggctgcaacagcaaagctgccagatggcctcgcagttgcaatgcaaagtggagttgccccacaagttgcacagccacccataacaaatcccatcacataccatacggctgattatggacagaacccggggttaaaatattttgatagggctcgtgaaacgagctccagtgcaatccctgatgacggcaacagaattgctggtgaggtcaagaagaagaaaagaaaacctgaatatgaccctgtagatacacaagctaacctaccaagggctcccatgccgcacgggagcgagaagcaaaagccttctaagcctgctgacgaggccagtgctggtagcctgccctccatggcgacaactcaaactgtgcttggcctaccgtcggtgcttggtcataaccaacaacctagctgattctttcggcgtagtgttggacatttggttctccttataggcctttttcagctgctgtaacaaattatggcctttccatgtgttcagcatcgattgttgagactaacatgttcccgagtagagaggatatttgatcactctttacttttccagcattgcatggttggtacccttgcccagattatctgtgcagcgctgatagatatgatctgcaaccccttcaaataccagttgtaattatgaatattttctcgagacatgtactgctcatattgtgcgaagcgatgtgcagattttctttta

SEQ ID NO: 35844 - DNA, 3105 bp, Zea Mays
aaaaaataaactaaaataaagggagagaaaaactgtcttttgctacagctgagctagaaaaggaacctttttccgcgcgttattcttcttcttgtattcgaaagcccaagcccaactgataaaaggcccatgctcaagcgataagacgagaataaacaaccaccgatcccccagggcccaggcccacgcgcacacattctgattccgaaggcaagggcgtgtacatggcggtgagacgaggagccaaaacccaacggcgacgagaaatccacggcggctagttcaccccatccggcgcgagcgactccctccgcctgcaccaaaaacgagggcgttttcgtgtcccctcctccaaactccggagcccacatcctccagtccccactcacctgcgccactccccaccacgctcctcaaaaccctaggtccttcgatctaatgccgtgagctctcgaattctcaattcccccagcctctccatggaagaccccgtggcggtaccctcctcgtccttgaccgaccctgccgctgccgccgcagctagggttccgggtgcggtggcagcagcccctggcgtcacctctgcgccgtccgctctcgctccgacgcagccgcctgccaccgcggccgcggtctctgaagccgcgacgccgtgccagaggcagctgttcacagtggagctgcggccaggggagaccacaatcgtgtcgtggaagaagcttctcaaggaggccgggcacaccgccgcggcaccgccagtggcggtggagccagcgttcgccgcacatgcgggcccatctggtccggcacatcctgcagaaaatgacccaaaggatccaacacagccaaatcggttcaatgcagtgattgaaaaaatagagcgcctttacatgggaaaacatagcagcgatgaagaggatcttaatgatgtaccagatgatgatcagtatgacactgaggattctttcattgatgatgccgaattggatgaatatttcgaagttgataatttgaaaactaagcatgatggctattttgtgaacaagggaaaattggaacagattgaacctggtacagcggcaaatgttgctccaaagaaaaggagaagaaaggatgcatcaagttcttatctggagagtaatcaccttggtccaattgattattttgatattggcgatgtacctgaaaaatcctctgcaagaggtactgtgcagacgggaaaacagttagttagtagcaacgtaagttcttatggtcaataccatgaggacaatagagtggtgaagaataaaatcagtggtcctggaggagcccctaaaagaaaatcttctgaattctcgggtgacgctgcagcacgagctaagattattaaggatgtctcgcatgctcctttggagctaagagacatggaaaagcataaagctgcagcactacctgttgactatgcacataagtcaaaaatcagcgaaacatttgattatgcatatccagcttatagggataaaggcacttcagggcaacttgatttccaacaaagaaagataagcagggaaaatcaaggtccatcaaatagaacctatcgcaaagagaaacatggaacaaatgaatatcctggcatcgctatggctactgcggtctattctacacaaacaatgcacccagttgttggtagggagggttcaggaactaaacccaaaggcaccaggcttgagcgagctattcgcgatctccagaagatcgttgcagaatacagaccaccaacaattgatattaatgaggtagatccaaatggccaggtagcagttaaaagacggttgcctcctgaaataaagcaaaagcttgcgaaggttgcaaaggttatcggcaaataacggaaagatccaagaacatgagctaatgaatcgcctcatgggcatagttggacaccttgttcagcgcaggacactgaagagaaacatgaaagaaatggtagaatctggtatatctgctaaactggagaaggctgacaggtttcagcgtgtaaaattggagatcaatgagatgattaaagagcgtatggctacaaagtccaaggtcaatgaacaggatggttcagctgatgattttcaggttgctaatgatgaaagaagagctttaaaaacaaagtatacaatggatactgcattggaggacaagatgtgtgatctgtatgatatgtatgttgagggtatggatgaagacaagggccctcaaagcaggaagttatatgtagagcttgccgagttatggcctcatggttgcatggacaatgtcgggatcaaagatgccatttatagatcaaaggagcgaagaagattattgtacagccagcaaaaggttcgcagtgaagagagaatgaagaggaagaggctggctgcaacagcaaagctgccagatggcctcgcagttgcaatgcaaagtggagttgccccacaagttgcacagccacccataacaaatcccatcacataccatacggctgattatggacagaacccggggttaaaatattttgatagggctcgtgaaacgagctccagtgcaatccctgatgacggcaacagaattgctggtgaggtcaagaagaagaaaagaaaacctgaatatgaccctgtagatacacaagctaacctaccaagggctcccatgccgcacgggagcgagaagcaaaagccttctaagcctgctgacgaggccagtgctggtagcctgccctccatggcgacaactcaaactgtgcttggcctaccgtcggtgcttggtcataaccaacaacctagctgattctttcggcgtagtgttggacatttggttctccttataggcctttttcagctgctgtaacaaattatggcctttccatgtgttcagcatcgattgttgagactaacatgttcccgagtagagaggatatttgatcactctttacttttccagcattgcatggttggtacccttgcccagattatctgtgcagcgctgatagatatgatctgcaaccccttcaaataccagttgtaattatgaatattttctcgagacatgtactgctcatattgtgcgaagcgatgtgcagattttctttta

SEQ ID NO: 35845 - DNA, 3188 bp, Zea Mays
aaaaaataaactaaaataaagggagagaaaaactgtcttttgctacagctgagctagaaaaggaacctttttccgcgcgttattcttcttcttgtattcgaaagcccaagcccaactgataaaaggcccatgctcaagcgataagacgagaataaacaaccaccgatcccccagggcccaggcccacgcgcacacattctgattccgaaggcaagggcgtgtacatggcggtgagacgaggagccaaaacccaacggcgacgagaaatccacggcggctagttcaccccatccggcgcgagcgactccctccgcctgcaccaaaaacgagggcgttttcgtgtcccctcctccaaactccggagcccacatcctccagtccccactcacctgcgccactccccaccacgctcctcaaaaccctaggtccttcgatctaatgccgtgagctctcgaattctcaattcccccagcctctccatggaagaccccgtggcggtaccctcctcgtccttgaccgaccctgccgctgccgccgcagctagggttccgggtgcggtggcagcagcccctggcgtcacctctgcgccgtccgctctcgctccgacgcagccgcctgccaccgcggccgcggtctctgaagccgcgacgccgtgccagaggcagctgttcacagtggagctgcggccaggggagaccacaatcgtgtcgtggaagaagcttctcaaggaggccgggcacaccgccgcggcaccgccagtggcggtggagccagcgttcgccgcacatgcgggcccatctggtccggcacatcctgcagaaaatgacccaaaggatccaacacagccaaatcggttcaatgcagtgattgaaaaaatagagcgcctttacatgggaaaacatagcagcgatgaagaggatcttaatgatgtaccagatgatgatcagtatgacactgaggattctttcattgatgatgccgaattggatgaatatttcgaagttgataatttgaaaactaagcatgatggctattttgtgaacaagggaaaattggaacagattgaacctggtacagcggcaaatgttgctccaaagaaaaggagaagaaaggatgcatcaagttcttatctggagagtaatcaccttggtccaattgattattttgatattggcgatgtacctgaaaaatcctctgcaagaggtactgtgcagacgggaaaacagttagttagtagcaacgtaagttcttatggtcaataccatgaggacaatagagtggtgaagaataaaatcagtggtcctggaggagcccctaaaagaaaatcttctgaattctcgggtgacgctgcagcacgagctaagattattaaggatgtctcgcatgctcctttggagctaagagacatggaaaagcataaagctgcagcactacctgttgactatgcacataagtcaaaaatcagcgaaacatttgattatgcatatccagcttatagggataaaggcacttcagggcaacttgatttccaacaaagaaagataagcagggaaaatcaaggtccatcaaatagaacctatcgcaaagagaaacatggaacaaatgaatatcctggcatcgctatggctactgcggtctattctacacaaacaatgcacccagttgttggtagggagggttcaggaactaaacccaaaggcaccaggcttgagcgagctattcgcgatctccagaagatcgttgcagaatacagaccaccaacaattgatattaatgaggtagatccaaatggccaggtagcagttaaaagacggttgcctcctgaaataaagcaaaagcttgcgaaggttgcaaaggcaaataacggaaagatccaagaacatgagctaatgaatcgcctcatgggcatagttggacaccttgttcagcgcaggacactgaagggatggcagcgggtcaggtattatccgcacatgagtatacctgtgatcctaatttttacccgtgcccgcgagcatacctgcgggctgcggagaaacatgaaagaaatggtagaatctggtatatctgctaaactggagaaggctgacaggtttcagcgtgtaaaattggagatcaatgagatgattaaagagcgtatggctacaaagtccaaggtcaatgaacaggatggttcagctgatgattttcaggttgctaatgatgaaagaagagctttaaaaacaaagtatacaatggatactgcattggaggacaagatgtgtgatctgtatgatatgtatgttgagggtatggatgaagacaagggccctcaaagcaggaagttatatgtagagcttgccgagttatggcctcatggttgcatggacaatgtcgggatcaaagatgccatttatagatcaaaggagcgaagaagattattgtacagccagcaaaaggttcgcagtgaagagagaatgaagaggaagaggctggctgcaacagcaaagctgccagatggcctcgcagttgcaatgcaaagtggagttgccccacaagttgcacagccacccataacaaatcccatcacataccatacggctgattatggacagaacccggggttaaaatattttgatagggctcgtgaaacgagctccagtgcaatccctgatgacggcaacagaattgctggtgaggtcaagaagaagaaaagaaaacctgaatatgaccctgtagatacacaagctaacctaccaagggctcccatgccgcacgggagcgagaagcaaaagccttctaagcctgctgacgaggccagtgctggtagcctgccctccatggcgacaactcaaactgtgcttggcctaccgtcggtgcttggtcataaccaacaacctagctgattctttcggcgtagtgttggacatttggttctccttataggcctttttcagctgctgtaacaaattatggcctttccatgtgttcagcatcgattgttgagactaacatgttcccgagtagagaggatatttgatcactctttacttttccagcattgcatggttggtacccttgcccagattatctgtgcagcgctgatagatatgatctgcaaccccttcaaataccagttgtaattatgaatattttctcgagacatgtactgctcatattgtgcgaagcgatgtgcagattttctttta

SEQ ID NO: 35846 - DNA, 3098 bp, Zea Mays
aaaaaataaactaaaataaagggagagaaaaactgtcttttgctacagctgagctagaaaaggaacctttttccgcgcgttattcttcttcttgtattcgaaagcccaagcccaactgataaaaggcccatgctcaagcgataagacgagaataaacaaccaccgatcccccagggcccaggcccacgcgcacacattctgattccgaaggcaagggcgtgtacatggcggtgagacgaggagccaaaacccaacggcgacgagaaatccacggcggctagttcaccccatccggcgcgagcgactccctccgcctgcaccaaaaacgagggcgttttcgtgtcccctcctccaaactccggagcccacatcctccagtccccactcacctgcgccactccccaccacgctcctcaaaaccctaggtccttcgatctaatgccgtgagctctcgaattctcaattcccccagcctctccatggaagaccccgtggcggtaccctcctcgtccttgaccgaccctgccgctgccgccgcagctagggttccgggtgcggtggcagcagcccctggcgtcacctctgcgccgtccgctctcgctccgacgcagccgcctgccaccgcggccgcggtctctgaagccgcgacgccgtgccagaggcagctgttcacagtggagctgcggccaggggagaccacaatcgtgtcgtggaagaagcttctcaaggaggccgggcacaccgccgcggcaccgccagtggcggtggagccagcgttcgccgcacatgcgggcccatctggtccggcacatcctgcagaaaatgacccaaaggatccaacacagccaaatcggttcaatgcagtgattgaaaaaatagagcgcctttacatgggaaaacatagcagcgatgaagaggatcttaatgatgtaccagatgatgatcagtatgacactgaggattctttcattgatgatgccgaattggatgaatatttcgaagttgataatttgaaaactaagcatgatggctattttgtgaacaagggaaaattggaacagattgaacctggtacagcggcaaatgttgctccaaagaaaaggagaagaaaggatgcatcaagttcttatctggagagtaatcaccttggtccaattgattattttgatattggcgatgtacctgaaaaatcctctgcaagaggtactgtgcagacgggaaaacagttagttagtagcaacgtaagttcttatggtcaataccatgaggacaatagagtggtgaagaataaaatcagtggtcctggaggagcccctaaaagaaaatcttctgaattctcgggtgacgctgcagcacgagctaagattattaaggatgtctcgcatgctcctttggagctaagagacatggaaaagcataaagctgcagcactacctgttgactatgcacataagtcaaaaatcagcgaaacatttgattatgcatatccagcttatagggataaaggcacttcagggcaacttgatttccaacaaagaaagataagcagggaaaatcaaggtccatcaaatagaacctatcgcaaagagaaacatggaacaaatgaatatcctggcatcgctatggctactgcggtctattctacacaaacaatgcacccagttgttggtagggagggttcaggaactaaacccaaaggcaccaggcttgagcgagctattcgcgatctccagaagatcgttgcagaatacagaccaccaacaattgatattaatgaggtagatccaaatggccaggtagcagttaaaagacggttgcctcctgaaataaagcaaaagcttgcgaaggttgcaaaggcaaataacggaaagatccaagaacatgagctaatgaatcgcctcatgggcatagttggacaccttgttcagcgcaggacactgaagagaaacatgaaagaaatggtagaatctggtatatctgctaaactggagaaggctgacaggtttcagcgtgtaaaattggagatcaatgagatgattaaagagcgtatggctacaaagtccaaggtcaatgaacaggatggttcagctgatgattttcaggttgctaatgatgaaagaagagctttaaaaacaaagtatacaatggatactgcattggaggacaagatgtgtgatctgtatgatatgtatgttgagggtatggatgaagacaagggccctcaaagcaggaagttatatgtagagcttgccgagttatggcctcatggttgcatggacaatgtcgggatcaaagatgccatttatagatcaaaggagcgaagaagattattgtacagccagcaaaaggttcgcagtgaagagagaatgaagaggaagaggctggctgcaacagcaaagctgccagatggcctcgcagttgcaatgcaaagtggagttgccccacaagttgcacagccacccataacaaatcccatcacataccatacggctgattatggacagaacccggggttaaaatattttgatagggctcgtgaaacgagctccagtgcaatccctgatgacggcaacagaattgctggtgaggtcaagaagaagaaaagaaaacctgaatatgaccctgtagatacacaagctaacctaccaagggctcccatgccgcacgggagcgagaagcaaaagccttctaagcctgctgacgaggccagtgctggtagcctgccctccatggcgacaactcaaactgtgcttggcctaccgtcggtgcttggtcataaccaacaacctagctgattctttcggcgtagtgttggacatttggttctccttataggcctttttcagctgctgtaacaaattatggcctttccatgtgttcagcatcgattgttgagactaacatgttcccgagtagagaggatatttgatcactctttacttttccagcattgcatggttggtacccttgcccagattatctgtgcagcgctgatagatatgatctgcaaccccttcaaataccagttgtaattatgaatattttctcgagacatgtactgctcatattgtgcgaagcgatgtgcagattttctttta

SEQ ID NO: 35847 - DNA, 3101 bp, Zea Mays
aaaaaataaactaaaataaagggagagaaaaactgtcttttgctacagctgagctagaaaaggaacctttttccgcgcgttattcttcttcttgtattcgaaagcccaagcccaactgataaaaggcccatgctcaagcgataagacgagaataaacaaccaccgatcccccagggcccaggcccacgcgcacacattctgattccgaaggcaagggcgtgtacatggcggtgagacgaggagccaaaacccaacggcgacgagaaatccacggcggctagttcaccccatccggcgcgagcgactccctccgcctgcaccaaaaacgagggcgttttcgtgtcccctcctccaaactccggagcccacatcctccagtccccactcacctgcgccactccccaccacgctcctcaaaaccctaggtccttcgatctaatgccgtgagctctcgaattctcaattcccccagcctctccatggaagaccccgtggcggtaccctcctcgtccttgaccgaccctgccgctgccgccgcagctagggttccgggtgcggtggcagcagcccctggcgtcacctctgcgccgtccgctctcgctccgacgcagccgcctgccaccgcggccgcggtctctgaagccgcgacgccgtgccagaggcagctgttcacagtggagctgcggccaggggagaccacaatcgtgtcgtggaagaagcttctcaaggaggccgggcacaccgccgcggcaccgccagtggcggtggagccagcgttcgccgcacatgcgggcccatctggtccggcacatcctgcagaaaatgacccaaaggatccaacacagccaaatcggttcaatgcagtgattgaaaaaatagagcgcctttacatgggaaaacatagcagcgatgaagaggatcttaatgatgtaccagatgatgatcagtatgacactgaggattctttcattgatgatgccgaattggatgaatatttcgaagttgataatttgaaaactaagcatgatggctattttgtgaacaagggaaaattggaacagattgaacctggtacagcggcaaatgttgctccaaagaaaaggagaagaaaggatgcatcaagttcttatctggagagtaatcaccttggtccaattgattattttgatattggcgatgtacctgaaaaatcctctgcaagaggtactgtgcagacgggaaaacagttagttagtagcaacgtaagttcttatggtcaataccatgaggacaatagagtggtgaagaataaaatcagtggtcctggaggagcccctaaaagaaaatcttctgaattctcgggtgacgctgcagcacgagctaagattattaaggatgtctcgcatgctcctttggagctaagagacatggaaaagcataaagctgcagcactacctgttgactatgcacataagtcaaaaatcagcgaaacatttgattatgcatatccagcttatagggataaaggcacttcagggcaacttgatttccaacaaagaaagataagcagggaaaatcaaggtccatcaaatagaacctatcgcaaagagaaacatggaacaaatgaatatcctggcatcgctatggctactgcggtctattctacacaaacaatgcacccagttgttggtagggagggttcaggaactaaacccaaaggcaccaggcttgagcgagctattcgcgatctccagaagatcgttgcagaataccaccaacaattgatattaatgaggtagatccaaatggccaggtagcagttaaaagacggttgcctcctgaaataaagcaaaagcttgcgaaggttgcaaaggttatcggcaaataacggaaagatccaagaacatgagctaatgaatcgcctcatgggcatagttggacaccttgttcagcgcaggacactgaagagaaacatgaaagaaatggtagaatctggtatatctgctaaactggagaaggctgacaggtttcagcgtgtaaaattggagatcaatgagatgattaaagagcgtatggctacaaagtccaaggtcaatgaacaggatggttcagctgatgattttcaggttgctaatgatgaaagaagagctttaaaaacaaagtatacaatggatactgcattggaggacaagatgtgtgatctgtatgatatgtatgttgagggtatggatgaagacaagggccctcaaagcaggaagttatatgtagagcttgccgagttatggcctcatggttgcatggacaatgtcgggatcaaagatgccatttatagatcaaaggagcgaagaagattattgtacagccagcaaaaggttcgcagtgaagagagaatgaagaggaagaggctggctgcaacagcaaagctgccagatggcctcgcagttgcaatgcaaagtggagttgccccacaagttgcacagccacccataacaaatcccatcacataccatacggctgattatggacagaacccggggttaaaatattttgatagggctcgtgaaacgagctccagtgcaatccctgatgacggcaacagaattgctggtgaggtcaagaagaagaaaagaaaacctgaatatgaccctgtagatacacaagctaacctaccaagggctcccatgccgcacgggagcgagaagcaaaagccttctaagcctgctgacgaggccagtgctggtagcctgccctccatggcgacaactcaaactgtgcttggcctaccgtcggtgcttggtcataaccaacaacctagctgattctttcggcgtagtgttggacatttggttctccttataggcctttttcagctgctgtaacaaattatggcctttccatgtgttcagcatcgattgttgagactaacatgttcccgagtagagaggatatttgatcactctttacttttccagcattgcatggttggtacccttgcccagattatctgtgcagcgctgatagatatgatctgcaaccccttcaaataccagttgtaattatgaatattttctcgagacatgtactgctcatattgtgcgaagcgatgtgcagattttctttta

SEQ ID NO: 35848 - DNA, 3155 bp, Zea Mays
aaaaaataaactaaaataaagggagagaaaaactgtcttttgctacagctgagctagaaaaggaacctttttccgcgcgttattcttcttcttgtattcgaaagcccaagcccaactgataaaaggcccatgctcaagcgataagacgagaataaacaaccaccgatcccccagggcccaggcccacgcgcacacattctgattccgaaggcaagggcgtgtacatggcggtgagacgaggagccaaaacccaacggcgacgagaaatccacggcggctagttcaccccatccggcgcgagcgactccctccgcctgcaccaaaaacgagggcgttttcgtgtcccctcctccaaactccggagcccacatcctccagtccccactcacctgcgccactccccaccacgctcctcaaaaccctaggtccttcgatctaatgccgtgagctctcgaattctcaattcccccagcctctccatggaagaccccgtggcggtaccctcctcgtccttgaccgaccctgccgctgccgccgcagctagggttccgggtgcggtggcagcagcccctggcgtcacctctgcgccgtccgctctcgctccgacgcagccgcctgccaccgcggccgcggtctctgaagccgcgacgccgtgccagaggcagctgttcacagtggagctgcggccaggggagaccacaatcgtgtcgtggaagaagcttctcaaggaggccgggcacaccgccgcggcaccgccagtggcggtggagccagcgttcgccgcacatgcgggcccatctggtccgggaaaacatagcagcgatgaagaggatcttaatgatgtaccagatgatgatcagtatgacactgaggattctttcattgatgatgccgaattggatgaatatttcgaagttgataatttgaaaactaagcatgatggctattttgtgaacaagggaaaattggaacagattgaacctggtacagcggcaaatgttgctccaaagaaaaggagaagaaaggatgcatcaagttcttatctggagagtaatcaccttggtccaattgattattttgatattggcgatgtacctgaaaaatcctctgcaagaggtactgtgcagacgggaaaacagttagttagtagcaacgtaagttcttatggtcaataccatgaggacaatagagtggtgaagaataaaatcagtggtcctggaggagcccctaaaagaaaatcttctgaattctcgggtgacgctgcagcacgagctaagattattaaggatgtctcgcatgctcctttggagctaagagacatggaaaagcataaagctgcagcactacctgttgactatgcacataagtcaaaaatcagcgaaacatttgattatgcatatccagcttatagggataaaggcacttcagggcaacttgatttccaacaaagaaagataagcagggaaaatcaaggtccatcaaatagaacctatcgcaaagagaaacatggaacaaatgaatatcctggcatcgctatggctactgcggtctattctacacaaacaatgcacccagttgttggtagggagggttcaggaactaaacccaaaggcaccaggcttgagcgagctattcgcgatctccagaagatcgttgcagaatacagaccaccaacaattgatattaatgaggtagatccaaatggccaggtagcagttaaaagacggttgcctcctgaaataaagcaaaagcttgcgaaggttgcaaaggcaaataacggaaagatccaagaacatgagctaatgaatcgcctcatgggcatagttggacaccttgttcagcgcaggacactgaagggatggcagcgggtcaggtattatccgcacatgagtatacctgtgatcctaatttttacccgtgcccgcgagcatacctgcgggctgcggagaaacatgaaagaaatggtagaatctggtatatctgctaaactggagaaggctgacaggtttcagcgtgtaaaattggagatcaatgagatgattaaagagcgtatggctacaaagtccaaggtcaatgaacaggatggttcagctgatgattttcaggttgctaatgatgaaagaagagctttaaaaacaaagtatacaatggatactgcattggaggacaagatgtgtgatctgtatgatatgtatgttgagcctgataaggcgttagcacgaattgttagctttatcatttgcatgttagtgaagggtatggatgaagacaagggccctcaaagcaggaagttatatgtagagcttgccgagttatggcctcatggttgcatggacaatgtcgggatcaaagatgccatttatagatcaaaggagcgaagaagattattgtacagccagcaaaaggttcgcagtgaagagagaatgaagaggaagaggctggctgcaacagcaaagctgccagatggcctcgcagttgcaatgcaaagtggagttgccccacaagttgcacagccacccataacaaatcccatcacataccatacggctgattatggacagaacccggggttaaaatattttgatagggctcgtgaaacgagctccagtgcaatccctgatgacggcaacagaattgctggtgaggtcaagaagaagaaaagaaaacctgaatatgaccctgtagatacacaagctaacctaccaagggctcccatgccgcacgggagcgagaagcaaaagccttctaagcctgctgacgaggccagtgctggtagcctgccctccatggcgacaactcaaactgtgcttggcctaccgtcggtgcttggtcataaccaacaacctagctgattctttcggcgtagtgttggacatttggttctccttataggcctttttcagctgctgtaacaaattatggcctttccatgtgttcagcatcgattgttgagactaacatgttcccgagtagagaggatatttgatcactctttacttttccagcattgcatggttggtacccttgcccagattatctgtgcagcgctgatagatatgatctgcaaccccttcaaataccagttgtaattatgaatattttctcgagacatgtactgctcatattgtgcgaagcgatgtgcagattttctttta

SEQ ID NO: 35849 - DNA, 3159 bp, Zea Mays
aaaaaataaactaaaataaagggagagaaaaactgtcttttgctacagctgagctagaaaaggaacctttttccgcgcgttattcttcttcttgtattcgaaagcccaagcccaactgataaaaggcccatgctcaagcgataagacgagaataaacaaccaccgatcccccagggcccaggcccacgcgcacacattctgattccgaaggcaagggcgtgtacatggcggtgagacgaggagccaaaacccaacggcgacgagaaatccacggcggctagttcaccccatccggcgcgagcgactccctccgcctgcaccaaaaacgagggcgttttcgtgtcccctcctccaaactccggagcccacatcctccagtccccactcacctgcgccactccccaccacgctcctcaaaaccctaggtccttcgatctaatgccgtgagctctcgaattctcaattcccccagcctctccatggaagaccccgtggcggtaccctcctcgtccttgaccgaccctgccgctgccgccgcagctagggttccgggtgcggtggcagcagcccctggcgtcacctctgcgccgtccgctctcgctccgacgcagccgcctgccaccgcggccgcggtctctgaagccgcgacgccgtgccagaggcagctgttcacagtggagctgcggccaggggagaccacaatcgtgtcgtggaagaagcttctcaaggaggccgggcacaccgccgcggcaccgccagtggcggtggagccagcgttcgccgcacatgcgggcccatctggtccggcacatcctgcagaaaatgacccaaaggatccaacacagccaaatcggttcaatgcagtgattgaaaaaatagagcgcctttacatgggaaaacatagcagcgatgaagaggatcttaatgatgtaccagatgatgatcagtatgacactgaggattctttcattgatgatgccgaattggatgaatatttcgaagttgataatttgaaaactaagcatgatggctattttgtgaacaagggaaaattggaacagattgaacctggtacagcggcaaatgttgctccaaagaaaaggagaagaaaggatgcatcaagttcttatctggagagtaatcaccttggtccaattgattattttgatattggcgatgtacctgaaaaatcctctgcaagaggtactgtgcagacgggaaaacagttagttagtagcaacgtaagttcttatggtcaataccatgaggacaatagagtggtgaagaataaaatcagtggtcctggaggagcccctaaaagaaaatcttctgaattctcgggtgacgctgcagcacgagctaagattattaaggatgtctcgcatgctcctttggagctaagagacatggaaaagcataaagctgcagcactacctgttgactatgcacataagtcaaaaatcagcgaaacatttgattatgcatatccagcttatagggataaaggcacttcagggcaacttgatttccaacaaagaaagataagcagggaaaatcaaggtccatcaaatagaacctatcgcaaagagaaacatggaacaaatgaatatcctggcatcgctatggctactgcggtctattctacacaaacaatgcacccagttgttggtagggagggttcaggaactaaacccaaaggcaccaggcttgagcgagctattcgcgatctccagaagatcgttgcagaatacagaccaccaacaattgatattaatgaggtagatccaaatggccaggtagcagttaaaagacggttgcctcctgaaataaagcaaaagcttgcgaaggttgcaaaggttatcggcaaataacggaaagatccaagaacatgagctaatgaatcgcctcatgggcatagttggacaccttgttcagcgcaggacactgaagagaaacatgaaagaaatggtagaatctggtatatctgctaaactggagaaggctgacaggtttcagcgtgtaaaattggagatcaatgagatgattaaagagcgtatggctacaaagtccaaggtcaatgaacaggatggttcagctgatgattttcaggttgctaatgatgaaagaagagctttaaaaacaaagtatacaatggatactgcattggaggacaagatgtgtgatctgtatgatatgtatgttgagcctgataaggcgttagcacgaattgttagctttatcatttgcatgttagtgaagggtatggatgaagacaagggccctcaaagcaggaagttatatgtagagcttgccgagttatggcctcatggttgcatggacaatgtcgggatcaaagatgccatttatagatcaaaggagcgaagaagattattgtacagccagcaaaaggttcgcagtgaagagagaatgaagaggaagaggctggctgcaacagcaaagctgccagatggcctcgcagttgcaatgcaaagtggagttgccccacaagttgcacagccacccataacaaatcccatcacataccatacggctgattatggacagaacccggggttaaaatattttgatagggctcgtgaaacgagctccagtgcaatccctgatgacggcaacagaattgctggtgaggtcaagaagaagaaaagaaaacctgaatatgaccctgtagatacacaagctaacctaccaagggctcccatgccgcacgggagcgagaagcaaaagccttctaagcctgctgacgaggccagtgctggtagcctgccctccatggcgacaactcaaactgtgcttggcctaccgtcggtgcttggtcataaccaacaacctagctgattctttcggcgtagtgttggacatttggttctccttataggcctttttcagctgctgtaacaaattatggcctttccatgtgttcagcatcgattgttgagactaacatgttcccgagtagagaggatatttgatcactctttacttttccagcattgcatggttggtacccttgcccagattatctgtgcagcgctgatagatatgatctgcaaccccttcaaataccagttgtaattatgaatattttctcgagacatgtactgctcatattgtgcgaagcgatgtgcagattttctttta

SEQ ID NO: 35850 - DNA, 3097 bp, Zea Mays
aaaaaataaactaaaataaagggagagaaaaactgtcttttgctacagctgagctagaaaaggaacctttttccgcgcgttattcttcttcttgtattcgaaagcccaagcccaactgataaaaggcccatgctcaagcgataagacgagaataaacaaccaccgatcccccagggcccaggcccacgcgcacacattctgattccgaaggcaagggcgtgtacatggcggtgagacgaggagccaaaacccaacggcgacgagaaatccacggcggctagttcaccccatccggcgcgagcgactccctccgcctgcaccaaaaacgagggcgttttcgtgtcccctcctccaaactccggagcccacatcctccagtccccactcacctgcgccactccccaccacgctcctcaaaaccctaggtccttcgatctaatgccgtgagctctcgaattctcaattcccccagcctctccatggaagaccccgtggcggtaccctcctcgtccttgaccgaccctgccgctgccgccgcagctagggttccgggtgcggtggcagcagcccctggcgtcacctctgcgccgtccgctctcgctccgacgcagccgcctgccaccgcggccgcggtctctgaagccgcgacgccgtgccagaggcagctgttcacagtggagctgcggccaggggagaccacaatcgtgtcgtggaagaagcttctcaaggaggccgggcacaccgccgcggcaccgccagtggcggtggagccagcgttcgccgcacatgcgggcccatctggtccggcacatcctgcagaaaatgacccaaaggatccaacacagccaaatcggttcaatgcagtgattgaaaaaatagagcgcctttacatgggaaaacatagcagcgatgaagaggatcttaatgatgtaccagatgatgatcagtatgacactgaggattctttcattgatgatgccgaattggatgaatatttcgaagttgataatttgaaaactaagcatgatggctattttgtgaacaagggaaaattggaacagattgaacctggtacagcggcaaatgttgctccaaagaaaaggagaagaaaggatgcatcaagttcttatctggagagtaatcaccttggtccaattgattattttgatattggcgatgtacctgaaaaatcctctgcaagaggtactgtgcagacgggaaaacagttagttagtagcaacgtaagttcttatggtcaataccatgaggacaatagagtggtgaagaataaaatcagtggtcctggaggagcccctaaaagaaaatcttctgaattctcgggtgacgctgcagcacgagctaagattattaaggatgtctcgcatgctcctttggagctaagagacatggaaaagcataaagctgcagcactacctgttgactatgcacataagtcaaaaatcagcgaaacatttgattatgcatatccagcttatagggataaaggcacttcagggcaacttgatttccaacaaagaaagataagcagggaaaatcaaggtccatcaaatagaacctatcgcaaagagaaacatggaacaaatgaatatcctggcatcgctatggctactgcggtctattctacacaaacaatgcacccagttgttggtagggagggttcaggaactaaacccaaaggcaccaggcttgagcgagctattcgcgatctccagaagatcgttgcagaatacagaccaccaacaattgatattaatgaggtagatccaaatggccaggtagcagttaaaagacggttgcctcctgaaataaagcaaaagcttgcgaaggttgcaaaggttatcggcaaataacggaaagatccaagaacatgagctaatgaatcgcctcatgggcatagttggacaccttgttcagcgcaggacactgaagagaaacatgaaagaaatggtagaatctggtatatctgctaaactggagaaggctgacaggtttcagcgtgtaaaattggagatcaatgagatgattaaagagcgtatggctacaaagtccaaggtcaatgaacaggatggttcagctgatgattttcaggttgctaatgatgaaagaagagctttaaaaacaaagtatacaatggatactgcattggaggacaagatgtgtgatctgtatgatatgtatgttgagggtatggatgaagacaagggccctcaaagcaggaagttatatgtagagcttgccgagttatggcctcatggttgcatggacaatgtcgggatcaaagatgccatttatagatcaaaggagcgaagaagattattgtacagccagcaaaagtgaagagagaatgaagaggaagaggctggctgcaacagcaaagctgccagatggcctcgcagttgcaatgcaaagtggagttgccccacaagttgcacagccacccataacaaatcccatcacataccatacggctgattatggacagaacccggggttaaaatattttgatagggctcgtgaaacgagctccagtgcaatccctgatgacggcaacagaattgctggtgaggtcaagaagaagaaaagaaaacctgaatatgaccctgtagatacacaagctaacctaccaagggctcccatgccgcacgggagcgagaagcaaaagccttctaagcctgctgacgaggccagtgctggtagcctgccctccatggcgacaactcaaactgtgcttggcctaccgtcggtgcttggtcataaccaacaacctagctgattctttcggcgtagtgttggacatttggttctccttataggcctttttcagctgctgtaacaaattatggcctttccatgtgttcagcatcgattgttgagactaacatgttcccgagtagagaggatatttgatcactctttacttttccagcattgcatggttggtacccttgcccagattatctgtgcagcgctgatagatatgatctgcaaccccttcaaataccagttgtaattatgaatattttctcgagacatgtactgctcatattgtgcgaagcgatgtgcagattttctttta

SEQ ID NO: 35851 - DNA, 3249 bp, Zea Mays
aaaaaataaactaaaataaagggagagaaaaactgtcttttgctacagctgagctagaaaaggaacctttttccgcgcgttattcttcttcttgtattcgaaagcccaagcccaactgataaaaggcccatgctcaagcgataagacgagaataaacaaccaccgatcccccagggcccaggcccacgcgcacacattctgattccgaaggcaagggcgtgtacatggcggtgagacgaggagccaaaacccaacggcgacgagaaatccacggcggctagttcaccccatccggcgcgagcgactccctccgcctgcaccaaaaacgagggcgttttcgtgtcccctcctccaaactccggagcccacatcctccagtccccactcacctgcgccactccccaccacgctcctcaaaaccctaggtccttcgatctaatgccgtgagctctcgaattctcaattcccccagcctctccatggaagaccccgtggcggtaccctcctcgtccttgaccgaccctgccgctgccgccgcagctagggttccgggtgcggtggcagcagcccctggcgtcacctctgcgccgtccgctctcgctccgacgcagccgcctgccaccgcggccgcggtctctgaagccgcgacgccgtgccagaggcagctgttcacagtggagctgcggccaggggagaccacaatcgtgtcgtggaagaagcttctcaaggaggccgggcacaccgccgcggcaccgccagtggcggtggagccagcgttcgccgcacatgcgggcccatctggtccggcacatcctgcagaaaatgacccaaaggatccaacacagccaaatcggttcaatgcagtgattgaaaaaatagagcgcctttacatgggaaaacatagcagcgatgaagaggatcttaatgatgtaccagatgatgatcagtatgacactgaggattctttcattgatgatgccgaattggatgaatatttcgaagttgataatttgaaaactaagcatgatggctattttgtgaacaagggaaaattggaacagattgaacctggtacagcggcaaatgttgctccaaagaaaaggagaagaaaggatgcatcaagttcttatctggagagtaatcaccttggtccaattgattattttgatattggcgatgtacctgaaaaatcctctgcaagaggtactgtgcagacgggaaaacagttagttagtagcaacgtaagttcttatggtcaataccatgaggacaatagagtggtgaagaataaaatcagtggtcctggaggagcccctaaaagaaaatcttctgaattctcgggtgacgctgcagcacgagctaagattattaaggatgtctcgcatgctcctttggagctaagagacatggaaaagcataaagctgcagcactacctgttgactatgcacataagtcaaaaatcagcgaaacatttgattatgcatatccagcttatagggataaaggcacttcagggcaacttgatttccaacaaagaaagataagcagggaaaatcaaggtccatcaaatagaacctatcgcaaagagaaacatggaacaaatgaatatcctggcatcgctatggctactgcggtctattctacacaaacaatgcacccagttgttggtagggagggttcaggaactaaacccaaaggcaccaggcttgagcgagctattcgcgatctccagaagatcgttgcagaatacagaccaccaacaattgatattaatgaggtagatccaaatggccaggtagcagttaaaagacggttgcctcctgaaataaagcaaaagcttgcgaaggttgcaaaggttatcggcaaataacggaaagatccaagaacatgagctaatgaatcgcctcatgggcatagttggacaccttgttcagcgcaggacactgaagggatggcagcgggtcaggtattatccgcacatgagtatacctgtgatcctaatttttacccgtgcccgcgagcatacctgcgggctgcggagaaacatgaaagaaatggtagaatctggtatatctgctaaactggagaaggctgacaggtttcagcgtgtaaaattggagatcaatgagatgattaaagagcgtatggctacaaagtccaaggtcaatgaacaggatggttcagctgatgattttcaggttgctaatgatgaaagaagagctttaaaaacaaagtatacaatggatactgcattggaggacaagatgtgtgatctgtatgatatgtatgttgagcctgataaggcgttagcacgaattgttagctttatcatttgcatgttagtgaagggtatggatgaagacaagggccctcaaagcaggaagttatatgtagagcttgccgagttatggcctcatggttgcatggacaatgtcgggatcaaagatgccatttatagatcaaaggagcgaagaagattattgtacagccagcaaaaggttcgcagtgaagagagaatgaagaggaagaggctggctgcaacagcaaagctgccagatggcctcgcagttgcaatgcaaagtggagttgccccacaagttgcacagccacccataacaaatcccatcacataccatacggctgattatggacagaacccggggttaaaatattttgatagggctcgtgaaacgagctccagtgcaatccctgatgacggcaacagaattgctggtgaggtcaagaagaagaaaagaaaacctgaatatgaccctgtagatacacaagctaacctaccaagggctcccatgccgcacgggagcgagaagcaaaagccttctaagcctgctgacgaggccagtgctggtagcctgccctccatggcgacaactcaaactgtgcttggcctaccgtcggtgcttggtcataaccaacaacctagctgattctttcggcgtagtgttggacatttggttctccttataggcctttttcagctgctgtaacaaattatggcctttccatgtgttcagcatcgattgttgagactaacatgttcccgagtagagaggatatttgatcactctttacttttccagcattgcatggttggtacccttgcccagattatctgtgcagcgctgatagatatgatctgcaaccccttcaaataccagttgtaattatgaatattttctcgagacatgtactgctcatattgtgcgaagcgatgtgcagattttctttta

SEQ ID NO: 35852 - DNA, 3152 bp, Zea Mays
aaaaaataaactaaaataaagggagagaaaaactgtcttttgctacagctgagctagaaaaggaacctttttccgcgcgttattcttcttcttgtattcgaaagcccaagcccaactgataaaaggcccatgctcaagcgataagacgagaataaacaaccaccgatcccccagggcccaggcccacgcgcacacattctgattccgaaggcaagggcgtgtacatggcggtgagacgaggagccaaaacccaacggcgacgagaaatccacggcggctagttcaccccatccggcgcgagcgactccctccgcctgcaccaaaaacgagggcgttttcgtgtcccctcctccaaactccggagcccacatcctccagtccccactcacctgcgccactccccaccacgctcctcaaaaccctaggtccttcgatctaatgccgtgagctctcgaattctcaattcccccagcctctccatggaagaccccgtggcggtaccctcctcgtccttgaccgaccctgccgctgccgccgcagctagggttccgggtgcggtggcagcagcccctggcgtcacctctgcgccgtccgctctcgctccgacgcagccgcctgccaccgcggccgcggtctctgaagccgcgacgccgtgccagaggcagctgttcacagtggagctgcggccaggggagaccacaatcgtgtcgtggaagaagcttctcaaggaggccgggcacaccgccgcggcaccgccagtggcggtggagccagcgttcgccgcacatgcgggcccatctggtccggcacatcctgcagaaaatgacccaaaggatccaacacagccaaatcggttcaatgcagtgattgaaaaaatagagcgcctttacatgggaaaacatagcagcgatgaagaggatcttaatgatgtaccagatgatgatcagtatgacactgaggattctttcattgatgatgccgaattggatgaatatttcgaagttgataatttgaaaactaagcatgatggctattttgtgaacaagggaaaattggaacagattgaacctggtacagcggcaaatgttgctccaaagaaaaggagaagaaaggatgcatcaagttcttatctggagagtaatcaccttggtccaattgattattttgatattggcgatgtacctgaaaaatcctctgcaagaggtactgtgcagacgggaaaacagttagttagtagcaacgtaagttcttatggtcaataccatgaggacaatagagtggtgaagaataaaatcagtggtcctggaggagcccctaaaagaaaatcttctgaattctcgggtgacgctgcagcacgagctaagattattaaggatgtctcgcatgctcctttggagctaagagacatggaaaagcataaagctgcagcactacctgttgactatgcacataagtcaaaaatcagcgaaacatttgattatgcatatccagcttatagggataaaggcacttcagggcaacttgatttccaacaaagaaagataagcagggaaaatcaaggtccatcaaatagaacctatcgcaaagagaaacatggaacaaatgaatatcctggcatcgctatggctactgcggtctattctacacaaacaatgcacccagttgttggtagggagggttcaggaactaaacccaaaggcaccaggcttgagcgagctattcgcgatctccagaagatcgttgcagaatacagaccaccaacaattgatattaatgaggtagatccaaatggccaggtagcagttaaaagacggttgcctcctgaaataaagcaaaagcttgcgaaggttgcaaaggcaaataacggaaagatccaagaacatgagctaatgaatcgcctcatgggcatagttggacaccttgttcagcgcaggacactgaagagaaacatgaaagaaatggtagaatctggtatatctgctaaactggagaaggctgacaggtttcagcgtgtaaaattggagatcaatgagatgattaaagagcgtatggctacaaagtccaaggtcaatgaacaggatggttcagctgatgattttcaggttgctaatgatgaaagaagagctttaaaaacaaagtatacaatggatactgcattggaggacaagatgtgtgatctgtatgatatgtatgttgagcctgataaggcgttagcacgaattgttagctttatcatttgcatgttagtgaagggtatggatgaagacaagggccctcaaagcaggaagttatatgtagagcttgccgagttatggcctcatggttgcatggacaatgtcgggatcaaagatgccatttatagatcaaaggagcgaagaagattattgtacagccagcaaaaggttcgcagtgaagagagaatgaagaggaagaggctggctgcaacagcaaagctgccagatggcctcgcagttgcaatgcaaagtggagttgccccacaagttgcacagccacccataacaaatcccatcacataccatacggctgattatggacagaacccggggttaaaatattttgatagggctcgtgaaacgagctccagtgcaatccctgatgacggcaacagaattgctggtgaggtcaagaagaagaaaagaaaacctgaatatgaccctgtagatacacaagctaacctaccaagggctcccatgccgcacgggagcgagaagcaaaagccttctaagcctgctgacgaggccagtgctggtagcctgccctccatggcgacaactcaaactgtgcttggcctaccgtcggtgcttggtcataaccaacaacctagctgattctttcggcgtagtgttggacatttggttctccttataggcctttttcagctgctgtaacaaattatggcctttccatgtgttcagcatcgattgttgagactaacatgttcccgagtagagaggatatttgatcactctttacttttccagcattgcatggttggtacccttgcccagattatctgtgcagcgctgatagatatgatctgcaaccccttcaaataccagttgtaattatgaatattttctcgagacatgtactgctcatattgtgcgaagcgatgtgcagattttctttta

SEQ ID NO: 35853 - DNA, 1578 bp, Zea Mays
ctcgctcgccacccaccctgacccagagtccacaccgaaatatccgcgtggcgtggactcgggcaccactctccattcctgcatcccattcccatctcttcttcgcctcctccgcctcgccggcgtcaccgtccggccccgcctcttccccccgctcgaagctcgatctctcctcccgttctccgcccacgcaatccctgccaccgccgaatgcggaacactcgcctttggtgaccgactgacctaccctgcttctgccgggttagttgagtgtccgcgcctaccggaccccgcgccgcgtccggatctcgaatgcgccgccgccgccgtcgcgcgatctagcggctgcgcgctgccccgcaggagggtagagctccaggggcccggtgtggtcaggcggcggatatggcaacggaggcgtctacctctgcggcgggcgggatctgggtggaggggatgtccgcggacaacatcaaggggctggtgctcgcgctctcctccagcttcttcatcggggccagcttcatcgtcaagaagaaggggcttaagaaggccggtgcgtccggcgtccgcgcaggtgttggtggttactcttacttgtatgaaccattatggtgggcaggaatgattacaatgattgttggagaagtggctaactttgcagcatatgcttttgctcctgctatcttggtcacaccacttggtgcacttagcatcataattagtgctgctcttgcagacattatgttgaaggaaaagctgcatatatttggtatacttgggtgtgttctttgtgttgtgggttcaacaactattgtacttcatgcccctcaggagcgcacaattgaatctgtagcagaagtgtgggatcttgctactgaaccagcctttctatcttatgctgccatcgttcttgctgcaacatttgtcctcatatactactttattccacgatatggtcagacacacatcatggtctatattggtgtttgttcccttgtaggatctctgtcggtcatgagtgtgaaagctcttggaatagccttgaaactgaccttttctggcatgaatcagctaatttatccacaaacatggttgttcaccattgttgttgttgcatgtatagtaacacagatgaactacctgaacaaggctcttgatactttcaacacagcagttgtatcaccgatatactatacaatgttcacgtcactaaccattttggctagcgtgataatgttcaaggactgggatcgtcaaaatccaactcaaattgtaacagagatgtgtggttttgttaccattctttcggggacgtttcttctccacaagacaaaagacatggttgatggcctcccgccaactctacctgtccggattcctaaacatgaggacgatggagctgaaggaatccctctcagatccgctgaaggcatcccgctcagatcaccgagggcaacggcgcgctctttaattcagcttacctgagcatcaatggtgaaggaagaatgcaagctcattgaccaaggtggcaatgatgtcgccgatccacaacgcgatggagacgaggacagtgat

SEQ ID NO: 35854 - DNA, 2964 bp, Zea Mays
agtaccctactgcttccatcaaggagaactgcaactggaagcgggtgcgagcgactgcgatccggacgaggggagggacctgtccgtaatttcggaaaggagcctgggggagaatgccgatagacatgccgcggggtctccccttcgccgtcgacacgtgggggtcctcctcccgaagccggcgccaccgcttccttacccacgcacaccgggaccacctcgtcggcgccggtgcggacatcgatgggggagggatcgtctacgccactcgcctcaccttgcacctcgcacttcgccactttccccagttggggagttgggagttcgtggagatggaggtgggaaggacgttggtggtggatgatcccgtcggcgccttctctgtcaccacgggcagtcatgttcttgtttgagggtcaatttggtaccatacttcacacaggggactgtcggcttacaccagattgcgtacagaatttgccaatgaagtacataacaaagaaaggaaacgagaacatttgccgacttgactttgtattcctagattgcaccttctccaaatgcttcctcaagctaccgagcaaggactcagcaatccgacaggttatatcttgcatatggaaacatctgcatgcaccatttgtcttccttgcttgtgatctgcttgggcatgaagatatactagttgaggtgtcaaggactttcggaacaaaaatttacgttgaccggaaattggattgttttaaagcactctcactgacagcccctgaaatcatcactgacgattcatcttctcgctttcagatggttgggttccaccaattacatgatagagcaagcaaagagcttgcagaggcaagggcaaatctccaacctgaacccttatttattcgtccatcaacacaatggtatgcaacctgtgctcgaagcccgaaacccagcctaacagaagctgagcaggatgagcttggcatctggcatgtttgtttctccattcactcctctcgtgatgagttggagcaagcactacaacttctccaacctcactgggttatttcaacaactcccccatgctttgccattgagctgagctatgtaaagaaacattgtttcaagacccgcttaacagctgatgatccactctggaaaatattcagagatcctctgggaaagtcagtgtcctccccttgttcagtgcttgcgacacagacagatgaaaataactcaaattttgttgttgatgatgaccattcttcttcctctagcgatggatgcacatacttaaatgtaataagcactcttgaactgaaatttgtgccacctcaaccacctgaagaaccggacattacattgtttggaagagcaaggtttgcctctcaagcaattgactttatgaaagaagattacattgccttagaagaagccagggcatgtgcaccaacagattcggttcatggcagtagtgaagaagtcgaaacatattctggaatggatttcggtgtgaaacaaccaccagcctcccagcaggatctcatggaagttggagatgatgtttctttcaaaaaagttggagatgatgtggattcctgtaagcatgaagtaacctcaacacaattagaagggtttcgagtcaagtcattacctactgttcaaagcaatatgttagtggtgtctgatcaacttgaaaggtcagaagttgtaggagagtcaaaattattgaaatccacggaagacttaaaccttaccattgtcagaagtgcagaaagaactgattgtcaaaaggaacctttgtgctatattggatcatcgaaatgtttgaatgcaagtttgaagaggttttacaggtcaaggaatatccctgttcctagacctcttccatcgcttgtcaaacttatggagtccactaaacgggtcaaaatacaaccaaatactaattatactttgttgaactcacgacacagcttaccctaatgaatgattgagcttatacttggcatattatgatagccaaaattttcagatttatgagtatatgaatggattatttctgaagaggacacctgtatattggttattgtgataaccaaaatactcggattctattgggtatacaggtatacttggactggttccgaagaagatacctgtttagtattgatccagatccacacttatacaggagctttgtacgattctcaaactgttgtacagaaaattgatgtaattacatgatgactctattggataatccgaagtgtattattcttctgcaatactagctaggcatcgtatgatgtcaaatatattctcagcaagttcgctttacgacttgatttactgaatatcatgatattctggcgtggatctatattgcttctgattcataattgtttgctgcaggagagtacataatatcttctagttcactaatgcataattttatacacaaagcagtgtcgccatggcatgacccttcaatccgaaaatacagattcatcacgcgacaagtcccgatgctactaggaattaaatcgtccagggcttaacagggcataaacttaaaaaaaatcgaaaaggagctaaaataaaaaatcgtaaaaaaatcgataaaggagctaaaataaaaaacagaaaatttgaaaagtaggtaaaataaaaaaaaacagtgaggccaactccagcaaatgcatgcaggctgttttacactataaataaactgtaacactgttcgtttctaaagctgactgtttagactgcttttacagactgtttgttctcgttcgtttgactgtttgttcctctatagtagaaaccgatatggattaaactaaacgaacaggatagaaataagagtatgatagggtttggagatagtctgagagcccccaccaaaggagtggctatcgccgtcgccgcgctgctccagagtccaggctaaagatctcaaaagacatgacaacagat

SEQ ID NO: 35855 - DNA, 2913 bp, Zea Mays
agtaccctactgcttccatcaaggagaactgcaactggaagcgggtgcgagcgactgcgatccggacgaggggagggacctgtccgtaatttcggaaaggagcctgggggagaatgccgatagacatgccgcggggtctccccttcgccgtcgacacgtgggggtcctcctcccgaagccggcgccaccgcttccttacccacgcacaccgggaccacctcgtcggcgccggtgcggacatcgatgggggagggatcgtctacgccactcgcctcaccttgcacctcgcacttcgccactttccccagttggggagttgggagttcgtggagatggaggtgggaaggacgttggtggtggatgatcccgtcggcgccttctctgtcaccacgggactgtcggcttacaccagattgcgtacagaatttgccaatgaagtacataacaaagaaaggaaacgagaacatttgccgacttgactttgtattcctagattgcaccttctccaaatgcttcctcaagctaccgagcaaggactcagcaatccgacaggttatatcttgcatatggaaacatctgcatgcaccatttgtcttccttgcttgtgatctgcttgggcatgaagatatactagttgaggtgtcaaggactttcggaacaaaaatttacgttgaccggaaattggattgttttaaagcactctcactgacagcccctgaaatcatcactgacgattcatcttctcgctttcagatggttgggttccaccaattacatgatagagcaagcaaagagcttgcagaggcaagggcaaatctccaacctgaacccttatttattcgtccatcaacacaatggtatgcaacctgtgctcgaagcccgaaacccagcctaacagaagctgagcaggatgagcttggcatctggcatgtttgtttctccattcactcctctcgtgatgagttggagcaagcactacaacttctccaacctcactgggttatttcaacaactcccccatgctttgccattgagctgagctatgtaaagaaacattgtttcaagacccgcttaacagctgatgatccactctggaaaatattcagagatcctctgggaaagtcagtgtcctccccttgttcagtgcttgcgacacagacagatgaaaataactcaaattttgttgttgatgatgaccattcttcttcctctagcgatggatgcacatacttaaatgtaataagcactcttgaactgaaatttgtgccacctcaaccacctgaagaaccggacattacattgtttggaagagcaaggtttgcctctcaagcaattgactttatgaaagaagattacattgccttagaagaagccagggcatgtgcaccaacagattcggttcatggcagtagtgaagaagtcgaaacatattctggaatggatttcggtgtgaaacaaccaccagcctcccagcaggatctcatggaagttggagatgatgtttctttcaaaaaagttggagatgatgtggattcctgtaagcatgaagtaacctcaacacaattagaagggtttcgagtcaagtcattacctactgttcaaagcaatatgttagtggtgtctgatcaacttgaaaggtcagaagttgtaggagagtcaaaattattgaaatccacggaagacttaaaccttaccattgtcagaagtgcagaaagaactgattgtcaaaaggaacctttgtgctatattggatcatcgaaatgtttgaatgcaagtttgaagaggttttacaggtcaaggaatatccctgttcctagacctcttccatcgcttgtcaaacttatggagtccactaaacgggtcaaaatacaaccaaatactaattatactttgttgaactcacgacacagcttaccctaatgaatgattgagcttatacttggcatattatgatagccaaaattttcagatttatgagtatatgaatggattatttctgaagaggacacctgtatattggttattgtgataaccaaaatactcggattctattgggtatacaggtatacttggactggttccgaagaagatacctgtttagtattgatccagatccacacttatacaggagctttgtacgattctcaaactgttgtacagaaaattgatgtaattacatgatgactctattggataatccgaagtgtattattcttctgcaatactagctaggcatcgtatgatgtcaaatatattctcagcaagttcgctttacgacttgatttactgaatatcatgatattctggcgtggatctatattgcttctgattcataattgtttgctgcaggagagtacataatatcttctagttcactaatgcataattttatacacaaagcagtgtcgccatggcatgacccttcaatccgaaaatacagattcatcacgcgacaagtcccgatgctactaggaattaaatcgtccagggcttaacagggcataaacttaaaaaaaatcgaaaaggagctaaaataaaaaatcgtaaaaaaatcgataaaggagctaaaataaaaaacagaaaatttgaaaagtaggtaaaataaaaaaaaacagtgaggccaactccagcaaatgcatgcaggctgttttacactataaataaactgtaacactgttcgtttctaaagctgactgtttagactgcttttacagactgtttgttctcgttcgtttgactgtttgttcctctatagtagaaaccgatatggattaaactaaacgaacaggatagaaataagagtatgatagggtttggagatagtctgagagcccccaccaaaggagtggctatcgccgtcgccgcgctgctccagagtccaggctaaagatctcaaaagacatgacaacagat

SEQ ID NO: 35856 - DNA, 3040 bp, Zea Mays
ccgatatccccattctctgcgcatataaaaaccgacgcaacgaactacaccctagtaccctactgcttccatcaaggagaactgcaactggaagcgggtgcgagcgactgcgatccggacgaggggagggacctgtccgtaatttcggaaaggagcctgggggagaatgccgatagacatgccgcggggtctccccttcgccgtcgacacgtgggggtcctcctcccgaagccggcgccaccgcttccttacccacgcacaccgggaccacctcgtcggcgccggtgcggacatcgatgggggagggatcgtctacgccactcgcctcaccttgcacctcgcacttcgccactttccccagttggggagttgggagttcgtggagatggaggtgggaaggacgttggtggtggatgatcccgtcggcgccttctctgtcaccacgtacgacgcaaatcactgccctggggcagtcatgttcttgtttgagggtcaatttggtaccatacttcacacaggggactgtcggcttacaccagattgcgtacagaatttgccaatgaagtacataacaaagaaaggaaacgagaacatttgccgacttgactttgtattcctagattgcaccttctccaaatgcttcctcaagctaccgagcaaggactcagcaatccgacaggttatatcttgcatatggaaacatctgcatgcaccatttgtcttccttgcttgtgatctgcttgggcatgaagatatactagttgaggtgtcaaggactttcggaacaaaaatttacgttgaccggaaattggattgttttaaagcactctcactgacagcccctgaaatcatcactgacgattcatcttctcgctttcagatggttgggttccaccaattacatgatagagcaagcaaagagcttgcagaggcaagggcaaatctccaacctgaacccttatttattcgtccatcaacacaatggtatgcaacctgtgctcgaagcccgaaacccagcctaacagaagctgagcaggatgagcttggcatctggcatgtttgtttctccattcactcctctcgtgatgagttggagcaagcactacaacttctccaacctcactgggttatttcaacaactcccccatgctttgccattgagctgagctatgtaaagaaacattgtttcaagacccgcttaacagctgatgatccactctggaaaatattcagagatcctctgggaaagtcagtgtcctccccttgttcagtgcttgcgacacagacagatgaaaataactcaaattttgttgttgatgatgaccattcttcttcctctagcgatggatgcacatacttaaatgtaataagcactcttgaactgaaatttgtgccacctcaaccacctgaagaaccggacattacattgtttggaagagcaaggtttgcctctcaagcaattgactttatgaaagaagattacattgccttagaagaagccagggcatgtgcaccaacagattcggttcatggcagtagtgaagaagtcgaaacatattctggaatggatttcggtgtgaaacaaccaccagcctcccagcaggatctcatggaagttggagatgatgtttctttcaaaaaagttggagatgatgtggattcctgtaagcatgaagtaacctcaacacaattagaagggtttcgagtcaagtcattacctactgttcaaagcaatatgttagtggtgtctgatcaacttgaaaggtcagaagttgtaggagagtcaaaattattgaaatccacggaagacttaaaccttaccattgtcagaagtgcagaaagaactgattgtcaaaaggaacctttgtgctatattggatcatcgaaatgtttgaatgcaagtttgaagaggttttacaggtcaaggaatatccctgttcctagacctcttccatcgcttgtcaaacttatggagtccactaaacgggtcaaaatacaaccaaatactaattatactttgttgaactcacgacacagcttaccctaatgaatgattgagcttatacttggcatattatgatagccaaaattttcagatttatgagtatatgaatggattatttctgaagaggacacctgtatattggttattgtgataaccaaaatactcggattctattgggtatacaggtatacttggactggttccgaagaagatacctgtttagtattgatccagatccacacttatacaggagctttgtacgattctcaaactgttgtacagaaaattgatgtaattacatgatgactctattggataatccgaagtgtattattcttctgcaatactagctaggcatcgtatgatgtcaaatatattctcagcaagttcgctttacgacttgatttactgaatatcatgatattctggcgtggatctatattgcttctgattcataattgtttgctgcaggagagtacataatatcttctagttcactaatgcataattttatacacaaagcagtgtcgccatggcatgacccttcaatccgaaaatacagattcatcacgcgacaagtcccgatgctactaggaattaaatcgtccagggcttaacagggcataaacttaaaaaaaatcgaaaaggagctaaaataaaaaatcgtaaaaaaatcgataaaggagctaaaataaaaaacagaaaatttgaaaagtaggtaaaataaaaaaaaacagtgaggccaactccagcaaatgcatgcaggctgttttacactataaataaactgtaacactgttcgtttctaaagctgactgtttagactgcttttacagactgtttgttctcgttcgtttgactgtttgttcctctatagtagaaaccgatatggattaaactaaacgaacaggatagaaataagagtatgatagggtttggagatagtctgagagcccccaccaaaggagtggctatcgccgtcgccgcgctgctccagagtccaggctaaagatctcaaaagacatgacaacagat

SEQ ID NO: 35857 - DNA, 1541 bp, Zea Mays
ggctctcttctccaccggtcctaccccttacctcccaagatcacaatcctctgctccttatatattagccacaccgctcgttccctgctgcaccgggtgacacacaggcacaaagacaccgcccgtacacaggctcgttggcttggctgctgtgtgttgcgctcagccattcagacttgagagctactagctaactgctcgttgggtgtgggtgcgctcccggcctagaccgtggaggaaaggagtccagtccactcactaccccctctgctccgttcgggttccaggccagcacagccgagggttccgcacagcgataagcgcgaagcggaagagatggagcatatcgccaggttcttcttcggagtttctgtgtcaccttctggagggtcatcaggaagcggtcgacggaggacttctccggcgtgccctacaacatgacgctgctcaactgcctcctatcggcttggtacggcctgccgttcgtgtccccgaacaacatcctggtgtcgacgatcaacgggacggggtcggtgatcgaggccatctacgtggtgatcttcctcatcttcgcggtggaccggcgggccaggctcagcatgctgggcctcctgggcatcgtcgcctccatcttcaccaccgtggtgctcgtctcgctgctggccctccacggcaacgcccgcaaggtcttctgcggcctcgccgccaccatcttctccatctgcatgtacgcctcgccgctctccatcatgaggctggtgatcaagacgaagagcgtggagttcatgccgttcctgctctccctggccgtgttcctgtgcggcacctcctggttcatctacggcctcctcggccgcgaccccttcattattatcccgaacgggtgcgggagcttcctgggcctgatgcagctcatcctgtacgccatctaccggaaaaacaagggccccgccgcgccggccggcaagggagaggccgccgccgccgccgcggaggtggaggacaccaagaaggtggccgctgccgtggagctggccgatgccacgaccaacaaggcagcggacgccgtcggcggcgacggcaaggtcgccagccaggtgtaggcgggcaaggcttatttgctgtctgggactgggaggaacatcctaaacgaggctgccttagtttgtcggtggagcagattggtgttggtttctgtgggcttttacggttgttgttactctcatctccatctctcccaggaggctaccccaagcatgtagtagcttccattctgattctgggacggtgttgcacgttacagtgctctcaagctgtctctgcaaagtgtgtttttttattccatttccctcctgctcttgttctccaactgcgcttacctgcccccgatttctctaaaaaatgtattaaactatctgagaaattcatccaactgcgagtactgtgctgtgcgtgagcaatgcatcttttgcgtgtacggtgtgtgtgacacgctgaaccctgacttatcacaacaattctagagtgtgctctatagcggc

SEQ ID NO: 35858 - DNA, 2197 bp, Zea Mays
ggctctcttctccaccggtcctaccccttacctcccaagatcacaatcctctgctccttatatattagccacaccgctcgttccctgctgcaccgggtgacacacaggcacaaagacaccgcccgtacacaggctcgttggcttggctgctgtgtgttgcgctcagccattcagacttgagagctactagctaactgctcgttgggtgtgggtgcgctcccggcctagaccgtggaggaaaggagtccagtccactcactaccccctctgctccgttcgggttccaggccagcacagccgagggttccgcacagcgataagcgcgaagcggaagagatggagcatatcgccaggttcttcttcggagtttctgatctgtctccccagggaatgtcattgcgctcttcctcttcctgtcgcctgttgtcaccttctggagggtcatcaggaagcggtcgacggaggacttctccggcgtgccctacaacatgacgctgctcaactgcctcctatcggcttggtacggcctgccgttcgtgtccccgaacaacatcctggtgtcgacgatcaacgggacggggtcggtgatcgaggccatctacgtggtgatcttcctcatcttcgcggtggaccggcgggccaggctcagcatgctgggcctcctgggcatcgtcgcctccatcttcaccaccgtggtgctcgtctcgctgctggccctccacggcaacgcccgcaaggtcttctgcggcctcgccgccaccatcttctccatctgcatgtacgcctcgccgctctccatcatgaggctggtgatcaagacgaagagcgtggagttcatgccgttcctgctctccctggccgtgttcctgtgcggcacctcctggttcatctacggcctcctcggccgcgaccccttcattattgtacgcacacggttctctctctagtctagatcctgagccgcactcaccgcccggccgtacgcacgtgctatccgcgcatgttgtccgattggcactcggaaaccactgtagcagcactgtatcactagctgttgggactggacgtaactgcatctgatctggccagcacagtacccccgggctgggcgtcggttgccctttcgatgtcccgcccaagcccaaccaggcgcacatgcctgccgctgccgcagccgatgcacgggcatgggcgccggtagcgtctagcagcgtgggcgtggccacccacaggcagcgcacgccggtgctagctgccgatgggccgccgtgcccatgtccatgcagctggattggacccggcacaggcagaagcaacagcgcccgcgctctttcttgtcgcaatgctagttagcaaactgcacggtgcactccacttcagtacacaccaacgcgacagactgcgatgaaatatctaaggccgagttttttttttttgcaaatctcatcatgtcggaatgattcatgcggtccaaacttcagcacacccccactgtcgctaaacccgcgctgtctgtgcatgcgtgcagatcccgaacgggtgcgggagcttcctgggcctgatgcagctcatcctgtacgccatctaccggaaaaacaagggccccgccgcgccggccggcaagggagaggccgccgccgccgccgcggaggtggaggacaccaagaaggtggccgctgccgtggagctggccgatgccacgaccaacaaggcagcggacgccgtcggcggcgacggcaaggtcgccagccaggtgtaggcgggcaaggcttatttgctgtctgggactgggaggaacatcctaaacgaggctgccttagtttgtcggtggagcagattggtgttggtttctgtgggcttttacggttgttgttactctcatctccatctctcccaggaggctaccccaagcatgtagtagcttccattctgattctgggacggtgttgcacgttacagtgctctcaagctgtctctgcaaagtgtgtttttttattccatttccctcctgctcttgttctccaactgcgcttacctgcccccgatttctctaaaaaatgtattaaactatctgagaaattcatccaactgcgagtactgtgctgtgcgtgagcaatgcatcttttgcgtgtacggtgtgtgtgacacgctgaaccctgacttatcacaacaattctagagtgtgctctatagcggc

SEQ ID NO: 35859 - DNA, 2202 bp, Zea Mays
atgggcttccgtccgaacaggctctcttctccaccggtcctaccccttacctcccaagatcacaatcctctgctccttatatattagccacaccgctcgttccctgctgcaccgggtgacacacaggcacaaagacaccgcccgtacacaggctcgttggcttggctgctgtgtgttgcgctcagccattcagacttgagagctactagctaactgctcgttgggtgtgggtgcgctcccggcctagaccgtggaggaaaggagtccagtccactcactaccccctctgctccgttcgggttccaggccagcacagccgagggttccgcacagcgataagcgcgaagcggaagagatggagcatatcgccaggttcttcttcggagtttctgggaatgtcattgcgctcttcctcttcctgtcgcctgttgtcaccttctggagggtcatcaggaagcggtcgacggaggacttctccggcgtgccctacaacatgacgctgctcaactgcctcctatcggcttggtacggcctgccgttcgtgtccccgaacaacatcctggtgtcgacgatcaacgggacggggtcggtgatcgaggccatctacgtggtgatcttcctcatcttcgcggtggaccggcgggccaggctcagcatgctgggcctcctgggcatcgtcgcctccatcttcaccaccgtggtgctcgtctcgctgctggccctccacggcaacgcccgcaaggtcttctgcggcctcgccgccaccatcttctccatctgcatgtacgcctcgccgctctccatcatgaggctggtgatcaagacgaagagcgtggagttcatgccgttcctgctctccctggccgtgttcctgtgcggcacctcctggttcatctacggcctcctcggccgcgaccccttcattattgtacgcacacggttctctctctagtctagatcctgagccgcactcaccgcccggccgtacgcacgtgctatccgcgcatgttgtccgattggcactcggaaaccactgtagcagcactgtatcactagctgttgggactggacgtaactgcatctgatctggccagcacagtacccccgggctgggcgtcggttgccctttcgatgtcccgcccaagcccaaccaggcgcacatgcctgccgctgccgcagccgatgcacgggcatgggcgccggtagcgtctagcagcgtgggcgtggccacccacaggcagcgcacgccggtgctagctgccgatgggccgccgtgcccatgtccatgcagctggattggacccggcacaggcagaagcaacagcgcccgcgctctttcttgtcgcaatgctagttagcaaactgcacggtgcactccacttcagtacacaccaacgcgacagactgcgatgaaatatctaaggccgagttttttttttttgcaaatctcatcatgtcggaatgattcatgcggtccaaacttcagcacacccccactgtcgctaaacccgcgctgtctgtgcatgcgtgcagatcccgaacgggtgcgggagcttcctgggcctgatgcagctcatcctgtacgccatctaccggaaaaacaagggccccgccgcgccggccggcaagggagaggccgccgccgccgccgcggaggtggaggacaccaagaaggtggccgctgccgtggagctggccgatgccacgaccaacaaggcagcggacgccgtcggcggcgacggcaaggtcgccagccaggtgtaggcgggcaaggcttatttgctgtctgggactgggaggaacatcctaaacgaggctgccttagtttgtcggtggagcagattggtgttggtttctgtgggcttttacggttgttgttactctcatctccatctctcccaggaggctaccccaagcatgtagtagcttccattctgattctgggacggtgttgcacgttacagtgctctcaagctgtctctgcaaagtgtgtttttttattccatttccctcctgctcttgttctccaactgcgcttacctgcccccgatttctctaaaaaatgtattaaactatctgagaaattcatccaactgcgagtactgtgctgtgcgtgagcaatgcatcttttgcgtgtacggtgtgtgtgacacgctgaaccctgacttatcacaacaattctagagtgtgctctatagcggc

SEQ ID NO: 35860 - DNA, 3174 bp, Zea Mays
atgggcgagcgcagcggcacgcaggccgagctggagcatcacggtctgctgcgcagccatggagacgagcaaatgggagcagggcgccgcaaggtactcgacgacggcgcgacagggaaggagttggagactgggcacacggctgacgagctggagggatgcgagctaggagctctggccgacgagcacgtgcaggaaacttcggctgggcgcgagcatagggagcgagcagggcccgagcgcgcagagttccacggcgcggtggccatggcgaacgccagggcgctcaagcgcgcgcaacagggagagaaacgggatgagggaggagcgaggaaaccgcgaacaagttggagaaccttccgcatccttccacccgttcctccggcggacacatctttgccgcgcccgctcgaagaaatgctcctccgccaccgccaccacctcttgtcgcgcccgcgccgcagcttccctctcgctgccctgggctgtgtcgccatgtccacctcctcttccccctcttcctccacctccacctccgcggccgccgactaccactgccgcaccaagcacagtcccaccgccggttacgcgcgcggtccgggccgcctcgactgggccaaccagcccaaccccttcctccgtttctcccccgcaccgccattaccgctccccaacccacctccgctcgcccccgtcccctaccctgctctcttccactccccacccccgccgccgcagccgctcaccctcgactccctctctgcgctgctcttccactccctcgcgctctccgcctggaagtccgcgggcctctcaacctggtcgctccgcgttaaccccagcagcggcaacctgcaccccaccgaggcccacctggtcttcccgcatccgcgagaggtcgaccgcctcgccatcgcgcactacgcgccccgcgaccatctcctcgaggcccgtgctaccgcaccaattagggattgttccgcgattctgtctgcgccggggatggcgatcctggctctatcgtcagtcttctggcgagaggcgtggaagtatggagagcgggcgctgcggtactgcaaccatgacgtggggcacgcgctcgcagcggttgccttggccgcggccacgctgggttgggacgcgcgtttactagacgggctgtcggacgaggacctcgggaggctcgttggggtggagaaagggagcccggctgcagttccggaggggctccttaacaaagtggtcaagggtaaggcgcggtgggtggagcggcagcatccagattgcgcggttctgctattcccagttgggtctgagccggaggtcgactatggtagaattagtgaggagctgaaggtgttcgatgggctggagtgggtggggaaggcaaatgcacttagtaatgatcatgtggtgtgggatgtgatataccgcacagcagagcaagttaagaagcatggccctgcaccgggggaacggttctttgtgatgccatggcagaagagtccagccttgtccaaaggattgtataaggaattaacagtgcaggaggtagtacgtcagaggagaagtgcggtggacatggatggtgtgcatgtgatgggaagggatacattttatcagatgctgatgcactgccttccatcaggggaggttggatcaggtgaacggcaaggggagcagagtgctctgccattccgagtattaccatgggaagcagaggtgcatgctgcactatttgtgcatcgtgtctcagggcttcacagggggatttatttcctggctgatgaaaggagattgccagaagtttgctatgcagatatcatgctttcaggaaattgcctcgcatggatgttttagccttgggatgattgctagattcgagcctgtgttgcatgagaaaggtgaatggatgtatcctcgtttgttctgggagactggcattcttggtcaagtgctttaccttgaggcccatgctattggaatatctgccacaggaatcggatgctactttgatgatactgttcacgaggcacttggcttgaaaggtttggactttcagagcatgtaccattttacagtgggcgctcctgtgcttgacaagaggataatgagtctcccagcttaccctggtcccggaattgacgcatgatatcttgcctcgggggaattttttgtcgacagatcaacaaagaaccgtggagcctgactgttttggtttatgtgtagtggcatgcctgaaatctatgcattgcataccccggtactaaccactcgtatttatctagttgttagccacgatgctcctatgttgcaccagcgtacaagtatgtcccgatgttccagtgcaattattctggtcctcaaccaggtatatagtttggtatattgtgcaactaatttttttgccacatttactagaataaggagggcgtacaaaattgtagaagtagagatacaacaagaagaaaaaaaacagggaatgtaaatcctctttgcgactatacacttagaacgaaatttctgcatgtatagaatggtttatgcatcctgtccaaatcagaatggcatctgtaaactgatagtgcctgaatctacctgcttgcttcatcgattcctgttcttgcttttgacgtcttttgaagggaatttgctgcataacgtgctataaaacttcaagtatgccttgccctggtttcgaatatgtaatgtaataataaaattccgtgaaaagctgccagttgcacatacgtctcgtgttcgatacaattaatcaattatgtaggagtatcatgtaaagaaaaataaacattcagtgctagcgtgaggatctctgatggtactatatgactgcttgcttagttcgaaaagagagatctagcctgagtcatggcgcatgaatgcatgcgtccgtaaaagtgggtgggcgccgagccacgaccatgactcccgagccctcattttggttgggtcgtagggcggcggcgcacatgtggcggtgggggcgcagtgaaaagacacagctgcaaagataggcagtgttgcagtgatgaacccccactagcggcgaggcgataatgttgtttgccaggacctgctaaattgcggaaaatgcacgccgagcgcccgagcctatctgcctgtcctttccgtgctctgccacagcaccacttc

SEQ ID NO: 35861 - DNA, 3027 bp, Zea Mays
atgccgtcccttcccttctggtcgctgttccgttcaccatgctccgccccctctatttgtgaggacacagctaagcgaaggacccagaaaagcaaaagtttcaaagaggttgagaaatttgatgtttttgtgctggagaaaagttctggttgcaaattccggtcgttgcaacttttgctcttcgctatcatgtctgctgcgtttctaacactcctatacacaccatctgtgtatgaacatcagttgcagtcaagctctcggcttgtcaatgggtggatatgggataagaggagttctgatccccgatatatatcttctgccagcattcaatgggaggatgtatataaaagcatgcaaaatctgaatgttggtgaacaaaagctcagtgttggactcctgaattttaacaggactgagttcagtgcttggacacatatgctcccagaaagtgatttttcagtcataaggctagagcatgccaatgaaagcatcacctggcaaactctgtatcctgaatggatagatgaggaggaagaaacagagataccatcttgtccttcgcttccagatcctagtttttcaagagcgacacactttgatgttgttgctgttaagcttccctgtactcgtgtggcgggttggtcaagagatgttgcaaggctgcatctgcagttgtcagcagcaaaattagcagcagccacagcaagaggcaatagaggaatccatgtgctgtttgtgactgattgcttcccaattccaaacctcttctcttgcaaggacctagtgaaacgtgaaggcaatgcttggatgtacaaacctgacgtgaaggctctaaaggagaagctcaggctgcctgttggttcctgtgagcttgctgttccactcaacgcaaaagcacgactctacacggtagacagacgcagagaagcatatgctacaatactgcattcagcaagtgaatatgtttgcggtgcgataacagcagctcaaagcattcgtcaagcaggatcaacaagggaccttgttattcttgttgatgacaccataagcgaccaccaccgcaaggggctggaatctgctgggtggaaggttagaataatacagaggatccggaatcccaaagccgagcgtgatgcctacaacgaatggaactacagcaaattccggctgtggcagcttacagattatgacaaggtcattttcattgatgctgatctgctcatcctgaggaacattgatttcttgtttgcaatgccggaaatcaccgcaactgggaacaatgcaacactcttcaactctggagtgatggtcattgagccttcaaactgcacgttccagttactgatggagcacatcaacgagataacatcttacaacggtggtgaccaagggtacctgaatgagatattcacatggtggcaccggattccaaagcacatgaatttcttgaagcatttctgggagggtgacgaggacgaagtgaaggccaagaagactcggctgttcggcgccaacccaccgatcctctacgttctccactacttggggcggaagccatggctgtgcttccgggactacgattgcaactggaacgttgagatcttgcgggagtttgcgactgatgttgcgcacgcccgctggtggaaggtgcacaacaagatgccgaagaagcttcagagctattgcctcctgaggtcaaggctgaaggctgggttggagtgggagcggcggcaggccgagaaggcgaacttcaccgacgggcattggaaacggaacataaccgatccgaggctgaagacttgcttcgagaagttctgcttctgggagagcatgctatggcactggggcgagaacaagaacaactcgacgcagagcagcgcggtgccggcaacacctgccgcgacgagcctgtcgagctcgtgaggcctgttgtgtagatacagctttgttgagagtagtataccagatacgaaacttctgaagctcctccatacatacatagcaacagctctgtaaaggtagctatgtaggcctttctccccccccccccccccccccccccccccgaatgactatactctttgttcgccgtcacggctgcagcgacccctcctgctgcttcctgatggttgacaattcttttggtttttgccaataattcatcagtataggctgtttttcactctgggcggcttgagtccggtctgggcctgttgttgcttcaaatcctaccggggctactgcttttgctgcggtacgcctggttttgatgtatggtggttgaacagtttcagtgataaatctggagtgatgcaatatgggattgctgaccagcaaacactgcatcatctaaggcatgaatatttatttgatcggttattgtctgagtgctgctgttcgggatgaacgaaaccaccctgactttttgagttgtttgcatgcagcactcgtgtttgtttctggtcgtgtgccaccaagccatggacgcaatgcaagcgttcaaatgccgtgcctccctgcgtcgtactggcacagagcaagcatcatcattgcgtccatcgagagctttggttccgtgcactgctgctgttgcgccaaagaacgagacgcatcattgcccggatccatgatctcgtggtgctgtcgagttccttggaggtgcggtcttttgcagctcatcagcctgctcgcttttccagcagcggcacacctaaaaagcacagggataggctgtatctgcgtgcgacctcgctccggcggtgccgtcgcttcgcctgagacagagacactgtacgtacacctggttgggtccttcccttgtcgctcacgattggagtagttggatgtttgcgttgcaagtgactgagattaggttttctccacgtttgccactacaaaatccgcgagatgcgcgtccagatctgacgcgcagtctagtagtgctacagtaatataatgtatagaaaaaactattgcgcgattaagttttttcgtgcgatcatcgtgtagttaaatgactgaaaattt

SEQ ID NO: 35862 - DNA, 725 bp, Zea Mays
cctggctcctgaccagatgggtctgcgcctttgccagacaggaccacagggagcgctgtttatttcgcagtgcccgcagcgatgccatctttccgtttcgatcccgcgtcgctgtcgtggcgtcgccgcgagtacagccaccgtcgggggccgcgaaatgaatgcccccatacaggtggcggtggccgcgtccggagcgcgccaggccaagaccacggagccaccgtggtactgtagaggcctagtgggcacttcttctttccttcctctgcgctgctcgcgagaccatggcgaggcgaggacgggccagggacggatgggctctccgacgacagcgccatcaccacattcatggcgcttctcattgattcgaggtccacaaccacaacacaactattgcaggagagaggaggcaggaggacggagggaattggggggtggggaggccccaccagaattcgcgtacccccaccagcggcttcgctttctctccgttctggcgttttggtcttgtgcgaccatgattgcgatggaaatcctctcctgccagagtgttacaaaatatgtataatatgtgatcaaccccctcccctgatgcttttctcccaagggacacacctcttgggagactctgtatccacttgtatataagcaagtaactctgcaataaagagaacagttctgtcattttgtattctctctgtctctctccactgagtatattc

SEQ ID NO: 35863 - DNA, 2011 bp, Zea Mays
cttggcggttgttgactgttgtagacttttgtggtctcacctcgcggacggcggacataccccgtctcggttctcaaacaccgccgccgccgttctcccaacatctccccgtccaggtcgttgggtcagcccctatccttcaccttcacgacttcacctgcttctccactgcgcgccccgcccccggccccgtcgtgcgccctgctcagatccatcgcacggggcttgccgcaccactgcgccaagcaaaaggtgggcggccagcggcgcgtgcgcagatcatgcactggtaggactaatttgcaagatcttggaccgggatggttcgcctgttagttgtcttatgaagattggtaaggggagaaagaagatgaggaataaacagcgaaaatcatctgccctcggttctgatgcaggatgtggatcttctttatcttgtattgtatggagcttgagaattagaggacatcgaggaggatcatttccgcttgccacctcctcacaagatcaaatgactgctgtggatccaacaaaaggaggaaatgatagcatgtatttctatcctggtagagtgtggctagacactgatggaaacaccattcaagcccatggtggggggattatgtatgatcacaagactgccagattctattggtatggagaaaacaaggatggaccaacataccaagctcgccccaaaggaacacagagggttgacatcattggggtaagctgctactcatcaaaagacctgtggtcgtggactcatgaaggaattgtgcttcgtggtgagccttctaatgtcatccatgacctttataaatcaaaggtgcttgagagacctaagctttcgtccacatggttgtgagagtagagacatgacagtcttcaaagatgacgatggaatggcttacctcttctattcttctcgtgacaatactgagctccatgttagcccattgacagaggactaccttcagatcacagcagcaatgaagagaatactaataaggcggcatcgtgaggctccagccgtcttcaagcaccaggggacctactacatgatcacctctggttgctcaggctgggctcccaacagggcattggcacatgctgcagagtctatcatgggcccatgggagacactgggaaacccttgcgttggaggcaacaggttttaccgccttacaacattcttatctcaaagcacatttgtgcttcccctccctggtttgtctggtgcatttatcttcatggcggataggtggagtccgtcaaacttgagagactcccggtatgtgtggcttcctctattcgtcggagggctcgcagacgaacctttagattacagttttggtttccctctgtggtcaagggtatcgatttattggcacaagaaatggcgcctcccagaagattggaagattgcaaacacagcaaatacataagatagctagctatacttgaaccgatagatcgttcataaacttgcttgaggattctaatcgcttgctcctcaagcttttgtacaaaacagtcatcctaaacatgcttcagtgatatatcttttttttggcgtgtgcatgtgtctgtaacttctcttggaaaaagaagtgtgtttcagataactgtattgataattggtatgaccatactctgtcgtttatgccaggacagcaaggtgcatcttgtcatgtttttttttgtttatcattaaacaagcatcaatagaggcttccctatgtccagcatcgtgacttcatcttctagactagatcacatttgtttggaaaccaaacttatataaatccagtgagtgatttatgtaacctctccagaaagtttacattaccattttgtttggaaactgaacttctctgaatccagcgagtgatttatgtaacctctccagaaagtttacattaccggcagacagaatccacacgcaaacgaacacatgctgtctcccacgtcataaatctcaagtatctaatctcctacagaaaacaaa

SEQ ID NO: 35864 - DNA, 2270 bp, Zea Mays
gaacattgaagagagccttggcggttgttgactgttgtagacttttgtggtctcacctcgcggacggcggacataccccgtctcggttctcaaacaccgccgccgccgttctcccaacatctccccgtccaggtcgttgggtcagcccctatccttcaccttcacgacttcacctgcttctccactgcgcgccccgcccccggccccgtcgtgcgccctgctcagatccatcgcacggggcttgccgcaccactgcgccaagcaaaagctgtttatgaaggtgggcggccagcggcgcgtgcgcagatcatgcactggtaggactaatttgcaagatcttggaccgggatggttcgcctgttagttgtcttatgaagattggtaaggggagaaagaagatgaggaataaacagcgaaaatcatctgccctcggttctgatgcaggatgtggatcttctttatcttgtattgtatggagcttgagaattagaggacatcgaggaggatcatttccgcttgccacctcctcacaaggtgaatcctcgtgcagtgaaaaggaggggacctcgtaaacaaccaaaggttatagatgattatctggaggagtcttcagcagtacatgcactgttctttccagatcaaatgactgctgtggatccaacaaaaggaggaaatgatagcatgtatttctatcctggtagagtgtggctagacactgatggaaacaccattcaagcccatggtggggggattatgtatgatcacaagactgccagattctattggtatggagaaaacaaggatggaccaacataccaagctcgccccaaaggaacacagagggttgacatcattggggtaagctgctactcatcaaaagacctgtggtcgtggactcatgaaggaattgtgcttcgtggtgagccttctaatgtcatccatgacctttataaatcaaaggtgcttgagagacctaaggtgatatataatgatcgcactgaaaaatatatcatgtggatgcacatcgatgatgctaactacaccaaagcatctgtcggtgtggccgtgagtagctctccgactggaccttttacttacctttacagctttcgtccacatggttgtgagagtagagacatgacagtcttcaaagatgacgatggaatggcttacctcttctattcttctcgtgacaatactgagctccatgttagcccattgacagaggactaccttcagatcacagcagcaatgaagagaatactaataaggcggcatcgtgaggctccagccgtcttcaagcaccaggggacctactacatgatcacctctggttgctcaggctgggctcccaacagggcattggcacatgctgcagagtctatcatgggcccatgggagacactgggaaacccttgcgttggaggcaacaggttttaccgccttacaacattcttatctcaaagcacatttgtgcttcccctccctggtttgtctggtgcatttatcttcatggcggataggtggagtccgtcaaacttgagagactcccggtatgtgtggcttcctctattcgtcggagggctcgcagacgaacctttagattacagttttggtttccctctgtggtcaagggtatcgatttattggcacaagaaatggcgcctcccagaagattggaagattgcaaacacagcaaatacataagatagctagctatacttgaaccgatagatcgttcataaacttgcttgaggattctaatcgcttgctcctcaagcttttgtacaaaacagtcatcctaaacatgcttcagtgatatatcttttttttggcgtgtgcatgtgtctgtaacttctcttggaaaaagaagtgtgtttcagataactgtattgataattggtatgaccatactctgtcgtttatgccaggacagcaaggtgcatcttgtcatgtttttttttgtttatcattaaacaagcatcaatagaggcttccctatgtccagcatcgtgacttcatcttctagactagatcacatttgtttggaaaccaaacttatataaatccagtgagtgatttatgtaacctctccagaaagtttacattaccattttgtttggaaactgaacttctctgaatccagcgagtgatttatgtaacctctccagaaagtttacattaccggcagacagaatccacacgcaaacgaacacatgctgtctcccacgtcataaatctcaagtatctaatctcctacagaaaacaaa

SEQ ID NO: 35865 - DNA, 3306 bp, Zea Mays
cttgtctccagcagaggttagcgaccagagaccagccagagccagcagcctggaccaaggtaacggtgctaagagtgtgatggtgtattttaaaatgcatttctggttagtccttgtgctctgcagtttccgagcatcaaaatccctacctctggatagagatatacttttgggcatcagaggctatctgaaagatccacagaattacctacacaactgggatgaatcccactcaccgtgccaattctacggtgttacatgtgaccacaattctggcgatgtcatcgggatatcactctcaaatatctcgctgtcaggcactatatcatcttcattttctcttcttggacaattacgcactctggagcttggggcaaactccatctcaggaactgttcctgctgcgctagccgactgcacaaatctgcaggtacttaatctgtcaatgaacagtttaactggtgaattgcctgatctttcagcattggtcaacctacgagttctggacttgtcgaccaatagtttcaatggggcattcccaacatgggtcagcaaattaccaggtctaactgaactaggccttggagagaacagcttcgacgaaggtgatgttccggaaagcattggagacctgaagaacttaacgtggctgttcttgggacaatgcaatcttaggggagagataccagcttcagtcttcgatttggtatcactcgggacactggacttctcacgcaaccaaattactggtgtattcccgaaggcaatatctaaactgaggaacttatggaagattgagctctaccagaacaacttgactggtgaaattcctcaagagcttgcaactctaaccttgttatctgagtttgatgtttctcggaatcagctgactggcatgctgcctaaggagattggcagcctgaagaagctgaggatattccatatataccacaacaacttctttggtgaacttcctgaagagttggggaacctgcagtttcttgagtcattctcaacctatgaaaatcagttctcaggaaagttccctgccaacctgggtcgattctcaccactcaacacaatcgacatatccgagaattacttttctggcgaatttccaagattcttgtgccaaaacaacaagctccagttcttattggctttgaccaacaacttttcaggtgaattccccgcttcttactcttcttgcaagacacttcagaggttcagaataagtcaaaatcaattcagtgggagtattcctgctggcttgtggggattgcctaatgctgtgataattgatgttgctgataatgcatttagtgggggcatattttctgatataggcttttcagttactctgaaccagctgtatgttcagaacaactacttcatcggggagcttccagtagagctagggaggctcaccctgcttcagaagttggttgcttcgaacaacagactctctggccaaatacctagacagattggaagactcaagcagcttacttacctacatttggaacataacgcattggaagggccaataccacgtatgtgcagtagcatggttgacctgaatcttgcagagaattccttgactggggacattccagacacactggtctcccttgtctctctgaattcactcaatatatcccataacatgatctctggtggcattcctgaaggtctgcagtcactgaagctgagtgatatcgatttctcccagaatgagttgtctggcccagtccctccccaactcttgatgatagctggagattatgcattctctgaaaatgctggcctttgtgttgcagacacttcagaaggctggaaacaaagtatcactaatctaaaaccttgtcagtggtccgataaccgtgacaacttgtcaaggagacgactccttgttctggtaactgtggtatctttagttgtcctcctgtttgggttggcgtgtctaagctatgaaaattataggctagaagagctcaacagaaaaggggatactgagagtggcagtgacactgatttgaagtgggctctcgagacattccatcccccagaacttgaccccgaggagatatccaacttggatggagagagtttgattggctgtggaggcactggcaaagtttacaggctagaattgagcaagggaaggggaactgtggctgtgaaggagttgtggaagcgtgatgacgcaaaggtcttgaacgctgagataaatacccttgggaagatacgccatcggaacattttgaaactcaatgcatttttgaccggagcatcaaattttctggtttatgagtatgtggtgaacggcaatctgtatgacgctattcgccgtgagttcaaagctggacacccggaacttgactgggacaagaggtgccggattgcggttggggttgcaaaggccatcatgtaccttcaccacgactgctccccggccataattcatcgggacataaagtcaaccaacattctgctggacgagaagtatgaagctaagcttgcagatttcggtatcgccaaaatggtggaaggttcgacgcttagctgcttcgctggtacgcatgactacatggctcctgagcttgcgtattctctaaacgcgactgagaagagcgatgtttacaacttcggtgtcgtactgctagagttgcttacaggacatagcccaactgatcaacaatttggcggtgaaaaagacattgtgtcctgggtttcattccatttggcagagaaagaccctgctgctgttcttgacccgaaagtaagcaatgatgcatcggatcacaatcacatgatgaaggcgttgcatattgctattctttgtaccactcagcttccatctgaacgaccgacgatgagagagatcgtgaaaatgctcaccgacattgatcctagctccacagctaggagggcaaagaacaagactgataagtaacagcgacaggctttgtcttagtaaaatatactagtaataaccataatgtcagggcctcttggcaccctgtagcaatcatgggggaagcttattaggccgtcagaatggctgattagttaatagaaactagagggctggtaaaataatatggaggtatagcctatgcaatgcttgtccatgtgtaaaagctttagatcatgtacaaattagtattgtgcaccgaaagtttaggtattgttgaatatacgccgaaaaaacaatcataatccatgataacgctaatgggtctttaggataaaagtctattagtaatgatccatatatacaaagacgttgacgtgcttgagaga

SEQ ID NO: 35866 - DNA, 3344 bp, Zea Mays
cttatatctaccggccttcctcgccgcccccatggccttgtcttgtctccagcagagattggccggacgcttgggacgctgccgcctttttttttgggtaacggtgctaagagtgtgatggtgtattttaaaatgcatttctggttagtccttgtgctctgcagtttccgagcatcaaaatccctacctctggatagagatatacttttgggcatcagaggctatctgaaagatccacagaattacctacacaactgggatgaatcccactcaccgtgccaattctacggtgttacatgtgaccacaattctggcgatgtcatcgggatatcactctcaaatatctcgctgtcaggcactatatcatcttcattttctcttcttggacaattacgcactctggagcttggggcaaactccatctcaggaactgttcctgctgcgctagccgactgcacaaatctgcaggtacttaatctgtcaatgaacagtttaactggtgaattgcctgatctttcagcattggtcaacctacgagttctggacttgtcgaccaatagtttcaatggggcattcccaacatgggtcagcaaattaccaggtctaactgaactaggccttggagagaacagcttcgacgaaggtgatgttccggaaagcattggagacctgaagaacttaacgtggctgttcttgggacaatgcaatcttaggggagagataccagcttcagtcttcgatttggtatcactcgggacactggacttctcacgcaaccaaattactggtgtattcccgaaggcaatatctaaactgaggaacttatggaagattgagctctaccagaacaacttgactggtgaaattcctcaagagcttgcaactctaaccttgttatctgagtttgatgtttctcggaatcagctgactggcatgctgcctaaggagattggcagcctgaagaagctgaggatattccatatataccacaacaacttctttggtgaacttcctgaagagttggggaacctgcagtttcttgagtcattctcaacctatgaaaatcagttctcaggaaagttccctgccaacctgggtcgattctcaccactcaacacaatcgacatatccgagaattacttttctggcgaatttccaagattcttgtgccaaaacaacaagctccagttcttattggctttgaccaacaacttttcaggtgaattccccgcttcttactcttcttgcaagacacttcagaggttcagaataagtcaaaatcaattcagtgggagtattcctgctggcttgtggggattgcctaatgctgtgataattgatgttgctgataatgcatttagtgggggcatattttctgatataggcttttcagttactctgaaccagctgtatgttcagaacaactacttcatcggggagcttccagtagagctagggaggctcaccctgcttcagaagttggttgcttcgaacaacagactctctggccaaatacctagacagattggaagactcaagcagcttacttacctacatttggaacataacgcattggaagggccaataccacgtatgtgcagtagcatggttgacctgaatcttgcagagaattccttgactggggacattccagacacactggtctcccttgtctctctgaattcactcaatatatcccataacatgatctctggtggcattcctgaaggtctgcagtcactgaagctgagtgatatcgatttctcccagaatgagttgtctggcccagtccctccccaactcttgatgatagctggagattatgcattctctgaaaatgctggcctttgtgttgcagacacttcagaaggctggaaacaaagtatcactaatctaaaaccttgtcagtggtccgataaccgtgacaacttgtcaaggagacgactccttgttctggtaactgtggtatctttagttgtcctcctgtttgggttggcgtgtctaagctatgaaaattataggctagaagagctcaacagaaaaggggatactgagagtggcagtgacactgatttgaagtgggctctcgagacattccatcccccagaacttgaccccgaggagatatccaacttggatggagagagtttgattggctgtggaggcactggcaaagtttacaggctagaattgagcaagggaaggggaactgtggctgtgaaggagttgtggaagcgtgatgacgcaaaggtcttgaacgctgagataaatacccttgggaagatacgccatcggaacattttgaaactcaatgcatttttgaccggagcatcaaattttctggtttatgagtatgtggtgaacggcaatctgtatgacgctattcgccgtgagttcaaagctggacacccggaacttgactgggacaagaggtgccggattgcggttggggttgcaaaggccatcatgtaccttcaccacgactgctccccggccataattcatcgggacataaagtcaaccaacattctgctggacgagaagtatgaagctaagcttgcagatttcggtatcgccaaaatggtggaaggttcgacgcttagctgcttcgctggtacgcatgactacatggctcctgagcttgcgtattctctaaacgcgactgagaagagcgatgtttacaacttcggtgtcgtactgctagagttgcttacaggacatagcccaactgatcaacaatttggcggtgaaaaagacattgtgtcctgggtttcattccatttggcagagaaagaccctgctgctgttcttgacccgaaagtaagcaatgatgcatcggatcacaatcacatgatgaaggcgttgcatattgctattctttgtaccactcagcttccatctgaacgaccgacgatgagagagatcgtgaaaatgctcaccgacattgatcctagctccacagctaggagggcaaagaacaagactgataagtaacagcgacaggctttgtcttagtaaaatatactagtaataaccataatgtcagggcctcttggcaccctgtagcaatcatgggggaagcttattaggccgtcagaatggctgattagttaatagaaactagagggctggtaaaataatatggaggtatagcctatgcaatgcttgtccatgtgtaaaagctttagatcatgtacaaattagtattgtgcaccgaaagtttaggtattgttgaatatacgccgaaaaaacaatcataatccatgataacgctaatgggtctttaggataaaagtctattagtaatgatccatatatacaaagacgttgacgtgcttgagaga

SEQ ID NO: 35867 - DNA, 1513 bp, Zea Mays
ctgcgacaacaagcgtaaactaggagagaaccagcaccccaaggatatcctgaacgaggtgtcgaggactcatcaagcaatacaatcgctggacaaggcggtgtccaccctggagatggagatggccgtggagcgcgcgaggagcgcggcggcgtggcatccggcaggagtcctccccagaaggccttcgtcgtggtcggcatcaacacggccttcaccagcaggaagcggcgcgactcgctccgggacacctgggtccccagagggcataagctgaggaagctggagcgggagaagggggtcgtgatccggttcgtgatcgggcacagcggcacgccgggcggcggcgcgctggaccgcgccctggacgcggaggaggccgagagcagggacttcctgcggctcgaccacgccgagggctaccacgagctgtcgtccaagaccaggagctacttcaccaccgccgtcgccacctgggacgccgacttctacgtcaaggtcgacgacgacatccacctcaacctcggtgcgtatacgtacgtactacgtgctcgctggccaaacacagaacgcggcgtcggctgtatgaagtctgggcctgtcctgtcacagaaaggagtgaagtaccacgagccagagtactggaagttcggtgactagggcaacaagtacttccgccacgccaccggccggccaaatctacgccatctccaaagacctcgccgcctacatctccatcaactagccgatccttcacaggttcgcgaacgaggacgtctcgctgggcgcgtggctgatcgtgctcgaggtcgagcacgtcgacgaccgaagcatgtgctgcgcgacgcctccagactgcgagtggaagaagcgagccggcaacgtgtgcgtagcgtccttcgacgggtcgtgcagcggcgtctgcaagtcggcggacaggatgatgcggcacatccactgcggcgaaggcgacggggccgtctggaacgccgccacgtgagattgcccatctcacatcgggaaccccaaccgttgctgtatgtggaggtggagcttcactcggcatccgattttctgaaaacgccaaggcgagagggaagcgaggtcgttgatccactgtttggcatattgagcattccgcatatgcatgacaagtatatggccgtttcacttgagacgtcatgctgtgatatgatccacgtaaaaagcgcatggattggtgtgtgtgaatgtgaatgtgaatgtacagacagggagtgaggggcttggattaatggtacttggtcgaccaactgaagtaatgctgttcactaatcatgatttgttttttttggcctattttgaactaaccagctccgtggcccatggatatgtttactaccatgtatcactggcccatgggtatgtctactactatgtatcagtactcttttgtttactactatgtatcactggcccatggatatgtttacgtgtctcgttttttcttgaggagttaatcaataaaaaacag

SEQ ID NO: 35868 - DNA, 1874 bp, Zea Mays
cgtgcgtgtacgcacgcctttggtgcgcaggcactggcggagcggcagccgcagctggagaagaagccgccgcgcggggggagggcgccgctgtcggggaaggccgtcgcggcgctgtgcgtgacgagcttcgttgtggggctgctgctcagcggcaacgtgtcgctgatgtcggcctcggcggcggcggcggcgtcgtcgtcgtactcgagcagggacaaaactaggagagaaccagcaccccaaggatatcctgaacgaggtgtcgaggactcatcaagcaatacaatcgctggacaaggcggtgtccaccctggagatggagatggccgtggagcgcgcgaggagcgcggcggcgtggcatccggcaggagtcctccccagaaggccttcgtcgtggtcggcatcaacacggccttcaccagcaggaagcggcgcgactcgctccgggacacctgggtccccagagggcataagctgaggaagctggagcgggagaagggggtcgtgatccggttcgtgatcgggcacagcggcacgccgggcggcggcgcgctggaccgcgccctggacgcggaggaggccgagagcagggacttcctgcggctcgaccacgccgagggctaccacgagctgtcgtccaagaccaggagctacttcaccaccgccgtcgccacctgggacgccgacttctacgtcaaggtcgacgacgacatccacctcaacctcggtgcgtatacggtgggtgtactactacacgccgtgagtctctgaagaaattcgcttccaatccaactgcagggatgctgacgagcaggctggccaaacacagaacgcggcgtcggctgtatgaagtctgggcctgtcctgtcacagaaaggagtgaagtaccacgagccagagtactggaagttcggtgactagggcaacaagtacttccgccacgccaccggccggccaaatctacgccatctccaaagacctcgccgcctacatctccatcaactagttatttctatatatatatatatcctgcattgcgttgtgtcatgtcatgtgcggccgcgttcctctgtgcctgacgtagtgacgtacgtgtttccaggccgatccttcacaggttcgcgaacgaggacgtctcgctgggcgcgtggctgatcgtgctcgaggtcgagcacgtcgacgaccgaagcatgtgctgcgcgacgcctccagactgcgagtggaagaagcgagccggcaacgtgtgcgtagcgtccttcgacgggtcgtgcagcggcgtctgcaagtcggcggacaggatgatgcggcacatccactgcggcgaaggcgacggggccgtctggaacgccgccacgtgagattgcccatctcacatcgggaaccccaaccgttgctgtatgtggaggtggagcttcactcggcatccgattttctgaaaacgccaaggcgagagggaagcgaggtcgttgatccactgtttggcatattgagcattccgcatatgcatgacaagtatatggccgtttcacttgagacgtcatgctgtgatatgatccacgtaaaaagcgcatggattggtgtgtgtgaatgtgaatgtgaatgtacagacagggagtgaggggcttggattaatggtacttggtcgaccaactgaagtaatgctgttcactaatcatgatttgttttttttggcctattttgaactaaccagctccgtggcccatggatatgtttactaccatgtatcactggcccatgggtatgtctactactatgtatcagtactcttttgtttactactatgtatcactggcccatggatatgtttacgtgtctcgttttttcttgaggagttaatcaataaaaaacag

SEQ ID NO: 35869 - DNA, 1706 bp, Zea Mays
cgtgcgtgtacgcacgcctttggtgcgcaggcactggcggagcggcagccgcagctggagaagaagccgccgcgcggggggagggcgccgctgtcggggaaggccgtcgcggcgctgtgcgtgacgagcttcgttgtggggctgctgctcagcggcaacgtgtcgctgatgtcggcctcggcggcggcggcggcgtcgtcgtcgtactcgagcagggacaaaactaggagagaaccagcaccccaaggatatcctgaacgaggtgtcgaggactcatcaagcaatacaatcgctggacaaggcggtgtccaccctggagatggagatggccgtggagcgcgcgaggagcgcggcggcgtggcatccggcaggagtcctccccagaaggccttcgtcgtggtcggcatcaacacggccttcaccagcaggaagcggcgcgactcgctccgggacacctgggtccccagagggcataagctgaggaagctggagcgggagaagggggtcgtgatccggttcgtgatcgggcacagcggcacgccgggcggcggcgcgctggaccgcgccctggacgcggaggaggccgagagcagggacttcctgcggctcgaccacgccgagggctaccacgagctgtcgtccaagaccaggagctacttcaccaccgccgtcgccacctgggacgccgacttctacgtcaaggtcgacgacgacatccacctcaacctcgggatgctgacgagcaggctggccaaacacagaacgcggcgtcggctgtatgaagtctgggcctgtcctgtcacagaaaggagtgaagtaccacgagccagagtactggaagttcggtgactagggcaacaagtacttccgccacgccaccggccggccaaatctacgccatctccaaagacctcgccgcctacatctccatcaactagccgatccttcacaggttcgcgaacgaggacgtctcgctgggcgcgtggctgatcgtgctcgaggtcgagcacgtcgacgaccgaagcatgtgctgcgcgacgcctccagactgcgagtggaagaagcgagccggcaacgtgtgcgtagcgtccttcgacgggtcgtgcagcggcgtctgcaagtcggcggacaggatgatgcggcacatccactgcggcgaaggcgacggggccgtctggaacgccgccacgtgagattgcccatctcacatcgggaaccccaaccgttgctgtatgtggaggtggagcttcactcggcatccgattttctgaaaacgccaaggcgagagggaagcgaggtcgttgatccactgtttggcatattgagcattccgcatatgcatgacaagtatatggccgtttcacttgagacgtcatgctgtgatatgatccacgtaaaaagcgcatggattggtgtgtgtgaatgtgaatgtgaatgtacagacagggagtgaggggcttggattaatggtacttggtcgaccaactgaagtaatgctgttcactaatcatgatttgttttttttggcctattttgaactaaccagctccgtggcccatggatatgtttactaccatgtatcactggcccatgggtatgtctactactatgtatcagtactcttttgtttactactatgtatcactggcccatggatatgtttacgtgtctcgttttttcttgaggagttaatcaataaaaaacag

SEQ ID NO: 35870 - DNA, 909 bp, Zea Mays
cataactctagagtccagatcaccggtgggcgacggctgctccagatcaccagcgtctccagcaccagtgacaagatgagttcgtcatctcaagttaggtcatggggattactctgcttcaagcacaaaagtactgcgcatgatgaatactcttggagtcgacaatgaagccaagcagacaatagaagtactgcaagctgagctaaagaaaacaaaagagaggctgcaagcagttgaagaactgaaaggacaaactgatcctggaaccgtggtagacgctaatattgctgaaaagttagcacaacttaagaatcaaattgcgacacttgaaaaacgtgaagaaagatacaaggcggtgtttgcagagaggatctcggtcttccggaaagcctgctgctcccttttcggttacaagatagtgatgaatgatcagcagcagtcaaatgggattcccgtaacacgctttattctgcagtcagtgtatgcccaaagcgatgatgaaaagcttgagtttgactatgaatcaggaagcactaatatcgtggtcaacgattacacatcccaacaagaaattgctcggcaggtcgacatctacataaggaggacgaactccataccagccttcactgccaacctgacaatggagtctttcaacaaaagaagtatatgctgaagacatgaaactagtgtcagggcacattgcttgatttctgtatgttatcattgacgaagagtatgtatatgagcactcacattggtgggtgaaaactgctcctgctaattgaagttgaggctggagctttgattctattcccaacggattctttttttccctttaactagcaaggcgtacatgagctcacaaacggaaaaaaattgggtgtagccagctagataataactctttag

SEQ ID NO: 35871 - DNA, 2232 bp, Zea Mays
tttcgtcacgcgtgtcagaatcgaagctctttaaacctttttcagtttacgcatgattagttgtttgatcaaggtcaaatccgagttcatggtggcacttgacacggcagagaagcaagttcaggagtatcaaacaaaacttgttgccttggaggaccaattatctaagagtgaggatgaaagaatgcagtttctggataaacttaactatgtggaacaagaactggcagcaaccaaaggacgggagagtgcattacaggaacgcctactaaaggagttgggtgaatatcaggaacgatatcgtggtcaagtaatgaaaataaatgaacttgaggtacaactcaataaagagattgattctaggatcagtgcagaatcatcagtatcatccgcgaaggcattgatcaaagacttggaaggggatttgcatcgattatctgaaagttcagaaagggagaagaaaacccttaagaaggaactttcatacgtgaaagaagacttatccctatctgcttccaaaaataatgctgagcttgagaaaacaatactcagagcagaaaactatgagagtgaggcaaagttgttgaacgagcagttgaccaacttgaaaaagcaacttgacgagtgtctcagtgagaagaatgaaatggagctcaagctattgaattccagtgctttgcctaatcaacatgccccaacagaagaacagaagttgatcaagcttttgcaagaggagctccggaattatgaaaaagaagtgcatgaagctaaaaggttgaaatcttcccacatgaatgttgagttgctgaaagaaaaactattggaggagcaggggcgcagggaaagagcagaacttgaattatctaaactgcaggaaattggtgctagagcacataagctggagcttgaattagcatcttgtacagcactgctcagcaacatacctgatgtgtcttcttatgctgacataccccaaaagatcgcagatctgcaaaagcaagcattgacatatttgaacgaagttggtgaggtaacatcaaggttgaaagaattagaggttgcactagaatatgctgatctcagcaagcaacaagcagaaggtgaagctgctcttgctaaagagagggctgcaagtgctactagggaggtcaagcggcttgagcttatgcttactgcgatcagtgaagaaagagataagctgagaaaggaacatgctacggagtcggatcagtctgggatggaaaaaacgataagagagctggagagcattatacacgagctgaaagaattgattagtcacaaggacactgaactcaatataatgaatgaaagattaaaccttgaaacaaggaaagtgaagtctttggagcgagagggagatcagctacgctctcaggtggcattactagagtctaagttaggtcatggggattactctgcttcaagcacaaaagtactgcgcatgatgaatactcttggagtcgacaatgaagccaagcagacaatagaagtactgcaagctgagctaaagaaaacaaaagagaggctgcaagcagttgaagaactgaaaggacaaactgatcctggaaccgtggtagacgctaatattgctgaaaagttagcacaacttaagaatcaaattgcgacacttgaaaaacgtgaagaaagatacaaggcggtgtttgcagagaggatctcggtcttccggaaagcctgctgctcccttttcggttacaagatagtgatgaatgatcagcagcagtcaaatgggattcccgtaacacgctttattctgcagtcagtgtatgcccaaagcgatgatgaaaagcttgagtttgactatgaatcaggaagcactaatatcgtggtcaacgattacacatcccaacaagaaattgctcggcaggtcgacatctacataaggaggacgaactccataccagccttcactgccaacctgacaatggagtctttcaacaaaagaagtatatgctgaagacatgaaactagtgtcagggcacattgcttgatttctgtatgttatcattgacgaagagtatgtatatgagcactcacattggtgggtgaaaactgctcctgctaattgaagttgaggctggagctttgattctattcccaacggattctttttttccctttaactagcaaggcgtacatgagctcacaaacggaaaaaaattgggtgtagccagctagataataactctttag

SEQ ID NO: 35872 - DNA, 2574 bp, Zea Mays
tcgctattctcatattctgctcgtgtgaagtatttatttgcacgcccatgtatgaagacaaatattttcccgttcaccgtcgcttgattttcgaatcgaatcgctcattcattcctcaccgcctccatccccgctccggcctcccctccggaagtcccaaaccctaggaaccagctgaactgccgaagctttcagaaccccaggcggcaagaacaattgcggcgagatgattctccggactccaccacagcggaagcgccgcgcaggctccggcgccggcgatgacgccgatctcggtcttgtcaaatccgtgggcgtcgcgagcgcgaccggccgtagtccggtctccgatcgccgcctggccctctacgaccgccccaccgccctcgcgcttgccgacgcccccggggagccgttcgacgacatggtctgcacgtaccactgccgccagatggtcaaatccgagttcatggtggcacttgacacggcagagaagcaagttcaggagtatcaaacaaaacttgttgccttggaggaccaattatctaagagtgaggatgaaagaatgcagtttctggataaacttaactatgtggaacaagaactggcagcaaccaaaggacgggagagtgcattacaggaacgcctactaaaggagttgggtgaatatcaggaacgatatcgtggtcaagtaatgaaaataaatgaacttgaggtacaactcaataaagagattgattctaggatcagtgcagaatcatcagtatcatccgcgaaggcattgatcaaagacttggaaggggatttgcatcgattatctgaaagttcagaaagggagaagaaaacccttaagaaggaactttcatacgtgaaagaagacttatccctatctgcttccaaaaataatgctgagcttgagaaaacaatactcagagcagaaaactatgagagtgaggcaaagttgttgaacgagcagttgaccaacttgaaaaagcaacttgacgagtgtctcagtgagaagaatgaaatggagctcaagctattgaattccagtgctttgcctaatcaacatgccccaacagaagaacagaagttgatcaagcttttgcaagaggagctccggaattatgaaaaagaagtgcatgaagctaaaaggttgaaatcttcccacatgaatgttgagttgctgaaagaaaaactattggaggagcaggggcgcagggaaagagcagaacttgaattatctaaactgcaggaaattggtgctagagcacataagctggagcttgaattagcatcttgtacagcactgctcagcaacatacctgatgtgtcttcttatgctgacataccccaaaagatcgcagatctgcaaaagcaagcattgacatatttgaacgaagttggtgaggtaacatcaaggttgaaagaattagaggttgcactagaatatgctgatctcagcaagcaacaagcagaaggtgaagctgctcttgctaaagagagggctgcaagtgctactagggaggtcaagcggcttgagcttatgcttactgcgatcagtgaagaaagagataagctgagaaaggaacatgctacggagtcggatcagtctgggatggaaaaaacgataagagagctggagagcattatacacgagctgaaagaattgattagtcacaaggacactgaactcaatataatgaatgaaagattaaaccttgaaacaaggaaagtgaagtctttggagcgagagggagatcagctacgctctcaggtggcattactagagtctaagttaggtcatggggattactctgcttcaagcacaaaagtactgcgcatgatgaatactcttggagtcgacaatgaagccaagcagacaatagaagtactgcaagctgagctaaagaaaacaaaagagaggctgcaagcagttgaagaactgaaaggacaaactgatcctggaaccgtggtagacgctaatattgctgaaaagttagcacaacttaagaatcaaattgcgacacttgaaaaacgtgaagaaagatacaaggcggtgtttgcagagaggatctcggtcttccggaaagcctgctgctcccttttcggttacaagatagtgatgaatgatcagcagcagtcaaatgggattcccgtaacacgctttattctgcagtcagtgtatgcccaaagcgatgatgaaaagcttgagtttgactatgaatcaggaagcactaatatcgtggtcgacatctacataaggaggacgaactccataccagccttcactgccaacctgacaatggagtctttcaacaaaagaagtatatgctgaagacatgaaactagtgtcagggcacattgcttgatttctgtatgttatcattgacgaagagtatgtatatgagcactcacattggtgggtgaaaactgctcctgctaattgaagttgaggctggagctttgattctattcccaacggattctttttttccctttaactagcaaggcgtacatgagctcacaaacggaaaaaaattgggtgtagccagctagataataactctttag

SEQ ID NO: 35873 - DNA, 2589 bp, Zea Mays
tcgctattctcatattctgctcgtgtgaagtatttatttgcacgcccatgtatgaagacaaatattttcccgttcaccgtcgcttgattttcgaatcgaatcgctcattcattcctcaccgcctccatccccgctccggcctcccctccggaagtcccaaaccctaggaaccagctgaactgccgaagctttcagaaccccaggcggcaagaacaattgcggcgagatgattctccggactccaccacagcggaagcgccgcgcaggctccggcgccggcgatgacgccgatctcggtcttgtcaaatccgtgggcgtcgcgagcgcgaccggccgtagtccggtctccgatcgccgcctggccctctacgaccgccccaccgccctcgcgcttgccgacgcccccggggagccgttcgacgacatggtctgcacgtaccactgccgccagatggtcaaatccgagttcatggtggcacttgacacggcagagaagcaagttcaggagtatcaaacaaaacttgttgccttggaggaccaattatctaagagtgaggatgaaagaatgcagtttctggataaacttaactatgtggaacaagaactggcagcaaccaaaggacgggagagtgcattacaggaacgcctactaaaggagttgggtgaatatcaggaacgatatcgtggtcaagtacaactcaataaagagattgattctaggatcagtgcagaatcatcagtatcatccgcgaaggcattgatcaaagacttggaaggggatttgcatcgattatctgaaagttcagaaagggagaagaaaacccttaagaaggaactttcatacgtgaaagaagacttatccctatctgcttccaaaaataatgctgagcttgagaaaacaatactcagagcagaaaactatgagagtgaggcaaagttgttgaacgagcagttgaccaacttgaaaaagcaacttgacgagtgtctcagtgagaagaatgaaatggagctcaagctattgaattccagtgctttgcctaatcaacatgccccaacagaagaacagaagttgatcaagcttttgcaagaggagctccggaattatgaaaaagaagtgcatgaagctaaaaggttgaaatcttcccacatgaatgttgagttgctgaaagaaaaactattggaggagcaggggcgcagggaaagagcagaacttgaattatctaaactgcaggaaattggtgctagagcacataagctggagcttgaattagcatcttgtacagcactgctcagcaacatacctgatgtgtcttcttatgctgacataccccaaaagatcgcagatctgcaaaagcaagcattgacatatttgaacgaagttggtgaggtaacatcaaggttgaaagaattagaggttgcactagaatatgctgatctcagcaagcaacaagcagaaggtgaagctgctcttgctaaagagagggctgcaagtgctactagggaggtcaagcggcttgagcttatgcttactgcgatcagtgaagaaagagataagctgagaaaggaacatgctacggagtcggatcagtctgggatggaaaaaacgataagagagctggagagcattatacacgagctgaaagaattgattagtcacaaggacactgaactcaatataatgaatgaaagattaaaccttgaaacaaggaaagtgaagtctttggagcgagagggagatcagctacgctctcaggtggcattactagagtctaagttaggtcatggggattactctgcttcaagcacaaaagtactgcgcatgatgaatactcttggagtcgacaatgaagccaagcagacaatagaagtactgcaagctgagctaaagaaaacaaaagagaggctgcaagcagttgaagaactgaaaggacaaactgatcctggaaccgtggtagacgctaatattgctgaaaagttagcacaacttaagaatcaaattgcgacacttgaaaaacgtgaagaaagatacaaggcggtgtttgcagagaggatctcggtcttccggaaagcctgctgctcccttttcggttacaagatagtgatgaatgatcagcagcagtcaaatgggattcccgtaacacgctttattctgcagtcagtgtatgcccaaagcgatgatgaaaagcttgagtttgactatgaatcaggaagcactaatatcgtggtcaacgattacacatcccaacaagaaattgctcggcaggtcgacatctacataaggaggacgaactccataccagccttcactgccaacctgacaatggagtctttcaacaaaagaagtatatgctgaagacatgaaactagtgtcagggcacattgcttgatttctgtatgttatcattgacgaagagtatgtatatgagcactcacattggtgggtgaaaactgctcctgctaattgaagttgaggctggagctttgattctattcccaacggattctttttttccctttaactagcaaggcgtacatgagctcacaaacggaaaaaaattgggtgtagccagctagataataactctttag

SEQ ID NO: 35874 - DNA, 1644 bp, Zea Mays
ccactgtgcaatcaatgtctgcaccattctagaacttctacaatatatatggaggagctcagtacccgttttatggaggagcaacagctggcatggtgacaggaacaagtcccttttatccatatttccaatttgggcagtcaggaaacactactaccaactatacaagtggacaaggctacaacttgcaacaatacccacaaatgttccacttctcaactgtatcttctacagctgcagctgtgaccggctttgctcagcaatatggaggaccattgtcactagcagcaagccctcaagcccaagcaggcatgactatggcactcacagctccaaccctgccaactccaacacaggctgctcatccttaccggttgattccctcgcactttgcagtttctgctgctccagagcaacccttggcctaaccatggtctcccttctcaccgttgttgtactgtctcgtttccgacgtgtttgagtccatgcatccatctctaacaccaaaaggcactattgtagatcacgcttatcagtcaaagtgctcacctccatatcccacatggtcatgtggtgaatggatattagctttagccccaggatgggcataaagcttcatgccccaaggatggggtgttctaacagacaagtacaaaccccaaccattctaacaatagtccaaggaaggactttatctgggagagttaatttcagccgtaccaagacaatgctgtagctaaaagaaactaacagtcaagcatgacccagggatggttcatgctgatactagtcaaattggacaacaatgacagctaaataactgactagcatgccactcccacatgtcattagtagaatcccaactgtacctagcttaggcatggcatctcttgttgaagcatgaaccatttagcaaaacctacccttctatagtcccgatgttacctagaccaaatgcatttgatatatgaccagcgactacttgtgtaaccaactcatcttttctttgcaaatgcttagatgcatcaactaacattttatttgatctttcagtcgatagcttgcatctaggtggtcaaggctctaaggagagcctgtgcccctaatcagacacaggttcagagtagtgctaatgtttgtttttagcacttggcactacctcctgtcactccaaacacagtattgggactccaaagaaggctttggagtaaccaagcactgctgtgtaactcattaacacaatggacccacagataaatttttattgtcttgggccaccccactcatgtagatgtcattacttctcagtgtcactaccatggttaggtccaggcccccctccccaaccgcgtcccccacctctctcactgcacatcgcagagaccttagtgctctttaatctactattaccaggcatggtggttgtaataataaagtagcgctgtgctactcgtaggacatgaagaactatttgttattcaacccttcatatgtacttaatatcttgtctatttcagttcagtagtcggtacttatttccatccattgtaatgcaccatataatgttgtgtaatatatgtccactgtgctgcacatttcttagggcatgtttggttcgtcttttttgtgacgaggttttctgag

SEQ ID NO: 35875 - DNA, 1670 bp, Zea Mays
gacctctctctcagaaataaagtactctccatataccccagactatggttatccaacaaacttctacaatatatatggaggagctcagtacccgttttatggaggagcaacagctggcatggtgacaggaacaagtcccttttatccatatttccaatttgggcagtcaggaaacactactaccaactatacaagtggacaaggctacaacttgcaacaatacccacaaatgttccacttctcaactgtatcttctacagctgcagctgtgaccggctttgctcagcaatatggaggaccattgtcactagcagcaagccctcaagcccaagcaggcatgactatggcactcacagctccaaccctgccaactccaacacaggctgctcatccttaccggttgattccctcgcactttgcagtttctgctgctccagagcaacccttggcctaaccatggtctcccttctcaccgttgttgtactgtctcgtttccgacgtgtttgagtccatgcatccatctctaacaccaaaaggcactattgtagatcacgcttatcagtcaaagtgctcacctccatatcccacatggtcatgtggtgaatggatattagctttagccccaggatgggcataaagcttcatgccccaaggatggggtgttctaacagacaagtacaaaccccaaccattctaacaatagtccaaggaaggactttatctgggagagttaatttcagccgtaccaagacaatgctgtagctaaaagaaactaacagtcaagcatgacccagggatggttcatgctgatactagtcaaattggacaacaatgacagctaaataactgactagcatgccactcccacatgtcattagtagaatcccaactgtacctagcttaggcatggcatctcttgttgaagcatgaaccatttagcaaaacctacccttctatagtcccgatgttacctagaccaaatgcatttgatatatgaccagcgactacttgtgtaaccaactcatcttttctttgcaaatgcttagatgcatcaactaacattttatttgatctttcagtcgatagcttgcatctaggtggtcaaggctctaaggagagcctgtgcccctaatcagacacaggttcagagtagtgctaatgtttgtttttagcacttggcactacctcctgtcactccaaacacagtattgggactccaaagaaggctttggagtaaccaagcactgctgtgtaactcattaacacaatggacccacagataaatttttattgtcttgggccaccccactcatgtagatgtcattacttctcagtgtcactaccatggttaggtccaggcccccctccccaaccgcgtcccccacctctctcactgcacatcgcagagaccttagtgctctttaatctactattaccaggcatggtggttgtaataataaagtagcgctgtgctactcgtaggacatgaagaactatttgttattcaacccttcatatgtacttaatatcttgtctatttcagttcagtagtcggtacttatttccatccattgtaatgcaccatataatgttgtgtaatatatgtccactgtgctgcacatttcttagggcatgtttggttcgtcttttttgtgacgaggttttctgag

SEQ ID NO: 35876 - DNA, 1853 bp, Zea Mays
tgaaagtcacgaggagtggggccgtgggggtatcacatgcatgtgcattgtgacatactgacatgccaccttggtcaatgttgaatggacatcaggctttactctcttacagacatatcctcagtccctcacacaagcataaagtagccatgcgtgctagtggcacatgatggcagccctgtcatatgcccactcccgtgaacagtactctccatataccccagactatggttatccaacaaacttctacaatatatatggaggagctcagtacccgttttatggaggagcaacagctggcatggtgacaggaacaagtcccttttatccatatttccaatttgggcagtcaggaaacactactaccaactatacaagtggacaaggctacaacttgcaacaatacccacaaatgttccacttctcaactgtatcttctacagctgcagctgtgaccggctttgctcagcaatatggaggaccattgtcactagcagcaagccctcaagcccaagcaggcatgactatggcactcacagctccaaccctgccaactccaacacaggctgctcatccttaccggttgattccctcgcactttgcagtttctgctgctccagagcaacccttggcctaaccatggtctcccttctcaccgttgttgtactgtctcgtttccgacgtgtttgagtccatgcatccatctctaacaccaaaaggcactattgtagatcacgcttatcagtcaaagtgctcacctccatatcccacatggtcatgtggtgaatggatattagctttagccccaggatgggcataaagcttcatgccccaaggatggggtgttctaacagacaagtacaaaccccaaccattctaacaatagtccaaggaaggactttatctgggagagttaatttcagccgtaccaagacaatgctgtagctaaaagaaactaacagtcaagcatgacccagggatggttcatgctgatactagtcaaattggacaacaatgacagctaaataactgactagcatgccactcccacatgtcattagtagaatcccaactgtacctagcttaggcatggcatctcttgttgaagcatgaaccatttagcaaaacctacccttctatagtcccgatgttacctagaccaaatgcatttgatatatgaccagcgactacttgtgtaaccaactcatcttttctttgcaaatgcttagatgcatcaactaacattttatttgatctttcagtcgatagcttgcatctaggtggtcaaggctctaaggagagcctgtgcccctaatcagacacaggttcagagtagtgctaatgtttgtttttagcacttggcactacctcctgtcactccaaacacagtattgggactccaaagaaggctttggagtaaccaagcactgctgtgtaactcattaacacaatggacccacagataaatttttattgtcttgggccaccccactcatgtagatgtcattacttctcagtgtcactaccatggttaggtccaggcccccctccccaaccgcgtcccccacctctctcactgcacatcgcagagaccttagtgctctttaatctactattaccaggcatggtggttgtaataataaagtagcgctgtgctactcgtaggacatgaagaactatttgttattcaacccttcatatgtacttaatatcttgtctatttcagttcagtagtcggtacttatttccatccattgtaatgcaccatataatgttgtgtaatatatgtccactgtgctgcacatttcttagggcatgtttggttcgtcttttttgtgacgaggttttctgag

SEQ ID NO: 35877 - DNA, 2250 bp, Zea Mays
tttatatgagcgtgctttggacaagaaggacctcgcgggtgcattatagcaaactctagtatatattgctgtttcggtaccctacccccctctctctctctcctctacctccttttcctctaacctttagctttcctccctccctctcctctctcccccctcctctaacaagaactactcccagccattcagatcctaagttgctgaccttgctgctgcttgttggagatagatttgttggttctaagttccaagtaccatgagtccaccgagtgtgatggggcagtttggggacacaacctacaccaaggtttttgttgggggactcgcgtgggaaacccagaaggagacgatgaggaagtacttcgagcagtttggggagatcctggaggctgttgtcatcactgacaagaacactggcagatccaagggctacggatttgaggagctagaaactttagagtaatgaaatccttcaaccagcaggcaggaatccaaggtggactcggcgcagcttttccttctcatgccaccttccctcattatgccatcccacaaggccttcccttccatgtctatgggtactctccatataccccagactatggttatccaacaaacttctacaatatatatggaggagctcagtacccgttttatggaggagcaacagctggcatggtgacaggaacaagtcccttttatccatatttccaatttgggcagtcaggaaacactactaccaactatacaagtggacaaggctacaacttgcaacaatacccacaaatgttccacttctcaactgtatcttctacagctgcagctgtgaccggctttgctcagcaatatggaggaccattgtcactagcagcaagccctcaagcccaagcagtgtgtatccccattaaacaggcatgactatggcactcacagctccaaccctgccaactccaacacaggctgctcatccttaccggttgattccctcgcactttgcagtttctgctgctccagagcaacccttggcctaaccatggtctcccttctcaccgttgttgtactgtctcgtttccgacgtgtttgagtccatgcatccatctctaacaccaaaaggcactattgtagatcacgcttatcagtcaaagtgctcacctccatatcccacatggtcatgtggtgaatggatattagctttagccccaggatgggcataaagcttcatgccccaaggatggggtgttctaacagacaagtacaaaccccaaccattctaacaatagtccaaggaaggactttatctgggagagttaatttcagccgtaccaagacaatgctgtagctaaaagaaactaacagtcaagcatgacccagggatggttcatgctgatactagtcaaattggacaacaatgacagctaaataactgactagcatgccactcccacatgtcattagtagaatcccaactgtacctagcttaggcatggcatctcttgttgaagcatgaaccatttagcaaaacctacccttctatagtcccgatgttacctagaccaaatgcatttgatatatgaccagcgactacttgtgtaaccaactcatcttttctttgcaaatgcttagatgcatcaactaacattttatttgatctttcagtcgatagcttgcatctaggtggtcaaggctctaaggagagcctgtgcccctaatcagacacaggttcagagtagtgctaatgtttgtttttagcacttggcactacctcctgtcactccaaacacagtattgggactccaaagaaggctttggagtaaccaagcactgctgtgtaactcattaacacaatggacccacagataaatttttattgtcttgggccaccccactcatgtagatgtcattacttctcagtgtcactaccatggttaggtccaggcccccctccccaaccgcgtcccccacctctctcactgcacatcgcagagaccttagtgctctttaatctactattaccaggcatggtggttgtaataataaagtagcgctgtgctactcgtaggacatgaagaactatttgttattcaacccttcatatgtacttaatatcttgtctatttcagttcagtagtcggtacttatttccatccattgtaatgcaccatataatgttgtgtaatatatgtccactgtgctgcacatttcttagggcatgtttggttcgtcttttttgtgacgaggttttctgag

SEQ ID NO: 35878 - DNA, 2383 bp, Zea Mays
tttatatgagcgtgctttggacaagaaggacctcgcgggtgcattatagcaaactctagtatatattgctgtttcggtaccctacccccctctctctctctcctctacctccttttcctctaacctttagctttcctccctccctctcctctctcccccctcctctaacaagaactactcccagccattcagatcctaagttgctgaccttgctgctgcttgttggagatagatttgttggttctaagttccaagtaccatgagtccaccgagtgtgatggggcagtttggggacacaacctacaccaaggtttttgttgggggactcgcgtgggaaacccagaaggagacgatgaggaagtacttcgagcagtttggggagatcctggaggctgttgtcatcactgacaagaacactggcagatccaagggctacggatttgttaccttccgggatccggacgcggcgatgagagcttgcgttgatcccgcaccggtgattgatgggaggagggctaactgtaatcttgcttcccttggggttcaaagatctaggcctcctactccccagcatggaggagctagaaactttagagtaatgaaatccttcaaccagcaggcaggaatccaaggtggactcggcgcagcttttccttctcatgccaccttccctcattatgccatcccacaaggccttcccttccatgtctatgggtactctccatataccccagactatggttatccaacaaacttctacaatatatatggaggagctcagtacccgttttatggaggagcaacagctggcatggtgacaggaacaagtcccttttatccatatttccaatttgggcagtcaggaaacactactaccaactatacaagtggacaaggctacaacttgcaacaatacccacaaatgttccacttctcaactgtatcttctacagctgcagctgtgaccggctttgctcagcaatatggaggaccattgtcactagcagcaagccctcaagcccaagcagtgtgtatccccattaaacaggcatgactatggcactcacagctccaaccctgccaactccaacacaggctgctcatccttaccggttgattccctcgcactttgcagtttctgctgctccagagcaacccttggcctaaccatggtctcccttctcaccgttgttgtactgtctcgtttccgacgtgtttgagtccatgcatccatctctaacaccaaaaggcactattgtagatcacgcttatcagtcaaagtgctcacctccatatcccacatggtcatgtggtgaatggatattagctttagccccaggatgggcataaagcttcatgccccaaggatggggtgttctaacagacaagtacaaaccccaaccattctaacaatagtccaaggaaggactttatctgggagagttaatttcagccgtaccaagacaatgctgtagctaaaagaaactaacagtcaagcatgacccagggatggttcatgctgatactagtcaaattggacaacaatgacagctaaataactgactagcatgccactcccacatgtcattagtagaatcccaactgtacctagcttaggcatggcatctcttgttgaagcatgaaccatttagcaaaacctacccttctatagtcccgatgttacctagaccaaatgcatttgatatatgaccagcgactacttgtgtaaccaactcatcttttctttgcaaatgcttagatgcatcaactaacattttatttgatctttcagtcgatagcttgcatctaggtggtcaaggctctaaggagagcctgtgcccctaatcagacacaggttcagagtagtgctaatgtttgtttttagcacttggcactacctcctgtcactccaaacacagtattgggactccaaagaaggctttggagtaaccaagcactgctgtgtaactcattaacacaatggacccacagataaatttttattgtcttgggccaccccactcatgtagatgtcattacttctcagtgtcactaccatggttaggtccaggcccccctccccaaccgcgtcccccacctctctcactgcacatcgcagagaccttagtgctctttaatctactattaccaggcatggtggttgtaataataaagtagcgctgtgctactcgtaggacatgaagaactatttgttattcaacccttcatatgtacttaatatcttgtctatttcagttcagtagtcggtacttatttccatccattgtaatgcaccatataatgttgtgtaatatatgtccactgtgctgcacatttcttagggcatgtttggttcgtcttttttgtgacgaggttttctgag

SEQ ID NO: 35879 - DNA, 1423 bp, Zea Mays
cgtgcctcttccgctccccgttcccgcaataaaggcctaccctacctgattagcccgtgccctcgcgcggcatcacacagattcccgcgtcccgccgtcggcgactcggcgtcctgctgattgcgtcgcgaggagtgctcgtagccgccctcctctctcagattcagtcgcccatggcgaggaatccaggccgcaccgtcttcatcggcaacttggatgaaaaagtatctgaaagagtcttgtatgagattcttattcaggcaggccatgtagtaggcctacatgtacctagtaataaggagagtaacagtcgcaaaggttatgcttttgctgagtatgaaaccgaggatatcgcgcaatacgctgttaggcttttctcgggacttgttcggatcaatggtaaaacgctcaagttcgtggtaggttttcatttctatctaggtacattagttgtgtataatattctgcctacaagcattacttgtgtatacaccacttgtctataatagcagacagttgttcttacgttatctgtcatactatctgctgaaatattaacatttgcctcaatcacgtgcaactttttatataattgtctttatgccttcaaatgtaaccaagttcagacatctattttcttgttacgtttttgtagattgctggtcatgacaaaccgtcttcaaatgacaataagtcggtactgctcaatcatgtaccctcttcaaatggcaataacccagtaatgcctaagctcaaccctataccgttgccaaaaccgactcaaatcatgcgttgtagtgatatgcctgtgtctcatatcccagcatatccggtggtaaacgggaggattggaggttatggtttttcttccactccttatcctaatggtttccacccgcaagctttaccgggtggaccagtacacagccatggcaaggtttagcaacagtacgtatgcttacaataggcaggaatttggttctgttctgaacattgcgcagagaggtcctgttatgaatgcctttgcccatgaggctgcgaatcagccaatcatgtatgttgagaacgtaggtgcagaagaacgtagtatgttaagagtaggcaggttccacataggttcttgacacctcaatacctcggtaacgtctaggtaggttgtagtacctcctagtcttgcccaagcttgtaatatggttatcaatcctctagatcttcagtagaacattgcattattcttgaaggcaaaaaaaagtcttcttgtgttctccattgtccattgtcccaaccctgaaggcagcaggtgttacttatacaaagacagtgaagtacactattatgttcgtgctcgtgccagccaaaccggtgaatccaactcgttcgttcggtttttttttatatatcaactcgttgggttggattgctg

SEQ ID NO: 35880 - DNA, 919 bp, Zea Mays
cttccatctccacgtcggttctcgcgccgttttttcgaatctccacccgccgcatacggagtcggagaacccgtgcctcttccgctccccgttcccgcaataaaggcctaccctacctgattagcccgtgccctcgcgcggcatcacacagattcccgcgtcccgccgtcggcgactcggcgtcctgctgattgcgtcgcgaggagtgctcgtagccgccctcctctctcagattcagtcgcccatggcgaggaatccaggccgcaccgtcttcatcgattgctggtcatgacaaaccgtcttcaaatgacaataagtcgcatatccggtggtaaacgggaggattggaggttatggtttttcttccactccttatcctaatggtttccacccgcaagctttaccgggtggaccagtacacagccatggcaaggtttagcaacagtacgtatgcttacaataggcaggaatttggttctgttctgaacattgcgcagagaggtcctgttatgaatgcctttgcccatgaggctgcgaatcagccaatcatgtatgttgagaacgtaggtgcagaagaacgtagtatgttaagagtaggcaggttccacataggttcttgacacctcaatacctcggtaacgtctaggtaggttgtagtacctcctagtcttgcccaagcttgtaatatggttatcaatcctctagatcttcagtagaacattgcattattcttgaaggcaaaaaaaagtcttcttgtgttctccattgtccattgtcccaaccctgaaggcagcaggtgttacttatacaaagacagtgaagtacactattatgttcgtgctcgtgccagccaaaccggtgaatccaactcgttcgttcggtttttttttatatatcaactcgttgggttggattgctg

SEQ ID NO: 35881 - DNA, 4335 bp, Zea Mays
cttcgttccgtggtcttcaaaggtatatagtttcagtcagctgaaacagaattttatgtgttctcaacccatttttggagcactataactcttgatccatgattctttgacctaaggctgctgcagcaaacttgtacagatatgtgtggtaaacaaattttattagtcaaggttggcctattattgtttggaattgtgaggagtaatggagttacaggtgggggttcagtttggtgtagagttcagtttcagaatctaaaacgtaattcagtttgctgaatttttagaaactgtgaattcctctcagttttgaacccttctaagtctcaattcttgaagttttggtggatgatcattgcagtaaacttgaagatctaatattggggagcaatttcttttaagaaggatctccctatccttgctttgaattgagagaaaagattattccaagttgctctgttaggtagagggtgctgaatttagttcagttagctgaattgtgtagtttcgtggagttccaactttggagctctctaacctgaagcctgttgagttttagctagtatcctttaaagtaaagttggagagtgatcatagaagagcaactcctagtaagaaagtgtatcaagccagcatagggagatgagagaaaatctgattggaacttctaggattgtaatttgatgtggtttttagtcaagaaattcgggtggccagcgccatcgttctgcgtttgtgtagagtattgaagttcagtaaatagctccctggtagttatggcttgtggtgatagcttgtaattgtaattttgtagtgcttcgtaatactttccttgctagtagcatatacacaggcattcataatcatggcatttcatgtagagtaccaagaagaagtgatttgtgaaggagcctgttccagttctactgatccagtggtggattccatctaactgcttatcgtaatagaagatatcatatttcctcctgtagtaaggcaagccctggtgcatttgtcacctccttgctattttaaaatctttctcacttgattgatgcattaggtgataggagttgtgtgctaaaccgttgatgcatttccttccttgaaattgattacccttccttgatacccgttttgaaaagaattttatgatgcttagccttgctttagcaaacaaaaatgttttgttttaaaacaaaagtgatgcttcagtgggtgggaagttttcaaaaataaaacttgatggtggatccatcacggccgggatgggttcaacgtcggaaaagatgtacctctgccaggtaccaaactttgggttgaaaataataaagctgagatcgggcagttgacttgcacgagaaaggagtctcgatgtagtgtcttcgtctgagtcgattaaggaccgtaccgattgttggcctgctgatctaggaccctttaactggccacatacctcaccatgggtaagcctgaacccggctattccatacgtgaaaagacaaccgcgcactgggcgtgggagatggtgggagtagcagttatcctcctggcaagaggctggatggtagggtaatgtgctcccgggtagcgcggacctgttcatgtagtggaggatccatgggaatggttgacatatgcaagggttaagtgctacatatgtcgtgtggttggagatccccagctgggtattaatcggttcggatcatcgtacttctcggatatgaagactggatcactgccctgcatcgtagtttaataagtgaaacatgattgtggtttggttgaaaggaagctagtataggacaagtgaatgctctagattaggcaaatctagattcaggaaaaataattaacttgtgaagtaaaagtttggcataaagattcactactagtaagctcttctgcaaaatgagtctttgaaatttgacaagccttaccttgattcccaacaaaccagcatatccttgagagtcttttctttagtcgggtaagtcttgctgagtaattgcatactcagggttttatcccttgttgtttttgtaggagaagttttattcccctatctttgggttagttacttcatgtggaggacttgaagcttagaaggtttttatatatatctcttatggaaaggcttcacccttccaattattgtagttaagttatgcccttcgagtactatcaggacttgtaataaatacatcgctttctaccatgtaaaacttgagttctggaatgtaaagtgtactttgtgaaagtcttccgctctatctccaatgtgtgtgtatcaaatgtgattactgtaatatacctgttatgtgggagatccttgggatgatgagttccagttggcgaactcgatagccttgttaagttacccggtacacgtgcacatccatctgaggccattaaggcaaggattggtgcatgtgggcctgataacttgggagggctgtcacacggcacgacgcgtagcgtcctgtcgtgggtgacgtgctcgtctacccctggacgtgcatgtctaccccccgtgtattttatgcgcattgatcatgttatttatattaatgaaatggaaactcaactcagaaattgattacgttagttatttcatgtagttaatcattgactttgtttaatgtcaaccaattggaaatagttataactctagtagcacatgttattaatacttgttagtataactagatagaactagatgaagcaatgattaattatacatctacccgtaatacgcttcgattatagctttgaccactgcaagaccttccttcttccttttctagcagttgcgaatgcaaaaccgtatgtcatatcttatgcatattcagtttatctgctctctagtatggtgtactgtttatttcctaattcaaatggatggatgtatgtttgcgctcgcatagaaaacggtctggttgaggagtccgaagaactcgcaggagaagcccctgagcagtagctggttggtggaggcaagtgtcccttgacccaactatgtcctatacaattctataattcacttcccgcatttacacagttatacctaaagattgactagcttttgttattcatgtccttgcttacctatttgggttggattattatggtttagctttatgctagtgcttaacattaattaatgaatatgatgagatttatctatgatacattgtttcccttcttatttatgatgatatacttatggaatttaagggggctcgagcagtttctcgagtgcctctccgtaaggacctgttcgttggatgaccgcccgggagaacagtgcaaccatgagggtgaaatgggacgcccttagctgaataattagaggaaccaggatgtagtttacttcaccgtcgtgccgttaatggggctcggtgtatgcggctcgctctaccaaggttggtttgccccttggggagtagtgcggtacatttaggaaacctaacgggcggctacagccccggggaatctttgtaaaggctacgtagtgataccctgctgggtcaccttggtagtgatcaatggagagtcatgatctccgggcagaaagggaatcacggcttgtgggtaaagtgcgcaacttctgcagagtgtttgaaaactgatatatcagtcgtgctcgcggttatgagcgaccaagggagctccattgattagtgatacttgatcagagatgttcggattacaagtgacgatgagaatggtggttttggtattgactctggtgatggtaagtggtattctttccgtttggaaagggtacttttgggttaaaaacttgggttaatactaaaatctggctctctttactagtaataataatctgaccaactaaaagcaactgcttgacttatccccatatagagctagtccactacagccaaacaggacacttgctgagtatgttgatgtgtactcacccttgctctacacaccaacccccccccccccttccccaggttgtccgcattgcaaccactgctcagaagaagatgaagccgtggaaggagacttccaggagttccaagattacgacgagttctaggcgtgggttagcggcaacccccagtcggctgcctgtgaaggccgcgtgtatctacgtttcgttttcgcactttgattattattaaagactatgtggatgtctccgacattatgatgtaatcgactattattccccttttatgttattatttgagcactgtgtgatgatgtccaattatgtaactgctgtgtacgtgaattgctgatcctgacacgtacatggttcgcattcggttttgccttctaaaaccgggtgtgacagat

SEQ ID NO: 35882 - DNA, 3672 bp, Zea Mays
cttcgttccgtggtcttcaaaggtcagtgaagcattggtattgctgctgtgtaaaaaaattggataaaacgtctcaaaactttcactgacaggtatatagtttcagtcagctgaaacagaattttatgtgttctcaacccatttttggagcactataactcttgatccatgattctttgacctaaggctgctgcagcaaacttgtacagatatgtgtgagtaccaagaagaagtgatttgtgaaggagcctgttccagttctactgatccagtggtggattccatctaactgcttatcgtaatagaagatatcatatttcctcctgtagtaaggcaagccctggtgcatttgtcacctccttgctattttaaaatctttctcacttgattgatgcattaggtgataggagttgtgtgctaaaccgttgatgcatttccttccttgaaattgattacccttccttgatacccgttttgaaaagaattttatgatgcttagccttgctttagcaaacaaaaatgttttgttttaaaacaaaagtgatgcttcagtgggtgggaagttttcaaaaataaaacttgatggtggatccatcacggccgggatgggttcaacgtcggaaaagatgtacctctgccaggtaccaaactttgggttgaaaataataaagctgagatcgggcagttgacttgcacgagaaaggagtctcgatgtagtgtcttcgtctgagtcgattaaggaccgtaccgattgttggcctgctgatctaggaccctttaactggccacatacctcaccatgggtaagcctgaacccggctattccatacgtgaaaagacaaccgcgcactgggcgtgggagatggtgggagtagcagttatcctcctggcaagaggctggatggtagggtaatgtgctcccgggtagcgcggacctgttcatgtagtggaggatccatgggaatggttgacatatgcaagggttaagtgctacatatgtcgtgtggttggagatccccagctgggtattaatcggttcggatcatcgtacttctcggatatgaagactggatcactgccctgcatcgtagtttaataagtgaaacatgattgtggtttggttgaaaggaagctagtataggacaagtgaatgctctagattaggcaaatctagattcaggaaaaataattaacttgtgaagtaaaagtttggcataaagattcactactagtaagctcttctgcaaaatgagtctttgaaatttgacaagccttaccttgattcccaacaaaccagcatatccttgagagtcttttctttagtcgggtaagtcttgctgagtaattgcatactcagggttttatcccttgttgtttttgtaggagaagttttattcccctatctttgggttagttacttcatgtggaggacttgaagcttagaaggtttttatatatatctcttatggaaaggcttcacccttccaattattgtagttaagttatgcccttcgagtactatcaggacttgtaataaatacatcgctttctaccatgtaaaacttgagttctggaatgtaaagtgtactttgtgaaagtcttccgctctatctccaatgtgtgtgtatcaaatgtgattactgtaatatacctgttatgtgggagatccttgggatgatgagttccagttggcgaactcgatagccttgttaagttacccggtacacgtgcacatccatctgaggccattaaggcaaggattggtgcatgtgggcctgataacttgggagggctgtcacacggcacgacgcgtagcgtcctgtcgtgggtgacgtgctcgtctacccctggacgtgcatgtctaccccccgtgtattttatgcgcattgatcatgttatttatattaatgaaatggaaactcaactcagaaattgattacgttagttatttcatgtagttaatcattgactttgtttaatgtcaaccaattggaaatagttataactctagtagcacatgttattaatacttgttagtataactagatagaactagatgaagcaatgattaattatacatctacccgtaatacgcttcgattatagctttgaccactgcaagaccttccttcttccttttctagcagttgcgaatgcaaaaccgtatgtcatatcttatgcatattcagtttatctgctctctagtatggtgtactgtttatttcctaattcaaatggatggatgtatgtttgcgctcgcatagaaaacggtctggttgaggagtccgaagaactcgcaggagaagcccctgagcagtagctggttggtggaggcaagtgtcccttgacccaactatgtcctatacaattctataattcacttcccgcatttacacagttatacctaaagattgactagcttttgttattcatgtccttgcttacctatttgggttggattattatggtttagctttatgctagtgcttaacattaattaatgaatatgatgagatttatctatgatacattgtttcccttcttatttatgatgatatacttatggaatttaagggggctcgagcagtttctcgagtgcctctccgtaaggacctgttcgttggatgaccgcccgggagaacagtgcaaccatgagggtgaaatgggacgcccttagctgaataattagaggaaccaggatgtagtttacttcaccgtcgtgccgttaatggggctcggtgtatgcggctcgctctaccaaggttggtttgccccttggggagtagtgcggtacatttaggaaacctaacgggcggctacagccccggggaatctttgtaaaggctacgtagtgataccctgctgggtcaccttggtagtgatcaatggagagtcatgatctccgggcagaaagggaatcacggcttgtgggtaaagtgcgcaacttctgcagagtgtttgaaaactgatatatcagtcgtgctcgcggttatgagcgaccaagggagctccattgattagtgatacttgatcagagatgttcggattacaagtgacgatgagaatggtggttttggtattgactctggtgatggtaagtggtattctttccgtttggaaagggtacttttgggttaaaaacttgggttaatactaaaatctggctctctttactagtaataataatctgaccaactaaaagcaactgcttgacttatccccatatagagctagtccactacagccaaacaggacacttgctgagtatgttgatgtgtactcacccttgctctacacaccaacccccccccccccttccccaggttgtccgcattgcaaccactgctcagaagaagatgaagccgtggaaggagacttccaggagttccaagattacgacgagttctaggcgtgggttagcggcaacccccagtcggctgcctgtgaaggccgcgtgtatctacgtttcgttttcgcactttgattattattaaagactatgtggatgtctccgacattatgatgtaatcgactattattccccttttatgttattatttgagcactgtgtgatgatgtccaattatgtaactgctgtgtacgtgaattgctgatcctgacacgtacatggttcgcattcggttttgccttctaaaaccgggtgtgacagat

SEQ ID NO: 35883 - DNA, 2379 bp, Zea Mays
ccacacccaccgaaacctcccacctcgctgtggccaaagcgttccagtgagttgcatgcccgtgtggtcttcgttccgtggtcttcaaaggagaagttttattcccctatctttgggttagttacttcatgtggaggacttgaagcttagaaggtttttatatatatctcttatggaaaggcttcacccttccaattattgtagttaagttatgcccttcgagtactatcaggacttgtaataaatacatcgctttctaccatgtaaaacttgagttctggaatgtaaagtgtactttgtgaaagtcttccgctctatctccaatgtgtgtgtatcaaatgtgattactgtaatatacctgttatgtgggagatccttgggatgatgagttccagttggcgaactcgatagccttgttaagttacccggtacacgtgcacatccatctgaggccattaaggcaaggattggtgcatgtgggcctgataacttgggagggctgtcacacggcacgacgcgtagcgtcctgtcgtgggtgacgtgctcgtctacccctggacgtgcatgtctaccccccgtgtattttatgcgcattgatcatgttatttatattaatgaaatggaaactcaactcagaaattgattacgttagttatttcatgtagttaatcattgactttgtttaatgtcaaccaattggaaatagttataactctagtagcacatgttattaatacttgttagtataactagatagaactagatgaagcaatgattaattatacatctacccgtaatacgcttcgattatagctttgaccactgcaagaccttccttcttccttttctagcagttgcgaatgcaaaaccgtatgtcatatcttatgcatattcagtttatctgctctctagtatggtgtactgtttatttcctaattcaaatggatggatgtatgtttgcgctcgcatagaaaacggtctggttgaggagtccgaagaactcgcaggagaagcccctgagcagtagctggttggtggaggcaagtgtcccttgacccaactatgtcctatacaattctataattcacttcccgcatttacacagttatacctaaagattgactagcttttgttattcatgtccttgcttacctatttgggttggattattatggtttagctttatgctagtgcttaacattaattaatgaatatgatgagatttatctatgatacattgtttcccttcttatttatgatgatatacttatggaatttaagggggctcgagcagtttctcgagtgcctctccgtaaggacctgttcgttggatgaccgcccgggagaacagtgcaaccatgagggtgaaatgggacgcccttagctgaataattagaggaaccaggatgtagtttacttcaccgtcgtgccgttaatggggctcggtgtatgcggctcgctctaccaaggttggtttgccccttggggagtagtgcggtacatttaggaaacctaacgggcggctacagccccggggaatctttgtaaaggctacgtagtgataccctgctgggtcaccttggtagtgatcaatggagagtcatgatctccgggcagaaagggaatcacggcttgtgggtaaagtgcgcaacttctgcagagtgtttgaaaactgatatatcagtcgtgctcgcggttatgagcgaccaagggagctccattgattagtgatacttgatcagagatgttcggattacaagtgacgatgagaatggtggttttggtattgactctggtgatggtaagtggtattctttccgtttggaaagggtacttttgggttaaaaacttgggttaatactaaaatctggctctctttactagtaataataatctgaccaactaaaagcaactgcttgacttatccccatatagagctagtccactacagccaaacaggacacttgctgagtatgttgatgtgtactcacccttgctctacacaccaacccccccccccccttccccaggttgtccgcattgcaaccactgctcagaagaagatgaagccgtggaaggagacttccaggagttccaagattacgacgagttctaggcgtgggttagcggcaacccccagtcggctgcctgtgaaggccgcgtgtatctacgtttcgttttcgcactttgattattattaaagactatgtggatgtctccgacattatgatgtaatcgactattattccccttttatgttattatttgagcactgtgtgatgatgtccaattatgtaactgctgtgtacgtgaattgctgatcctgacacgtacatggttcgcattcggttttgccttctaaaaccgggtgtgacagat

SEQ ID NO: 35884 - DNA, 2809 bp, Zea Mays
acttaatagagtagtatagatatagattatgtcaagttcggggacagaagtgactccaacggctccttgctgcatatgcccgcagtagctccctcgcatcccgtcgcagatctcgcgccctcaccatcccaagcccatccccctcctcggatctaacccctctcctatctccgcgaccgcggtcatggcgggcactgtggggccttcgatgtgtgcgagtgcgacccctttctaatctaaagcgggtggattcgtcacgcataggccaactgcggcaagttcgccgcgctgcagcaatccattcagtgatatctcggtgcgtgcggcccctttctaccctctcctccctcgcatcgggatctcatggcggctgatgttggagttgtgatggtctctgcgtggtccgtgtcgttccagatagctttaaagggggctacggcagagggcacagtcatcacgaaggcgcttgggtcagctgggcgcgtgctcgatgggccgcaggccgagctggtgcctggtgctgcagccacccgcctcgccgtcgagaccaagcacgtcaagctcgtcgaggccgcgctcaactgcctgcacgtaattactaatcatcatcatcctattgctgctcttgcttttgcattgcatacgtgaggcccatgaagcgtcagattcatgtcgagcatcatgataggtataataaatgtgtgccaccaaatgggtcatttgctccagcaccatggatgctttggacgttagcaggctagaaacacatttccttgtctagggtatatacttgcatcgaccagtcctcattttgtatgtgcagagccaagtccctggccaaaattatgccattttatgtatttacaattttgagaatattatggtgtaacagactgttgttatacgaagattaggacgttacgagatctaccagcgcaagaccactccctggccaaaatttcagatcccgcaacaattgtgtcgatcctcccaataccgctgccgctgtcaacgcatacgccgacctcaaccactcgtggatggatactatcgagaaggttgtgcgaaggaaagaagaggcggttggagaggagggcgacatggagaggccgacactgctgtcggaggcgctcaggatgccccaacccactgcttttgtctccgtgcagctgtccgatggtcaacccacgccgagcaacgtctcgaagaagaagatggacggtggcgaggtgctgttcttgtatggcgtcggggaggtcgctgtcaccatcggtcgcaacagcctctctccacagcccctccacccgggaagtagcattgtgattgtagtcattgagtcggaccgcggagatgatgatgggctttctgaggcacttatgcttggcgtaggctgcaagagcgtatttgatccatccaaggaagtgtaatttatttgaatcgagaaagagggcacatgtaataaaattcaatattactattttacatcatttactccagtcacctaaaaaatgtttttttaacatggattttttggccgttggcgaatgagttgtcaggcttttcaatgcggtaatcacaccaatcttatatcattctctataacttttaaactttgcatgctacttttcttcattgtagtgagttgatctatgtttactccacctattcttacttcagtaatgtttttatgtgtttcatcgattatatgaaagtagatatagtaacattctaagtcttaggacagataaccctctggtttccaagtttgttcaacagatacaggatccggcatggcggatccatggcgcccaccggagacctctcccttaccgcactgaacaagcaccccatgaagcccgcccgagacatcgccggcgtcgcacgattaccgaaaattgctcaaaaattgtttagtcttccaaatatgattatgatgctttatgttgtagtagcaaagcatcgactggtactatttttgtttaaacattattgggttacgaatttggttggctatgaattgtggcgagtgttttatttagaacattattgtctacgaatctggttggctattcatactactctttgcatcttttggacttgaaaaatgtttataatttggtcatattacccttaacatcttttggacatgaaaattgtttataatttggtattttggttatttgttgagagtgttaatttgaactaattcttttttcctcggtgtgccgacacgacggtgaggtgtccgcggaggcagcacgacacaatgagcatgcggctccggggcccaggcggtgctggtccacggtggtgcagcacgtggtggctctagtggctagacgatgagagcaatgtgcttagtttccgcgtggtcgttggcgggagcaccggctccagaactacctctctatgttgctggccaccctaccactgtcgagaagctcatagccgtgtaggtgtgacgacgtgaggggacaccatctctatagtcatgggtgatctgatcgatggtttttcgtggaagagggatgcctgtttacccatgtttgctcgcctcattggagcaccaccagtctacgtcgaccatgaagaggctaggcagttgactgaataaggaggaggttgtacaacacgcggcgccacacaactgggagagccatcgccacctcgatacgctagatcccatgctccagtagctaaaaatgcaaaagttgctacctacaggtgtccattttgtgttgtctgaagacatcgaattgaatcttttaaagcttccatggccttaagttcattctctagcatcattttg

SEQ ID NO: 35885 - DNA, 1766 bp, Zea Mays
ggacactgacgctacagacttaatagagtagtatagatatagattatgtcaagttcggggacagaagtgactccaacggctccttgctgcatatgcccgcagtagctccctcgcatcccgtcgcagatctcgcgccctcaccatcccaagcccatccccctcctcggatctaacccctctcctatctccgcgaccgcggtcatggcgggcactgtggggccttcgatgtgtgcgagtgcgacccctttctaatctaaagcgggtggattcgtcacgcataggccaactgcggcaagttcgccgcgctgcagcaatccattcagtgatatctcggtgcgtgcggcccctttctaccctctcctccctcgcatcgggatctcatggcggctgatgttggagttgtgatggtctctgcgtggtccgtgtcgttccagatagctttaaagggggctacggcagagggcacagtcatcacgaaggcgcttgggtcagctgggcgcgtgctcgatgggccgcaggccgagctggtgcctggtgctgcagccacccgcctcgccgtcgagaccaagcacgtcaagctcgtcgaggccgcgctcaactgcctgcacgacgttacgagatctaccagcgcaagaccactccctggccaaaatttcagatcccgcaacaattgtgtcgatcctcccaataccgctgccgctgtcaacgcatacgccgacctcaaccactcgtggatggatactatcgagaaggttgtgcgaaggaaagaagaggcggttggagaggagggcgacatggagaggccgacactgctgtcggaggcgctcaggatgccccaacccactgcttttgtctccgtgcagctgtccgatggtcaacccacgccgagcaacgtctcgaagaagaagatggacggtggcgaggtgctgttcttgtatggcgtcggggaggtcgctgtcaccatcggtcgcaacagcctctctccacagcccctccacccgggaagtagcattgtgattgtagtcattgagtcggaccgcggagatgatgatgggctttctgaggcacttatgcttggcgtaggctgcaaaatctaggcaaccttttgatggatttcttgtaatttttcgggtaagaaaatatgctcgaacattgtttaataatgagatgggtccaaacaattgtatcagtgtgtctaaagccctaaatttcaatagcgccttctgttccttctattttggaatagctactactgagtatgttacataaaatttgttatcttaatgccaggagcgtatttgatccatccaaggaagtgtaatttatttgaatcgagaaagagggcacatgtaataaaattcaatattactattttacatcatttactccagtcacctaaaaaatgtttttttaacatggattttttggccgttggcgaatgagttgtcaggcttttcaatgcggtaatcacaccaatcttatatcattctctataacttttaaactttgcatgctacttttcttcattgtagtgagttgatctatgtttactccacctattcttacttcagtaatgtttttatgtgtttcatcgattatatgaaagtagatatagtaacattctaagtcttaggacagataaccctctggtttccaagtttgttcaacagatacaggatccggcatggcggatccatggcgcccaccggagacctctcccttaccgcactgaacaagcaccccatgaagcccgcccgagacatcgc

SEQ ID NO: 35886 - DNA, 2228 bp, Zea Mays
actcactcgcacgttcactgaattcatttcaggtttttgctatcacgcccacgtcacctcctcgagtcatccagtcgagctgtaggagtatcacgcgcttcctgtgcatcgatcggaatctctgcgtggcgtggacgtcgtccaagtcgcttgcttcaccctatagagaaaccaaagcatagcccgacgcttcataatcataaataaataatatctataattctatatatatagcagtctcttgttgagcagaatcagcagaaaggtgcagcttcaggaggagctctcatggcgtcataagtctctggaaggtccaaattaagattagaagatggacggcgagatggacgaggacgcgctgacggagatccttgcgaggctgccgtgcaggtcgctggcgcggttccagtgcgtctccacgtcgtggcgccgcatcatctcgagcgactacctccgccgccggctgccgctcatcacgtcgggggtgctctaccacgacgacacgtgccgcggcggcgcggacggcggcaggaggcagcaggtgtacacgtacgcgtgcgcgtcaggcggcggcgccaccgccaccgccaccgccacggcggaggcccccgacatgggcttcttcccgcgccacgacacgtccaccatcatcgacggctgcaacgggctgctgctctactacgcgtcccgcccgacggcggcgttccacgtcgtgaacccgaccacgcggcggtgggcggagctgccggcgccgcgcgcgaggacgctgctctccgtgctggcgttcgacccctgcgcgtccccgcgctaccgggtggtgtgcttcaccgggtggctcccccggggcgcgaccctcgaggtgttcgactcggagcgcggcgcgtggaccgaccacgaggtcgacttcggcctcgacaccgacgccatgtccgccaccatgcactactccggcggcgcgctccacgtgctggcctactcgggccacgtcgtccgcgtcgacctggacaccatggcgtccgcggccaccgagctcccggcccccgtcagctgccgggcgcgcgccgggcactgccgcggccgcctgcgcttcgcgtccagcgacggagcgcgcctcaggatctgggagctcagggacgccaccggaggcgagtgggcgctcaagcacgagatcggggtcgccgacgtcgtccccggcgccgcgtcccagcccatcacgttcctgttcatggcgttccaccccgagcgggaggtggtgtacctgtggtcgccgtggaagctgctggcgttcgacatggtccagaggcgcgtcgaggaggagtgggcgttcggttcggagaaagaaggcacgcatctcatacagggaagtagcattgtgattgtagtcattgagtcggaccgcggagatgatgatgggctttctgaggcacttatgcttggcgtaggctgcaagtaagttgcgaagcatggacactatatttgagtttactgctctatttgtaatctaatttttttaatccttgtaatcattttcataatttttgtaatatggcagaatctaggcaaccttttgatggatttcttgtaatttttcgggtaagaaaatatgctcgaacattgtttaataatgagatgggtccaaacaattgtatcagtgtgtctaaagccctaaatttcaatagcgccttctgttccttctattttggaatagctactactgagtatgttacataaaatttgttatcttaatgccaggagcgtatttgatccatccaaggaagtgtaatttatttgaatcgagaaagagggcacatgtaataaaattcaatattactattttacatcatttactccagtcacctaaaaaatgtttttttaacatggattttttggccgttggcgaatgagttgtcaggcttttcaatgcggtaatcacaccaatcttatatcattctctataacttttaaactttgcatgctacttttcttcattgtagtgagttgatctatgtttactccacctattcttacttcagtaatgtttttatgtgtttcatcgattatatgaaagtagatatagtaacattctaagtcttaggacagataaccctctggtttccaagtttgttcaacagatacaggatccggcatggcggatccatggcgcccaccggagacctctcccttaccgcactgaacaagcaccccatgaagcccgcccgagacatcgc

SEQ ID NO: 35887 - DNA, 1233 bp, Zea Mays
aaagcaacaaatctcacaccgtcacacgatcacgtccttgcccctctgagtccttgtccatgtccgttgccaacaattcaccctcatgacctctatggccccacacgtacgaccactagtagtactaggcgtacggagtacctctatttcacgatggcatccatccacaattgcagtaatccctctctccgtccctcccaatgttactccatctctctatttttaaagccggttccactcctcctccctcgctcactctcagtttccgctgtcaccccctctccctctgttcgccactttataccgcccgcccaccactccccgtttctctctgcttcatccttcgctttcccctgcgccaggcccgccccgccccgcccctccagaacgacatcctgcttccccgccccctccgatggggaacccgccggagctgtaccacaagatcctcaacatccccaaggacacctcgccgcacgaaatccgcgccgcgtacaagaacctcgtcaagaagtggcaccccgacaagcacccgccgtcgtccaggccggaggccgaggcgcgcttcaaggccatcagcgaggcctacgaggcgctcctggaccagcaggagaacaggggcgtgttcgagctgtgcaacgacggccgggcgggtgagaggacgcgcggcgccttcggcggcgccggcggcggcggtggcggaggcctcggcgccggcgtcggggcgcgcatggagaggacgcgcagcgacgggttctgcacgaggagcgcgcccggcacaccggcgagggagttcaagaaggtgtacagctccggcgaccccggcgggcgccgcgccttcgccgagttctccagctccatcgtgcgcaaggcgccgccgctggagcgcaagctcgagtgcaccctcgaggagctctgccgcggctgcaagaaggaggtcagcttcacccgcgacgtcgtcaccaagaacgggtatctgctcatctgcgctgttttgctctgcctaactgaacaaggttgacgcgaaaccttgctagaaatgaagaaatccggtgagctatcgcttgtcggtagattattattatttttgtttccaagacaacgaacggagcggagaattttaatcgaggaagggctttgtgtgccgacgtgggttcagattttaacagtgaatcaatcgatgcttggaaaactaaactcgaggttaggcaagaattcagaaccggctctgat

SEQ ID NO: 35888 - DNA, 1445 bp, Zea Mays
gtgcatatggtaatggctcacaatcaagattcagtgtcaaattgcccatcaacctgaggactggaaagaatgaacttgcccttctaagtatgactgttggtttacaagattcgcttatgaatggataggagcaggctttacaaatgtgaacatctctggtgtgagaactggaaccatagacttgtcttcaaataattgggcatacaagattggactggaaggggaatattataatttgttcaagcctgatcagacaaataaccaacggtggataccacaatccgagccaccaaaaaaccaacctttgacatggtataaggtaaatgttgatgttccacaaggagatgacccagttgggatagacatgcagtctatggggaaaggcttggcttggttgaatggaaatgccatcgggcggtattggccgaggaccagttctattaatgataggtgcactcccagttgtaactacaggggaacatttattccagacaagtgcaggacaggttgtggacagccaactcagagatggtaccatatcccacggtcatggtttcatccctcagggaacatcctcgtggtctttgaggagaagggtggggatcccacgaagatcacattctcaagaagagctgtgacgagcgtgtgctcctttgtgtcagagcacttcccttccatagacttggaatcctgggatgaaagtgccatgaccgaaggcacacccccagccaaagcacagctgttttgccccgagggtaaaagtatatcttccgtgaagtttgcgagcttgggaaaccccagtggaacctgtagatcataccaaatggggcgctgccaccacccgaactccttatctgttgttgagaaggcttgtctgaacaccaacagctgtacagtctccctgacagacgagagctttgggaaggatttatgccctggagtcaccaaaacactcgccatcgaagcggactgttcttagtggcctacggagtacgaagtgtctcggtgtgcatctaggttccactgcaagtatgcccgtcaaaattctaaaactgtagtgcttgttgcacggcaatgctattgtaacctggatttgaatcgcaaatatgtttcctagattttaagagtcttcagaggcattactcaatatgataagtgttcaattgtcccaaagaccaaattaccatcaaaagataattgttcaattaggctaagtacaaagtatggggcagctaatcgcgaaccaaacaaaagctaaagttaagcaatttagcggtgctaaatcgtgatttagcagtcgcaactcacgtagcggcagctctcgcagccactatagcgccgccatctaaaaccatgctgagcagtattcagtgatgctggtaggtgacagttagcgattgatactgaccatccgcgctagcaaatgcaatattgtatttgggatc

SEQ ID NO: 35889 - DNA, 3249 bp, Zea Mays
acgaacggcgccggcgggtggccgtccacgacgctgtcacgcacgcttggcacggcacaccgagagagagagagcgcgcgcgcgcgacgcagccaatcccccacggcatgcccaaaaccctcagttccgtgcaataattctgcctcgtcctcccatcgctgtcccccaccgaaacactctcggacgcgtcgtcgtctccccaagaccaaagccaggcggcctgtctgtcctccagtctccccacttcgctctcaccccacgccgcgtaccgctattaataccaccaccagtaccaccacctctgccagttcgccaccatcgtgctccgtacacgctccgctccggccatggccgccgccgcggcctccttttcggccctgccgttccttctacttttgctgctggtgccgtcgctcgacggcgcctccaatgtgacgtacgaccaccgctccctcatcatctccggccgccgccgcctcgtcatctccacctccatccactacccccgcagcgtccccgagatgtggcccaagctggtggctgaagccaaggacggcggcgccgactgcatcgagacctacgtcttctggaacggccatgaaatcgccccaggccagtactacttcgaggaccggtttgacctggtgcggtttgtgaaggtcgttagagacgctgggctgctcttgatcctgcgcatcgggccctatgtggccgccgagtggaattatggaggcgtgccggtgtggttgcactacgtgccaggaacggttttcaggacaaacaacgagccattcaagaaccatgtgaagagtttcacgacatacatcgtggatatgatgaagaaagagcagctcttcgcttctcagggagggaacattatcctagctcagatagagaacgaatatggagattattatgaacaagcgtatggagctggcggcaaaccatacgccatgtgggcagctagtatggctcttgctcaaaacactggtgtcccttggattatgtgccaagagtctgatgctcctgatcccgtgataaactcttgcaatggtttctactgcgatggattccagccaaattcgccaaccaagccaaaaatttggactgagaattggccaggatggttccagacttttggtgaaagtaatccccacagaccacctgaagatgttgcattcgctgttgcacgttttttcgagaaaggtggcagtgttcagaattactatgtgtatcatggtggcacaaattttggtcgcactactggggggccattcattacaactagctacgactatgatgcaccaattgatgaatatggacttcggagatttccaaagtgggcacatctgagggatcttcacaaatctataagattgtgtgagcacaccctgctttatggaaatacaacgtttctttctctgggtcctaaacaagaggcaatatgatcttcctgcttggtcagttagcattcttcctgactgcaggaatgtggtgttcaacactgcaaaggtgcaatctcaaacttcaatggtgaccatggttccagaaagtttgcaagcatcaaaacctgagcgatggagcattttcagggagagaactgggatttggggtaaaaatgactttgtccggaatggatttgtggaccatattaatacgacaaaggactccaccgactacctatggtacacaacaagttttagtgtggatggaagttactcctcaaaagggagccatgctgtccttaatatcgactccaatggccatggtgtccatgctttcttgaataatgtgctcataggtagtgcatatggtaatggctcacaatcaagattcagtgtcaaattgcccatcaacctgaggactggaaagaatgaacttgcccttctaagtatgactgttggtttacaagattcgcttatgaatggataggagcaggctttacaaatgtgaacatctctggtgtgagaactggaaccatagacttgtcttcaaataattgggcatacaagattggactggaaggggaatattataatttgttcaagcctgatcagacaaataaccaacggtggataccacaatccgagccaccaaaaaaccaacctttgacatggtataaggtaaatgttgatgttccacaaggagatgacccagttgggatagacatgcagtctatggggaaaggcttggcttggttgaatggaaatgccatcgggcggtattggccgaggaccagttctattaatgataggtgcactcccagttgtaactacaggggaacatttattccagacaagtgcaggacaggttgtggacagccaactcagagatggtaccatatcccacggtcatggtttcatccctcagggaacatcctcgtggtctttgaggagaagggtggggatcccacgaagatcacattctcaagaagagctgtgacgagcgtgtgctcctttgtgtcagagcacttcccttccatagacttggaatcctgggatgaaagtgccatgaccgaaggcacacccccagccaaagcacagctgttttgccccgagggtaaaagtatatcttccgtgaagtttgcgagcttgggaaaccccagtggaacctgtagatcataccaaatggggcgctgccaccacccgaactccttatctgttgttgagaaggcttgtctgaacaccaacagctgtacagtctccctgacagacgagagctttgggaaggatttatgccctggagtcaccaaaacactcgccatcgaagcggactgttcttagtggcctacggagtacgaagtgtctcggtgtgcatctaggttccactgcaagtatgcccgtcaaaattctaaaactgtagtgcttgttgcacggcaatgctattgtaacctggatttgaatcgcaaatatgtttcctagattttaagagtcttcagaggcattactcaatatgataagtgttcaattgtcccaaagaccaaattaccatcaaaagataattgttcaattaggctaagtacaaagtatggggcagctaatcgcgaaccaaacaaaagctaaagttaagcaatttagcggtgctaaatcgtgatttagcagtcgcaactcacgtagcggcagctctcgcagccactatagcgccgccatctaaaaccatgctgagcagtattcagtgatgctggtaggtgacagttagcgattgatactgaccatccgcgctagcaaatgcaatattgtatttgggatc

SEQ ID NO: 35890 - DNA, 3256 bp, Zea Mays
acgaacggcgccggcgggtggccgtccacgacgctgtcacgcacgcttggcacggcacaccgagagagagagagcgcgcgcgcgcgacgcagccaatcccccacggcatgcccaaaaccctcagttccgtgcaataattctgcctcgtcctcccatcgctgtcccccaccgaaacactctcggacgcgtcgtcgtctccccaagaccaaagccaggcggcctgtctgtcctccagtctccccacttcgctctcaccccacgccgcgtaccgctattaataccaccaccagtaccaccacctctgccagttcgccaccatcgtgctccgtacacgctccgctccggccatggccgccgccgcggcctccttttcggccctgccgttccttctacttttgctgctggtgccgtcgctcgacggcgcctccaatgtgacgtacgaccaccgctccctcatcatctccggccgccgccgcctcgtcatctccacctccatccactacccccgcagcgtccccgagatgtggcccaagctggtggctgaagccaaggacggcggcgccgactgcatcgagacctacgtcttctggaacggccatgaaatcgccccaggccagtactacttcgaggaccggtttgacctggtgcggtttgtgaaggtcgttagagacgctgggctgctcttgatcctgcgcatcgggccctatgtggccgccgagtggaattatggaggcgtgccggtgtggttgcactacgtgccaggaacggttttcaggacaaacaacgagccattcaagaaccatgtgaagagtttcacgacatacatcgtggatatgatgaagaaagagcagctcttcgcttctcagggagggaacattatcctagctcagatagagaacgaatatggagattattatgaacaagcgtatggagctggcggcaaaccatacgccatgtgggcagctagtatggctcttgctcaaaacactggtgtcccttggattatgtgccaagagtctgatgctcctgatcccgtgataaactcttgcaatggtttctactgcgatggattccagccaaattcgccaaccaagccaaaaatttggactgagaattggccaggatggttccagacttttggtgaaagtaatccccacagaccacctgaagatgttgcattcgctgttgcacgttttttcgagaaaggtggcagtgttcagaattactatgtgtatcatggtggcacaaattttggtcgcactactggggggccattcattacaactagctacgactatgatgcaccaattgatgaatatggacttcggagatttccaaagtgggcacatctgagggatcttcacaaatctataagattgtgtgagcacaccctgctttatggaaatacaacgtttctttctctgggtcctaaacaagaggcaatatgatcttcctgcttggtcagttagcattcttcctgactgcaggaatgtggtgttcaacactgcaaaggtgcaatctcaaacttcaatggtgaccatggttccagaaagtttgcaagcatcaaaacctgagcgatggagcattttcagggagagaactgggatttggggtaaaaatgactttgtccggaatggatttgtggaccatattaatacgacaaaggactccaccgactacctatggtacacaacaagttttagtgtggatggaagttactcctcaaaagggagccatgctgtccttaatatcgactccaatggccatggtgtccatgctttcttgaataatgtgctcataggtagtgcatatggtaatggctcacaatcaagattcagtgtcaaattgcccatcaacctgaggactggaaagaatgaacttgcccttctaagtatgactgttggtttacaaaatgcaggattcgcttatgaatggataggagcaggctttacaaatgtgaacatctctggtgtgagaactggaaccatagacttgtcttcaaataattgggcatacaagattggactggaaggggaatattataatttgttcaagcctgatcagacaaataaccaacggtggataccacaatccgagccaccaaaaaaccaacctttgacatggtataaggtaaatgttgatgttccacaaggagatgacccagttgggatagacatgcagtctatggggaaaggcttggcttggttgaatggaaatgccatcgggcggtattggccgaggaccagttctattaatgataggtgcactcccagttgtaactacaggggaacatttattccagacaagtgcaggacaggttgtggacagccaactcagagatggtaccatatcccacggtcatggtttcatccctcagggaacatcctcgtggtctttgaggagaagggtggggatcccacgaagatcacattctcaagaagagctgtgacgagcgtgtgctcctttgtgtcagagcacttcccttccatagacttggaatcctgggatgaaagtgccatgaccgaaggcacacccccagccaaagcacagctgttttgccccgagggtaaaagtatatcttccgtgaagtttgcgagcttgggaaaccccagtggaacctgtagatcataccaaatggggcgctgccaccacccgaactccttatctgttgttgagaaggcttgtctgaacaccaacagctgtacagtctccctgacagacgagagctttgggaaggatttatgccctggagtcaccaaaacactcgccatcgaagcggactgttcttagtggcctacggagtacgaagtgtctcggtgtgcatctaggttccactgcaagtatgcccgtcaaaattctaaaactgtagtgcttgttgcacggcaatgctattgtaacctggatttgaatcgcaaatatgtttcctagattttaagagtcttcagaggcattactcaatatgataagtgttcaattgtcccaaagaccaaattaccatcaaaagataattgttcaattaggctaagtacaaagtatggggcagctaatcgcgaaccaaacaaaagctaaagttaagcaatttagcggtgctaaatcgtgatttagcagtcgcaactcacgtagcggcagctctcgcagccactatagcgccgccatctaaaaccatgctgagcagtattcagtgatgctggtaggtgacagttagcgattgatactgaccatccgcgctagcaaatgcaatattgtatttgggatc

SEQ ID NO: 35891 - DNA, 3259 bp, Zea Mays
acgaacggcgccggcgggtggccgtccacgacgctgtcacgcacgcttggcacggcacaccgagagagagagagcgcgcgcgcgcgacgcagccaatcccccacggcatgcccaaaaccctcagttccgtgcaataattctgcctcgtcctcccatcgctgtcccccaccgaaacactctcggacgcgtcgtcgtctccccaagaccaaagccaggcggcctgtctgtcctccagtctccccacttcgctctcaccccacgccgcgtaccgctattaataccaccaccagtaccaccacctctgccagttcgccaccatcgtgctccgtacacgctccgctccggccatggccgccgccgcggcctccttttcggccctgccgttccttctacttttgctgctggtgccgtcgctcgacggcgcctccaatgtgacgtacgaccaccgctccctcatcatctccggccgccgccgcctcgtcatctccacctccatccactacccccgcagcgtccccgagatgtggcccaagctggtggctgaagccaaggacggcggcgccgactgcatcgagacctacgtcttctggaacggccatgaaatcgccccaggccagtactacttcgaggaccggtttgacctggtgcggtttgtgaaggtcgttagagacgctgggctgctcttgatcctgcgcatcgggccctatgtggccgccgagtggaattatggaggcgtgccggtgtggttgcactacgtgccaggaacggttttcaggacaaacaacgagccattcaagaaccatgtgaagagtttcacgacatacatcgtggatatgatgaagaaagagcagctcttcgcttctcagggagggaacattatcctagctcagatagagaacgaatatggagattattatgaacaagcgtatggagctggcggcaaaccatacgccatgtgggcagctagtatggctcttgctcaaaacactggtgtcccttggattatgtgccaagagtctgatgctcctgatcccgtggttccagacttttggtgaaagtaatccccacagaccacctgaagatgttgcattcgctgttgcacgttttttcgagaaaggtggcagtgttcagaattactatgtgtatcatggtggcacaaattttggtcgcactactggggggccattcattacaactagctacgactatgatgcaccaattgatgaatatggacttcggagatttccaaagtgggcacatctgagggatcttcacaaatctataagattgtgtgagcacaccctgctttatggaaatacaacgtttctttctctgggtcctaaacaagaggctgatatttacagtgatcagtctggaggctgtgttgcattcttggcaaatattgattcagccaatgacaaagttgtcactttccgtaacaggcaatatgatcttcctgcttggtcagttagcattcttcctgactgcaggaatgtggtgttcaacactgcaaaggtgcaatctcaaacttcaatggtgaccatggttccagaaagtttgcaagcatcaaaacctgagcgatggagcattttcagggagagaactgggatttggggtaaaaatgactttgtccggaatggatttgtggaccatattaatacgacaaaggactccaccgactacctatggtacacaacaagttttagtgtggatggaagttactcctcaaaagggagccatgctgtccttaatatcgactccaatggccatggtgtccatgctttcttgaataatgtgctcataggtagtgcatatggtaatggctcacaatcaagattcagtgtcaaattgcccatcaacctgaggactggaaagaatgaacttgcccttctaagtatgactgttggtttacaaaatgcaggattcgcttatgaatggataggagcaggctttacaaatgtgaacatctctggtgtgagaactggaaccatagacttgtcttcaaataattgggcatacaagattggactggaaggggaatattataatttgttcaagcctgatcagacaaataaccaacggtggataccacaatccgagccaccaaaaaaccaacctttgacatggtataaggtaaatgttgatgttccacaaggagatgacccagttgggatagacatgcagtctatggggaaaggcttggcttggttgaatggaaatgccatcgggcggtattggccgaggaccagttctattaatgataggtgcactcccagttgtaactacaggggaacatttattccagacaagtgcaggacaggttgtggacagccaactcagagatggtaccatatcccacggtcatggtttcatccctcagggaacatcctcgtggtctttgaggagaagggtggggatcccacgaagatcacattctcaagaagagctgtgacgagcgtgtgctcctttgtgtcagagcacttcccttccatagacttggaatcctgggatgaaagtgccatgaccgaaggcacacccccagccaaagcacagctgttttgccccgagggtaaaagtatatcttccgtgaagtttgcgagcttgggaaaccccagtggaacctgtagatcataccaaatggggcgctgccaccacccgaactccttatctgttgttgagaaggcttgtctgaacaccaacagctgtacagtctccctgacagacgagagctttgggaaggatttatgccctggagtcaccaaaacactcgccatcgaagcggactgttcttagtggcctacggagtacgaagtgtctcggtgtgcatctaggttccactgcaagtatgcccgtcaaaattctaaaactgtagtgcttgttgcacggcaatgctattgtaacctggatttgaatcgcaaatatgtttcctagattttaagagtcttcagaggcattactcaatatgataagtgttcaattgtcccaaagaccaaattaccatcaaaagataattgttcaattaggctaagtacaaagtatggggcagctaatcgcgaaccaaacaaaagctaaagttaagcaatttagcggtgctaaatcgtgatttagcagtcgcaactcacgtagcggcagctctcgcagccactatagcgccgccatctaaaaccatgctgagcagtattcagtgatgctggtaggtgacagttagcgattgatactgaccatccgcgctagcaaatgcaatattgtatttgggatc

SEQ ID NO: 35892 - DNA, 3237 bp, Zea Mays
acgaacggcgccggcgggtggccgtccacgacgctgtcacgcacgcttggcacggcacaccgagagagagagagcgcgcgcgcgcgacgcagccaatcccccacggcatgcccaaaaccctcagttccgtgcaataattctgcctcgtcctcccatcgctgtcccccaccgaaacactctcggacgcgtcgtcgtctccccaagaccaaagccaggcggcctgtctgtcctccagtctccccacttcgctctcaccccacgccgcgtaccgctattaataccaccaccagtaccaccacctctgccagttcgccaccatcgtgctccgtacacgctccgctccggccatggccgccgccgcggcctccttttcggccctgccgttccttctacttttgctgctggtgccgtcgctcgacggcgcctccaatgtgacgtacgaccaccgctccctcatcatctccggccgccgccgcctcgtcatctccacctccatccactacccccgcagcgtccccgagatgtggcccaagctggtggctgaagccaaggacggcggcgccgactgcatcgagacctacgtcttctggaacggccatgaaatcgccccaggccagtactacttcgaggaccggtttgacctggtgcggtttgtgaaggtcgttagagacgctgggctgctcttgatcctgcgcatcgggccctatgtggccgccgagtggaattatggaggcgtgccggtgtggttgcactacgtgccaggaacggttttcaggacaaacaacgagccattcaagaaccatgtgaagagtttcacgacatacatcgtggatatgatgaagaaagagcagctcttcgcttctcagggagggaacattatcctagctcagatagagaacgaatatggagattattatgaacaagcgtatggagctggcggcaaaccatacgccatgtgggcagctagtatggctcttgctcaaaacactggtgtcccttggattatgtgccaagagtctgatgctcctgatcccgtgataaactcttgcaatggtttctactgcgatggattccagccaaattcgccaaccaagccaaaaatttggactgagaattggccaggatggttccagacttttggtgaaagtaatccccacagaccacctgaagatgttgcattcgctgttgcacgttttttcgagaaaggtggcagtgttcagaattactatgtgtatcatggtggcacaaattttggtcgcactactggggggccattcattacaactagctacgactatgatgcaccaattgatgaatatggacttcggagatttccaaagtgggcacatctgagggatcttcacaaatctataagattgtgtgagcacaccctgctttatggaaatacaacgtttctttctctgggtcctaaacaagaggctgatatttacagtgatcagtctggaggctgtgttgcattcttggcaaatattgattcagccaatgacaaagttgtcactttccgtaacaggcaatatgatcttcctgcttggtcagttagcattcttcctgactgcaggaatgtggtgttcaacactgcaaaggtgcaatctcaaacttcaatggtgaccatggttccagaaagtttgcaagcatcaaaacctgagcgatggagcattttcagggagagaactgggatttggggtaaaaatgactttgtccggaatggatttgtggaccatattaatacgacaaaggactccaccgactacctatggtacacaacaaggtagtgcatatggtaatggctcacaatcaagattcagtgtcaaattgcccatcaacctgaggactggaaagaatgaacttgcccttctaagtatgactgttggtttacaagattcgcttatgaatggataggagcaggctttacaaatgtgaacatctctggtgtgagaactggaaccatagacttgtcttcaaataattgggcatacaagattggactggaaggggaatattataatttgttcaagcctgatcagacaaataaccaacggtggataccacaatccgagccaccaaaaaaccaacctttgacatggtataaggtaaatgttgatgttccacaaggagatgacccagttgggatagacatgcagtctatggggaaaggcttggcttggttgaatggaaatgccatcgggcggtattggccgaggaccagttctattaatgataggtgcactcccagttgtaactacaggggaacatttattccagacaagtgcaggacaggttgtggacagccaactcagagatggtaccatatcccacggtcatggtttcatccctcagggaacatcctcgtggtctttgaggagaagggtggggatcccacgaagatcacattctcaagaagagctgtgacgagcgtgtgctcctttgtgtcagagcacttcccttccatagacttggaatcctgggatgaaagtgccatgaccgaaggcacacccccagccaaagcacagctgttttgccccgagggtaaaagtatatcttccgtgaagtttgcgagcttgggaaaccccagtggaacctgtagatcataccaaatggggcgctgccaccacccgaactccttatctgttgttgagaaggcttgtctgaacaccaacagctgtacagtctccctgacagacgagagctttgggaaggatttatgccctggagtcaccaaaacactcgccatcgaagcggactgttcttagtggcctacggagtacgaagtgtctcggtgtgcatctaggttccactgcaagtatgcccgtcaaaattctaaaactgtagtgcttgttgcacggcaatgctattgtaacctggatttgaatcgcaaatatgtttcctagattttaagagtcttcagaggcattactcaatatgataagtgttcaattgtcccaaagaccaaattaccatcaaaagataattgttcaattaggctaagtacaaagtatggggcagctaatcgcgaaccaaacaaaagctaaagttaagcaatttagcggtgctaaatcgtgatttagcagtcgcaactcacgtagcggcagctctcgcagccactatagcgccgccatctaaaaccatgctgagcagtattcagtgatgctggtaggtgacagttagcgattgatactgaccatccgcgctagcaaatgcaatattgtatttgggatc

SEQ ID NO: 35893 - DNA, 3347 bp, Zea Mays
ctttggacgaacggcgccggcgggtggccgtccacgacgctgtcacgcacgcttggcacggcacaccgagagagagagagcgcgcgcgcgcgacgcagccaatcccccacggcatgcccaaaaccctcagttccgtgcaataattctgcctcgtcctcccatcgctgtcccccaccgaaacactctcggacgcgtcgtcgtctccccaagaccaaagccaggcggcctgtctgtcctccagtctccccacttcgctctcaccccacgccgcgtaccgctattaataccaccaccagtaccaccacctctgccagttcgccaccatcgtgctccgtacacgctccgctccggccatggccgccgccgcggcctccttttcggccctgccgttccttctacttttgctgctggtgccgtcgctcgacggcgcctccaatgtgacgtacgaccaccgctccctcatcatctccggccgccgccgcctcgtcatctccacctccatccactacccccgcagcgtccccgagatgtggcccaagctggtggctgaagccaaggacggcggcgccgactgcatcgagacctacgtcttctggaacggccatgaaatcgccccaggccagtactacttcgaggaccggtttgacctggtgcggtttgtgaaggtcgttagagacgctgggctgctcttgatcctgcgcatcgggccctatgtggccgccgagtggaattatggaggcgtgccggtgtggttgcactacgtgccaggaacggttttcaggacaaacaacgagccattcaagaaccatgtgaagagtttcacgacatacatcgtggatatgatgaagaaagagcagctcttcgcttctcagggagggaacattatcctagctcagatagagaacgaatatggagattattatgaacaagcgtatggagctggcggcaaaccatacgccatgtgggcagctagtatggctcttgctcaaaacactggtgtcccttggattatgtgccaagagtctgatgctcctgatcccgtgataaactcttgcaatggtttctactgcgatggattccagccaaattcgccaaccaagccaaaaatttggactgagaattggccaggatggttccagacttttggtgaaagtaatccccacagaccacctgaagatgttgcattcgctgttgcacgttttttcgagaaaggtggcagtgttcagaattactatgtgtatcatggtggcacaaattttggtcgcactactggggggccattcattacaactagctacgactatgatgcaccaattgatgaatatggacttcggagatttccaaagtgggcacatctgagggatcttcacaaatctataagattgtgtgagcacaccctgctttatggaaatacaacgtttctttctctgggtcctaaacaagaggctgatatttacagtgatcagtctggaggctgtgttgcattcttggcaaatattgattcagccaatgacaaagttgtcactttccgtaacaggcaatatgatcttcctgcttggtcagttagcattcttcctgactgcaggaatgtggtgttcaacactgcaaaggtgcaatctcaaacttcaatggtgaccatggttccagaaagtttgcaagcatcaaaacctgagcgatggagcattttcagggagagaactgggatttggggtaaaaatgactttgtccggaatggatttgtggaccatattaatacgacaaaggactccaccgactacctatggtacacaacaagttttagtgtggatggaagttactcctcaaaagggagccatgctgtccttaatatcgactccaatggccatggtgtccatgctttcttgaataatgtgctcataggtagtgcatatggtaatggctcacaatcaagattcagtgtcaaattgcccatcaacctgaggactggaaagaatgaacttgcccttctaagtatgactgttggtttacaagattcgcttatgaatggataggagcaggctttacaaatgtgaacatctctggtgtgagaactggaaccatagacttgtcttcaaataattgggcatacaagattggactggaaggggaatattataatttgttcaagcctgatcagacaaataaccaacggtggataccacaatccgagccaccaaaaaaccaacctttgacatggtataaggtaaatgttgatgttccacaaggagatgacccagttgggatagacatgcagtctatggggaaaggcttggcttggttgaatggaaatgccatcgggcggtattggccgaggaccagttctattaatgataggtgcactcccagttgtaactacaggggaacatttattccagacaagtgcaggacaggttgtggacagccaactcagagatggtaccatatcccacggtcatggtttcatccctcagggaacatcctcgtggtctttgaggagaagggtggggatcccacgaagatcacattctcaagaagagctgtgacgagcgtgtgctcctttgtgtcagagcacttcccttccatagacttggaatcctgggatgaaagtgccatgaccgaaggcacacccccagccaaagcacagctgttttgccccgagggtaaaagtatatcttccgtgaagtttgcgagcttgggaaaccccagtggaacctgtagatcataccaaatggggcgctgccaccacccgaactccttatctgttgttgagaaggcttgtctgaacaccaacagctgtacagtctccctgacagacgagagctttgggaaggatttatgccctggagtcaccaaaacactcgccatcgaagcggactgttcttagtggcctacggagtacgaagtgtctcggtgtgcatctaggttccactgcaagtatgcccgtcaaaattctaaaactgtagtgcttgttgcacggcaatgctattgtaacctggatttgaatcgcaaatatgtttcctagattttaagagtcttcagaggcattactcaatatgataagtgttcaattgtcccaaagaccaaattaccatcaaaagataattgttcaattaggctaagtacaaagtatggggcagctaatcgcgaaccaaacaaaagctaaagttaagcaatttagcggtgctaaatcgtgatttagcagtcgcaactcacgtagcggcagctctcgcagccactatagcgccgccatctaaaaccatgctgagcagtattcagtgatgctggtaggtgacagttagcgattgatactgaccatccgcgctagcaaatgcaatattgtatttgggatc

SEQ ID NO: 35894 - DNA, 1443 bp, Zea Mays
atatagcccccgaggggcctttcctctgcacgtagccatatcacaccgcacacagtactcgtcctccttgcagagcttgcaccaacacgccaccttaccttgctttgctcgcactcgcacacagttgcgagcgcattgcttgcattgcgcagccgcaggccgcagcacgaagctagccagtaggcggtagatggcgagcagcgcggggaaccgcttcctgaggcagctgagcgcgagcaacggcgacgaagcggtctgcggcggcctgcagatggaccagcaggagtacggcggcgccggcgtggggaggaggggatcccggcggtggtcgaagaagcgggccgccgccgccgccgccgcgaggggctacggcgccggcagcgggaatggcgtgaagcagccggcctctgccgcggggaagcgggtgatggtggtggtggacgagagctcgggagccaaccacgccatgatgtgggcgctcacccacgtcgccgacaagggggacttcctcacgctgctccacgtcctgccgcgctccggcagcggcaggggcgaggaggcctcctccctcgccaactcgctcggcacgctctgcaaggcctccaggccagaggtggaggtcgaagcgcttgtgatccaagggcccaagctgggcaccgtgctcagccagtgcaggccatctccctgctggttaagctgcttcctgcggagcagcggcgaggagtttgtggagcagtgcatcaaccaggcggagtgcctgacgctggcggtgaggaagcagagcaagggcgtcggtgggtacctcatcagcacccggtggcagaagaacttctggctcctggcctgacaaccatgcattttacctagctagttactactgctacatgatcacatttgttttaagtcactcccgtatatgtgctgtcatttcgtgtcatcaagtgcgtcacaagaaagaccatctctctctctccttcatcctgttgtaaagcgaaaagagcctccgaatctgaccacctttctacgaacctgtatcttccctgcaagtctttagcgtgcgtgtagtactgtgatctgcactgaacaatcatgtaatgctgcataaatgaccaattctgttgtacggcgcttcttgcttgctgcaattgacacttgaggctgtacagcttgcggattacgctaccggatgaaacctgattgcttaaccacgagggaagagctacgcaaattcaggataacaacatcggcaaggccaaggcgacgtttcggatgccgaaggtcgaaattggaaagcaatcaaggcgactcacactcaagcttgggtgcgagaaggaagtcttgagttatttctagaagtaaaataatgttcaggtcctgctccgccaaaataatgttctggtcctgcagccgtccctataataaatacttcatccgtttcaattt

SEQ ID NO: 35895 - DNA, 1055 bp, Zea Mays
cacttctttctgttagcgtttttcttggcgcagctggcggctccgaacacgcaggcctcgttcggccctatcttcgcgcatgccgccatggccttgtgcgcccggagctccagctcacacgccctcgacagcagacgcatggacgccgggtccaagagcgccgccatcctctgtccagcgctgggaggaaacaaaaaatcacgcggcggtctgcacccagcggcgctgcctgcgcacggccaccagacagccgaacggcggccagcagacagccgaacggcaaagaaaggagccttcgcccctgcacctgcacgtgcacgatgccgagtggagccttaagatttgctcacctgcacccagctagcagccacatggatgaaacgacaaagtctgctgctctctcaagtgagtcatggctgtaattataaccgcaattatgcctgcccaaaagcccaaagcagagcacataggtgatggtcaacgacaaagatgaaggtcatgcgagtttgtgtcggtggactcagagtagtgaaggacgaacatcaggctataactaagagtccagaaaagctagaggaccaatcatgagtggctgacacctagggtcatcgatgagtgcaagaggacatggagaagtacattatgttgatcgaatcaagatggcggttgatcaagtaaaattgaagcgctagaggacttagtgatttggcggtcaaggacttgaggtgacacatttcaagattgtggggagagcatatggagtaccctacccatgattgatttaattgtttgagcatcaaaaccatgagttgacaacatctagctttgtacctcaaaacttgggtggagttctagcgagaactgtaggtggcagtggcatcatcatgaagcttgcatcggtgcaaagcaaagttgtgagaccataacatctgcggggttaaattgtttggctctaattacctagggacaagttggaaatatgtaatatctctatcaataatgtaaggaaaatgaatcaatgcctatttatagtaaggttttggtgtttgatgatc

SEQ ID NO: 35896 - DNA, 1022 bp, Zea Mays
ccttttccctctcccagccgccacacttctttctgttagcgtttttcttggcgcagctggcggctccgaacacgcaggcctcgttcggccctatcttcgcgcatgccgccatggccttgtgcgcccggagctccagctcacacgccctcgacagcagacgcatggacgccgggtccaagagcgccgccatcctctgtccagcgctgggaggaaacaaaaaatcacgcggcggtctgcacccagcggcgctgcctgcgcacggccaccagacagccgaacggcggccagcagacagccgaacggcaaagaaaggagccttcgcccctgcacctgcacgtgcacgatgccgagtggagccttaagatttgctcacctgcacccagctagcagccacatggatgaaacgacaaagtctgctgctctctcaaagcacataggtgatggtcaacgacaaagatgaaggtcatgcgagtttgtgtcggtggactcagagtagtgaaggacgaacatcaggctataactaagagtccagaaaagctagaggaccaatcatgagtggctgacacctagggtcatcgatgagtgcaagaggacatggagaagtacattatgttgatcgaatcaagatggcggttgatcaagtaaaattgaagcgctagaggacttagtgatttggcggtcaaggacttgaggtgacacatttcaagattgtggggagagcatatggagtaccctacccatgattgatttaattgtttgagcatcaaaaccatgagttgacaacatctagctttgtacctcaaaacttgggtggagttctagcgagaactgtaggtggcagtggcatcatcatgaagcttgcatcggtgcaaagcaaagttgtgagaccataacatctgcggggttaaattgtttggctctaattacctagggacaagttggaaatatgtaatatctctatcaataatgtaaggaaaatgaatcaatgcctatttatagtaaggttttggtgtttgatgatc

SEQ ID NO: 35897 - DNA, 2309 bp, Zea Mays
cgggttcccatcgaaccgcatctgagtatctgaccacgtcacacgacaccaccaccagccctccccttcatcaattggagcacggcgcccgttcattcccctctgctccgctgcttgcctccggctccccaattccacgagatctccaattccaccgcgtcgtctctgcatccggaccccataccccgatcgatccctaaggcccatggttttctccgccgccgcgtcgcctctagtagccaccgctgctgactctgcttcctcctgcgtcgcccacctccgctgctgctgtcgcgttagttgctgccgttgttgaagacgcgtagctctttagggttcgcgatttctcgccgatcggttcgagaattggcacgcggtagccgcgccgctgcgcctgttcgacgacgcggaggagccgaagccggagcgcgtcggggccggagaggccgacgcggagagggatgacgaggacgggggcgaccagcacttctccctcctcgggcactccctctgcgtcaagcgcccgcgccgcgccggcaacggcggcgggggcggagagacgtcatcctgctcgtccacgtccgcggcgcttcgccctgccaagcgacaggcgacgggggagggcagcggcgcagatctggagacccgccgcgccgcggtccgcgcctggggcaatcagtcgctggcggaggccgacccggacgtgcactcgctgatggagcaggagttggaccgccaggtgcgaggcatcgagctcatagcgtcggaaaacttcgtctgccgcgcggtgctcgatgcactcggcagccacctcactaacaagtactccgagggggccccgggtgctcgctactacggcgggaatcagcacatcgacgccatcgaacggctctgccatgagcgcgctctcaccgccttcggtctcgaccctgcctgctggggcgtcaacgtgcagccctactcgtgcacgtctgccaacttggctgtctacactgggctccttcaacccaaggaccgcatcatggggctggagccaccgtcgggcggccatgttagccatggttactacacgcccagtggcaagaaggtgtcaggtgcctctattttcttcgagagcatgtcgtacaaggtgaacccacagactgggtatattgattacgacaagcttgaagaaagagcaatggatttccaccctaaaattctcatctgtggtgggagctcttaccccagagagtgggactttgcacggatgagattgattgctgataagtgtggtgcggtgcttctttgcgacatggcacatatcagtgggcttgtcgcagcaaaggaatgccgtagccctttcgactactgtgatgttgttacgtcaactactcacaagaatcttaggggccctagaggtggtataatattcttcaggaaagggaaaaatttaaggaaacgagctggatctttttctcaaggagatgagaatgaatacgacttcgaggataggataaattttggtgttttcccttcaatgcaaggagggccccataataatcatattgctggcttggctataactctgaagcagattggttacaggtggcacagataatcacttagtactttgggacctcagaactcttggcttgactggcaagatcttcgagaaggtttgcgaggcatgccacatatctgtcaacaagacaccaatatatggagataatggctcgatatcgccaggtggtgtgcggattggaacacctgcaatgactactagaggttgcttagaagaggacttcgaggtgattgcagacttcctcataagggctactcaaattgctaacaatgttctgaaagaacatggcaaagtgcaaaaggagtttctaagaggcctacagaacaataatgatgttatagaactccgaaatcaggttgaggcatttgcgtcacagtttgcgatgccaggttttgatgtatgaatgtgcatatatacgtagtcagcaattatcagattcacagcaacattgccatcctttccgttactccaatactagcaactattgctttcaactgcacaatgattagggagtttttttttatttgatggtagacggtctagatggttgattcaaacaattatgtacagcaagttgtgatgaattatgtatgcagtgaaccttggtatgacgggttcctataggagatattttcttgtcactacaacagaaccctttgttgccttttgacacctgtttgttgccgaggctgaataagctttaaccatatggtttctggctaattattagacgatgatatttggt

SEQ ID NO: 35898 - DNA, 1532 bp, Zea Mays
cgggttcccatcgaaccgcatctgagtatctgaccacgtcacacgacaccaccaccagccctccccttcatcaattggagcacggcgcccgttcattcccctctgctccgctgcttgcctccggctccccaattccacgagatctccaattccaccgcgtcgtctctgcatccggaccccataccccgatcgatccctaaggcccatggttttctccgccgccgcgtcgcctctagtagccaccgctgctgactctgcttcctcctgcgtcgcccacctccgctgctgctgtcgcgttagttgctgccgttgttgaagacgcgtagctctttagggttcgcgatttctcgccgatcggttcgagaattggtaagctatggatctctcgcggcccacatcgtcggacctctcgctcgggctccactctcacggtcacgcccacgcccacgctcgcaggcacgcggtagccgcgccgctgcgcctgttcgacgacgcggaggagccgaagccggagcgcgtcggggccggagaggccgacgcggagagggatgacgaggacgggggcgaccagcacttctccctcctcgggcactccctctgcgtcaagcgcccgcgccgcgccggcaacggcggcgggggcggagagacgtcatcctgctcgtccacgtccgcggcgcttcgccctgccaagcgacaggcgacgggggagggcagcggcgcagatctggagacccgccgcgccgcggtccgcgcctggggcaatcagtcgctggcggaggccgacccggacgtgcactcgctgatggagcaggagttggaccgccaggtgcgaggcatcgagctcatagcgtcggaaaacttcgtctgccgcgcggtgctcgatgcactcggcagccacctcactaacaagtactccgagggggccccgggtgctcgctactacggcgggaatcagcacatcgacgccatcgaacggctctgccatgagcgcgctctcaccgccttcggtctcgaccctgcctgctggggcgtcaacgtgcagccctactcgtgcacgtctgccaacttggctgtctacactgggctccttcaacccaaggaccgcatcatggggctggagccaccgtcgggcggccatgttagccatggttactacacgcccagtggcaagaaggtgtcaggtgcctctattttcttcgagagcatgtcgtacaaggtgaacccacagactgggtatattgattacgacaagcttgaagaaagagcaatggatttccaccctaaaattctcatctgtggtgggagctcttaccccagagagtgggactttgcacggatgagattgattgctgataagtgtggtgcggtgcttctttgcgacatggcacatatcagtgggcttgtcgcagcaaaggtttgtggatgatgtggcttgctgacatggttagattgcatgaaatgtcataattacatgcactggtgggctcctgctgtggatggcttgcattttaagatagaaggctagtggggtt

SEQ ID NO: 35899 - DNA, 2981 bp, Zea Mays
ggacgatatttgcaagatactttacttaatgagctgcctatcatgtggtgaatctccagaatctcacatgtactcttatacccaccataatggtactctaactgttcttgtgaaaagacttcccttggagttgacactttctggtgagactcaaggaagaatttggatgtggaccagatgtttgagatgcaatgctaagccgacccatagggttataatatcttcctctgcacgtaatctgtcgtttggaaagttcttggaactcagcttctcaacccactctgctaccaagaagctaccaacatgtgggcatttgcttcatagagactgcctacgtttctttggatttggatccagagttgctatgttcatatactcatctgtagaaatatattctgcttgtaagcctccattgagtttggagttcaataaccgaaacaaaaatgattggcttgacattgaagtgaagaatccaattgcatacttgcatgctaacatcattctattctttaaggtccttcttaaatggaagcagttatttacaacaattgaaaatgtaatacaagacttgagatcaagatactctagtcaagccatgggggaagacaccaacgtttcagtagatgaggatgaggggttacttttggaggtgtccaggatgcttacacaagagaaaaataaagttgaggtttctctgagggagtttagccgaattgccatacctgagagttttgcacatgggatccttggtttgaactggttgtaccagcaacttcttcttgggttctacatttgggatcttcggttgcttcatattctgcagtacactaaagttaatactgcatcttcagacaattccattcatgaaagcacagcaaagaatgaaccgaagagttcagcaagtattgcaatccaggacacaccatcactaaaggaaattggaacagaaagaaaggaagcaactataaattcttctggcaactttgatgatccatttgggtgatacaatgttggataaggttcaccttactgctaaattaataaccaaagagaaagagcacgatttgctcaattatcaagaccatgatgtaaaatcagctctttcctctctaggcgaagctgctgatcagtttgaaacgattgctaatgttaattgttcagagaaattaaacactataccatttatgaatgatgaacaacctgcagcatccaatgtattgcatcatgttgtcattccaagtgacgatgaaggaaaatggttctggaatcaatttaatcaattggaaatggaatacaagaaagaacttgaaggtggttctttgtataaattttacctcatcaacaaatacaccccatgctcttcaccattggcacaattaaaacatcaaatggacttggggcattttatagctggccatggtggtaatatcttttcaatttctgaggaagaggcttctagcattattgcttatgctctaattatatctgaacaacaagggttctattatgaagctgcatctagtaacttggataaaaatgcttctatgctgccatccatgtcgtctccaaatgagtctttcgaaaacaaccataaattttcaaggtttgcaccaactgaggaattaacatcagggttttatgattcatttctgtcagctttaaaagatctgcaccacgaaatcgatctgaacaatgaaaagatagctctgagaagcaaatatactgtcatttgtatatatgcaaaacaattccatgatcttcggaagatgtgctgcccatcagaacttgcatatatttcgtcaataagccgctgcaaaaactggaatgcacagggtggaaagagtaaggttttctttgcgaaatcaatggatgacagatttatcataaaacaaatcaagaagactgaatttgactcgttcttaaagtttggtcttgagtactttaagcattttggtgcatctcaggtttcaagcaaccctacttgtcttgcgaaaattctaggaatatatcaggttaaggaaactaggaatggcaaggagacaagggttaacttcatggttatggaaaatcttctgtttggacataatatactacgcagatatgatctgaagggtgctcttttctcacgatatattcctgattcagaaaattctgaaaagaacatgaatgtcatggattactccttgcttgttggagttgacaaagagaagaaagagcttgtatttggaattatagattatttgagacaatatacctgggacaaacagctggaatcttgggtgaagacatctcttgttgttccaaagaatctatccccaactgtaattttacctagggagtacaaaatgagattcagggcctttatgtcacaatactttctatcagttccagatgcttgagtcttgaggcccaatcattttctggtattggtgaccgaacatatcttgagttaggacttcggagatcatgttgccgatggttatttccctatccagtgagcagtacggcatattggcatcatgttttgagcattgaaattttcccatagtttcattgttgtgtgtgtctatccttgtccattttccttctcagcagttgtgtacatagtagcagctaggacacctgggaagtgcaaattttaagcaaacgaacggtgatggacgcacaaatagcctagtcattgttttttattgagttaattagggtggagatctttccaaaaaaagggtggagatcaaggtctgtaggggtagaggagcatgtaatgtactccggtttgtgtttatcggaatatattcctgaagtttaaagttagattaaagattcagcttttttactttaatcaaattactagcaaaggtttatcatagcagcatttgtgtgacgaacattacttgtggcatggcagacatagacacaatatcattgtccaacatagatacaatatcgtcgaatgctacttcgtcaggcgaatgtatgtc

SEQ ID NO: 35900 - DNA, 3513 bp, Zea Mays
gtcagatgctccctctgtgaccaagaacctgaaaccagtaatcacctgctggtctcatgtgtcttctctagggtttattggtactctactcttagaagatactgctgaaaggagcaacaagggaagaacttaagaagattaagcgtgtgcttcatttcactgtctttgcagcttaccatttgatccttgaaacttcattctttgccgatcaaaaattgtttacgacagacaaaactaccacagggaaagagaagtgctttaaaactaatcaacagctgcttggttcctgttatgataattcaaaaaacagtgacaccatgaataacacaccaacttgtgatgatcagtatcctaatcaggaaaagcttattcatactgaaaaatctgtaccattgcatcttcatgattccaaaactatggcatctgaagattctgctggtgaagagcatattgacagcaaaggcattcagtcatattcatccctgcctgtttcagatccctcgacaaattttatgcaggacatgccatcaccagattgtgctgagtcaaaaatatctggtggttttgatggctcaacattcactgatacttccaaagaggtgcagaagaaggaattgtctagtgacaattttcagggaacttttgatgtaatttgtgctgagagtggagctgctttgaacactcaggatatcttggtatcaatgtctagccaacatatcaggaaccaagctgtttgtgagcagagtcacctgtcgcggataacttattatgggtattttgatacatcccttggacgatatttgcaagatactttacttaatgagaaacacagctgcctatcatgtggtgaatctccagaatctcacatgtactcttatacccaccataatggtactctaactgttcttgtgaaaagacttcccttggagttgacactttctggtgagactcaaggaagaatttggatgtggaccagatgtttgagatgcaatgctaagccgacccatagggttataatatcttcctctgcacgtaatctgtcgtttggaaagttcttggaactcagcttctcaacccactctgctaccaagaagctaccaacatgtgggcatttgcttcatagagactgcctacgtttctttggatttggatccagagttgctatgttcatatactcatctgtagaaatatattctgcttgtaagcctccattgagtttggagttcaataaccgaaacaaaaatgattggcttgacattgaagtgaagaatccaattgcatacttgcatgctaacatcattctattctttaaggtccttcttaaatggaagcagttatttacaacaattgaaaatgtaatacaagacttgagatcaagatactctagtcaagccatgggggaagacaccaacgtttcagtagatgaggatgaggggttacttttggaggtgtccaggatgcttacacaagagaaaaataaagttgaggtttctctgagggagtttagccgaattgccatacctgagagttttgcacatgggatccttggtttgaactggttgtaccagcaacttcttcttgggttctacatttgggatcttcggttgcttcatattctgcagtacactaaagttaatactgcatcttcagacaattccattcatgaaagcacagcaaagaatgaaccgaagagttcagcaaagaaattaaacactataccatttatgaatgatgaacaacctgcagcatccaatgtattgcatcatgttgtcattccaagtgacgatgaaggaaaatggttctggaatcaatttaatcaattggaaatggaatacaagaaagaacttgaaggtggttctttgtataaattttacctcatcaacaaatacaccccatgctcttcaccattggcacaattaaaacatcaaatggacttggggcattttatagctggccatggtggtaatatcttttcaatttctgaggaagaggcttctagcattattgcttatgctctaattatatctgaacaacaagggttctattatgaagctgcatctagtaacttggataaaaatgcttctatgctgccatccatgtcgtctccaaatgagtctttcgaaaacaaccataaattttcaaggtttgcaccaactgaggaattaacatcagggttttatgattcatttctgtcagctttaaaagatctgcaccacgaaatcgatctgaacaatgaaaagatagctctgagaagcaaatatactgtcatttgtatatatgcaaaacaattccatgatcttcggaagatgtgctgcccatcagaacttgcatatatttcgtcaataagccgctgcaaaaactggaatgcacagggtggaaagagtttcaagcaaccctacttgtcttgcgaaaattctaggaatatatcaggttaaggaaactaggaatggcaaggagacaagggttaacttcatggttatggaaaatcttctgtttggacataatatactacgcagatatgatctgaagggtgctcttttctcacgatatattcctgattcagaaaattctgaaaaggtactgttggatcaaaattttattgaagacatgcgtaccatgccaatctacattcaaggaaaaactaaaaacctcatggaacgcgctatttggaacgacacatctttcctaagtaacatgaatgtcatggattactccttgcttgttggagttgacaaagagaagaaagagcttgtatttggaattatagattatttgagacaatatacctgggacaaacagctggaatcttgggtgaagacatctcttgttgttccaaagaatctatccccaactgtaattttacctagggagtacaaaatgagattcagggcctttatgtcacaatactttctatcagttccagatgcttgagtcttgaggcccaatcattttctggtattggtgaccgaacatatcttgagttaggacttcggagatcatgttgccgatggttatttccctatccagtgagcagtacggcatattggcatcatgttttgagcattgaaattttcccatagtttcattgttgtgtgtgtctatccttgtccattttccttctcagcagttgtgtacatagtagcagctaggacacctgggaagtgcaaattttaagcaaacgaacggtgatggacgcacaaatagcctagtcattgttttttattgagttaattagggtggagatctttccaaaaaaagggtggagatcaaggtctgtaggggtagaggagcatgtaatgtactccggtttgtgtttatcggaatatattcctgaagtttaaagttagattaaagattcagcttttttactttaatcaaattactagcaaaggtttatcatagcagcatttgtgtgacgaacattacttgtggcatggcagacatagacacaatatcattgtccaacatagatacaatatcgtcgaatgctacttcgtcaggcgaatgtatgtc

SEQ ID NO: 35901 - DNA, 3775 bp, Zea Mays
cctacatgggtctttttattggatcatgctcctttggccactacagacagatctggaagatactgctgaaaggagcaacaagggaagaacttaagaagattaagcgtgtgcttcatttcactgtctttgcagcttaccatttgatccttgaaacttcattctttgccgatcaaaaattgtttacgacagacaaaactaccacagggaaagagaagtgctttaaaactaatcaacagctgcttggttcctgttatgataattcaaaaaacagtgacaccatgaataacacaccaacttgtgatgatcagtatcctaatcaggaaaagcttattcatactgaaaaatctgtaccattgcatcttcatgattccaaaactatggcatctgaagattctgctggtgaagagcatattgacagcaaaggcattcagtcatattcatccctgcctgtttcagatccctcgacaaattttatgcaggacatgccatcaccagattgtgctgagtcaaaaatatctggtggttttgatggctcaacattcactgatacttccaaagaggtgcagaagaaggaattgtctagtgacaattttcagggaacttttgatgtaatttgtgctgagagtggagctgctttgaacactcaggatatcttggtatcaatgtctagccaacatatcaggaaccaagctgtttgtgagcagagtcacctgtcgcggataacttattatgggtattttgatacatcccttggacgatatttgcaagatactttacttaatgaggtcatacatcttaactatttgctaatttaggatatcattcattttactttctgttgttttcaataatgattaaactgtttacagaaacacagctgcctatcatgtggtgaatctccagaatctcacatgtactcttatacccaccataatggtactctaactgttcttgtgaaaagacttcccttggagttgacactttctggtgagactcaaggaagaatttggatgtggaccagatgtttgagatgcaatgctaagccgacccatagggttataatatcttcctctgcacgtaatctgtcgtttggaaagttcttggaactcagcttctcaacccactctgctaccaagaagctaccaacatgtgggcatttgcttcatagagactgcctacgtttctttggatttggatccagagttgctatgttcatatactcatctgtagaaatatattctgcttgtaagcctccattgagtttggagttcaataaccgaaacaaaaatgattggcttgacattgaagtgaagaatgtccttcttaaatggaagcagttatttacaacaattgaaaatgtaatacaagacttgagatcaagatactctagtcaagccatgggggaagacaccaacgtttcagtagatgaggatgaggggttacttttggaggtgtccaggatgcttacacaagagaaaaataaagttgaggtttctctgagggagtttagccgaattgccatacctgagagttttgcacatgggatccttggtttgaactggttgtaccagcaacttcttcttgggttctacatttgggatcttcggttgcttcatattctgcagtacactaaagttaatactgcatcttcagacaattccattcatgaaagcacagcaaagaatgaaccgaagagttcagcaagtattgcaatccaggacacaccatcactaaaggaaattggaacagaaagaaaggaagcaactataaattcttctggcaactttgatgatccatttgggtgatacaatgttggataaggttcaccttactgctaaattaataaccaaagagaaagagcacgatttgctcaattatcaagaccatgatgtaaaatcagctctttcctctctaggcgaagctgctgatcagtttgaaacgattgctaatgttaattgttcagagaaattaaacactataccatttatgaatgatgaacaacctgcagcatccaatgtattgcatcatgttgtcattccaagtgacgatgaaggaaaatggttctggaatcaatttaatcaattggaaatggaatacaagaaagaacttgaaggtggttctttgtataaattttacctcatcaacaaatacaccccatgctcttcaccattggcacaattaaaacatcaaatggacttggggcattttatagctggccatggtggtaatatcttttcaatttctgaggaagaggcttctagcattattgcttatgctctaattatatctgaacaacaagggttctattatgaagctgcatctagtaacttggataaaaatgcttctatgctgccatccatgtcgtctccaaatgagtctttcgaaaacaaccataaattttcaaggtttgcaccaactgaggaattaacatcagggttttatgattcatttctgtcagctttaaaagatctgcaccacgaaatcgatctgaacaatgaaaagatagctctgagaagcaaatatactgtcatttgtatatatgcaaaacaattccatgatcttcggaagatgtgctgcccatcagaacttgcatatatttcgtcaataagccgctgcaaaaactggaatgcacagggtggaaagagtttcaagcaaccctacttgtcttgcgaaaattctaggaatatatcaggttaaggaaactaggaatggcaaggagacaagggttaacttcatggttatggaaaatcttctgtttggacataatatactacgcagatatgatctgaagggtgctcttttctcacgatatattcctgattcagaaaattctgaaaaggtactgttggatcaaaattttattgaagacatgcgtaccatgccaatctacattcaaggaaaaactaaaaacctcatggaacgcgctatttggaacgacacatctttcctaagtaacatgaatgtcatggattactccttgcttgttggagttgacaaagagaagaaagagcttgtatttggaattatagattatttgagacaatatacctgggacaaacagctggaatcttgggtgaagacatctcttgttgttccaaagaatctatccccaactgtaattttacctagggagtacaaaatgagattcagggcctttatgtcacaatactttctatcagttccagatgcttgagtcttgaggcccaatcattttctggtattggtgaccgaacatatcttgagttaggacttcggagatcatgttgccgatggttatttccctatccagtgagcagtacggcatattggcatcatgttttgagcattgaaattttcccatagtttcattgttgtgtgtgtctatccttgtccattttccttctcagcagttgtgtacatagtagcagctaggacacctgggaagtgcaaattttaagcaaacgaacggtgatggacgcacaaatagcctagtcattgttttttattgagttaattagggtggagatctttccaaaaaaagggtggagatcaaggtctgtaggggtagaggagcatgtaatgtactccggtttgtgtttatcggaatatattcctgaagtttaaagttagattaaagattcagcttttttactttaatcaaattactagcaaaggtttatcatagcagcatttgtgtgacgaacattacttgtggcatggcagacatagacacaatatcattgtccaacatagatacaatatcgtcgaatgctacttcgtcaggcgaatgtatgtc

SEQ ID NO: 35902 - DNA, 5341 bp, Zea Mays
ctcttcttcccgtttcaaaatcgcgtccaatttaaacagcaaaatcccacacatcaagccatcgaatcccgcggctcttggattcatcccttccctcccctcttgttctccgccatatgtgaaccggtgaacgggtgtgcgtgtgtctatcgaggctttcggtgggcgtattcgctccggtggatttggaatcgtgccttctcggcgcgcacaagtggcatgctagcacaataatgcagtgaagttgtgtcatgagtaaaatgtgtcacgcatgtgcatcagaggagacaaccatgaatgaagctaatatcgacctggcctgcagtacgtcttgctgcaagatgtgtgattatggtgagggatcatcaattgttaccagcgagatcaactggctggccatggactcgagcccttacagcactccttacggcacccctgttttttcccgagaaaattctttctcaagctttgccagttgcttttcaagccttggtgactctctaacagattctgattctgaagaggagattgagctccaagatactggtcaattttatcatgataccatattaattaaagattttatggagcaagaagagagttttgtgcgagtggaagaatgtcaatttaaggatattgctgatgactgtgctattttttccattccaataaaccaatatatttcatctgctgagcaacagctggagagacatgaagactccaacaagggaaattttgataccattaatatttcattggattcagatatatcttatgaacagagaaaagacatcctgtccgatgataaacatgtaagaacgaaatgtgctgtaccagtggaagatattgatcataaagaatcaggtgctatagttgttgaacagatcactagccttcccatgccaggtggtgatattttcccattgaatgaacaagttatggatggactcagcagtaccttggaaaatacaatagtatataacaatatattgaataccgaacctgaaatgaaacatggtactcactttgaaaatgaaaatgaatgcctgtacccactagctttgcctagttttgaagcagatcctctcatttggttaccaccggagccagaaaataatgaagatgactttgatactgtttctaatgatgacgacgagagtggcaataacagcactgggtggggtaggtcaagtttcaaggttaacttagcagagagaaacaaggaaagccgcgacgaccaattgcagaaagtaatgtcagaagtaatgaatggacaattcaagatcctagtaagtcgattcttggctgctgaagggctctctttatctgatggaggcacagataaaaactggcttgatattgttgcatcattgtcatgggatgctgcactacgtgtaaaacctgaagccaattccggaaatgcaatggatcctggttcgtatgtgaaggtgaaatgtttagcttcaggatcttaccagcagagtgaagtgatcaatggtcttgtttttaagaagagtgctgcacataaacagatgcgtgccaatgtaaaacatccaaaactgctacttcttcagggcgcccttggccattcgtcaacggggctatcatcaataaattcgatgaaacaggaaaacgatcagctggagagaactctttatgaagtgatagtcaaatgccagcttgatgttatattggtcgagaaagcagtttcccgtaatgtaaacgaatatattcagaaacaaggagttacggtagtaagtgacatgaatacccatcggttggaaagaattgctcgctgcattggctctccaattctatctttgcagagtgttcttatgaaacccagtcttattaagcagtgtgaatctctccattttgaaaagtttgttgaagagcataatattactggagaagatggaaaaaaatcatgcaaaacatttttatttctagagggttttccaagacctctgggatgcacgatactgctgaaaggagcaacaagggaagaacttaagaagattaagcgtgtgcttcatttcactgtctttgcagcttaccatttgatccttgaaacttcattctttgccgatcaaaaattgtttacgacagacaaaactaccacagggaaagagaagtgctttaaaactaatcaacagctgcttggttcctgttatgataattcaaaaaacagtgacaccatgaataacacaccaacttgtgatgatcagtatcctaatcaggaaaagcttattcatactgaaaaatctgtaccattgcatcttcatgattccaaaactatggcatctgaagattctgctggtgaagagcatattgacagcaaaggcattcagtcatattcatccctgcctgtttcagatccctcgacaaattttatgcaggacatgccatcaccagattgtgctgagtcaaaaatatctggtggttttgatggctcaacattcactgatacttccaaagaggtgcagaagaaggaattgtctagtgacaattttcagggaacttttgatgtaatttgtgctgagagtggagctgctttgaacactcaggatatcttggtatcaatgtctagccaacatatcaggaaccaagctgtttgtgagcagagtcacctgtcgcggataacttattatgggtattttgatacatcccttggacgatatttgcaagatactttacttaatgagaaacacagctgcctatcatgtggtgaatctccagaatctcacatgtactcttatacccaccataatggtactctaactgttcttgtgaaaagacttcccttggagttgacactttctggtgagactcaaggaagaatttggatgtggaccagatgtttgagatgcaatgctaagccgacccatagggttataatatcttcctctgcacgtaatctgtcgtttggaaagttcttggaactcagcttctcaacccactctgctaccaagaagctaccaacatgtgggcatttgcttcatagagactgcctacgtttctttggatttggatccagagttgctatgttcatatactcatctgtagaaatatattctgcttgtaagcctccattgagtttggagttcaataaccgaaacaaaaatgattggcttgacattgaagtgaagaatgtccttcttaaatggaagcagttatttacaacaattgaaaatgtaatacaagacttgagatcaagatactctagtcaagccatgggggaagacaccaacgtttcagtagatgaggatgaggggttacttttggaggtgtccaggatgcttacacaagagaaaaataaagttgaggtttctctgagggagtttagccgaattgccatacctgagagttttgcacatgggatccttggtttgaactggttgtaccagcaacttcttcttgggttctacatttgggatcttcggttgcttcatattctgcagtacactaaagttaatactgcatcttcagacaattccattcatgaaagcacagcaaagaatgaaccgaagagttcagcaaagaaattaaacactataccatttatgaatgatgaacaacctgcagcatccaatgtattgcatcatgttgtcattccaagtgacgatgaaggaaaatggttctggaatcaatttaatcaattggaaatggaatacaagaaagaacttgaaggtggttctttgtataaattttacctcatcaacaaatacaccccatgctcttcaccattggcacaattaaaacatcaaatggacttggggcattttatagctggccatggtggtaatatcttttcaatttctgaggaagaggcttctagcattattgcttatgctctaattatatctgaacaacaagggttctattatgaagctgcatctagtaacttggataaaaatgcttctatgctgccatccatgtcgtctccaaatgagtctttcgaaaacaaccataaattttcaaggtttgcaccaactgaggaattaacatcagggttttatgattcatttctgtcagctttaaaagatctgcaccacgaaatcgatctgaacaatgaaaagatagctctgagaagcaaatatactgtcatttgtatatatgcaaaacaattccatgatcttcggaagatgtgctgcccatcagaacttgcatatatttcgtcaataagccgctgcaaaaactggaatgcacagggtggaaagagtaaggttttctttgcgaaatcaatggatgacagatttatcataaaacaaatcaagaagactgaatttgactcgttcttaaagtttggtcttgagtactttaagcattttggtgcatctcaggtttcaagcaaccctacttgtcttgcgaaaattctaggaatatatcagaaaattctgaaaaggtactgttggatcaaaattttattgaagacatgcgtaccatgccaatctacattcaaggaaaaactaaaaacctcatggaacgcgctatttggaacgacacatctttcctaagtaacatgaatgtcatggattactccttgcttgttggagttgacaaagagaagaaagagcttgtatttggaattatagattatttgagacaatatacctgggacaaacagctggaatcttgggtgaagacatctcttgttgttccaaagaatctatccccaactgtaattttacctagggagtacaaaatgagattcagggcctttatgtcacaatactttctatcagttccagatgcttgagtcttgaggcccaatcattttctggtattggtgaccgaacatatcttgagttaggacttcggagatcatgttgccgatggttatttccctatccagtgagcagtacggcatattggcatcatgttttgagcattgaaattttcccatagtttcattgttgtgtgtgtctatccttgtccattttccttctcagcagttgtgtacatagtagcagctaggacacctgggaagtgcaaattttaagcaaacgaacggtgatggacgcacaaatagcctagtcattgttttttattgagttaattagggtggagatctttccaaaaaaagggtggagatcaaggtctgtaggggtagaggagcatgtaatgtactccggtttgtgtttatcggaatatattcctgaagtttaaagttagattaaagattcagcttttttactttaatcaaattactagcaaaggtttatcatagcagcatttgtgtgacgaacattacttgtggcatggcagacatagacacaatatcattgtccaacatagatacaatatcgtcgaatgctacttcgtcaggcgaatgtatgtc

SEQ ID NO: 35903 - DNA, 5783 bp, Zea Mays
ccccattcctcctctcttcttcccgtttcaaaatcgcgtccaatttaaacagcaaaatcccacacatcaagccatcgaatcccgcggctcttggattcatcccttccctcccctcttgttctccgccatatgtgaaccggtgaacgggtgtgcgtgtgtctatcgaggctttcggtgggcgtattcgctccggtggatttggaatcgtgccttctcggcgcgcacaagtggcatgctagcacaataatgcagtgaagttgtgtcatgagtaaaatgtgtcacgcatgtgcatcagaggagacaaccatgaatgaagctaatatcgacctggcctgcagtacgtcttgctgcaagatgtgtgattatggtgagggatcatcaattgttaccagcgagatcaactggctggccatggactcgagcccttacagcactccttacggcacccctgttttttcccgagaaaattctttctcaagctttgccagttgcttttcaagccttggtgactctctaacagattctgattctgaagaggagattgagctccaagatactggtcaattttatcatgataccatattaattaaagattttatggagcaagaagagagttttgtgcgagtggaagaatgtcaatttaaggatattgctgatgactgtgctattttttccattccaataaaccaatatatttcatctgctgagcaacagctggagagacatgaagactccaacaagggaaattttgataccattaatatttcattggattcagatatatcttatgaacagagaaaagacatcctgtccgatgataaacatgtaagaacgaaatgtgctgtaccagtggaagatattgatcataaagaatcaggtgctatagttgttgaacagatcactagccttcccatgccaggtggtgatattttcccattgaatgaacaagttatggatggactcagcagtaccttggaaaatacaatagtatataacaatatattgaataccgaacctgaaatgaaacatggtactcactttgaaaatgaaaatgaatgcctgtacccactagctttgcctagttttgaagcagatcctctcatttggttaccaccggagccagaaaataatgaagatgactttgatactgtttctaatgatgacgacgagagtggcaataacagcactgggtggggtaggtcaagtttcaaggttaacttagcagagagaaacaaggaaagccgcgacgaccaattgcagaaagtaatgtcagaagtaatgaatggacaattcaagatcctagtaagtcgattcttggctgctgaagggctctctttatctgatggaggcacagataaaaactggcttgatattgttgcatcattgtcatgggatgctgcactacgtgtaaaacctgaagccaattccggaaatgcaatggatcctggttcgtatgtgaaggtgaaatgtttagcttcaggatcttaccagcagagtgatcaatggtcttgtttttaagaagagtgctgcacataaacagatgcgtgccaatgtaaaacatccaaaactgctacttcttcagggcgcccttggccattcgtcaacggggctatcatcaataaattcgatgaaacaggaaaacgatcagctggagagaactctttatgaagtgatagtcaaatgccagcttgatgttatattggtcgagaaagcagtttcccgtaatgtaaacgaatatattcagaaacaaggagttacggtagtaagtgacatgaatacccatcggttggaaagaattgctcgctgcattggctctccaattctatctttgcagagtgttcttatgaaacccagtcttattaagcagtgtgaatctctccattttgaaaagtttgttgaagagcataatattactggagaagatggaaaaaaatcatgcaaaacatttttatttctagagggttttccaagacctctgggatgcacgatactgctgaaaggagcaacaagggaagaacttaagaagattaagcgtgtgcttcatttcactgtctttgcagcttaccatttgatccttgaaacttcattctttgccgatcaaaaattgtttacgacagacaaaactaccacagggaaagagaagtgctttaaaactaatcaacagctgcttggttcctgttatgataattcaaaaaacagtgacaccatgaataacacaccaacttgtgatgatcagtatcctaatcaggaaaagcttattcatactgaaaaatctgtaccattgcatcttcatgattccaaaactatggcatctgaagattctgctggtgaagagcatattgacagcaaaggcattcagtcatattcatccctgcctgtttcagatccctcgacaaattttatgcaggacatgccatcaccagattgtgctgagtcaaaaatatctggtggttttgatggctcaacattcactgatacttccaaagaggtgcagaagaaggaattgtctagtgacaattttcagggaacttttgatgtaatttgtgctgagagtggagctgctttgaacactcaggatatcttggtatcaatgtctagccaacatatcaggaaccaagctgtttgtgagcagagtcacctgtcgcggataacttattatgggtattttgatacatcccttggacgatatttgcaagatactttacttaatgagaaacacagctgcctatcatgtggtgaatctccagaatctcacatgtactcttatacccaccataatggtactctaactgttcttgtgaaaagacttcccttggagttgacactttctggtgagactcaaggaagaatttggatgtggaccagatgtttgagatgcaatgctaagccgacccatagggttataatatcttcctctgcacgtaatctgtcgtttggaaagttcttggaactcagcttctcaacccactctgctaccaagaagctaccaacatgtgggcatttgcttcatagagactgcctacgtttctttggatttggatccagagttgctatgttcatatactcatctgtagaaatatattctgcttgtaagcctccattgagtttggagttcaataaccgaaacaaaaatgattggcttgacattgaagtgaagaatccaattgcatacttgcatgctaacatcattctattctttaaggtccttcttaaatggaagcagttatttacaacaattgaaaatgtaatacaagacttgagatcaagatactctagtcaagccatgggggaagacaccaacgtttcagtagatgaggatgaggggttacttttggaggtgtccaggatgcttacacaagagaaaaataaagttgaggtttctctgagggagtttagccgaattgccatacctgagagttttgcacatgggatccttggtttgaactggttgtaccagcaacttcttcttgggttctacatttgggatcttcggttgcttcatattctgcagtacactaaagttaatactgcatcttcagacaattccattcatgaaagcacagcaaagaatgaaccgaagagttcagcaagtattgcaatccaggacacaccatcactaaaggaaattggaacagaaagaaaggaagcaactataaattcttctggcaactttgatgatccatttgggtgatacaatgttggataaggttcaccttactgctaaattaataaccaaagagaaagagcacgatttgctcaattatcaagaccatgatgtaaaatcagctctttcctctctaggcgaagctgctgatcagtttgaaacgattgctaatgttaattgttcagagaaattaaacactataccatttatgaatgatgaacaacctgcagcatccaatgtattgcatcatgttgtcattccaagtgacgatgaaggaaaatggttctggaatcaatttaatcaattggaaatggaatacaagaaagaacttgaaggtggttctttgtataaattttacctcatcaacaaatacaccccatgctcttcaccattggcacaattaaaacatcaaatggacttggggcattttatagctggccatggtggtaatatcttttcaatttctgaggaagaggcttctagcattattgcttatgctctaattatatctgaacaacaagggttctattatgaagctgcatctagtaacttggataaaaatgcttctatgctgccatccatgtcgtctccaaatgagtctttcgaaaacaaccataaattttcaaggtttgcaccaactgaggaattaacatcagggttttatgattcatttctgtcagctttaaaagatctgcaccacgaaatcgatctgaacaatgaaaagatagctctgagaagcaaatatactgtcatttgtatatatgcaaaacaattccatgatcttcggaagatgtgctgcccatcagaacttgcatatatttcgtcaataagccgctgcaaaaactggaatgcacagggtggaaagagtaaggttttctttgcgaaatcaatggatgacagatttatcataaaacaaatcaagaagactgaatttgactcgttcttaaagtttggtcttgagtactttaagcattttggtgcatctcaggtttcaagcaaccctacttgtcttgcgaaaattctaggaatatatcaggttaaggaaactaggaatggcaaggagacaagggttaacttcatggttatggaaaatcttctgtttggacataatatactacgcagatatgatctgaagggtgctcttttctcacgatatattcctgattcagaaaattctgaaaaggtactgttggatcaaaattttattgaagacatgcgtaccatgccaatctacattcaaggaaaaactaaaaacctcatggaacgcgctatttggaacgacacatctttcctaagtaacatgaatgtcatggattactccttgcttgttggagttgacaaagagaagaaagagcttgtatttggaattatagattatttgagacaatatacctgggacaaacagctggaatcttgggtgaagacatctcttgttgttccaaagaatctatccccaactgtaattttacctagggagtacaaaatgagattcagggcctttatgtcacaatactttctatcagttccagatgcttgagtcttgaggcccaatcattttctggtattggtgaccgaacatatcttgagttaggacttcggagatcatgttgccgatggttatttccctatccagtgagcagtacggcatattggcatcatgttttgagcattgaaattttcccatagtttcattgttgtgtgtgtctatccttgtccattttccttctcagcagttgtgtacatagtagcagctaggacacctgggaagtgcaaattttaagcaaacgaacggtgatggacgcacaaatagcctagtcattgttttttattgagttaattagggtggagatctttccaaaaaaagggtggagatcaaggtctgtaggggtagaggagcatgtaatgtactccggtttgtgtttatcggaatatattcctgaagtttaaagttagattaaagattcagcttttttactttaatcaaattactagcaaaggtttatcatagcagcatttgtgtgacgaacattacttgtggcatggcagacatagacacaatatcattgtccaacatagatacaatatcgtcgaatgctacttcgtcaggcgaatgtatgtc

SEQ ID NO: 35904 - DNA, 5894 bp, Zea Mays
ctatatttagctgtttccgtccccattcctcctctcttcttcccgtttcaaaatcgcgtccaatttaaacagcaaaatcccacacatcaagccatcgaatcccgcggctcttggattcatcccttccctcccctcttgttctccgccatatgtgaaccggtgaacgggtgtgcgtgtgtctatcgaggctttcggtgggcgtattcgctccggtggatttggaatcgtgccttctcggcgcgcacaagtggcatgctagcacaataatgcagtgaagttgtgtcatgagtaaaatgtgtcacgcatgtgcatcagaggagacaaccatgaatgaagctaatatcgacctggcctgcagtacgtcttgctgcaagatgtgtgattatggtgagggatcatcaattgttaccagcgagatcaactggctggccatggactcgagcccttacagcactccttacggcacccctgttttttcccgagaaaattctttctcaagctttgccagttgcttttcaagccttggtgactctctaacagattctgattctgaagaggagattgagctccaagatactggtcaattttatcatgataccatattaattaaagattttatggagcaagaagagagttttgtgcgagtggaagaatgtcaatttaaggatattgctgatgactgtgctattttttccattccaataaaccaatatatttcatctgctgagcaacagctggagagacatgaagactccaacaagggaaattttgataccattaatatttcattggattcagatatatcttatgaacagagaaaagacatcctgtccgatgataaacatgtaagaacgaaatgtgctgtaccagtggaagatattgatcataaagaatcaggtgctatagttgttgaacagatcactagccttcccatgccaggtggtgatattttcccattgaatgaacaagttatggatggactcagcagtaccttggaaaatacaatagtatataacaatatattgaataccgaacctgaaatgaaacatggtactcactttgaaaatgaaaatgaatgcctgtacccactagctttgcctagttttgaagcagatcctctcatttggttaccaccggagccagaaaataatgaagatgactttgatactgtttctaatgatgacgacgagagtggcaataacagcactgggtggggtaggtcaagtttcaaggttaacttagcagagagaaacaaggaaagccgcgacgaccaattgcagaaagtaatgtcagaagtaatgaatggacaattcaagatcctagtaagtcgattcttggctgctgaagggctctctttatctgatggaggcacagataaaaactggcttgatattgttgcatcattgtcatgggatgctgcactacgtgtaaaacctgaagccaattccggaaatgcaatggatcctggttcgtatgtgaaggtgaaatgtttagcttcaggatcttaccagcagagtgatcaatggtcttgtttttaagaagagtgctgcacataaacagatgcgtgccaatgtaaaacatccaaaactgctacttcttcagggcgcccttggccattcgtcaacggggctatcatcaataaattcgatgaaacaggaaaacgatcagctggagagaactctttatgaagtgatagtcaaatgccagcttgatgttatattggtcgagaaagcagtttcccgtaatgtaaacgaatatattcagaaacaaggagttacggtagtaagtgacatgaatacccatcggttggaaagaattgctcgctgcattggctctccaattctatctttgcagagtgttcttatgaaacccagtcttattaagcagtgtgaatctctccattttgaaaagtttgttgaagagcataatattactggagaagatggaaaaaaatcatgcaaaacatttttatttctagagggttttccaagacctctgggatgcacgatactgctgaaaggagcaacaagggaagaacttaagaagattaagcgtgtgcttcatttcactgtctttgcagcttaccatttgatccttgaaacttcattctttgccgatcaaaaattgtttacgacagacaaaactaccacagggaaagagaagtgctttaaaactaatcaacagctgcttggttcctgttatgataattcaaaaaacagtgacaccatgaataacacaccaacttgtgatgatcagtatcctaatcaggaaaagcttattcatactgaaaaatctgtaccattgcatcttcatgattccaaaactatggcatctgaagattctgctggtgaagagcatattgacagcaaaggcattcagtcatattcatccctgcctgtttcagatccctcgacaaattttatgcaggacatgccatcaccagattgtgctgagtcaaaaatatctggtggttttgatggctcaacattcactgatacttccaaagaggtgcagaagaaggaattgtctagtgacaattttcagggaacttttgatgtaatttgtgctgagagtggagctgctttgaacactcaggatatcttggtatcaatgtctagccaacatatcaggaaccaagctgtttgtgagcagagtcacctgtcgcggataacttattatgggtattttgatacatcccttggacgatatttgcaagatactttacttaatgagaaacacagctgcctatcatgtggtgaatctccagaatctcacatgtactcttatacccaccataatggtactctaactgttcttgtgaaaagacttcccttggagttgacactttctggtgagactcaaggaagaatttggatgtggaccagatgtttgagatgcaatgctaagccgacccatagggttataatatcttcctctgcacgtaatctgtcgtttggaaagttcttggaactcagcttctcaacccactctgctaccaagaagctaccaacatgtgggcatttgcttcatagagactgcctacgtttctttggatttggatccagagttgctatgttcatatactcatctgtagaaatatattctgcttgtaagcctccattgagtttggagttcaataaccgaaacaaaaatgattggcttgacattgaagtgaagaatccaattgcatacttgcatgctaacatcattctattctttaaggtccttcttaaatggaagcagttatttacaacaattgaaaatgtaatacaagacttgagatcaagatactctagtcaagccatgggggaagacaccaacgtttcagtagatgaggatgaggggttacttttggaggtgtccaggatgcttacacaagagaaaaataaagttgaggtaatcgtcctgcatcaattctattcttctatgtattagctgatttccttatgcaaaaggtttaagattattttttggtatgttaacatttcctctgcatacaaggtttctctgagggagtttagccgaattgccatacctgagagttttgcacatgggatccttggtttgaactggttgtaccagcaacttcttcttgggttctacatttgggatcttcggttgcttcatattctgcagtacactaaagttaatactgcatcttcagacaattccattcatgaaagcacagcaaagaatgaaccgaagagttcagcaagtattgcaatccaggacacaccatcactaaaggaaattggaacagaaagaaaggaagcaactataaattcttctggcaactttgatgatccatttgggtgatacaatgttggataaggttcaccttactgctaaattaataaccaaagagaaagagcacgatttgctcaattatcaagaccatgatgtaaaatcagctctttcctctctaggcgaagctgctgatcagtttgaaacgattgctaatgttaattgttcagagaaattaaacactataccatttatgaatgatgaacaacctgcagcatccaatgtattgcatcatgttgtcattccaagtgacgatgaaggaaaatggttctggaatcaatttaatcaattggaaatggaatacaagaaagaacttgaaggtggttctttgtataaattttacctcatcaacaaatacaccccatgctcttcaccattggcacaattaaaacatcaaatggacttggggcattttatagctggccatggtggtaatatcttttcaatttctgaggaagaggcttctagcattattgcttatgctctaattatatctgaacaacaagggttctattatgaagctgcatctagtaacttggataaaaatgcttctatgctgccatccatgtcgtctccaaatgagtctttcgaaaacaaccataaattttcaaggtttgcaccaactgaggaattaacatcagggttttatgattcatttctgtcagctttaaaagatctgcaccacgaaatcgatctgaacaatgaaaagatagctctgagaagcaaatatactgtcatttgtatatatgcaaaacaattccatgatcttcggaagatgtgctgcccatcagaacttgcatatatttcgtcaataagccgctgcaaaaactggaatgcacagggtggaaagagtaaggttttctttgcgaaatcaatggatgacagatttatcataaaacaaatcaagaagactgaatttgactcgttcttaaagtttggtcttgagtactttaagcattttggtgcatctcaggtttcaagcaaccctacttgtcttgcgaaaattctaggaatatatcaggaatggcaaggagacaagggttaacttcatggttatggaaaatcttctgtttggacataatatactacgcagatatgatctgaagggtgctcttttctcacgatatattcctgattcagaaaattctgaaaaggtactgttggatcaaaattttattgaagacatgcgtaccatgccaatctacattcaaggaaaaactaaaaacctcatggaacgcgctatttggaacgacacatctttcctaagtaacatgaatgtcatggattactccttgcttgttggagttgacaaagagaagaaagagcttgtatttggaattatagattatttgagacaatatacctgggacaaacagctggaatcttgggtgaagacatctcttgttgttccaaagaatctatccccaactgtaattttacctagggagtacaaaatgagattcagggcctttatgtcacaatactttctatcagttccagatgcttgagtcttgaggcccaatcattttctggtattggtgaccgaacatatcttgagttaggacttcggagatcatgttgccgatggttatttccctatccagtgagcagtacggcatattggcatcatgttttgagcattgaaattttcccatagtttcattgttgtgtgtgtctatccttgtccattttccttctcagcagttgtgtacatagtagcagctaggacacctgggaagtgcaaattttaagcaaacgaacggtgatggacgcacaaatagcctagtcattgttttttattgagttaattagggtggagatctttccaaaaaaagggtggagatcaaggtctgtaggggtagaggagcatgtaatgtactccggtttgtgtttatcggaatatattcctgaagtttaaagttagattaaagattcagcttttttactttaatcaaattactagcaaaggtttatcatagcagcatttgtgtgacgaacattacttgtggcatggcagacatagacacaatatcattgtccaacatagatacaatatcgtcgaatgctacttcgtcaggcgaatgtatgtc

SEQ ID NO: 35905 - DNA, 5860 bp, Zea Mays
agtacccctatatttagctgtttccgtccccattcctcctctcttcttcccgtttcaaaatcgcgtccaatttaaacagcaaaatcccacacatcaagccatcgaatcccgcggctcttggattcatcccttccctcccctcttgttctccgccatatgtgaaccggtgaacgggtgtgcgtgtgtctatcgaggctttcggtgggcgtattcgctccggtggatttggaatcgtgccttctcggcgcgcacaagtggcatgctagcacaataatgcagtgaagttgtgtcatgagtaaaatgtgtcacgcatgtgcatcagaggagacaaccatgaatgaagctaatatcgacctggcctgcagtacgtcttgctgcaagatgtgtgattatggtgagggatcatcaattgttaccagcgagatcaactggctggccatggactcgagcccttacagcactccttacggcacccctgttttttcccgagaaaattctttctcaagctttgccagttgcttttcaagccttggtgactctctaacagattctgattctgaagaggagattgagctccaagatactggtcaattttatcatgataccatattaattaaagattttatggagcaagaagagagttttgtgcgagtggaagaatgtcaatttaaggatattgctgatgactgtgctattttttccattccaataaaccaatatatttcatctgctgagcaacagctggagagacatgaagactccaacaagggaaattttgataccattaatatttcattggattcagatatatcttatgaacagagaaaagacatcctgtccgatgataaacatgtaagaacgaaatgtgctgtaccagtggaagatattgatcataaagaatcaggtgctatagttgttgaacagatcactagccttcccatgccaggtggtgatattttcccattgaatgaacaagttatggatggactcagcagtaccttggaaaatacaatagtatataacaatatattgaataccgaacctgaaatgaaacatggtactcactttgaaaatgaaaatgaatgcctgtacccactagctttgcctagttttgaagcagatcctctcatttggttaccaccggagccagaaaataatgaagatgactttgatactgtttctaatgatgacgacgagagtggcaataacagcactgggtggggtaggtcaagtttcaaggttaacttagcagagagaaacaaggaaagccgcgacgaccaattgcagaaagtaatgtcagaagtaatgaatggacaattcaagatcctagtaagtcgattcttggctgctgaagggctctctttatctgatggaggcacagataaaaactggcttgatattgttgcatcattgtcatgggatgctgcactacgtgtaaaacctgaagccaattccggaaatgcaatggatcctggttcgtatgtgaaggtgaaatgtttagcttcaggatcttaccagcagagtgaagtgatcaatggtcttgtttttaagaagagtgctgcacataaacagatgcgtgccaatgtaaaacatccaaaactgctacttcttcagggcgcccttggccattcgtcaacggggctatcatcaataaattcgatgaaacaggaaaacgatcagctggagagaactctttatgaagtgatagtcaaatgccagcttgatgttatattggtcgagaaagcagtttcccgtaatgtaaacgaatatattcagaaacaaggagttacggtaagtgttcttatgaaacccagtcttattaagcagtgtgaatctctccattttgaaaagtttgttgaagagcataatattactggagaagatggaaaaaaatcatgcaaaacatttttatttctagagggttttccaagacctctgggatgcacgatacctcagcaaattagcgctatcccaaatgtgtgtaccttgcccctattagagtgcatgcaagaaatcgtaaaaggccccgagcgattcttggtcgtgtgtttgagcgcgtccatccccacaccgcacatacacgcgattcgtccggcgcccatgcgaatactgctgaaaggagcaacaagggaagaacttaagaagattaagcgtgtgcttcatttcactgtctttgcagcttaccatttgatccttgaaacttcattctttgccgatcaaaaattgtttacgacagacaaaactaccacagggaaagagaagtgctttaaaactaatcaacagctgcttggttcctgttatgataattcaaaaaacagtgacaccatgaataacacaccaacttgtgatgatcagtatcctaatcaggaaaagcttattcatactgaaaaatctgtaccattgcatcttcatgattccaaaactatggcatctgaagattctgctggtgaagagcatattgacagcaaaggcattcagtcatattcatccctgcctgtttcagatccctcgacaaattttatgcaggacatgccatcaccagattgtgctgagtcaaaaatatctggtggttttgatggctcaacattcactgatacttccaaagaggtgcagaagaaggaattgtctagtgacaattttcagggaacttttgatgtaatttgtgctgagagtggagctgctttgaacactcaggatatcttggtatcaatgtctagccaacatatcaggaaccaagctgtttgtgagcagagtcacctgtcgcggataacttattatgggtattttgatacatcccttggacgatatttgcaagatactttacttaatgagaaacacagctgcctatcatgtggtgaatctccagaatctcacatgtactcttatacccaccataatggtactctaactgttcttgtgaaaagacttcccttggagttgacactttctggtgagactcaaggaagaatttggatgtggaccagatgtttgagatgcaatgctaagccgacccatagggttataatatcttcctctgcacgtaatctgtcgtttggaaagttcttggaactcagcttctcaacccactctgctaccaagaagctaccaacatgtgggcatttgcttcatagagactgcctacgtttctttggatttggatccagagttgctatgttcatatactcatctgtagaaatatattctgcttgtaagcctccattgagtttggagttcaataaccgaaacaaaaatgattggcttgacattgaagtgaagaatgtccttcttaaatggaagcagttatttacaacaattgaaaatgtaatacaagacttgagatcaagatactctagtcaagccatgggggaagacaccaacgtttcagtagatgaggatgaggggttacttttggaggtgtccaggatgcttacacaagagaaaaataaagttgaggtttctctgagggagtttagccgaattgccatacctgagagttttgcacatgggatccttggtttgaactggttgtaccagcaacttcttcttgggttctacatttgggatcttcggttgcttcatattctgcagtacactaaagttaatactgcatcttcagacaattccattcatgaaagcacagcaaagaatgaaccgaagagttcagcaagtattgcaatccaggacacaccatcactaaaggaaattggaacagaaagaaaggaagcaactataaattcttctggcaactttgatgatccatttgggtgatacaatgttggataaggttcaccttactgctaaattaataaccaaagagaaagagcacgatttgctcaattatcaagaccatgatgtaaaatcagctctttcctctctaggcgaagctgctgatcagtttgaaacgattgctaatgttaattgttcagagaaattaaacactataccatttatgaatgatgaacaacctgcagcatccaatgtattgcatcatgttgtcattccaagtgacgatgaaggaaaatggttctggaatcaatttaatcaattggaaatggaatacaagaaagaacttgaaggtggttctttgtataaattttacctcatcaacaaatacaccccatgctcttcaccattggcacaattaaaacatcaaatggacttggggcattttatagctggccatggtggtaatatcttttcaatttctgaggaagaggcttctagcattattgcttatgctctaattatatctgaacaacaagggttctattatgaagctgcatctagtaacttggataaaaatgcttctatgctgccatccatgtcgtctccaaatgagtctttcgaaaacaaccataaattttcaaggtttgcaccaactgaggaattaacatcagggttttatgattcatttctgtcagctttaaaagatctgcaccacgaaatcgatctgaacaatgaaaagatagctctgagaagcaaatatactgtcatttgtatatatgcaaaacaattccatgatcttcggaagatgtgctgcccatcagaacttgcatatatttcgtcaataagccgctgcaaaaactggaatgcacagggtggaaagagtaaggttttctttgcgaaatcaatggatgacagatttatcataaaacaaatcaagaagactgaatttgactcgttcttaaagtttggtcttgagtactttaagcattttggtgcatctcaggtttcaagcaaccctacttgtcttgcgaaaattctaggaatatatcaggttaaggaaactaggaatggcaaggagacaagggttaacttcatggttatggaaaatcttctgtttggacataatatactacgcagatatgatctgaagggtgctcttttctcacgatatattcctgattcagaaaattctgaaaaggtactgttggatcaaaattttattgaagacatgcgtaccatgccaatctacattcaaggaaaaactaaaaacctcatggaacgcgctatttggaacgacacatctttcctaagtaacatgaatgtcatggattactccttgcttgttggagttgacaaagagaagaaagagcttgtatttggaattatagattatttgagacaatatacctgggacaaacagctggaatcttgggtgaagacatctcttgttgttccaaagaatctatccccaactgtaattttacctagggagtacaaaatgagattcagggcctttatgtcacaatactttctatcagttccagatgcttgagtcttgaggcccaatcattttctggtattggtgaccgaacatatcttgagttaggacttcggagatcatgttgccgatggttatttccctatccagtgagcagtacggcatattggcatcatgttttgagcattgaaattttcccatagtttcattgttgtgtgtgtctatccttgtccattttccttctcagcagttgtgtacatagtagcagctaggacacctgggaagtgcaaattttaagcaaacgaacggtgatggacgcacaaatagcctagtcattgttttttattgagttaattagggtggagatctttccaaaaaaagggtggagatcaaggtctgtaggggtagaggagcatgtaatgtactccggtttgtgtttatcggaatatattcctgaagtttaaagttagattaaagattcagcttttttactttaatcaaattactagcaaaggtttatcatagcagcatttgtgtgacgaacattacttgtggcatggcagacatagacacaatatcattgtccaacatagatacaatatcgtcgaatgctacttcgtcaggcgaatgtatgtc

SEQ ID NO: 35906 - DNA, 5734 bp, Zea Mays
ccactaccccagtacccctatatttagctgtttccgtccccattcctcctctcttcttcccgtttcaaaatcgcgtccaatttaaacagcaaaatcccacacatcaagccatcgaatcccgcggctcttggattcatcccttccctcccctcttgttctccgccatatgtgaaccggtgaacgggtgtgcgtgtgtctatcgaggctttcggtgggcgtattcgctccggtggatttggaatcgtgccttctcggcgcgcacaagtggcatgctagcacaataatgcagtgaagttgtgtcatgagtaaaatgtgtcacgcatgtgcatcagaggagacaaccatgaatgaagctaatatcgacctggcctgcagtacgtcttgctgcaagatgtgtgattatggtgagggatcatcaattgttaccagcgagatcaactggctggccatggactcgagcccttacagcactccttacggcacccctgttttttcccgagaaaattctttctcaagctttgccagttgcttttcaagccttggtgactctctaacagattctgattctgaagaggagattgagctccaagatactggtcaattttatcatgataccatattaattaaagattttatggagcaagaagagagttttgtgcgagtggaagaatgtcaatttaaggatattgctgatgactgtgctattttttccattccaataaaccaatatatttcatctgctgagcaacagctggagagacatgaagactccaacaagggaaattttgataccattaatatttcattggattcagatatatcttatgaacagagaaaagacatcctgtccgatgataaacatgtaagaacgaaatgtgctgtaccagtggaagatattgatcataaagaatcaggtgctatagttgttgaacagatcactagccttcccatgccaggtggtgatattttcccattgaatgaacaagttatggatggactcagcagtaccttggaaaatacaatagtatataacaatatattgaataccgaacctgaaatgaaacatggtactcactttgaaaatgaaaatgaatgcctgtacccactagctttgcctagttttgaagcagatcctctcatttggttaccaccggagccagaaaataatgaagatgactttgatactgtttctaatgatgacgacgagagtggcaataacagcactgggtggggtaggtcaagtttcaaggttaacttagcagagagaaacaaggaaagccgcgacgaccaattgcagaaagtaatgtcagaagtaatgaatggacaattcaagatcctagtaagtcgattcttggctgctgaagggctctctttatctgatggaggcacagataaaaactggcttgatattgttgcatcattgtcatgggatgctgcactacgtgtaaaacctgaagccaattccggaaatgcaatggatcctggttcgtatgtgaaggtgaaatgtttagcttcaggatcttaccagcagagatgcgtgccaatgtaaaacatccaaaactgctacttcttcagggcgcccttggccattcgtcaacggggctatcatcaataaattcgatgaaacaggaaaacgatcagctggagagaactctttatgaagtgatagtcaaatgccagcttgatgttatattggtcgagaaagcagtttcccgtaatgtaaacgaatatattcagaaacaaggagttacggtagtaagtgacatgaatacccatcggttggaaagaattgctcgctgcattggctctccaattctatctttgcagagtgttcttatgaaacccagtcttattaagcagtgtgaatctctccattttgaaaagtttgttgaagagcataatattactggagaagatggaaaaaaatcatgcaaaacatttttatttctagagggttttccaagacctctgggatgcacgatactgctgaaaggagcaacaagggaagaacttaagaagattaagcgtgtgcttcatttcactgtctttgcagcttaccatttgatccttgaaacttcattctttgccgatcaaaaattgtttacgacagacaaaactaccacagggaaagagaagtgctttaaaactaatcaacagctgcttggttcctgttatgataattcaaaaaacagtgacaccatgaataacacaccaacttgtgatgatcagtatcctaatcaggaaaagcttattcatactgaaaaatctgtaccattgcatcttcatgattccaaaactatggcatctgaagattctgctggtgaagagcatattgacagcaaaggcattcagtcatattcatccctgcctgtttcagatccctcgacaaattttatgcaggacatgccatcaccagattgtgctgagtcaaaaatatctggtggttttgatggctcaacattcactgatacttccaaagaggtgcagaagaaggaattgtctagtgacaattttcagggaacttttgatgtaatttgtgctgagagtggagctgctttgaacactcaggatatcttggtatcaatgtctagccaacatatcaggaaccaagctgtttgtgagcagagtcacctgtcgcggataacttattatgggtattttgatacatcccttggacgatatttgcaagatactttacttaatgagaaacacagctgcctatcatgtggtgaatctccagaatctcacatgtactcttatacccaccataatggtactctaactgttcttgtgaaaagacttcccttggagttgacactttctggtgagactcaaggaagaatttggatgtggaccagatgtttgagatgcaatgctaagccgacccatagggttataatatcttcctctgcacgtaatctgtcgtttggaaagttcttggaactcagcttctcaacccactctgctaccaagaagctaccaacatgtgggcatttgcttcatagagactgcctacgtttctttggatttggatccagagttgctatgttcatatactcatctgtagaaatatattctgcttgtaagcctccattgagtttggagttcaataaccgaaacaaaaatgattggcttgacattgaagtgaagaatgtccttcttaaatggaagcagttatttacaacaattgaaaatgtaatacaagacttgagatcaagatactctagtcaagccatgggggaagacaccaacgtttcagtagatgaggatgaggggttacttttggaggtgtccaggatgcttacacaagagaaaaataaagttgaggtttctctgagggagtttagccgaattgccatacctgagagttttgcacatgggatccttggtttgaactggttgtaccagcaacttcttcttgggttctacatttgggatcttcggttgcttcatattctgcagtacactaaagttaatactgcatcttcagacaattccattcatgaaagcacagcaaagaatgaaccgaagagttcagcaagtattgcaatccaggacacaccatcactaaaggaaattggaacagaaagaaaggaagcaactataaattcttctggcaactttgatgatccatttgggtgatacaatgttggataaggttcaccttactgctaaattaataaccaaagagaaagagcacgatttgctcaattatcaagaccatgatgtaaaatcagctctttcctctctaggcgaagctgctgatcagtttgaaacgattgctaatgttaattgttcagagaaattaaacactataccatttatgaatgatgaacaacctgcagcatccaatgtattgcatcatgttgtcattccaagtgacgatgaaggaaaatggttctggaatcaatttaatcaattggaaatggaatacaagaaagaacttgaaggtggttctttgtataaattttacctcatcaacaaatacaccccatgctcttcaccattggcacaattaaaacatcaaatggacttggggcattttatagctggccatggtggtaatatcttttcaatttctgaggaagaggcttctagcattattgcttatgctctaattatatctgaacaacaagggttctattatgaagctgcatctagtaacttggataaaaatgcttctatgctgccatccatgtcgtctccaaatgagtctttcgaaaacaaccataaattttcaaggtttgcaccaactgaggaattaacatcagggttttatgattcatttctgtcagctttaaaagatctgcaccacgaaatcgatctgaacaatgaaaagatagctctgagaagcaaatatactgtcatttgtatatatgcaaaacaattccatgatcttcggaagatgtgctgcccatcagaacttgcatatatttcgtcaataagccgctgcaaaaactggaatgcacagggtggaaagagtaaggttttctttgcgaaatcaatggatgacagatttatcataaaacaaatcaagaagactgaatttgactcgttcttaaagtttggtcttgagtactttaagcattttggtgcatctcaggtttcaagcaaccctacttgtcttgcgaaaattctaggaatatatcaggttaaggaaactaggaatggcaaggagacaagggttaacttcatggttatggaaaatcttctgtttggacataatatactacgcagatatgatctgaagggtgctcttttctcacgatatattcctgattcagaaaattctgaaaaggtactgttggatcaaaattttattgaagacatgcgtaccatgccaatctacattcaaggaaaaactaaaaacctcatggaacgcgctatttggaacgacacatctttcctaagtaacatgaatgtcatggattactccttgcttgttggagttgacaaagagaagaaagagcttgtatttggaattatagattatttgagacaatatacctgggacaaacagctggaatcttgggtgaagacatctcttgttgttccaaagaatctatccccaactgtaattttacctagggagtacaaaatgagattcagggcctttatgtcacaatactttctatcagttccagatgcttgagtcttgaggcccaatcattttctggtattggtgaccgaacatatcttgagttaggacttcggagatcatgttgccgatggttatttccctatccagtgagcagtacggcatattggcatcatgttttgagcattgaaattttcccatagtttcattgttgtgtgtgtctatccttgtccattttccttctcagcagttgtgtacatagtagcagctaggacacctgggaagtgcaaattttaagcaaacgaacggtgatggacgcacaaatagcctagtcattgttttttattgagttaattagggtggagatctttccaaaaaaagggtggagatcaaggtctgtaggggtagaggagcatgtaatgtactccggtttgtgtttatcggaatatattcctgaagtttaaagttagattaaagattcagcttttttactttaatcaaattactagcaaaggtttatcatagcagcatttgtgtgacgaacattacttgtggcatggcagacatagacacaatatcattgtccaacatagatacaatatcgtcgaatgctacttcgtcaggcgaatgtatgtc

SEQ ID NO: 35907 - DNA, 5482 bp, Zea Mays
gctcatccaagccactaccccagtacccctatatttagctgtttccgtccccattcctcctctcttcttcccgtttcaaaatcgcgtccaatttaaacagcaaaatcccacacatcaagccatcgaatcccgcggctcttggattcatcccttccctcccctcttgttctccgccatatgtgaaccggtgaacgggtgtgcgtgtgtctatcgaggctttcggtgggcgtattcgctccggtggatttggaatcgtgccttctcggcgcgcacaagtggcatgctagcacaataatgcagtgaagttgtgtcatgagtaaaatgtgtcacgcatgtgcatcagaggagacaaccatgaatgaagctaatatcgacctggcctgcagtacgtcttgctgcaagatgtgtgattatggtgagggatcatcaattgttaccagcgagatcaactggctggccatggactcgagcccttacagcactccttacggcacccctgttttttcccgagaaaattctttctcaagctttgccagttgcttttcaagccttggtgactctctaacagattctgattctgaagaggagattgagctccaagatactggtcaattttatcatgataccatattaattaaagattttatggagcaagaagagagttttgtgcgagtggaagaatgtcaatttaaggatattgctgatgactgtgctattttttccattccaataaaccaatatatttcatctgctgagcaacagctggagagacatgaagactccaacaagggaaattttgataccattaatatttcattggattcagatatatcttatgaacagagaaaagacatcctgtccgatgataaacatgtaagaacgaaatgtgctgtaccagtggaagatattgatcataaagaatcaggtgctatagttgttgaacagatcactagccttcccatgccaggtggtgatattttcccattgaatgaacaagttatggatggactcagcagtaccttggaaaatacaatagtatataacaatatattgaataccgaacctgaaatgaaacatggtactcactttgaaaatgaaaatgaatgcctgtacccactagctttgcctagttttgaagcagatcctctcatttggttaccaccggagccagaaaataatgaagatgactttgatactgtttctaatgatgacgacgagagtggcaataacagcactgggtggggtaggtcaagtttcaaggttaacttagcagagagaaacaaggaaagccgcgacgaccaattgcagaaagtaatgtcagaagtaatgaatggacaattcaagatcctaccaattccggaaatgcaatggatcctggttcgtatgtgaaggtgaaatgtttagcttcaggatcttaccagcagagtgaagtgatcaatggtcttgtttttaagaagagtgctgcacataaacagatgcgtgccaatgtaaaacatccaaaactgctacttcttcagggcgcccttggccattcgtcaacggggctatcatcaataaattcgatgaaacaggaaaacgatcagctggagagaactctttatgaagtgatagtcaaatgccagcttgatgttatattggtcgagaaagcagtttcccgtaatgtaaacgaatatattcagaaacaaggagttacggtaagtgttcttatgaaacccagtcttattaagcagtgtgaatctctccattttgaaaagtttgttgaagagcataatattactggagaagatggaaaaaaatcatgcaaaacatttttatttctagagggttttccaagacctctgggatgcacgatactgctgaaaggagcaacaagggaagaacttaagaagattaagcgtgtgcttcatttcactgtctttgcagcttaccatttgatccttgaaacttcattctttgccgatcaaaaattgtttacgacagacaaaactaccacagggaaagagaagtgctttaaaactaatcaacagctgcttggttcctgttatgataattcaaaaaacagtgacaccatgaataacacaccaacttgtgatgatcagtatcctaatcaggaaaagcttattcatactgaaaaatctgtaccattgcatcttcatgattccaaaactatggcatctgaagattctgctggtgaagagcatattgacagcaaaggcattcagtcatattcatccctgcctgtttcagatccctcgacaaattttatgcaggacatgccatcaccagattgtgctgagtcaaaaatatctggtggttttgatggctcaacattcactgatacttccaaagaggtgcagaagaaggaattgtctagtgacaattttcagggaacttttgatgtaatttgtgctgagagtggagctgctttgaacactcaggatatcttggtatcaatgtctagccaacatatcaggaaccaagctgtttgtgagcagagtcacctgtcgcggataacttattatgggtattttgatacatcccttggacgatatttgcaagatactttacttaatgagaaacacagctgcctatcatgtggtgaatctccagaatctcacatgtactcttatacccaccataatggtactctaactgttcttgtgaaaagacttcccttggagttgacactttctggtgagactcaaggaagaatttggatgtggaccagatgtttgagatgcaatgctaagccgacccatagggttataatatcttcctctgcacgtaatctgtcgtttggaaagttcttggaactcagcttctcaacccactctgctaccaagaagctaccaacatgtgggcatttgcttcatagagactgcctacgtttctttggatttggatccagagttgctatgttcatatactcatctgtagaaatatattctgcttgtaagcctccattgagtttggagttcaataaccgaaacaaaaatgattggcttgacattgaagtgaagaatgtccttcttaaatggaagcagttatttacaacaattgaaaatgtaatacaagacttgagatcaagatactctagtcaagccatgggggaagacaccaacgtttcagtagatgaggatgaggggttacttttggaggtgtccaggatgcttacacaagagaaaaataaagttgaggtttctctgagggagtttagccgaattgccatacctgagagttttgcacatgggatccttggtttgaactggttgtaccagcaacttcttcttgggttctacatttgggatcttcggttgcttcatattctgcagtacactaaagttaatactgcatcttcagacaattccattcatgaaagcacagcaaagaatgaaccgaagagttcagcaagtattgcaatccaggacacaccatcactaaaggaaattggaacagaaagaaaggaagcaactataaattcttctggcaactttgatgatccatttgggtgatacaatgttggataaggttcaccttactgctaaattaataaccaaagagaaagagcacgatttgctcaattatcaagaccatgatgtaaaatcagctctttcctctctaggcgaagctgctgatcagtttgaaacgattgctaatgttaattgttcagagaaattaaacactataccatttatgaatgatgaacaacctgcagcatccaatgtattgcatcatgttgtcattccaagtgacgatgaaggaaaatggttctggaatcaatttaatcaattggaaatggaatacaagaaagaacttgaaggtggttctttgtataaattttacctcatcaacaaatacaccccatgctcttcaccattggcacaattaaaacatcaaatggacttggggcattttatagctggccatggtggtaatatcttttcaatttctgaggaagaggcttctagcattattgcttatgctctaattatatctgaacaacaagggttctattatgaagctgcatctagtaacttggataaaaatgcttctatgctgccatccatgtcgtctccaaatgagtctttcgaaaacaaccataaattttcaaggtttgcaccaactgaggaattaacatcagggttttatgattcatttctgtcagctttaaaagatctgcaccacgaaatcgatctgaacaatgaaaagatagctctgagaagcaaatatactgtcatttgtatatatgcaaaacaattccatgatcttcggaagatgtgctgcccatcagaacttgcatatatttcgtcaataagccgctgcaaaaactggaatgcacagggtggaaagagtttcaagcaaccctacttgtcttgcgaaaattctaggaatatatcaggttaaggaaactaggaatggcaaggagacaagggttaacttcatggttatggaaaatcttctgtttggacataatatactacgcagatatgatctgaagggtgctcttttctcacgatatattcctgattcagaaaattctgaaaaggtactgttggatcaaaattttattgaagacatgcgtaccatgccaatctacattcaaggaaaaactaaaaacctcatggaacgcgctatttggaacgacacatctttcctaagtaacatgaatgtcatggattactccttgcttgttggagttgacaaagagaagaaagagcttgtatttggaattatagattatttgagacaatatacctgggacaaacagctggaatcttgggtgaagacatctcttgttgttccaaagaatctatccccaactgtaattttacctagggagtacaaaatgagattcagggcctttatgtcacaatactttctatcagttccagatgcttgagtcttgaggcccaatcattttctggtattggtgaccgaacatatcttgagttaggacttcggagatcatgttgccgatggttatttccctatccagtgagcagtacggcatattggcatcatgttttgagcattgaaattttcccatagtttcattgttgtgtgtgtctatccttgtccattttccttctcagcagttgtgtacatagtagcagctaggacacctgggaagtgcaaattttaagcaaacgaacggtgatggacgcacaaatagcctagtcattgttttttattgagttaattagggtggagatctttccaaaaaaagggtggagatcaaggtctgtaggggtagaggagcatgtaatgtactccggtttgtgtttatcggaatatattcctgaagtttaaagttagattaaagattcagcttttttactttaatcaaattactagcaaaggtttatcatagcagcatttgtgtgacgaacattacttgtggcatggcagacatagacacaatatcattgtccaacatagatacaatatcgtcgaatgctacttcgtcaggcgaatgtatgtc

SEQ ID NO: 35908 - DNA, 5646 bp, Zea Mays
gctcatccaagccactaccccagtacccctatatttagctgtttccgtccccattcctcctctcttcttcccgtttcaaaatcgcgtccaatttaaacagcaaaatcccacacatcaagccatcgaatcccgcggctcttggattcatcccttccctcccctcttgttctccgccatatgtgaaccggtgaacgggtgtgcgtgtgtctatcgaggctttcggtgggcgtattcgctccggtggatttggaatcgtgccttctcggcgcgcacaagtggcatgctagcacaataatgcagtgaagttgtgtcatgagtaaaatgtgtcacgcatgtgcatcagaggagacaaccatgaatgaagctaatatcgacctggcctgcagtacgtcttgctgcaagatgtgtgattatggtgagggatcatcaattgttaccagcgagatcaactggctggccatggactcgagcccttacagcactccttacggcacccctgttttttcccgagaaaattctttctcaagctttgccagttgcttttcaagccttggtgactctctaacagattctgattctgaagaggagattgagctccaagatactggtcaattttatcatgataccatattaattaaagattttatggagcaagaagagagttttgtgcgagtggaagaatgtcaatttaaggatattgctgatgactgtgctattttttccattccaataaaccaatatatttcatctgctgagcaacagctggagagacatgaagactccaacaagggaaattttgataccattaatatttcattggattcagatatatcttatgaacagagaaaagacatcctgtccgatgataaacatgtaagaacgaaatgtgctgtaccagtggaagatattgatcataaagaatcaggtgctatagttgttgaacagatcactagccttcccatgccaggtggtgatattttcccattgaatgaacaagttatggatggactcagcagtaccttggaaaatacaatagtatataacaatatattgaataccgaacctgaaatgaaacatggtactcactttgaaaatgaaaatgaatgcctgtacccactagctttgcctagttttgaagcagatcctctcatttggttaccaccggagccagaaaataatgaagatgactttgatactgtttctaatgatgacgacgagagtggcaataacagcactgggtggggtaggtcaagtttcaaggttaacttagcagagagaaacaaggaaagccgcgacgaccaattgcagaaagtaatgtcagaagtaatgaatggacaattcaagatcctaccaattccggaaatgcaatggatcctggttcgtatgtgaaggtgaaatgtttagcttcaggatcttaccagcagagtgaagtgatcaatggtcttgtttttaagaagagtgctgcacataaacagatgcgtgccaatgtaaaacatccaaaactgctacttcttcagggcgcccttggccattcgtcaacggggctatcatcaataaattcgatgaaacaggaaaacgatcagctggagagaactctttatgaagtgatagtcaaatgccagcttgatgttatattggtcgagaaagcagtttcccgtaatgtaaacgaatatattcagaaacaaggagttacggtaagtgttcttatgaaacccagtcttattaagcagtgtgaatctctccattttgaaaagtttgttgaagagcataatattactggagaagatggaaaaaaatcatgcaaaacatttttatttctagagggttttccaagacctctgggatgcacgatactgctgaaaggagcaacaagggaagaacttaagaagattaagcgtgtgcttcatttcactgtctttgcagcttaccatttgatccttgaaacttcattctttgccgatcaaaaattgtttacgacagacaaaactaccacagggaaagagaagtgctttaaaactaatcaacagctgcttggttcctgttatgataattcaaaaaacagtgacaccatgaataacacaccaacttgtgatgatcagtatcctaatcaggaaaagcttattcatactgaaaaatctgtaccattgcatcttcatgattccaaaactatggcatctgaagattctgctggtgaagagcatattgacagcaaaggcattcagtcatattcatccctgcctgtttcagatccctcgacaaattttatgcaggacatgccatcaccagattgtgctgagtcaaaaatatctggtggttttgatggctcaacattcactgatacttccaaagaggtgcagaagaaggaattgtctagtgacaattttcagggaacttttgatgtaatttgtgctgagagtggagctgctttgaacactcaggatatcttggtatcaatgtctagccaacatatcaggaaccaagctgtttgtgagcagagtcacctgtcgcggataacttattatgggtattttgatacatcccttggacgatatttgcaagatactttacttaatgagaaacacagctgcctatcatgtggtgaatctccagaatctcacatgtactcttatacccaccataatggtactctaactgttcttgtgaaaagacttcccttggagttgacactttctggtgagactcaaggaagaatttggatgtggaccagatgtttgagatgcaatgctaagccgacccatagggttataatatcttcctctgcacgtaatctgtcgtttggaaagttcttggaactcagcttctcaacccactctgctaccaagaagctaccaacatgtgggcatttgcttcatagagactgcctacgtttctttggatttggatccagagttgctatgttcatatactcatctgtagaaatatattctgcttgtaagcctccattgagtttggagttcaataaccgaaacaaaaatgattggcttgacattgaagtgaagaatccaattgcatacttgcatgctaacatcattctattctttaaggtccttcttaaatggaagcagttatttacaacaattgaaaatgtaatacaagacttgagatcaagatactctagtcaagccatgggggaagacaccaacgtttcagtagatgaggatgaggggttacttttggaggtgtccaggatgcttacacaagagaaaaataaagttgaggtttctctgagggagtttagccgaattgccatacctgagagttttgcacatgggatccttggtttgaactggttgtaccagcaacttcttcttgggttctacatttgggatcttcggttgcttcatattctgcagtacactaaagttaatactgcatcttcagacaattccattcatgaaagcacagcaaagaatgaaccgaagagttcagcaagtattgcaatccaggacacaccatcactaaaggaaattggaacagaaagaaaggaagcaactataaattcttctggcaactttgatgatccatttgggtgatacaatgttggataaggttcaccttactgctaaattaataaccaaagagaaagagcacgatttgctcaattatcaagaccatgatgtaaaatcagctctttcctctctaggcgaagctgctgatcagtttgaaacgattgctaatgttaattgttcagagaaattaaacactataccatttatgaatgatgaacaacctgcagcatccaatgtattgcatcatgttgtcattccaagtgacgatgaaggaaaatggttctggaatcaatttaatcaattggaaatggaatacaagaaagaacttgaaggtggttctttgtataaattttacctcatcaacaaatacaccccatgctcttcaccattggcacaattaaaacatcaaatggacttggggcattttatagctggccatggtggtaatatcttttcaatttctgaggaagaggcttctagcattattgcttatgctctaattatatctgaacaacaagggttctattatgaagctgcatctagtaacttggataaaaatgcttctatgctgccatccatgtcgtctccaaatgagtctttcgaaaacaaccataaattttcaaggtttgcaccaactgaggaattaacatcagggttttatgattcatttctgtcagctttaaaagatctgcaccacgaaatcgatctgaacaatgaaaagatagctctgagaagcaaatatactgtcatttgtatatatgcaaaacaattccatgatcttcggaagatgtgctgcccatcagaacttgcatatatttcgtcaataagccgctgcaaaaactggaatgcacagggtggaaagagtaaggttttctttgcgaaatcaatggatgacagatttatcataaaacaaatcaagaagactgaatttgactcgttcttaaagtttggtcttgagtactttaagcattttggtgcatctcaggtttcaagcaaccctacttgtcttgcgaaaattctaggaatatatcaggttaaggaaactaggaatggcaaggagacaagggttaacttcatggttatggaaaatcttctgtttggacataatatactacgcagatatgatctgaagggtgctcttttctcacgatatattcctgattcagaaaattctgaaaaggtactgttggatcaaaattttattgaagacatgcgtaccatgccaatctacattcaaggaaaaactaaaaacctcatggaacgcgctatttggaacgacacatctttcctaagtaacatgaatgtcatggattactccttgcttgttggagttgacaaagagaagaaagagcttgtatttggaattatagattatttgagacaatatacctgggacaaacagctggaatcttgggtgaagacatctcttgttgttccaaagaatctatccccaactgtaattttacctagggagtacaaaatgagattcagggcctttatgtcacaatactttctatcagttccagatgcttgagtcttgaggcccaatcattttctggtattggtgaccgaacatatcttgagttaggacttcggagatcatgttgccgatggttatttccctatccagtgagcagtacggcatattggcatcatgttttgagcattgaaattttcccatagtttcattgttgtgtgtgtctatccttgtccattttccttctcagcagttgtgtacatagtagcagctaggacacctgggaagtgcaaattttaagcaaacgaacggtgatggacgcacaaatagcctagtcattgttttttattgagttaattagggtggagatctttccaaaaaaagggtggagatcaaggtctgtaggggtagaggagcatgtaatgtactccggtttgtgtttatcggaatatattcctgaagtttaaagttagattaaagattcagcttttttactttaatcaaattactagcaaaggtttatcatagcagcatttgtgtgacgaacattacttgtggcatggcagacatagacacaatatcattgtccaacatagatacaatatcgtcgaatgctacttcgtcaggcgaatgtatgtc

SEQ ID NO: 35909 - DNA, 5568 bp, Zea Mays
gctcatccaagccactaccccagtacccctatatttagctgtttccgtccccattcctcctctcttcttcccgtttcaaaatcgcgtccaatttaaacagcaaaatcccacacatcaagccatcgaatcccgcggctcttggattcatcccttccctcccctcttgttctccgccatatgtgaaccggtgaacgggtgtgcgtgtgtctatcgaggctttcggtgggcgtattcgctccggtggatttggaatcgtgccttctcggcgcgcacaagtggcatgctagcacaataatgcagtgaagttgtgtcatgagtaaaatgtgtcacgcatgtgcatcagaggagacaaccatgaatgaagctaatatcgacctggcctgcagtacgtcttgctgcaagatgtgtgattatggtgagggatcatcaattgttaccagcgagatcaactggctggccatggactcgagcccttacagcactccttacggcacccctgttttttcccgagaaaattctttctcaagctttgccagttgcttttcaagccttggtgactctctaacagattctgattctgaagaggagattgagctccaagatactggtcaattttatcatgataccatattaattaaagattttatggagcaagaagagagttttgtgcgagtggaagaatgtcaatttaaggatattgctgatgactgtgctattttttccattccaataaaccaatatatttcatctgctgagcaacagctggagagacatgaagactccaacaagggaaattttgataccattaatatttcattggattcagatatatcttatgaacagagaaaagacatcctgtccgatgataaacatgtaagaacgaaatgtgctgtaccagtggaagatattgatcataaagaatcaggtgctatagttgttgaacagatcactagccttcccatgccaggtggtgatattttcccattgaatgaacaagttatggatggactcagcagtaccttggaaaatacaatagtatataacaatatattgaataccgaacctgaaatgaaacatggtactcactttgaaaatgaaaatgaatgcctgtacccactagctttgcctagttttgaagcagatcctctcatttggttaccaccggagccagaaaataatgaagatgactttgatactgtttctaatgatgacgacgagagtggcaataacagcactgggtggggtaggtcaagtttcaaggttaacttagcagagagaaacaaggaaagccgcgacgaccaattgcagaaagtaatgtcagaagtaatgaatggacaattcaagatcctagtaagtcgattcttggctgctgaagggctctctttatctgatggaggcacagataaaaactggcttgatattgttgcatcattgtcatgggatgctgcactacgtgtaaaacctgaagccaattccggaaatgcaatggatcctggttcgtatgtgaaggtgaaatgtttagcttcaggatcttaccagcagagtgaagtgatcaatggtcttgtttttaagaagagtgctgcacataaacagatgcgtgccaatgtaaaacatccaaaactgctacttcttcagggcgcccttggccattcgtcaacggggctatcatcaataaattcgatgaaacaggaaaacgatcagctggagagaactctttatgaagtgatagtcaaatgccagcttgatgttatattggtcgagaaagcagtttcccgtaatgtaaacgaatatattcagaaacaaggagttacggtagtaagtgacatgaatacccatcggttggaaagaattgctcgctgcattggctctccaattctatctttgcagagtgttcttatgaaacccagtcttattaagcagtgtgaatctctccattttgaaaagtttgttgaagagcataatattactggagaagatggaaaaaaatcatgcaaaacatttttatttctagagggttttccaagacctctgggatgcacgatactgctgaaaggagcaacaagggaagaacttaagaagattaagcgtgtgcttcatttcactgtctttgcagcttaccatttgatccttgaaacttcattctttgccgatcaaaaattgtttacgacagacaaaactaccacagggaaagagaagtgctttaaaactaatcaacagctgcttggttcctgttatgataattcaaaaaacagtgacaccatgaataacacaccaacttgtgatgatcaattctgctggtgaagagcatattgacagcaaaggcattcagtcatattcatccctgcctgtttcagatccctcgacaaattttatgcaggacatgccatcaccagattgtgctgagtcaaaaatatctggtggttttgatggctcaacattcactgatacttccaaagaggtgcagaagaaggaattgtctagtgacaattttcagggaacttttgatgtaatttgtgctgagagtggagctgctttgaacactcaggatatcttggtatcaatgtctagccaacatatcaggaaccaagctgtttgtgagcagagtcacctgtcgcggataacttattatgggtattttgatacatcccttggacgatatttgcaagatactttacttaatgagaaacacagctgcctatcatgtggtgaatctccagaatctcacatgtactcttatacccaccataatggtactctaactgttcttgtgaaaagacttcccttggagttgacactttctggtgagactcaaggaagaatttggatgtggaccagatgtttgagatgcaatgctaagccgacccatagggttataatatcttcctctgcacgtaatctgtcgtttggaaagttcttggaactcagcttctcaacccactctgctaccaagaagctaccaacatgtgggcatttgcttcatagagactgcctacgtttctttggatttggatccagagttgctatgttcatatactcatctgtagaaatatattctgcttgtaagcctccattgagtttggagttcaataaccgaaacaaaaatgattggcttgacattgaagtgaagaatttatttacaacaattgaaaatgtaatacaagacttgagatcaagatactctagtcaagccatgggggaagacaccaacgtttcagtagatgaggatgaggggttacttttggaggtgtccaggatgcttacacaagagaaaaataaagttgaggtttctctgagggagtttagccgaattgccatacctgagagttttgcacatgggatccttggtttgaactggttgtaccagcaacttcttcttgggttctacatttgggatcttcggttgcttcatattctgcagtacactaaagttaatactgcatcttcagacaattccattcatgaaagcacagcaaagaatgaaccgaagagttcagcaagtattgcaatccaggacacaccatcactaaaggaaattggaacagaaagaaaggaagcaactataaattcttctggcaactttgatgatccatttgggtgatacaatgttggataaggttcaccttactgctaaattaataaccaaagagaaagagcacgatttgctcaattatcaagaccatgatgtaaaatcagctctttcctctctaggcgaagctgctgatcagtttgaaacgattgctaatgttaattgttcagagaaattaaacactataccatttatgaatgatgaacaacctgcagcatccaatgtattgcatcatgttgtcattccaagtgacgatgaaggaaaatggttctggaatcaatttaatcaattggaaatggaatacaagaaagaacttgaaggtggttctttgtataaattttacctcatcaacaaatacaccccatgctcttcaccattggcacaattaaaacatcaaatggacttggggcattttatagctggccatggtggtaatatcttttcaatttctgaggaagaggcttctagcattattgcttatgctctaattatatctgaacaacaagggttctattatgaagctgcatctagtaacttggataaaaatgcttctatgctgccatccatgtcgtctccaaatgagtctttcgaaaacaaccataaattttcaaggtttgcaccaactgaggaattaacatcagggttttatgattcatttctgtcagctttaaaagatctgcaccacgaaatcgatctgaacaatgaaaagatagctctgagaagcaaatatactgtcatttgtatatatgcaaaacaattccatgatcttcggaagatgtgctgcccatcagaacttgcatatatttcgtcaataagccgctgcaaaaactggaatgcacagggtggaaagagtttcaagcaaccctacttgtcttgcgaaaattctaggaatatatcaggttaaggaaactaggaatggcaaggagacaagggttaacttcatggttatggaaaatcttctgtttggacataatatactacgcagatatgatctgaagggtgctcttttctcacgatatattcctgattcagaaaattctgaaaaggtactgttggatcaaaattttattgaagacatgcgtaccatgccaatctacattcaaggaaaaactaaaaacctcatggaacgcgctatttggaacgacacatctttcctaagtaacatgaatgtcatggattactccttgcttgttggagttgacaaagagaagaaagagcttgtatttggaattatagattatttgagacaatatacctgggacaaacagctggaatcttgggtgaagacatctcttgttgttccaaagaatctatccccaactgtaattttacctagggagtacaaaatgagattcagggcctttatgtcacaatactttctatcagttccagatgcttgagtcttgaggcccaatcattttctggtattggtgaccgaacatatcttgagttaggacttcggagatcatgttgccgatggttatttccctatccagtgagcagtacggcatattggcatcatgttttgagcattgaaattttcccatagtttcattgttgtgtgtgtctatccttgtccattttccttctcagcagttgtgtacatagtagcagctaggacacctgggaagtgcaaattttaagcaaacgaacggtgatggacgcacaaatagcctagtcattgttttttattgagttaattagggtggagatctttccaaaaaaagggtggagatcaaggtctgtaggggtagaggagcatgtaatgtactccggtttgtgtttatcggaatatattcctgaagtttaaagttagattaaagattcagcttttttactttaatcaaattactagcaaaggtttatcatagcagcatttgtgtgacgaacattacttgtggcatggcagacatagacacaatatcattgtccaacatagatacaatatcgtcgaatgctacttcgtcaggcgaatgtatgtc

SEQ ID NO: 35910 - DNA, 5527 bp, Zea Mays
ttggtccgcacctcccatgttacgcaagcattagctggagcgcgtatatatgcagtctacaacagctcatccaagccactaccccagtacccctatatttagctgtttccgtccccattcctcctctcttcttcccgtttcaaaatcgcgtccaatttaaacagcaaaatcccacacatcaagccatcgaatcccgcggctcttggattcatcccttccctcccctcttgttctccgccatatgtgaaccggtgaacgggtgtgcgtgtgtctatcgaggctttcggtgggcgtattcgctccggtggatttggaatcgtgccttctcggcgcgcacaagtggcatgctagcacaataatgcagtgaagttgtgtcatgagtaaaatgtgtcacgcatgtgcatcagaggagacaaccatgaatgaagctaatatcgacctggcctgcagtacgtcttgctgcaagatgtgtgattatggtgagggatcatcaattgttaccagcgagatcaactggctggccatggactcgagcccttacagcactccttacggcacccctgttttttcccgagaaaattctttctcaagctttgccagttgcttttcaagccttggtgactctctaacagattctgattctgaagaggagattgagctccaagatactggtcaattttatcatgataccatattaattaaagattttatggagcaagaagagagttttgtgcgagtggaagaatgtcaatttaaggatattgctgatgactgtgctattttttccattccaataaaccaatatatttcatctgctgagcaacagctggagagacatgaagactccaacaagggaaattttgataccattaatatttcattggattcagatatatcttatgaacagagaaaagacatcctgtccgatgataaacatgtaagaacgaaatgtgctgtaccagtggaagatattgatcataaagaatcaggtgctatagttgttgaacagatcactagccttcccatgccaggtggtgatattttcccattgaatgaacaagttatggatggactcagcagtaccttggaaaatacaatagtatataacaatatattgaataccgaacctgaaatgaaacatggtactcactttgaaaatgaaaatgaatgcctgtacccactagctttgcctagttttgaagcagatcctctcatttggttaccaccggagccagaaaataatgaagatgactttgatactgtttctaatgatgacgacgagagtggcaataacagcactgggtggggtaggtcaagtttcaaggttaacttagcagagagaaacaaggaaagccgcgacgaccaattgcagaaagtaatgtcagaagtaatgaatggacaattcaagatcctagtaagtcgattcttggctgctgaagggctctctttatctgatggaggcacagataaaaactggcttgatattgttgcatcattgtcatgggatgctgcactacgtgtaaaacctgaagccaattccggaaatgcaatggatcctggttcgtatgtgaaggtgaaatgtttagcttcaggatcttaccagcagagtgaagtgatcaatggtcttgtttttaagaagagtgctgcacataaacagatgcgtgccaatgtaaaacatccaaaactgctacttcttcagggcgcccttggccattcgtcaacggggctatcatcaataaattcgatgaaacaggaaaacgatcagctggagagaactctttatgaagtgatagtcaaatgccagcttgatgttatattggtcgagaaagcagtttcccgtaatgtaaacgaatatattcagaaacaaggagttacggtaagtgttcttatgaaacccagtcttattaagcagtgtgaatctctccattttgaaaagtttgttgaagagcataatattactggagaagatggaaaaaaatcatgcaaaacatttttatttctagagggttttccaagacctctgggatgcacgatactgctgaaaggagcaacaagggaagaacttaagaagattaagcgtgtgcttcatttcactgtctttgcagcttaccatttgatccttgaaacttcattctttgccgatcaaaaattgtttacgacagacaaaactaccacagggaaagagaagtgctttaaaactaatcaacagctgcttggttcctgttatgataattcaaaaaacagtgacaccatgaataacacaccaacttgtgatgatcagtatcctaatcaggaaaagcttattcatactgaaaaatctgtaccattgcatcttcatgattccaaaactatggcatctgaagattctgctggtgaagagcatattgacagcaaaggcattcagtcatattcatccctgcctgtttcagatccctcgacaaattttatgcaggacatgccatcaccagattgtgctgagtcaaaaatatctggtggttttgatggctcaacattcactgatacttccaaagaggtgcagaagaaggaattgtctagtgacaattttcagggaacttttgatgtaatttgtgctgagagtggagctgctttgaacactcaggatatcttggtatcaatgtctagccaacatatcaggaaccaagctgtttgtgagcagagtcacctgtcgcggataacttattatgggtattttgatacatcccttggacgatatttgcaagatactttacttaatgagaaacacagctgcctatcatgtggtgaatctccagaatctcacatgtactcttatacccaccataatggtactctaactgttcttgtgaaaagacttcccttggagttgacactttctggtgagactcaaggaagaatttggatgtggaccagatgtttgagatgcaatgctaagccgacccatagggttataatatcttcctctgcacgtaatctgtcgtttggaaagttcttggaactcagcttctcaacccactctgctaccaagaagctaccaacatgtgggcatttgcttcatagagactgcctacgtttctttggatttggatccagagttgctatgttcatatactcatctgtagaaatatattctgcttgtaagcctccattgagtttggagttcaataaccgaaacaaaaatgattggcttgacattgaagtgaagaatgtccttcttaaatggaagcagttatttacaacaattgaaaatgtaatacaagacttgagatcaagatactctagtcaagccatgggggaagacaccaacgtttcagtagatgaggatgaggggttacttttggaggtgtccaggatgcttacacaagagaaaaataaagttgaggtttctctgagggagtttagccgaattgccatacctgagagttttgcacatgggatccttggtttgaactggttgtaccagcaacttcttcttgggttctacatttgggatcttcggttgcttcatattctgcagtacactaaagttaatactgcatcttcagacaattccattcatgaaagcacagcaaagaatgaaccgaagagttcagcaaagaaattaaacactataccatttatgaatgatgaacaacctgcagcatccaatgtattgcatcatgttgtcattccaagtgacgatgaaggaaaatggttctggaatcaatttaatcaattggaaatggaatacaagaaagaacttgaaggtggttctttgtataaattttacctcatcaacaaatacaccccatgctcttcaccattggcacaattaaaacatcaaatggacttggggcattttatagctggccatggtggtaatatcttttcaatttctgaggaagaggcttctagcattattgcttatgctctaattatatctgaacaacaagggttctattatgaagctgcatctagtaacttggataaaaatgcttctatgctgccatccatgtcgtctccaaatgagtctttcgaaaacaaccataaattttcaaggtttgcaccaactgaggaattaacatcagggttttatgattcatttctgtcagctttaaaagatctgcaccacgaaatcgatctgaacaatgaaaagatagctctgagaagcaaatatactgtcatttgtatatatgcaaaacaattccatgatcttcggaagatgtgctgcccatcagaacttgcatatatttcgtcaataagccgctgcaaaaactggaatgcacagggtggaaagagtaaggttttctttgcgaaatcaatggatgacagatttatcataaaacaaatcaagaagactgaatttgactcgttcttaaagtttggtcttgagtactttaagcattttggtgcatctcaggtttcaagcaaccctacttgtcttgcgaaaattctaggaatatatcaggttaaggaaactaggaatggcaaggagacaagggttaacttcatggttatggaaaatcttctgtttggacataatatactacgcagatatgatctgaagggtgctcttttctcacgatatattcctgattcagaaaattctgaaaaggtactgttggatcaaaattttattgaagacatgcgtaccatgccaatctacattcaaggaaaaactaaaaacctcatggaacgcgctatttggaacgacacatctttcctaagtaacatgaatgtcatggattactccttgcttgttggagttgacaaagagaagaaagagcttgtatttggaattatagattatttgagacaatatacctgggacaaacagctggaatcttgggtgaagacatctcttgttgttccaaagaatctatccccaactgtaattttacctagggagtacaaaatgagattcagggcctttatgtcacaatactttctatcagttccagatgcttgagtcttgaggcccaatcattttctggtattggtgaccgaacatatcttgagttaggacttcggagatcatgttgccgatggttatttccctatccagtgagcagtacggcatattggcatcatgttttgagcattgaaattttcccatagtttcattgttgtgtgtgtctatccttgtccattttccttctcagcagttgtgtacatagtagcagctaggacacctgggaagtgcaaattttaagcaaacgaacggtgatggacgcacaaatagcctagtcattgttttttattgagttaattagggtggagatctttccaaaaaaagggtggagatcaaggtctgtaggggtagaggagcatgtaatgtactccggtttgtgtttatcggaatatattcctgaagtttaaagttagattaaagattcagcttttttactttaatcaaattactagcaaaggtttatcatagcagcatttgtgtgacgaacattacttgtggcatggcagacatagacacaatatcattgtccaacatagatacaatatcgtcgaatgctacttcgtcaggcgaatgtatgtc

SEQ ID NO: 35911 - DNA, 5750 bp, Zea Mays
caaacattggtccgcacctcccatgttacgcaagcattagctggagcgcgtatatatgcagtctacaacagctcatccaagccactaccccagtacccctatatttagctgtttccgtccccattcctcctctcttcttcccgtttcaaaatcgcgtccaatttaaacagcaaaatcccacacatcaagccatcgaatcccgcggctcttggattcatcccttccctcccctcttgttctccgccatatgtgaaccggtgaacgggtgtgcgtgtgtctatcgaggctttcggtgggcgtattcgctccggtggatttggaatcgtgccttctcggcgcgcacaagtggcatgctagcacaataatgcagtgaagttgtgtcatgagtaaaatgtgtcacgcatgtgcatcagaggagacaaccatgaatgaagctaatatcgacctggcctgcagtacgtcttgctgcaagatgtgtgattatggtgagggatcatcaattgttaccagcgagatcaactggctggccatggactcgagcccttacagcactccttacggcacccctgttttttcccgagaaaattctttctcaagctttgccagttgcttttcaagccttggtgactctctaacagattctgattctgaagaggagattgagctccaagatactggtcaattttatcatgataccatattaattaaagattttatggagcaagaagagagttttgtgcgagtggaagaatgtcaatttaaggatattgctgatgactgtgctattttttccattccaataaaccaatatatttcatctgctgagcaacagctggagagacatgaagactccaacaagggaaattttgataccattaatatttcattggattcagatatatcttatgaacagagaaaagacatcctgtccgatgataaacatgtaagaacgaaatgtgctgtaccagtggaagatattgatcataaagaatcaggtgctatagttgttgaacagatcactagccttcccatgccaggtggtgatattttcccattgaatgaacaagttatggatggactcagcagtaccttggaaaatacaatagtatataacaatatattgaataccgaacctgaaatgaaacatggtactcactttgaaaatgaaaatgaatgcctgtacccactagctttgcctagttttgaagcagatcctctcatttggttaccaccggagccagaaaataatgaagatgactttgatactgtttctaatgatgacgacgagagtggcaataacagcactgggtggggtaggtcaagtttcaaggttaacttagcagagagaaacaaggaaagccgcgacgaccaattgcagaaagtaatgtcagaagtaatgaatggacaattcaagatcctagtaagtcgattcttggctgctgaagggctctctttatctgatggaggcacagataaaaactggcttgatattgttgcatcattgtcatgggatgctgcactacgtgtaaaacctgaagccaattccggaaatgcaatggatcctggttcgtatgtgaaggtgaaatgtttagcttcaggatcttaccagcagagtgaagtgatcaatggtcttgtttttaagaagagtgctgcacataaacagatgcgtgccaatgtaaaacatccaaaactgctacttcttcagggcgcccttggccattcgtcaacggggctatcatcaataaattcgatgaaacaggaaaacgatcagctggagagaactctttatgaagtgatagtcaaatgccagcttgatgttatattggtcgagaaagcagtttcccgtaatgtaaacgaatatattcagaaacaaggagttacggtagtaagtgacatgaatacccatcggttggaaagaattgctcgctgcattggctctccaattctatctttgcagagtgttcttatgaaacccagtcttattaagcagtgtgaatctctccattttgaaaagtttgttgaagagcataatattactggagaagatggaaaaaaatcatgcaaaacatttttatttctagagggttttccaagacctctgggatgcacgatactgctgaaaggagcaacaagggaagaacttaagaagattaagcgtgtgcttcatttcactgtctttgcagcttaccatttgatccttgaaacttcattctttgccgatcaaaaattgtttacgacagacaaaactaccacagggaaagagaagtgctttaaaactaatcaacagctgcttggttcctgttatgataattcaaaaaacagtgacaccatgaataacacaccaacttgtgatgatcagtatcctaatcaggaaaagcttattcatactgaaaaatctgtaccattgcatcttcatgattccaaaactatggcatctgaagattctgctggtgaagagcatattgacagcaaaggcattcagtcatattcatccctgcctgtttcagatccctcgacaaattttatgcaggacatgccatcaccagattgtgctgagtcaaaaatatctggtggttttgatggctcaacattcactgatacttccaaagaggtgcagaagaaggaattgtctagtgacaattttcagggaacttttgatgtaatttgtgctgagagtggagctgctttgaacactcaggatatcttggtatcaatgtctagccaacatatcaggaaccaagctgtttgtgagcagagtcacctgtcgcggataacttattatgggtattttgatacatcccttggacgatatttgcaagatactttacttaatgagaaacacagctgcctatcatgtggtgaatctccagaatctcacatgtactcttatacccaccataatggtactctaactgttcttgtgaaaagacttcccttggagttgacactttctggtgagactcaaggaagaatttggatgtggaccagatgtttgagatgcaatgctaagccgacccatagggttataatatcttcctctgcacgtaatctgtcgtttggaaagttcttggaactcagcttctcaacccactctgctaccaagaagctaccaacatgtgggcatttgcttcatagagactgcctacgtttctttggatttggatccagagttgctatgttcatatactcatctgtagaaatatattctgcttgtaagcctccattgagtttggagttcaataaccgaaacaaaaatgattggcttgacattgaagtgaagaatgtccttcttaaatggaagcagttatttacaacaattgaaaatgtaatacaagacttgagatcaagatactctagtcaagccatgggggaagacaccaacgtttcagtagatgaggatgaggggttacttttggaggtgtccaggatgcttacacaagagaaaaataaagttgaggtttctctgagggagtttagccgaattgccatacctgagagttttgcacatgggatccttggtttgaactggttgtaccagcaacttcttcttgggttctacatttgggatcttcggttgcttcatattctgcagtacactaaagttaatactgcatcttcagacaattccattcatgaaagcacagcaaagaatgaaccgaagagttcagcaagtattgcaatccaggacacaccatcactaaaggaaattggaacagaaagaaaggaagcaactataaattcttctggcaactttgatgatccatttgggtgatacaatgttggataaggttcaccttactgctaaattaataaccaaagagaaagagcacgatttgctcaattatcaagaccatgatgtaaaatcagctctttcctctctaggcgaagctgctgatcagtttgaaacgattgctaatgttaattgttcagagaaattaaacactataccatttatgaatgatgaacaacctgcagcatccaatgtattgcatcatgttgtcattccaagtgacgatgaaggaaaatggttctggaatcaatttaatcaattggaaatggaatacaagaaagaacttgaaggtggttctttgtataaattttacctcatcaacaaatacaccccatgctcttcaccattggcacaattaaaacatcaaatggacttggggcattttatagctggccatggtggtaatatcttttcaatttctgaggaagaggcttctagcattattgcttatgctctaattatatctgaacaacaagggttctattatgaagctgcatctagtaacttggataaaaatgcttctatgctgccatccatgtcgtctccaaatgagtctttcgaaaacaaccataaattttcaaggtttgcaccaactgaggaattaacatcagggttttatgattcatttctgtcagctttaaaagatctgcaccacgaaatcgatctgaacaatgaaaagatagctctgagaagcaaatatactgtcatttgtatatatgcaaaacaattccatgatcttcggaagatgtgctgcccatcagaacttgcatatatttcgtcaataagccgctgcaaaaactggaatgcacagggtggaaagagtaaggttttctttgcgaaatcaatggatgacagatttatcataaaacaaatcaagaagactgaatttgactcgttcttaaagtttggtcttgagtactttaagcattttggtgcatctcaggtttcaagcaaccctacttgtcttgcgaaaattctaggaatatatcaggttaaggaaactaggaatggcaaggagacaagggttaacttcatggttatggaaaatcttctgtttggacataatatactacgcagatatgatctgaagggtgctcttttctcacgatatattcctgattcagaaaattctgaaaagaacatgaatgtcatggattactccttgcttgttggagttgacaaagagaagaaagagcttgtatttggaattatagattatttgagacaatatacctgggacaaacagctggaatcttgggtgaagacatctcttgttgttccaaagaatctatccccaactgtaattttacctagggagtacaaaatgagattcagggcctttatgtcacaatactttctatcagttccagatgcttgagtcttgaggcccaatcattttctggtattggtgaccgaacatatcttgagttaggacttcggagatcatgttgccgatggttatttccctatccagtgagcagtacggcatattggcatcatgttttgagcattgaaattttcccatagtttcattgttgtgtgtgtctatccttgtccattttccttctcagcagttgtgtacatagtagcagctaggacacctgggaagtgcaaattttaagcaaacgaacggtgatggacgcacaaatagcctagtcattgttttttattgagttaattagggtggagatctttccaaaaaaagggtggagatcaaggtctgtaggggtagaggagcatgtaatgtactccggtttgtgtttatcggaatatattcctgaagtttaaagttagattaaagattcagcttttttactttaatcaaattactagcaaaggtttatcatagcagcatttgtgtgacgaacattacttgtggcatggcagacatagacacaatatcattgtccaacatagatacaatatcgtcgaatgctacttcgtcaggcgaatgtatgtc

SEQ ID NO: 35912 - DNA, 2057 bp, Zea Mays
ctcttcttcccgtttcaaaatcgcgtccaatttaaacagcaaaatcccacacatcaagccatcgaatcccgcggctcttggattcatcccttccctcccctcttgttctccgccatatgtgaaccggtgaacgggtgtgcgtgtgtctatcgaggctttcggtgggcgtattcgctccggtggatttggaatcgtgccttctcggcgcgcacaagtggcatgctagcacaataatgcagtgaagttgtgtcatgagtaaaatgtgtcacgcatgtgcatcagaggagacaaccatgaatgaagctaatatcgacctggcctgcagtacgtcttgctgcaagatgtgtgattatggtgagggatcatcaattgttaccagcgagatcaactggctggccatggactcgagcccttacagcactccttacggcacccctgttttttcccgagaaaattctttctcaagctttgccagttgcttttcaagccttggtgactctctaacagattctgattctgaagaggagattgagctccaagatactggtcaattttatcatgataccatattaattaaagattttatggagcaagaagagagttttgtgcgagtggaagaatgtcaatttaaggatattgctgatgactgtgctattttttccattccaataaaccaatatatttcatctgctgagcaacagctggagagacatgaagactccaacaagggaaattttgataccattaatatttcattggattcagatatatcttatgaacagagaaaagacatcctgtccgatgataaacatgtaagaacgaaatgtgctgtaccagtggaagatattgatcataaagaatcaggtgctatagttgttgaacagatcactagccttcccatgccaggtggtgatattttcccattgaatgaacaagttatggatggactcagcagtaccttggaaaatacaatagtatataacaatatattgaataccgaacctgaaatgaaacatggtactcactttgaaaatgaaaatgaatgcctgtacccactagctttgcctagttttgaagcagatcctctcatttggttaccaccggagccagaaaataatgaagatgactttgatactgtttctaatgatgacgacgagagtggcaataacagcactgggtggggtaggtcaagtttcaaggttaacttagcagagagaaacaaggaaagccgcgacgaccaattgcagaaagtaatgtcagaagtaatgaatggacaattcaagatcctagtaagtcgattcttggctgctgaagggctctctttatctgatggaggcacagataaaaactggcttgatattgttgcatcattgtcatgggatgctgcactacgtgtaaaacctgaagccaattccggaaatgcaatggatcctggttcgtatgtgaaggtgaaatgtttagcttcaggatcttaccagcagagtgaagtgatcaatggtcttgtttttaagaagagtgctgcacataaacagatgcgtgccaatgtaaaacatccaaaactgctacttcttcagggcgcccttggccattcgtcaacggggctatcatcaataaattcgatgaaacaggaaaacgatcagctggagagaactctttatgaagtgatagtcaaatgccagcttgatgttatattggtcgagaaagcagtttcccgtaatgtaaacgaatatattcagaaacaaggagttacggtagtaagtgacatgaatacccatcggttggaaagaattgctcgctgcattggctctccaattctatctttgcagagtgttcttatgaaacccagtcttattaagcagtgtgaatctctccattttgaaaagtttgttgaagagcataatattactggagaagatggaaaaaaatcatgcaaaacatttttatttctagagggttttccaagacctctgggatgcacggggtggttttgtatcctaacatggagggcaagcacatattttctattgctcctgatggtcattactctgcaaggattg

SEQ ID NO: 35913 - DNA, 1072 bp, Zea Mays
gccaaagctttattcactgggtgcagtgctaaaggtgttcatcaatgtgccgtggtggtatctagccgccaacaagatgatgagcccgttcctcacacagcgcaccaagagcaagttcgtctttgctagcccagccaaatcagcagcgactctattcagatacatcgcaccggaacaagttcctgtccaatttggaggcctcttcaaggaggatgatcctgagttcaccacctctgacactgtctccgagctcactatcaaaccatcctcaaaagaaaccgttgagatccctgtcaccgagaactccacaattgtatgggaactccgggtgctgagttgggaagtgagctatggcgccgagttcacccccgacgcggagggtgggtacaccgtcattgtacagaagacaaggaaggtgcctgctaacgaggaaccgatcatgaagggaagcttcaaggcaggcgagcctggcaaacttgtgctaactgtgaacaaccctgcatccaagaagaagacgctcctttacagatcgaaggtgaagagcaccagcgagtgagtgtgaggtcacgccgctagctgcctgggccctacagttaaaacgatctacagcatgatagaagagagaaggaaccttttggtttggttcgttaatttactgggttttttttttgggttcgcattctacattttgtttggttgaaaccaaagtgagcttgtttttgtgacagtagatgggagaagtataatggcattgtgtgatggatggttgttgatgagggcagggaggacgaaaatgtgggggaatgaaaggttggagaatgtctgttcctctgtagatgtgttctgtacattgcatctcttggattctcattgatatgttaaaatttaggagtacttggtcacatcattattcaatccatgttactctgcatgttcctcttttctcttcgtgtccttttcccttgttaatggaacactgtctgctgccgctcccaccatttatatatatatgctcatttgcagcaacaaggggatgtactcagaagtgacaaataatggccgtgtgatgggc

SEQ ID NO: 35914 - DNA, 2337 bp, Zea Mays
cccgggccgttgcattgcagctgctctggttttggttctcttccagccagccaccgtagagcgcgcagcaaagctggccgcgcagctttcaaagcgttgggagagatggcagaggagacgcaaccagaggccgcagccgccgccgcgcccgccgcggccgaggtagtcgtgaccgaagctgcgccggcggaggcggaggtgcctgtggcggcggaagctgaagccgaggccaaggatgagaagaaaggtgacgaggcggagctcaccgccgatgacgcgggggtggggaccggctcgttcaaggaggaaagcaacctggtggaagacctgcccgacccggagaagaaggcgctcgacgagttcaagcagctgatcgctgccgccctcgccgccggtgagttcaacctgcctcccccgccgccgccgccgaaggccaaggagacgaaggtggaggaagccaaggccgaggagcccgccaaagaagagcccgcggccgaggcggaggctacggcggaggagcccaaggcccaggtggctgcggatgccccggttgaggaggtcaagacggaggtgccgccggccgaggaggccaaggctgagacactggctgaggaagccaagccttccgagcccgagccgcaggagaagaccgtcgtggtcactgaggaggagactgccaccaagacggtggaagcaatcgaggaaaccgtcgtgtccgcccccgccgccatcccggaggaagcagcggcgccagaggcggtggtcgaggctcaggcgaccgcgcctgaacccgtgctgatttggggcgtgccgctggtcggcgacgacgagcgcacggacacggttctgctcaagttcctgcgtgcgcgggagttcaaggtgaaggatgccatggcgatgctcaagtccgcggtgctgtggcgcaagcgcttcggcatcacctcgctcctcgacgccgacctcggcctgacggagctggagaacgtggtgttctaccgcggcacggaccgcgaaggccaccccgtgtgctacaacgtctacggtgagttccaggacaaggatctctacgagaaggccttcggcgacgatgagaagagggagcgcttcctcaagtggcgcatccagctgctggagcgcggcattctgtcgaagctggacttctcgcccagcggcatctgctccatggttcaggttaccgacctcaagaactcgccgcctatgctcggcaagcaccgcgccgtcacccgccaggctgtcacgctgctccaggacaactaccccgagttcattgccaagaaggtgttcatcaatgtgccgtggtggtatctagccgccaacaagatgatgagcccgttcctcacacagcgcaccaagagcaagttcgtctttgctagcccagccaaatcagcagcgactctattcagatacatcgcaccggaacaagttcctgtccaatttggaggcctcttcaaggaggatgatcctgagttcaccacctctgacactgtctccgagctcactatcaaaccatcctcaaaagaaaccgttgagatccctgtcaccgagaactccacaattgtatgggaactccgggtgctgagttgggaagtgagctatggcgccgagttcacccccgacgcggagggtgggtacaccgtcattgtacagaagacaaggaaggtgcctgctaacgaggaaccgatcatgaagggaagcttcaaggcaggcgagcctggcaaacttgtgctaactgtgaacaaccctgcatccaagaagaagacgctcctttacagatcgaaggtgaagagcaccagcgagtgagtgtgaggtcacgccgctagctgcctgggccctacagttaaaacgatctacagcatgatagaagagagaaggaaccttttggtttggttcgttaatttactgggttttttttttgggttcgcattctacattttgtttggttgaaaccaaagtgagcttgtttttgtgacagtagatgggagaagtataatggcattgtgtgatggatggttgttgatgagggcagggaggacgaaaatgtgggggaatgaaaggttggagaatgtctgttcctctgtagatgtgttctgtacattgcatctcttggattctcattgatatgttaaaatttaggagtacttggtcacatcattattcaatccatgttactctgcatgttcctcttttctcttcgtgtccttttcccttgttaatggaacactgtctgctgccgctcccaccatttatatatatatgctcatttgcagcaacaaggggatgtactcagaagtgacaaataatggccgtgtgatgggc

SEQ ID NO: 35915 - DNA, 848 bp, Zea Mays
cgttgtaacgcacgagtatttacctagttattattataaacctcatttttaacgtcttcatttaatagtcgggtcgggtagtcgctacaatttacgtttcgcggtcttttctacgacatgcaacctttagaatagaattattagccaacttaaacaaatctctttttcttttattttgtctgccagtgccacgccatctgaccattttacccttgctctattttttggataatctagaaacgacgatattttccaaggagagcctagttcctttcctttcgcgttagttcgctttgaagccaccaggtgccggacgaacgacatcacgcgcagccgcccccggcgggctcccttccttggcgcctgctatctgctcggcgtccatggtcacaggattgtatggctgtccatgttctcgccgaagcaagtgatgattttgattaaagaaatgtagaacctgggatatgcgctcttcagtttgcacatggtcacaagatttccaacacagagtttgcacatcctgtctgcacatggactcagaagcaacaatacgtcaatacagcagcaatatcgtgtctgcgggactgcacatcagcagcatcctataggttgtcaggttctagtagttacaaatggatcagccgtcatgtcccaaaattgtatgggaaaaagaacgatgtatttagatcatccaaaacaaatagagcaagggtaaaaatatttgtttaagttggctaataattctattctaaacattgccgtagaaaaagactgttttatcgaatcccaaattgaagcgactattacatcaaaaccgtttaaaataaggtttataatagcaaaaaaaa

SEQ ID NO: 35916 - DNA, 851 bp, Zea Mays
cgttgtaacgcacgagtatttacctagttattattataaacctcatttttaacgtcttcatttaatagtcgggtcgggtagtcgctacaatttacgtttcgcggtcttttctacgacatgcaacctttagaatagaattattagccaacttaaacaaatctctttttcttttattttgtctgccagtgccacgccatctgaccattttacccttgctctattttttggataatctagaaacgacgatattttccaaggagagcctagttcctttcctttcgcgttagttcgctttgaagccaccaggtgccggacgaacgacatcacgcgcagccgcccccggcgggctcccttccttggcgcctgaagctatctgctcggcgtccatggtcacaggattgtatggctgtccatgttctcgccgaagcaagtgatgattttgattaaagaaatgtagaacctgggatatgcgctcttcagtttgcacatggtcacaagatttccaacacagagtttgcacatcctgtctgcacatggactcagaagcaacaatacgtcaatacagcagcaatatcgtgtctgcgggactgcacatcagcagcatcctataggttgtcaggttctagtagttacaaatggatcagccgtcatgtcccaaaattgtatgggaaaaagaacgatgtatttagatcatccaaaacaaatagagcaagggtaaaaatatttgtttaagttggctaataattctattctaaacattgccgtagaaaaagactgttttatcgaatcccaaattgaagcgactattacatcaaaaccgtttaaaataaggtttataatagcaaaaaaaa

SEQ ID NO: 35917 - DNA, 1647 bp, Zea Mays
ctccccttcttgttagtcttcgaaggcagacaccagctccgggactggctccggcactgtgggcagcaccgggtagttccgtgagaagcaggcgtcacagaactcatgtgcttcattgccgtagatgctgtggagcttgtcgagagagaggaaggcgagcgagtcgcagccaatggtcctcctcacaccctcgaggtccatcctgttggatatcagctcgccttcgctcggcgtgtcgatgccgtagaggcaggacccgacgactggggggctggagatgcgcatgtgcacctcgcgcgcgccggcatcgcggagcaggcgcacaatcttgctagaggtggtgccgcgcacgagcgagtcgtcgacgacgaccacgctcttgccggtaatgacgccgcgcacgggcgcgagtttgagcttgacggcaaggtcacggattgcctgcgatggctgtatgaagctgcggccgctgtagtgccaccggataagaccttgctggaactcgagtcccgacgcctgcgcgaagccgagcgccgcatagaaccccgagtcaggcacggggatgacgacgtccgcggtcggggcgggcgactcctcggcgagcgcgcggccgtacgcggtgcggcgctcgtggacggcgtgcccaaacacgacggagttgggaagggcgaagtagatgtgctcgaacacgcatgacttgcgcgggcgatgtgggacgaggcaggcgtaggacaccgacatgtcgcggcggtccacgaccaccacctccccgggctccacctcgcgctcataggtggcgtcgatgaggtcgagcgcgcaggtctctgacgagaacaccacggcgccgttggggcgtcggcccatcaccaggggccggaagccgaacggatcgcgcacggcaaaaagcttgtcggcagtcatgaacaacagcgagtacgcaccggcgaggcgctcgcaggcgtcgcagatgcgcgagagcagcgggcgcgagagcgaggttgagatgaggtgcaggatgacctccgtgtccgacgaggtgttgaagatggaaccctgcgcctcgagtttgttgcgcagcgcctggtagttcacgaggttgccgttgtgtgccacagccaactgcccgaatcggtacgcggcgaggaacggttgtacgttgcgcctcgaagaggcgccggcggttgagtagcgcacgtggccgatggcggcgtttccggggagcttggcgaggcgcgccggatcgcggaaaacgtccccgacaagacccaggtccgtcactgaattgagcttgccgtcggcgtccgacgcaacgatgcccgcgccctcctccccgcggtgctgcagcttctgcaggccgaggtagcagagcgacgacgcgtctgggtcgccaatgactccgaacacgccgcactcctctcggggatggtcgtcgccgtccgcgtcgaaggaaaacggcgtgacgcggtcagggagcagagctcgcgccggagcgagacccgcggcgcggtgccgcagctcgaactgcgagggcttgatggagcatttgagctgggagttgtgtcttgtggtaggcgccgcagaggctcggcggcggaggggagaggaaggcgtggaggccgtcgcggcggcggcggctgtggcggccat

SEQ ID NO: 35918 - DNA, 1223 bp, Zea Mays
ccgaaacagaaggtaggatcagggcatccgtaagaagtagggcaaagatttcaaggaccaaatctgaacatgtcaaatgcttgtaccccaacagaaaaccagctttgagtcaatgtattataatacaaagaagaccacaagcagctacatcagatgagcagcaacactgccaaatccgtgtttgttttggctactattaaatcataaacggaccatgtcaacatcatgtcattctgcttaccattgaatgccttcttgaatgcaaatcaacatgtaaacaaagactcatcggaagacaggcaattggcatgaagtatgccctcactccgtcctaaattataagttttttccaactttgagggagagtcaaagcatcttaatgttgaccgaatttatataataaaacaataacatttatgatattaaataagtattattagatcttttttaatcatattttcatagtatgcctatttgtttgagattataatttgcccagattatataatctaacttattttgaactaagtgttagttcaaaataagttggatcatataatatatgcatctcaaacagccttgatgtcgtgaatctttgtaattctcttaacttcggctaaattaaggtgttttcactctccaaaagagttgaaatcacttaaaattcagaactatgggagtagtattgtagtcagtcctgattacaatgtgtagggtatcataccactagtgctagtctagtgcagcaaggtcctaggaattccttgcttgccttgggacattaagaaaatttagaaaatatatgtagcatatactattcgcggtccaatgcaacaatacctaggaaaaggcacttcactagtgattcaggttggcgcattttatggacagcccaacccaactctagaaaaaggatcacgaactctggtgatgcaaactttgcaacgaattcgtagaagctaagaattttgaaaagctagacaattgcattccttaactttgactcgcttatacacatcagccttcagctagcacaaactaactctgaatgcatatttgccatatcctaaactggtccattgttagcgatagacactcagccaaatatggaagttatgcaagaacgttaagcaggatccaagaaggtgaggacgacctctgaagaaactctaaacagcagcagattaaggcatgtttggtttgctgcctaactttatattttg

SEQ ID NO: 35919 - DNA, 269 bp, Zea Mays
cttcaaagtgggaaatggtcaagctaccagattctggaaggacaaatgggtaaccagtcgacctcttagttattttcagatgtactcactggttaagattctggagaccgctacaaaaggaggaatcgcaacaacaaattctcgttgcttcgcacgttttggaagtggtggcgatggaagtcttcgcaaaccatggatggcgctcaaatacaagaattgagtatggctagtgttagtcatagtcttgtaatttaattcctttgagttag

SEQ ID NO: 35920 - DNA, 1956 bp, Zea Mays
cataacatgattttcccttgagccttggtttgcatatatagctgaactcatctccatcattgtgttttttttttttcgagaaacactcactgacggcagtaatagccagtagggcgctggaataaatactccagccgttgctgcggccattagccacgagacgaattgaagccgcaaaaggttcgacgtgctcctatcgttgcggaggcgcgccgcggggatacgaatggagtccggcggcgccggcgagcttctgtccggacctgctgggtcgcccgtcacatccaaacccggcggtgggcgtggcggttggcgtgccgccctcttcatcatcgtgatggggttctttgagcgtattgggttcgtcggcgtgtcggccaacttgatcacgtacctcaccgggccactcggcatgtccacggctgccgcggccgccggcgtgaacgcgtggtccggaaccgtgcaggtgctaccgctcgtcggcgctctcgtcgctgattcgcggcttggccggtatcgagctatcctcgccgcctgcgtgctctatcttctgagcttgggaatgctaacagcctcatccatgatgctaaccgcgagctcgccgccgtcgccgtctcctgcccggctcaccctcttctatgtcgcgctctacctgctggctctggcgcaaggcttttttgggccatgcggggaagccttcggagcagaccagttcacgcctagcgacatcgacgacctcagcgcgcccacactccggagctcatacttcaactggttccacttctccatgtcctggggctacgccatcgcgacggctgggctgagctacgtccaggacaacgccggctggaccttggggttcggcgcgtgctggaccgccatggtgctatgccttgtcgtcttcttacttggcacgcgaacgtaccgtgccgccaagcaacccatcgatggcgtgcaggcgtgggtcgcgagggtcttccgtcggagtggcaccactccaactgatgaaaggctgcttctagctccacaacctgagggtgagggcggactcatagctaagctgctcccgatatggttgacgagcttagtcttcgcagccatctactcgcagacgtccactctgttcaccaagcaagccagcacattggacaggcaccttggcacggagacgggtctcgtcgtgccgcccgcggcgctccagtgcttgatcgacgtcaccttcatcgtcatgatccccttatacgaccgcgtcattgtgcccttggcgaggcgcctcacagggcacgcctcgggcatcacgatgctccagcgcatcggcgccagcatggccacgtcctgtgtcgccatggccgtcgcggcgctggtggaagtcaggcggctccgcgtggccagagacgcgggcctggtcgaccggccggacgtggctctgccgatgagcctgtggtggatgattccgcagtacgttctcatgggccttgccgcggtgctgggtatggttggcctcgaggagttcttctacgaccagatgcccgacgctctccgcagcgtcggtctcgcgctgtgcctgagcatctttggggtgggaagctacgccagcagcatgcttgtgtccgtcatcgactgggcgacgagggtcaaaggggagagctggttctctgacaatctcaaccgagcccacctcgactacttctactggctcctggcagggctcgcggctctggaggtagccgtcttcttgcattttgcaaatcgatacgtctacacaaaaaaagccgagctgtgaatctgcaattcttgaaactttacaagtataaaaaatacttcgcttatgttaaaagaacatgatgttggattttagttgggcctggcccaattttatttaattaggacaaaaaaatcctaaggcatggacaaaatgctggtgaaataaagtgtttagtctcacacggaacttcg

SEQ ID NO: 35921 - DNA, 1583 bp, Zea Mays
caatgccaccagccgccaggcgtcactgagcatgggcatgctgaccgtctccgcgctcccggcgttccaccacgacggctgcagcagctacgcctccgcctccagaccgctggcctgctccccgccccccgtgcaagtgggcgtcttctacgtctccctgtacctggtggcgctcgcggaggccgggcacaagccctgcgcgcaggcgttcggcgcggaccagttcgaccagaacgacccaaaggagtccgcgtccaggagctccttcttcaactggtggtacttcggcatgtgctccggcaccgccgtcaccaccatggtgtccagctacatccaggacaacgtcggctggggcctcggcttcggcgtcccctgcctcgtcatgctcttcgcgctcctcatgttcttgctcggtaccaggaattaccgctactacacgtatactgaatcgagcccatttgctcgcctcgccacagctttcgttgcgctcatcaaaggctccaaatcgagacaacatgacggcactcttgcgagcgacgacgccgggcaccgtgaagaagtgaaaggcgtgctgcgcctgttccccatctgggcgacgtgcatcatctacgccgtcatcttctcgcagtcgtccacgttcttcacgaagcaggccgcgacgctggaccggcgggtcggctcgactctgcgcgtgccgccggcggcgctgcagacgttcatcagcgtgaccatcatggccttcatcccggtctacgaccgcgcgttcgtgccccttgcgcggcggcttacgcgcctctcgtccggtatcaccatgctgcagcggatcggcacggggctcgtcctggccctggttgccatggtcgtggcggcgctggtggagatgcggcggctcgccgtggcgagggacgccgggctcgtggaccagcccaaggcggcgctgccgatgagcctgtggtggatggtcccgcagtacgtgctgttcgggctctcggacgtgttcgccatgatcggcctgcaggagttcttctacgaccaggtccccgacgcgctgcgcagcctcgggctggccttctttctcagcatcttcggcgtaggacacttgttcagcagcttcatcatctccgccatcgacggtgccaccaagaagagcggagcgagctggttctccaacaacctcaatcgcgcgcacctcgactacttctactggctgctcgccgggctctgcgccgtggagttggctgctttcatcatcgtctcgcgcgtttacgtgtacaagaagaggatgtctcacgacaataatgctgctgccatgtagatcagtagacgtgacttttaccgtgctgtgaatggcgatacaatatgattgaggtgtagagaaagagaacgaaaaaaccttttgtacgctaaacctggacactaaactgacttttacggacggtcggcaatcggcataatagtgccggtttgttagcaaccggcagtgctagcgtttattgggaaaaaaaattctatgcaggagccctatacaaatacttcatccactccaaaataatagtgttttagcttttggtttttaagtcaat

SEQ ID NO: 35922 - DNA, 1161 bp, Zea Mays
accgaaccttgtcttgggatttgaaaatgcagcctctgggaattagactatgtgattgtgcaggttttgattccagccccatattgggtcagttatcctgagatggctagactggctgatgcgactccagtgattcttcctacaaacatatcagagaatttcttgttaaggccagagttgcttaccgacaagatcaatgagaaatcgaggctcttaattctctgctctccatctaatccaacagggtcagtatatccaaaggagttgcttgagaaaatagctgatatagtcaagaagcatccgaggcttttggttttatctgatgaaatttatgagcatattatctatcagcctgcaaaacacacaagctttgcttcactacctggaatgtgggaaagaacattaactgtaaatggtttttctaaggcttttgcaatgacgggttggcgtcttggttaccttgcagcccctaaacattttgttgcagcatgtggaaagatccaaagccagttcacctcaggtgccagcagcatatcacagaaggcaggggttgccgctctgaatcttggctatgctggtggtgaagcagtatcaactatggtcaaagcattccaggaacgccgtgactatcttgtgaaaaatttcaaggaactgcctggtgtgaaaatatcagaacctcagggtgccttttatttgttcattgacttcagcgcctactatgggtctgaagtagaggggtttggcactatcaagaattccgagtccctttgcatcttcctattagagaaagcacaggttgcccttgtccctggtgacgcatttggggatgacaagtgcattcgtatttcatatgctgcatccctaactacacttcagactgcgatgtcaaaattaaaggaagctgttgctctgctcaagccctgtgttgctgcgtagcaagatcactaaattgcaataaggagtgaccaaggcacctttaactaacctttcacattattttaaacacaatgttcgaattgttgggcagacttggtctgttgtttttatatgtaacattatggatttatgatgtgtacatgcaaataaaaatgttttgtttagaaaaggctaggttgtggtactatgcgaattaccttctatacaaaagaagatggtcgctgg

SEQ ID NO: 35923 - DNA, 1546 bp, Zea Mays
cagccatctcagcaaagtgtccatcagatacacagcgtccgggaggacaaaacacgcggcgaggaccaggatggcgattgtgcgggaggaggcagtggacacgtccatcagcccaagggtgagcgcgctgcggccgtccaaaaccatggccatcaccgatcaggccatggcgctgcggcaggccggcgtgccggttatcggtctagccgcgggggagccagacttcgacacgccgcccgcgatcgcggaggccgggatggatgcaattaggaatggttatacaagatacactcctaatgctgggactttggagctgaggaaggctatttgtactaaactccaggaggagaacggggtatcctacctcccagatgaggtgctggtgagcaatggagctaagcaatgcatcacacaagctgtgcttgcagtttgctcacctggtgatgaggttttgattccagccccatattgggtcagttatcctgagatggctagactggctgatgcgactccagtgattcttcctacaaacatatcagagaatttcttgttaaggccagagttgcttaccgacaagatcaatgagaaatcgaggctcttaattctctgctctccatctaatccaacagggtcagtatatccaaaggagttgcttgagaaaatagctgatatagtcaagaagcatccgaggcttttggttttatctgatgaaatttatgagcatattatctatcagcctgcaaaacacacaagctttgcttcactacctggaatgtgggaaagaacattaactgtaaatggtttttctaaggcttttgcaatgacgggttggcgtcttggttaccttgcagcccctaaacattttgttgcagcatgtggaaagatccaaagccagttcacctcaggtgccagcagcatatcacagaaggcaggggttgccgctctgaatcttggctatgctggtggtgaagcagtatcaactatggtcaaagcattccaggaacgccgtgactatcttgtgaaaaatttcaaggaactgcctggtgtgaaaatatcagaacctcagggtgccttttatttgttcattgacttcagcgcctactatgggtctgaagtagaggggtttggcactatcaagaattccgagtccctttgcatcttcctattagagaaagcacaggttgcccttgtccctggtgacgcatttggggatgacaagtgcattcgtatttcatatgctgcatccctaactacacttcagactgcgatgtcaaaattaaaggaagctgttgctctgctcaagccctgtgttgctgcgtagcaagatcactaaattgcaataaggagtgaccaaggcacctttaactaacctttcacattattttaaacacaatgttcgaattgttgggcagacttggtctgttgtttttatatgtaacattatggatttatgatgtgtacatgcaaataaaaatgttttgtttagaaaaggctaggttgtggtactatgcgaattaccttctatacaaaagaagatggtcgctgg

SEQ ID NO: 35924 - DNA, 1678 bp, Zea Mays
attccgtcacgctggattcaaacaagaacatgtattcaagcaccggcgacgagttacatactcacccaatagaacaattctatgcccggtgattgtacctcctgaagtagaagagcatactgaagcagaactcgagtggtgttggatcgaaatggaaggcgggatgtcaagtttggaagccgccatgaaagcttcttcatcgatggcaagcagcatggcaaggaatgctgaccctaaccaacagactctccgccccaatttagtggagcagttctattttccaagacctggtcaatctttgccaggcattcctccattttttgggcctccctctagtttgtatcttcctaatgacaatgaagctaaatttggcaacaactttgaatcaaatccttcacagaatacagattggaacccacaggcaatagtgagcaacctaaccttccttgagcagaagatcaagcaggtaaaggatattgtgcagtccatgagtaaccgagagaaccaagtagctggtggttcctgtgaggtagctgcaaagcagcagctcataaccgctgacctcactagcattataatccagctcatatctactgcgggttcgctgctcccttcaatgaagaacccacttcttagcagcaatccagcagtcaggcagcttggcaacactcttggttctcctacgggctttggcatgaatgctaatcagcgaccaagcgtagacagcaagaccgatattcctgacacaggaaaaacttctgattatgaggagctgatgaatacccttaatactagtcaagctgaaagagatgagctgatcaaatgcccaaatccctgtggtggggaagggtctgaactgactccgatggaggaccatgatgtgaaggagagtgacgatggtggtgagggagagaatctcccccctggttcatatgtaatcttgcaactggaaaaggaggagattttagcaccacatactcatttctgcttgatctgtggtaagggtttcaaaagagatgctaacctaaggatgcacatgaggggccatggagatgagtacaagactccagctgctcttgccaaacccacaaaagattatggtgcagatcatgcaccggttacaaggtactcatgcccatttgtgggttgcaaacggaacaaggagcacaggaagttccagcctctcaaaacaatcttgtgtgtgaagaaccattacaagagaagccactgtgacaagagctacacctgcagccgttgcaacaccaagaagttctctgtcatcgcggacttgaagactcatgagaagcactgtggtcgtgacaagtggctctgttcttgcggaacgaccttctccaggaaggacaagctttttggacatgttgcgcttttccaaggccacacacctgcgctccccgtggaagacggggatgtaccagaaggttcagagcagcctcaggacggcgaaccaacgaatgaaatggcgaggagcatggtgtatagcttcccgtgtagctcgtctgatggtttattgaacctcgacatgaaaatggctgatgacgatcttgcagttatgggcagcagaacggtgatagctgatggatgccgccatcgatgatgactacaccgcggcactgtcaacctttatgtgatgaatgtggctgtgtcggccatggagcag

SEQ ID NO: 35925 - DNA, 2093 bp, Zea Mays
gttgatctgcttcctgttcttgaaattcatagtggggacaaacaagggaagttgtttactgaacctttatttgattattaggagatttgggatctttgatttgatctcattagggtcttttgattgaactgaacagtcataatcctctcacgactcaactctttgatcgacctttgggttgcgtgtcttgaagttttcatccatccttctgtttgcctcaactagagttacatactcacccaatagaacaattctatgcccggtgattgtacctcctgaagtagaagagcatactgaagcagaactcgagtggtgttggatcgaaatggaaggcgggatgtcaagtttggaagccgccatgaaagcttcttcatcgatggcaagcagcatggcaaggaatgctgaccctaaccaacagactctccgccccaatttagtggagcagttctattttccaagacctggtcaatctttgccaggcattcctccattttttgggcctccctctagtttgtatcttcctaatgacaatgaagctaaatttggcaacaactttgaatcaaatccttcacagaatacagattggaacccacaggcaatagtgagcaacctaaccttccttgagcagaagatcaagcaggtaaaggatattgtgcagtccatgagtaaccgagagaaccaagtagctggtggttcctgtgaggtagctgcaaagcagcagctcataaccgctgacctcactagcattataatccagctcatatctactgcgggttcgctgctcccttcaatgaagaacccacttcttagcagcaatccagcagtcaggcagcttggcaacactcttggttctcctacgggctttggcatgaatgctaatcagcgaccaagcgtagacagcaagaccgatattcctgacacaggaaaaacttctgattatgaggagctgatgaatacccttaatactagtcaagctgaaagagatgagctgatcaaatgcccaaatccctgtggtggggaagggtctgaactgactccgatggaggaccatgatgtgaaggagagtgacgatggtggtgagggagagaatctcccccctggttcatatgtaatcttgcaactggaaaaggaggagattttagcaccacatactcatttctgcttgatctgtggtaagggtttcaaaagagatgctaacctaaggatgcacatgaggggccatggagatgagtacaagactccagctgctcttgccaaacccacaaaagattatggtgcagatcatgcaccggttacaaggtactcatgcccatttgtgggttgcaaacggaacaaggagcacaggaagttccagcctctcaaaacaatcttgtgtgtgaagaaccattacaagagaagccactgtgacaagagctacacctgcagccgttgcaacaccaagaagttctctgtcatcgcggacttgaagactcatgagaagcactgtggtcgtgacaagtggctctgttcttgcggaacgaccttctccaggaaggacaagctttttggacatgttgcgcttttccaaggccacacacctgcgctccccgtggaagacggggatgtaccagaaggttcagagcagcctcaggacggcgaaccaacgaatgaaatggcgaggagcatggtgtatagcttcccgtgtagctcgtctgatggtttattgaacctcgacatgaaaatggctgatgacgatcttgcagttatgggcagcagaacggtgatagctgatggatgccgccatcgatgatgactacaccgcggcactgtcaacctttatgtatgttgttgcatgatgctagtttggttcatcctctgttcaagagccattttaggctatgcctttaactttcttaagtgtacctccgtttgtggtcattaataatgatcaaggacttctagatagccccaattttctgcatacatatgcaaggattgctggttcatttggttgaatcggtgcgatgcctctagcgctgacaatatgtcaaaaatctggttctccagtatgttgatggtcaggcccggccctcgggagcacatgtgcatcggat

SEQ ID NO: 35926 - DNA, 2055 bp, Zea Mays
cgaacttctcttcctgtttccgtaattccgtcacgctggattcaaacaagaacatgtattcaagcaccggcgacgagttacatactcacccaatagaacaattctatgcccggtgattgtacctcctgaagtagaagagcatactgaagcagaactcgagtggtgttggatcgaaatggaaggcgggatgtcaagtttggaagccgccatgaaagcttcttcatcgatggcaagcagcatggcaaggaatgctgaccctaaccaacagactctccgccccaatttagtggagcagttctattttccaagacctggtcaatctttgccaggcattcctccattttttgggcctccctctagtttgtatcttcctaatgacaatgaagctaaatttggcaacaactttgaatcaaatccttcacagaatacagattggaacccacaggcaatagtgagcaacctaaccttccttgagcagaagatcaagcaggtaaaggatattgtgcagtccatgagtaaccgagagaaccaagtagctggtggttcctgtgaggtagctgcaaagcagcagctcataaccgctgacctcactagcattataatccagctcatatctactgcgggttcgctgctcccttcaatgaagaacccacttcttagcagcaatccagcagtcaggcagcttggcaacactcttggttctcctacgggctttggcatgaatgctaatcagcgaccaagcgtagacagcaagaccgatattcctgacacaggaaaaacttctgattatgaggagctgatgaatacccttaatactagtcaagctgaaagagatgagctgatcaaatgcccaaatccctgtggtggggaagggtctgaactgactccgatggaggaccatgatgtgaaggagagtgacgatggtggtgagggagagaatctcccccctggttcatatgtaatcttgcaactggaaaaggaggagattttagcaccacatactcatttctgcttgatctgtggtaagggtttcaaaagagatgctaacctaaggatgcacatgaggggccatggagatgagtacaagactccagctgctcttgccaaacccacaaaagattatggtgcagatcatgcaccggttacaaggtactcatgcccatttgtgggttgcaaacggaacaaggagcacaggaagttccagcctctcaaaacaatcttgtgtgtgaagaaccattacaagagaagccactgtgacaagagctacacctgcagccgttgcaacaccaagaagttctctgtcatcgcggacttgaagactcatgagaagcactgtggtcgtgacaagtggctctgttcttgcggaacgaccttctccaggaaggacaagctttttggacatgttgcgcttttccaaggccacacacctgcgctccccgtggaagacggggatgtaccagaaggttcagagcagcctcaggacggcgaaccaacgaatgaaatggcgaggagcatggtgtatagcttcccgtgtagctcgtctgatggtttattgaacctcgacatgaaaatggctgatgacgtgcgtggttatctctcgccgctgagctttgataattgctttggcgcgtttgacgacttcactcgccctggatttgacatctctgagaaccccttctccttcccgccttcaggatcttgcagttatgggcagcagaacggtgatagctgatggatgccgccatcgatgatgactacaccgcggcactgtcaacctttatgtatgttgttgcatgatgctagtttggttcatcctctgttcaagagccattttaggctatgcctttaactttcttaagtgtacctccgtttgtggtcattaataatgatcaaggacttctagatagccccaattttctgcatacatatgcaaggattgctggttcatttggttgaatcggtgcgatgcctctagcgctgacaatatgtcaaaaatctggttctccagtatgttgatggtcaggcccggccctcgggagcacatgtgcatcggat

SEQ ID NO: 35927 - DNA, 2018 bp, Zea Mays
atggcgagtctgacctcatggacccacaccaaacgggatagtgggagcagacaggaaggctcggggctccttcctcctataaacccaccgcacctgccttagaggctcccattttctcggccgggagccgcaattccatcctgctgctagagttacatactcacccaatagaacaattctatgcccggtgattgtacctcctgaagtagaagagcatactgaagcagaactcgagtggtgttggatcgaaatggaaggcgggatgtcaagtttggaagccgccatgaaagcttcttcatcgatggcaagcagcatggcaaggaatgctgaccctaaccaacagactctccgccccaatttagtggagcagttctattttccaagacctggtcaatctttgccaggcattcctccattttttgggcctccctctagtttgtatcttcctaatgacaatgaagctaaatttggcaacaactttgaatcaaatccttcacagaatacagattggaacccacaggcaatagtgagcaacctaaccttccttgagcagaagatcaagcaggtaaaggatattgtgcagtccatgagtaaccgagagaaccaagtagctggtggttcctgtgaggtagctgcaaagcagcagctcataaccgctgacctcactagcattataatccagctcatatctactgcgggttcgctgctcccttcaatgaagaacccacttcttagcagcaatccagcagtcaggcagcttggcaacactcttggttctcctacgggctttggcatgaatgctaatcagcgaccaagcgtagacagcaagaccgatattcctgacacaggaaaaacttctgattatgaggagctgatgaatacccttaatactagtcaagctgaaagagatgagctgatcaaatgcccaaatccctgtggtggggaagggtctgaactgactccgatggaggaccatgatgtgaaggagagtgacgatggtggtgagggagagaatctcccccctggttcatatgtaatcttgcaactggaaaaggaggagattttagcaccacatactcatttctgcttgatctgtggtaagggtttcaaaagagatgctaacctaaggatgcacatgaggggccatggagatgagtacaagactccagctgctcttgccaaacccacaaaagattatggtgcagatcatgcaccggttacaaggtactcatgcccatttgtgggttgcaaacggaacaaggagcacaggaagttccagcctctcaaaacaatcttgtgtgtgaagaaccattacaagagaagccactgtgacaagagctacacctgcagccgttgcaacaccaagaagttctctgtcatcgcggacttgaagactcatgagaagcactgtggtcgtgacaagtggctctgttcttgcggaacgaccttctccaggaaggacaagctttttggacatgttgcgcttttccaaggccacacacctgcgctccccgtggaagacggggatgtaccagaaggttcagagcagcctcaggacggcgaaccaacgaatgaaatggcgaggagcatggtgtatagcttcccgtgtagctcgtctgatggtttattgaacctcgacatgaaaatggctgatgacgatcttgcagttatgggcagcagaacggtgatagctgatggatgccgccatcgatgatgactacaccgcggcactgtcaacctttatgtatgttgttgcatgatgctagtttggttcatcctctgttcaagagccattttaggctatgcctttaactttcttaagtgtacctccgtttgtggtcattaataatgatcaaggacttctagatagccccaattttctgcatacatatgcaaggattgctggttcatttggttgaatcggtgcgatgcctctagcgctgacaatatgtcaaaaatctggttctccagtatgttgatggtcaggcccggccctcgggagcacatgtgcatcggat

SEQ ID NO: 35928 - DNA, 1800 bp, Zea Mays
attcactgtagccatttagatgaacaatggacactatcaagagtttgttctttcaaatatgacagttgtacactgttcgtgatggtggaaccattgctttggattggctgttcgcatctgatttggaagttgcagatggattcatttcgaaagacgcttcaacaccccttgtagttgtggttcctggattaactagcgattctgctgctgcttatgtaaaacacttggtttactccatggcaagcaaaggatggaatgttgttgtaagcaaccacagaggtcttggtggtgtgtccattacttcagattgcttctacaatggtggttggacagaagatgtccgagaggtcattacacacctgcatcacagatatccgaaaaccacactgttttgcattggtacaagcataggtgccaatattgtggtcaagtatcttggagaagaaggcgagaatactcctatagcgggtgcagtatctatttgttctccatgggatctgttgataggtgacagatttatttcccgcaagcttgtacagcgtatttacgacaaagcacttgcaattggtctgaagggctatgcaaaattacatcaacctgtcttggcccgacttgcaaattgggaaggtattaaaaagtcacgatctatccgagagtttgaccaccatgctacttgtgttgtctcaagatatgagacagtggatacttactatcgccggtgcagtagtgctagttacgtcggaaatgtgtcagttcccttgctttgtatcaatgctttggatgatcctctttgcacaagggaggctattccttgggatgaatgcagggccaataagaacattgttttagcaactactccaaatggtggtcatcttgcattctttcaaggactaactgcgcggagactatggtgggttggagctacttctgagttcctttctgctcttcatgacagctcctacatgcataggcagaaggcaaatgatcatgttttgctctcgtctttggaatcctccattgataagagtccgtatgttaatctcatggaagatggaatggtagctgcggtaacaaaagatggccctagcaatgacgggtcacctttgaaccatgcagctgatgaacaattaagtaacgaggcgggcggtggacaacagaatgtggtatctgcattgaaccataatgaaaactccattggagtgggaaacgacagccctgcagagccagtaaaacagcaaggtgatgacatccacagcaataagcttcatgagataattgctcctgtcaagagatctatgagccaactgactcgataccaagggaggtcagtctggttgcttgcctacattgcttttgtaacatcctggccgctgcttggctccctagctttcatcaccttccggaaaaagtccaggaatccgttgcgagctaaatgaatcatacttatattatgttattacaattacatcatgcaacatcctctgagctacgaaggccatttttccccgggtcgtcacagctcctgtgtacagtatcatcaccgatcatcagcaaacattgggggcgcctggataaactgatactttgtaatttgtattgtatttacaacaaaataatacgcaggataagcatctgtgtaattttactcggtaaatctggctggatttgctgtttggcatctgtcgagcttaacattatttttaatccaaaggatgcgaaacgtgtggtgaatgaacggtaaaaactatcagatagttgaggcgggaattttaattttaatttattactacttttttgttg

SEQ ID NO: 35929 - DNA, 2335 bp, Zea Mays
aggggaccaggaaagcgctctttgcatctccgccggtccgtccacggtgtgaatcgcgtggtccgccgaacctcagaatagccgctcgaaccgcttcataactcccaccgcaccggtcgccccggcgcgccggcgaggtgacctactgacctcgacgagcgcgcgacgttgaccggggcgtgcatccggccgcatcttgtcctcgttccttacgcagaggagcgccgctccaaaatcgcagaacgccaaggcgggcgtagcgaaggatgtcggaggccgtcgccgcaggcgagtcgcccgtcgagctgctgctccgcgcggcggcgatggtgcccgcagagcgctacgcgctggccgccatcatcgtcgtgtccgtctttctgtaccgcttcctcgagctccatgttatcggcgacatcctccgcggcttccggggcggccgcgtcgagctcaccttccaccccgcctcggagatctaccaccgcgtcgcgtccaagtgccgcttgctccacggcaggtatctggcgacaccatggctggcgagcccgcatttgcagacattgttcctgggcatttacgggacgccgccttcattcacatacaagagacagttgtacactgttcgtgatggtggaaccattgctttggattggctgttcgcatctgatttggaagttgcagatggattcatttcgaaagacgcttcaacaccccttgtagttgtggttcctggattaactagcgattctgctgctgcttatgtaaaacacttggtttactccatggcaagcaaaggatggaatgttgttgtaagcaaccacagaggtcttggtggtgtgtccattacttcagattgcttctacaatggtggttggacagaagatgtccgagaggtcattacacacctgcatcacagatatccgaaaaccacactgttttgcattggtacaagcataggtgccaatattgtggtcaagtatcttggagaagaaggcgagaatactcctatagcgggtgcagtatctatttgttctccatgggatctgttgataggtgacagatttatttcccgcaagcttgtacagcgtatttacgacaaagcacttgcaattggtctgaagggctatgcaaaattacatcaacctgtcttggcccgacttgcaaattgggaagtcacgatctatccgagagtttgaccaccatgctacttgtgttgtctcaagatatgagacagtggatacttactatcgccggtgcagtagtgctagttacgtcggaaatgtgtcagttcccttgctttgtatcaatgctttggatgatcctctttgcacaagggaggctattccttgggatgaatgcagggccaataagaacattgttttagcaactactccaaatggtggtcatcttgcattctttcaaggactaactgcgcggagactatggtgggttggagctacttctgagttcctttctgctcttcatgacagctcctacatgcataggcagaaggcaaatgatcatgttttgctctcgtctttggaatcctccattgataagagtccgtatgttaatctcatggaagatggaatggtagctgcggtaacaaaagatggccctagcaatgacgggtcacctttgaaccatgcagctgatgaacaattaagtaacgaggcgggcggtggacaacagaatgtggtatctgcattgaaccataatgaaaactccattggagtgggaaacgacagccctgcagagccagtaaaacagcaaggtgatgacatccacagcaataagcttcatgagataattgctcctgtcaagagatctatgagccaactgactcgataccaagggaggtcagtctggttgcttgcctacattgcttttgtaacatcctggccgctgcttggctccctagctttcatcaccttccggaaaaagtccaggaatccgttgcgagctaaatgaatcatacttatattatgttattacaattacatcatgcaacatcctctgagctacgaaggccatttttccccgggtcgtcacagctcctgtgtacagtatcatcaccgatcatcagcaaacattgggggcgcctggataaactgatactttgtaatttgtattgtatttacaacaaaataatacgcaggataagcatctgtgtaattttactcggtaaatctggctggatttgctgtttggcatctgtcgagcttaacattatttttaatccaaaggatgcgaaacgtgtggtgaatgaacggtaaaaactatcagatagttgaggcgggaattttaattttaatttattactacttttttgttg

SEQ ID NO: 35930 - DNA, 2342 bp, Zea Mays
aggggaccaggaaagcgctctttgcatctccgccggtccgtccacggtgtgaatcgcgtggtccgccgaacctcagaatagccgctcgaaccgcttcataactcccaccgcaccggtcgccccggcgcgccggcgaggtgacctactgacctcgacgagcgcgcgacgttgaccggggcgtgcatccggccgcatcttgtcctcgttccttacgcagaggagcgccgctccaaaatcgcagaacgccaaggcgggcgtagcgaaggatgtcggaggccgtcgccgcaggcgagtcgcccgtcgagctgctgctccgcgcggcggcgatggtgcccgcagagcgctacgcgctggccgccatcatcgtcgtgtccgtctttctgtaccgcttcctcgagctccatgttatcggcgacatcctccgcggcttccggggcggccgcgtcgagctcaccttccaccccgcctcggagatctaccaccgcgtcgcgtccaagtgccgcttgctccacggcaggtatctggcgacaccatggctggcgagcccgcatttgcagacattgttcctgggcatttacgggacgccgccttcattcacatacaagagacagttgtacactgttcgtgatggtggaaccattgctttggattggctgttcgcatctgatttggaagttgcagatggattcatttcgaaagacgcttcaacaccccttgtagttgtggttcctggattaactagcgattctgctgctgcttatgtaaaacacttggtttactccatggcaagcaaaggatggaatgttgttgtaagcaaccacagaggtcttggtggtgtgtccattacttcagattgcttctacaatggtggttggacagaagatgtccgagaggtcattacacacctgcatcacagatatccgaaaaccacactgttttgcattggtacaagcataggtgccaatattgtggtcaagtatcttggagaagaaggcgagaatactcctatagcgggtgcagtatctatttgttctccatgggatctgttgataggtgacagatttatttcccgcaagcttgtacagcgtatttacgacaaagcacttgcaattggtctgaagggctatgcaaaattacatcaacctgtcttggcccgacttgcaaattgggaaggtattaaaaagtcacgatctatccgagagtttgaccaccatgctacttgtgttgtctcaagatatgagacagtggatacttactatcgccggtgcagtagtgctagttacgtcggaaatgtgtcagttcccttgctttgtatcaatgctttggatgatcctctttgcacaagggaggctattccttgggatgaatggccaataagaacattgttttagcaactactccaaatggtggtcatcttgcattctttcaaggactaactgcgcggagactatggtgggttggagctacttctgagttcctttctgctcttcatgacagctcctacatgcataggcagaaggcaaatgatcatgttttgctctcgtctttggaatcctccattgataagagtccgtatgttaatctcatggaagatggaatggtagctgcggtaacaaaagatggccctagcaatgacgggtcacctttgaaccatgcagctgatgaacaattaagtaacgaggcgggcggtggacaacagaatgtggtatctgcattgaaccataatgaaaactccattggagtgggaaacgacagccctgcagagccagtaaaacagcaaggtgatgacatccacagcaataagcttcatgagataattgctcctgtcaagagatctatgagccaactgactcgataccaagggaggtcagtctggttgcttgcctacattgcttttgtaacatcctggccgctgcttggctccctagctttcatcaccttccggaaaaagtccaggaatccgttgcgagctaaatgaatcatacttatattatgttattacaattacatcatgcaacatcctctgagctacgaaggccatttttccccgggtcgtcacagctcctgtgtacagtatcatcaccgatcatcagcaaacattgggggcgcctggataaactgatactttgtaatttgtattgtatttacaacaaaataatacgcaggataagcatctgtgtaattttactcggtaaatctggctggatttgctgtttggcatctgtcgagcttaacattatttttaatccaaaggatgcgaaacgtgtggtgaatgaacggtaaaaactatcagatagttgaggcgggaattttaattttaatttattactacttttttgttg

SEQ ID NO: 35931 - DNA, 2340 bp, Zea Mays
aggggaccaggaaagcgctctttgcatctccgccggtccgtccacggtgtgaatcgcgtggtccgccgaacctcagaatagccgctcgaaccgcttcataactcccaccgcaccggtcgccccggcgcgccggcgaggtgacctactgacctcgacgagcgcgcgacgttgaccggggcgtgcatccggccgcatcttgtcctcgttccttacgcagaggagcgccgctccaaaatcgcagaacgccaaggcgggcgtagcgaaggatgtcggaggccgtcgccgcaggcgagtcgcccgtcgagctgctgctccgcgcggcggcgatggtgcccgcagagcgctacgcgctggccgccatcatcgtcgtgtccgtctttctgtaccgcttcctcgagctccatgttatcggcgacatcctccgcggcttccggggcggccgcgtcgagctcaccttccaccccgcctcggagatctaccaccgcgtcgcgtccaagtgccgcttgctccacggcaggtatctggcgacaccatggctggcgagcccgcatttgcagacattgttcctgggcatttacgggacgccgccttcattcacatacaagagacagttgtacactgttcgtgatggtggaaccattgctttggattggctgttcgcatctgatttggaagatggattcatttcgaaagacgcttcaacaccccttgtagttgtggttcctggattaactagcgattctgctgctgcttatgtaaaacacttggtttactccatggcaagcaaaggatggaatgttgttgtaagcaaccacagaggtcttggtggtgtgtccattacttcagattgcttctacaatggtggttggacagaagatgtccgagaggtcattacacacctgcatcacagatatccgaaaaccacactgttttgcattggtacaagcataggtgccaatattgtggtcaagtatcttggagaagaaggcgagaatactcctatagcgggtgcagtatctatttgttctccatgggatctgttgataggtgacagatttatttcccgcaagcttgtacagcgtatttacgacaaagcacttgcaattggtctgaagggctatgcaaaattacatcaacctgtcttggcccgacttgcaaattgggaaggtattaaaaagtcacgatctatccgagagtttgaccaccatgctacttgtgttgtctcaagatatgagacagtggatacttactatcgccggtgcagtagtgctagttacgtcggaaatgtgtcagttcccttgctttgtatcaatgctttggatgatcctctttgcacaagggaggctattccttgggatgaatgcagggccaataagaacattgttttagcaactactccaaatggtggtcatcttgcattctttcaaggactaactgcgcggagactatggtgggttggagctacttctgagttcctttctgctcttcatgacagctcctacatgcataggcagaaggcaaatgatcatgttttgctctcgtctttggaatcctccattgataagagtccgtatgttaatctcatggaagatggaatggtagctgcggtaacaaaagatggccctagcaatgacgggtcacctttgaaccatgcagctgatgaacaattaagtaacgaggcgggcggtggacaacagaatgtggtatctgcattgaaccataatgaaaactccattggagtgggaaacgacagccctgcagagccagtaaaacagcaaggtgatgacatccacagcaataagcttcatgagataattgctcctgtcaagagatctatgagccaactgactcgataccaagggaggtcagtctggttgcttgcctacattgcttttgtaacatcctggccgctgcttggctccctagctttcatcaccttccggaaaaagtccaggaatccgttgcgagctaaatgaatcatacttatattatgttattacaattacatcatgcaacatcctctgagctacgaaggccatttttccccgggtcgtcacagctcctgtgtacagtatcatcaccgatcatcagcaaacattgggggcgcctggataaactgatactttgtaatttgtattgtatttacaacaaaataatacgcaggataagcatctgtgtaattttactcggtaaatctggctggatttgctgtttggcatctgtcgagcttaacattatttttaatccaaaggatgcgaaacgtgtggtgaatgaacggtaaaaactatcagatagttgaggcgggaattttaattttaatttattactacttttttgttg

SEQ ID NO: 35932 - DNA, 1512 bp, Zea Mays
gcttccgcagttccgcttcaaaattccggtgaaaaaggaagacgacagctccagacccctaggcccctagccatggccggagaggcgggaaaagacccccaagcgtggctagccgccaacgagacggcgtcggccttcctctcccgttcactctcctcgcggccccccatcaccctcccgccaccactgcaccgcgcgcctctccgcccgggcaacgtcgtcgagatcgccggcccgtccaactctggcaagtcccacctcctcctcatggctgcagtgcagtgcatattaccaaaggagtgggagggaatctactttggggggctggggagggcggtcatgtacttggacttggactgccgatttgatgtgctacggctggctcaaattctgaggaatcgtattgcagagggctgccgtttagcacaccttagaaatggagaccctgaaaatgatgtcactaaagatgagtttcagtgttctcttcaaaatacactgttttctgattgtatgcagcgcttcttgtatgctcgatgttgcaaaagtcctgaattcatagatgctttgaagactgtacagtctcaatcaaggagggaagtgtccggcgctggtatatattttgttatgatagacagcattggtgcgttctactggatagatcgtggttctcaagcttcacgagagaataaagggaaaacactgcaaagcatttttgaaagtgttgtccacgagttacgcaagattttgcaacttgaacctgcattggttttggtcacaaaggcatccgtttatggggaaggcaccacaacagcaaatgacttcaatcgggattcttcaaaatacatgctggaggatcctagcggtttgggatattcaagacgggaggaagaaagaactctctctaatcgggaatatatgccatcaatatggcagtcttttgtcacacacaggataaaccttcaagtagaagcagaagttccctctgtgctggaaagtgaggtgcttcctttgcatacttctgagtgggtgcaaccttgcctcaaaatgaaggagaagttttctattatggatgatggtgttaaccttatccactgaatttaccagtctggcattctgtgatgaacatgtcgaacctcactgaattgttgtgatctgattaagaaaacagtatgcccacagcacgcctacaggatgttatgtggcagtgtctctatcttggttcttttattctttggcatggcacacatacagaacacagaagcatagaacgtgtgatggctgagtactgtatgattttaaagtttatccaatagtaccaaaaaatggaaactgttctcacgttcaagaattcttaacatagtggagctgagtaacctctactgatgccttacaattgatgggtgggaactcccaataccgatgatcaagttgctgttatcaccttattttaatcatggtgatgcttggtgccgggaatgatgagttagcatgtcgctatttattctgtttttt

SEQ ID NO: 35933 - DNA, 3129 bp, Zea Mays
gcttccgcagttccgcttcaaaattccggtgaaaaaggaagacgacagctccagacccctaggcccctagccatggccggagaggcgggaaaagacccccaagcgtggctagccgccaacgagacggcgtcggccttcctctcccgttcactctcctcgcggccccccatcaccctcccgccaccactgcaccgcgcgcctctccgcccgggcaacgtcgtcgagatcgccggcccgtccaactctggcaagtcccacctcctcctcatggctgcagtgcagtgcatattaccaaaggagtgggagggaatctactttggggggctggggagggcggtcatgtacttggacttggactgccgatttgatgtgctacggctggctcaaattctgaggaatcgtattgcagagggctgccgtttagcacaccttagaaatggagaccctgaaaatgatgtcactaaagatgagtttcagtgttctcttcaaaatacactgttttctgattgtatgcagcgcttcttgtatgctcgatgttgcaaaagtcctgaattcatagatgctttgaagactgtacagtctcaatcaaggagggaagtgtccggcgctggtatatattttgttatgatagacagcattggtgcgttctactggatagatcgtggttctcaagcttcacgagagaataaagggaaaacactgcaaagcatttttgaaagtgttgtccacgagttacgcaagattttgcaacttgaacctgcattggttttggtcacaaaggcatccgtttatggggaaggcaccacaacagcaaatgacttcaatcgggattcttcaaaatacatgctggaggatcctagcggtttgggatattcaagacgggaggaagaaagaactctctctaatcgggaatatatgccatcaatatggcagtcttttgtcacacacaggataaaccttcaagtagaagcagaagttccctctgtgctggaaagtgaggtgcttcctttgcatacttctgagtgggtgcaaccttgcctcaaaatgaaggagaagttttctattatggatgatggtgttaaccttatccactgaatttaccagtctggcattctgtgatgaacatgtcgaacctcactgaattgttgtgatctgattaagaaaacagtatgcccacagcacgcctacaggatgttatgtggcagtgtctctatcttggttcttttattctttggcatggcacacatacagaacacagaagcatagaacgtgtgatggctgagtactgtatgattttaaagtttatccaatagtaccaaaaaatggaaactgttctcacgttcaagaattcttaacatagtggagctgagtaacctctactgatgtaagtctcttatttttaattattttctatttgtgcgtgtgtaattcgctgcaaggtgagacgtgagtgactggtgttttgtatgggggtcaatcccccttttttcccttcttaatataattatacatggcttctgtgtgatggagattttttccatttgtgggctttacttgccaatttcaaattgtccagcttttgtacctactttcagtgtgcttttatattgagcttgttcgctgcggcttgctgcggctgcaatccggctgcggctgcggcttctacagtatttttctctctatggattgcagctgcagcagtccaaacagctgcaacagtgtcggcttgtagccagccgaacacgcccaattgctattttgaagtttttgataggcttgcaggttgtgcatatcagctttagcatatttgttgttttgcacatatgtgcagtattatgagccaggtgctgtaaatcatgttttcatgatacttgaagattattaaacagtcaacaatttatttatgcatgtatttacttccagttttcatcagcgtgtttgtttccatttgatcatctgcagatgtgaaattattttgaactttttcttgttttctcacagaaaatgtaccattaccatgactttatctttagcttgttgcagtatctaagtaggaccctgaggcccaaaaataaacttgcatgacataattgcaaatttacatagtactattgtagaagaaatgaagaatgactccttaataaaagtataaaacatgaatgtgatgattaagtaaaatgatgaggtaactttttttttcttggcttggtgtttggcattacatagtgctaccttgcactataatctactacaatgttccttggaaaagagagccattttatttatacaatcatttgtctggtctatttgctgctttatatcaatgccatgcaagtttatcttaaaggtttgtttattccgaaatccaagagcatgagaatatgaggtttccatttctgtagaagtatagatcataggaagtgcacgagatgcataaccagtcaccaggagaatagaaagcatcagtatgatcttgattggaaaggtatacaaattaggtaataccatccagtaaatcatgtggcagcccatcatgttgcagtgatttttaagggttaatgaacgttggagctcatctcaccgccagaaacaaggtgtgtttgaactgaggcctgagaaatttgggaactcatttggagatagcataatagttcaatttggcacattgatttatgcaaagtaactgattggttggtttctgtggaagtgttcactttgtttttctaatgtctactaattaatcgtcttcttctgtatggcgtcatgtactatgcaacactttattgttggaacatctcattttaagttgtgaatcttgtttgctttctagactaaagtttgtttttcactctgagttgttactgaagatttaattcttatagtagttgtactttatcccttttttgtcaatgtccctgcagattcttatcatccagctagtgtttcccgctcctttttctaggaagagatgtacccctttttggtgatcacaaagttaccgtacttaaattgttgttattgttattttctcatccactccagcactgtatttttttcctcgtctctgtttgtcaatcagcatgtcgacaatgaaggtgagatcaaagcaatcatcagcagtggtcattt

SEQ ID NO: 35934 - DNA, 673 bp, Zea Mays
gcttccgcagttccgcttcaaaattccggtgaaaaaggaagacgacagctccagacccctaggcccctagccatggccggagaggcgggaaaagacccccaagcgtggctagccgccaacgagacggcgtcggccttcctctcccgttcactctcctcgcggccccccatcaccctcccgccaccactgcaccgcgcgcctctccgcccgggcaacgtcgtcgagatcgccggcccgtccaactctggcaagtcccacctcctcctcatggctgcagtgcagtgcatattaccaaaggagtgggagggaatctactttggggggctggggagggcggtcatgtacttggacttggactgccgatttgatgtgctacggctggctcaaattctgaggaatcgtattgcagagggctgccgtttagcacaccttagaaatggagaccctgaaaatgatgtcactaaagatgagtttcagtgttctcttcaaaatacactgttttctgattgtatgcagcgcttcttgtatgctcgatgttgcaaaagtcctgaattcatagatgctttgaaggtgttttgagccagctgttgcaaatacttgtctgagacccccttgtgttgcaaattcttcatctggatggtggtacataattggtgttggacggttgaccgcc

SEQ ID NO: 35935 - DNA, 1589 bp, Zea Mays
ttccttccctccccctccctgctcggtgctcgcacacgctggcgcggcttgcccccacgctgcgctcccaccaccaccactatataatccccgatcgcctcacgcacacgcaccgacccaccggccgacgaggggcgaccgccgcaacacaaatccacacgcccgccgccaccgccgccatacggacccactcctcctttgccctggtgcgagcaggcttcggcagcaaaccccgcagactgctcccggacgagggagaacgcgcggggctgggctagccgctacccgctagccaggggaccggggcggaggcagcgaggaggtacgtatggacaagtacgaggcggtgcgggacatcgggtcggggaacttcggggtggcgcggctgatgcgcaaccgcgagactcgagagctcgtcgccgtcaagtgcatcgagcgtggccaccggattgacgagaatgtgtacagggagatcatcaaccaccgctcgctgcgccatcccaacattattcgcttcaaggaggtgatacttacaccaacacatcttatgattgtgatggagtttgcagcaggtggagagctttttgatcggatctgtgatcgtgggcggtttagtgaggatgagttgatctgtggagtgagctattgccattacatgcaaatatgccatagagatctgaagctggagaatgttctcttggatggcagcccagctccacggcttaagatctgcgattttggctattccaagtcatcagtgttgcattcaagacccaaatcagcagtaggaacgccagcatatattgcacctgaggtgctatcccgtcgcgagtatgatggaaagcttgcagacgtatggtcctgtggggtgactctttacgtcatgcttgtgggagcatacccatttgaagacccagatgaccccaagaatatacgcaacaccattcagcaaataatgcaagtgcaatacaagataccagatcatgtccacatatctacggaatgccagcaacttattgcccgtatctttgttgccaatccaatgaggagaatcacaatgaaggaaataaagagccatccatggtttttgaagaacctaccacgggaactcacggagactgcacaaggcatgtactacaggagggataacagggtcccttcttattcagaccaaacgtcggaagaaatcatgaagatagttcaagatgcaaggaccatgccgaaatcatccagatcaggctatgggtggagcagtgagtattcggatgaagaagaagagaaggaagaggaacacagaccagaggagcatgaggaagaggaagatgaatacgataggagggtgaaggaggtccatgcaagcggagaactccgtatggacgctcttcacatatgaaagctagtggaagagaaagttgcatgtagataactgggttgttgcggatctgaaggatccagtgggatgtatgcagttttggcttgagaatttgcttctgtttgtcaattttcatgtaacataatttaatacaccgagacaacagactaccatgttcttatattggtaaatatgaagcatgtaccttctatctgca

SEQ ID NO: 35936 - DNA, 1679 bp, Zea Mays
ttccttccctccccctccctgctcggtgctcgcacacgctggcgcggcttgcccccacgctgcgctcccaccaccaccactatataatccccgatcgcctcacgcacacgcaccgacccaccggccgacgaggggcgaccgccgcaacacaaatccacacgcccgccgccaccgccgccatacggacccactcctcctttgccctggtgcgagcaggcttcggcagcaaaccccgcagactgctcccggacgagggagaacgcgcggggctgggctagccgctacccgctagccaggggaccggggcggaggcagcgaggaggtacgtatggacaagtacgaggcggtgcgggacatcgggtcggggaacttcggggtggcgcggctgatgcgcaaccgcgagactcgagagctcgtcgccgtcaagtgcatcgagcgtggccaccggattgacgagaatgtgtacagggagatcatcaaccaccgctcgctgcgccatcccaacattattcgcttcaaggaggtgatacttacaccaacacatcttatgattgtgatggagtttgcagcaggtggagagctttttgatcggatctgtgatcgtgggcggtttagtgaggatgaggcccggtatttctttcagcagttgatctgtggagtgagctattgccattacatgcaaatatgccatagagatctgaagctggagaatgttctcttggatggcagcccagctccacggcttaagatctgcgattttggctattccaagtcatcagtgttgcattcaagacccaaatcagcagtaggaacgccagcatatattgcacctgaggtgctatcccgtcgcgagtatgatggaaagaaaagtggagcggggctagttgatgacagacatccacaaaaaagagcttgcagacgtatggtcctgtggggtgactctttacgtcatgcttgtgggagcatacccatttgaagacccagatgaccccaagaatatacgcaacaccattcagcaaataatgcaagtgcaatacaagataccagatcatgtccacatatctacggaatgccagcaacttattgcccgtatctttgttgccaatccaatgaggtactttttacgaatattctccagagaatcacaatgaaggaaataaagagccatccatggtttttgaagaacctaccacgggaactcacggagactgcacaaggcatgtactacaggagggataacagggtcccttcttattcagaccaaacgtcggaagaaatcatgaagatagttcaagatgcaaggaccatgccgaaatcatccagatcaggctatgggtggagcagtgagtattcggatgaagaagaagagaaggaagaggaacacagaccagaggagcatgaggaagaggaagatgaatacgataggagggtgaaggaggtccatgcaagcggagaactccgtatggacgctcttcacatatgaaagctagtggaagagaaagttgcatgtagataactgggttgttgcggatctgaaggatccagtgggatgtatgcagttttggcttgagaatttgcttctgtttgtcaattttcatgtaacataatttaatacaccgagacaacagactaccatgttcttatattggtaaatatgaagcatgtaccttctatctgca

SEQ ID NO: 35937 - DNA, 1613 bp, Zea Mays
acggcaggccccatccaacatctcctcctccccgtccctctcctcaccttccttccctccccctccctgctcggtgctcgcacacgctggcgcggcttgcccccacgctgcgctcccaccaccaccactatataatccccgatcgcctcacgcacacgcaccgacccaccggccgacgaggggcgaccgccgcaacacaaatccacacgcccgccgccaccgccgccatacggacccactcctcctttgccctggtgcgagcaggcttcggcagcaaaccccgcagactgctcccggacgagggagaacgcgcggggctgggctagccgctacccgctagccaggggaccggggcggaggcagcgaggaggtacgtatggacaagtacgaggcggtgcgggacatcgggtcggggaacttcggggtggcgcggctgatgcgcaaccgcgagactcgagagctcgtcgccgtcaagtgcatcgagcgtggccaccggattgacgagaatgtgtacagggagatcatcaaccaccgctcgctgcgccatcccaacattattcgcttcaaggaggtgatacttacaccaacacatcttatgattgtgatggagtttgcagcaggtggagagctttttgatcggatctgtgatcgtgggcggtttagtgaggatgaggcccggtatttctttcagcagttgatctgtggagtgagctattgccattacatgcaaatatgccatagagatctgaagctggagaatgttctcttggatggcagcccagctccacggcttaagatctgcgattttggctattccaagtcatcagtgttgcattcaagacccaaatcagcagtaggaacgccagcatatattgcacctgaggtgctatcccgtcgcgagtatgatggaaagcttgcagacgtatggtcctgtggggtgactctttacgtcatgcttgtgggagcatacccatttgaagacccagatgaccccaagaatatacgcaacaccattcagcaaataatgcaagtgcaatacaagataccagatcatgtccacatatctacggaatgccagcaacttattgcccgtatctttgttgccaatccaatgaggaacctaccacgggaactcacggagactgcacaaggcatgtactacaggagggataacagggtcccttcttattcagaccaaacgtcggaagaaatcatgaagatagttcaagatgcaaggaccatgccgaaatcatccagatcaggctatgggtggagcagtgagtattcggatgaagaagaagagaaggaagaggaacacagaccagaggagcatgaggaagaggaagatgaatacgataggagggtgaaggaggtccatgcaagcggagaactccgtatggacgctcttcacatatgaaagctagtggaagagaaagttgcatgtagataactgggttgttgcggatctgaaggatccagtgggatgtatgcagttttggcttgagaatttgcttctgtttgtcaattttcatgtaacataatttaatacaccgagacaacagactaccatgttcttatattggtaaatatgaagcatgtaccttctatctgca

SEQ ID NO: 35938 - DNA, 1380 bp, Zea Mays
ccgcctcgccgctcgccaatggacacctccactagtccacttggcgccactccagcttcacgctgcccgcgtctgtgattcccattcataagagctggccacgcagcctcggagcaacagacccccgcccacgaccacacgcagcaagcagcagccgcgcgctcgcctaggactaccgactacgagcggccggcacatatggcagcgcagtccatgctcatgtcgaccagcgtcaacggcggccgcgcgctgccgtctcttcaggccgtccggccggctccatacccgcggctaccgctgccgtcgtcgtcgtcctcgtcagctggctacaggcactccaagtccgtctccgtgaagacgctcgccctgttcggcaaatccaaggtcaagaccgcgccggcgaagaaggctgctgcgcccaagcccaagccgaaggttgaggatggtatcttcggcacgtccggcgggatcggtttcaccaaggagaacgagctgttcgtcggccgcgttgccatgcttggctttgccgcatcgctacttggagaggccattaccgggaagggcatccttgcgcagctgaacctggagacgggcatccccatctacgaggcggagcccctcctcctgttcttcatcctcttcaccctccttggcgccatcggcgctctcggagaccgcggccgcttcgtcgacgaggaggtcaccggcctcgacaaggccgtcatccaacccggcaagggcttccgcggcgccctcggcctcagcgagggagggccgctgttcgggttcaccaagtcgaacgagctgttcgtggggcggatggcgcagctgggcgtggccttctccatcatcggcgagatcatcacggggaagggcgcgctggcgcagctcaacatcgagacgggggtgcccatcaacgagatagagccgctcgtcatcttcaacgtcctcttcttcttcatcgccgccatcaaccccggcaatggcaggttcatcatcggcgaggaagaggaataggctgctggctgctgctgctggcctcggacatgagtcgtgtgcgtttacttttacctgtgactgtgcgtctcggtgcgcgcgcgtaagtgctttgctgtgtatcaattactcgtgatgagacctcgaaggtagggtgtcgcgttgggttgtctgcttgtagaaacaagagcttatatataaattactactagctaatatgccatggttgcaacgagttctcctagactatataatcttgttgagttcgagagaccgtataaatcacactgattgaccttcggtactgagctgcatttctaagtggcgctctcttgtgtaactctactccgtttccgttctaacttttgcccccggcaaggtgat

SEQ ID NO: 35939 - DNA, 1041 bp, Zea Mays
ccgtcgccatcgagcacgacgaccgatgcgccccaccgtgccggaggaggcgcagcggcggcggacacgaagcgcgtttcgcggcggacgtaggtactttggctgtgtccttggggttcgagaatcgccgtgcggggaagacgcgagctggcgcccgtggccccggctttgcctttttccaggccgccaacaccgcagttcgcgggttggtttcccgcgatccgctttttgtcaacaccgccggattggttttccactcctccctcacctccgtttccgctgcactccatatttttacatgtaaggaaagtcaggcgaatggttggatttcgggattttgacagaacagtggtgaagctggaatgggtactcaactggactacctttgtaacagcaagggtgatatgccatatcttgattacttacaagctcatctctgatgcccacaaatttgggaagggcattgagcttccgctagctctacttggtatggcaggaatgaatctgcttaacatatttcttgggctcgatctacttaaagcattcacacgagaaagaaataagcagaaccatcaggattgaatgcacctttcttgatgacggtgtactctaaattttgagaaggctgtagttccgttcttgtagggacatagaggtatgtttaagtcttaattaatcagcaactacactggaggctatggattctttatgtatcaacacgtgctaatgctaagatctctacaagaaagggttgttaatgtgtaatcatgtaggtataacattattgttcattaggagaattaagagagtgcaggcgggtaactggatgcaggatttacatacattttgcaatcaggaatcggaaagaagagaagcgtaccatgtatcaaaccccttggtcccaactctcatacctcatctaaagtaacacctaagcaacttgtagattggcactgtgactttgaggctacaatgctcttgtttattaatatttataatatttgacgatatcttgctgcgaagcaaatattgtgttttttt

SEQ ID NO: 35940 - DNA, 1310 bp, Zea Mays
ccgtcgccatcgagcacgacgaccgatgcgccccaccgtgccggaggaggcgcagcggcggcggacacgaagcgcgtttcgcggcggacgtaggtactttggctgtgtccttggggttcgagaatcgccgtgcggggaagacgcgagctggcgcccgtggccccggctttgcctttttccaggccgccaacaccgcagttcgcgggttggtttcccgcgatccgctttttgtcaacaccgccggattggttttccactcctccctcacctccgtttccgttatctttgttcttgctaatcaatggcgtaataagggccttgagaacatgtttgagcatgaagaactatttggtggcagttggattggagcatattctgctctgtgcttttcttgtggctactttgcatatgaccaactggacatgctccgataccggctatacagtggatggcttcctggaattctcatgcatcacttgatcctactcatttgctttacactagctctgtataggaatgtcacaatcaactacctaaatctctcccttctgcactccatatttttacatgtaaggaaagtcaggcgaatggttggatttcgggattttgacagaacagtggtgaagctggaatgggtactcaactggactacctttgtaacagcaagggtgatatgccatatcttgattacttacaagctcatctctgatgcccacaaatttgggaagggcattgagcttccgctagctctacttggtatggcaggaatgaatctgcttaacatatttcttgggctcgatctacttaaagcattcacacgagaaagaaataagcagaaccatcaggattgaatgcacctttcttgatgacggtgtactctaaattttgagaaggctgtagttccgttcttgtagggacatagaggtatgtttaagtcttaattaatcagcaactacactggaggctatggattctttatgtatcaacacgtgctaatgctaagatctctacaagaaagggttgttaatgtgtaatcatgtaggtataacattattgttcattaggagaattaagagagtgcaggcgggtaactggatgcaggatttacatacattttgcaatcaggaatcggaaagaagagaagcgtaccatgtatcaaaccccttggtcccaactctcatacctcatctaaagtaacacctaagcaacttgtagattggcactgtgactttgaggctacaatgctcttgtttattaatatttataatatttgacgatatcttgctgcgaagcaaatattgtgttttttt

SEQ ID NO: 35941 - DNA, 1393 bp, Zea Mays
ccgtcgccatcgagcacgacgaccgatgcgccccaccgtgccggaggaggcgcagcggcggcggacacgaagcgcgtttcgcggcggacgtaggtactttggctgtgtccttggggttcgagaatcgccgtgcggggaagacgcgagctggcgcccgtggccccggctttgcctttttccaggccgccaacaccgcagttcgcgggttggtttcccgcgatccgctttttgtcaacaccgccggattggttttccactcctccctcacctccgtttccgttatctttgttcttgctaatcaatggcgtaataagggccttgagaacatgtttgagcatgaagaactatttggtggcagttggattggagcatattctgctctgtgcttttcttgtggctactttgcatatgaccaactggacatgctccgataccggctatacagtggatggcttcctggaattctcatgcatcacttgatcctactcatttgctttacactagctctgtataggaatgtcacaatcaactacctaaatctctcccttgtatgtgagggtaactttagccaatagatagttatgtgcaccagttttgaccccagttttgtcgcagtgaacctgaaatacaactgcactccatatttttacatgtaaggaaagtcaggcgaatggttggatttcgggattttgacagaacagtggtgaagctggaatgggtactcaactggactacctttgtaacagcaagggtgatatgccatatcttgattacttacaagctcatctctgatgcccacaaatttgggaagggcattgagcttccgctagctctacttggtatggcaggaatgaatctgcttaacatatttcttgggctcgatctacttaaagcattcacacgagaaagaaataagcagaaccatcaggattgaatgcacctttcttgatgacggtgtactctaaattttgagaaggctgtagttccgttcttgtagggacatagaggtatgtttaagtcttaattaatcagcaactacactggaggctatggattctttatgtatcaacacgtgctaatgctaagatctctacaagaaagggttgttaatgtgtaatcatgtaggtataacattattgttcattaggagaattaagagagtgcaggcgggtaactggatgcaggatttacatacattttgcaatcaggaatcggaaagaagagaagcgtaccatgtatcaaaccccttggtcccaactctcatacctcatctaaagtaacacctaagcaacttgtagattggcactgtgactttgaggctacaatgctcttgtttattaatatttataatatttgacgatatcttgctgcgaagcaaatattgtgttttttt

SEQ ID NO: 35942 - DNA, 1033 bp, Zea Mays
ggtaggtatttccccctcgttcttatagaacacaaggtatcctgaatgaacataaatattccaaaagtaccatttccttttgttgcttcttgtactgtttttaaatataagacatatcaccgaggctctggttggtcacatctgcatggcacatcatatagaagaaaacatccagggagagaattatcaattatgtctgtattacattgagccatcatagttgcaagctgaacaaacaatttacattctgaagtatttgctgttgcattcgcggtcctggcagctggtgctataattctgaccttgaatgttctgcttctgggggggcacatcatcttcttccaaagcctgagtcttcttggctattgcctatttccattggatgttggtgctctagtttgcatgctgaaggacaatgtcatacttaagattgtcgtggtgacaatcacattggcttggagctcctgggctgcgtatccattcatgagcgctgctgttaacccaaggagaaaagctctggccctatatcctgtcttcctcatgtatatctcagttggtttcctcataattgccattgattaacggggttgagctttgtagtaacatctgaagagttgagagtttccttggatggttgaaccaccagaatacatacaagtttgagtagacaatgcttctatccttgtaccctcgtggagtctttgtgaattgcctcgtaggaattttggtttttacatgatcttgaggcataaggttgtaaaattagtcgaaaatctgtatctgttgtaaagggcatggactttggaccactgaaatggctgtcaagctttcgtatactgcaatgtatgctgttcaaaagtcaactattcaaatattcgattattccttgaatactctttcgaaggtgcatcatgtgttagtacttaataagccgactaggattatctggacggctggagcttagtgatcaaatctttggatgaggctgtgagacacgctccttgagttctgctgcattggcaaaagaggaaaa

SEQ ID NO: 35943 - DNA, 951 bp, Zea Mays
ttttactcatgagtcatgatagctatgagtctttttaaaagcctcttgatgatgagaaaaaagtcactgctatcattttagatgcacttagagaaacaggacaaaggggaatcattagccgtggttggggagctcttggaagtttttcagaagttccagttgatgtcttcatcttggaggattgccctcacgattggctcttccctcggtgtgctgcagtggtgcatcatggtggagcaggtactacagcagcagggctgatagctgggtgtcctactactgtagtgccgttttttggagaccagttcttctggggcgagagagttcatgcacgaggagtgggtcctgcacctatatctatcgcagaacttactgtagaagcactatcaaatgcaataatattcatgcttgatccagaggtaaaatcacgaacaatggaactggcgatagcaataggcaatgaggatggtgtggcagcagctgtagatgcatttcatcgtcacctgccttcagaattgccgctgtcgccgcccgcacatgtggaggaagaacgcacagacttcttccaatggttttctcgaggcctggagaagtgttgtttcccattcagtttttaggtacggcagtccgtacgctaggtatatgtatgatttattcatttatgagttgaaaaggtatatcacagtaattttctaaaattggaataaatgctggtataagccaatggtgaggatgcaataaaaaagatcgacgcaattgtaaatgtttgggcagctacaattgtattcagaatttgctggtaggcctgaaatttgtgccccgatgtgccttccagtatgagtgtagtagctacagaactgagcgatcacgactgcaaaaatgtgtttaatttgctcgttttttccaaagaactatagaatatacaaagtgaattcatattttgcatgcgat

SEQ ID NO: 35944 - DNA, 1642 bp, Zea Mays
ataaaatgcagatttttaattcacttttttgagcatgcagccaagcatggaattcggtcattatgttagattggcaactcatgtcaattttcgtacttttgtgaagtcagctggcattgatttttacccattgggtggtgatcctcgggttatggctcagtatatgacaaaaaacaaagggtttttcctggcggcaccgacagagattgccattcaaagaaagcagcttaaggaaatcatcttctcacttctacctgcatgcacagaacctgatttggatactggaacacctttcagagctcaggtcatctacacatagcagaagcacttggagcacctctgcatatcttcttcacttttccatggacgccaactaatgaattcccacatccattggcacgaatgcctcaaagtgcaacttataggctatcgtatcttattctggatttaatagtttggtggggctccaggggattcataaatgatttcaggaagaaattaaatttgccccctattgcttacttcagcacataccatggatctatatcacacttacctactggatacatgtggagcccgcaacttatgccaaagccaaaagattggggtcctctagtggatgttgtgggatattgcttcttaaatcttggaacaaagtatcaaccgccaccacaactgtcacagtggcttcaacaggggcccaagccaatatacattggttttggtagcatgcctcttgatgatgagaaaaaagtcactgctatcattttagatgcacttagagaaacaggacaaaggggaatcattagccgtggttggggagctcttggaagtttttcagaagttccagttgatgtcttcatcttggaggattgccctcacgattggctcttccctcggtgtgctgcagtggtgcatcatggtggagcaggtactacagcagcagggctgatagctgggtgtcctactactgtagtgccgttttttggagaccagttcttctggggcgagagagttcatgcacgaggagtgggtcctgcacctatatctatcgcagaacttactgtagaagcactatcaaatgcaataatattcatgcttgatccagaggtaaaatcacgaacaatggaactggcgatagcaataggcaatgaggatggtgtggcagcagctgtagatgcatttcatcgtcacctgccttcagaattgccgctgtcgccgcccgcacatgtggaggaagaacgcacagacttcttccaatggttttctcgaggcctggagaagtgttgtttcccattcagtttttaggtacggcagtccgtacgctaggtatatgtatgatttattcatttatgagttgaaaaggtatatcacagtaattttctaaaattggaataaatgctggtataagccaatggtgaggatgcaataaaaaagatcgacgcaattgtaaatgtttgggcagctacaattgtattcagaatttgctggtaggcctgaaatttgtgccccgatgtgccttccagtatgagtgtagtagctacagaactgagcgatcacgactgcaaaaatgtgtttaatttgctcgttttttccaaagaactatagaatatacaaagtgaattcatattttgcatgcgat

SEQ ID NO: 35945 - DNA, 1674 bp, Zea Mays
ggggataaaatgcagatttttaattcacttttttgagcatgcagccaagcatggaattcggtcattatgttagattggcaactcatgtcaattttcgtacttttgtgaagtcagctggcattgatttttacccattgggtggtgatcctcgggttatggctcagtatatgacaaaaaacaaagggtttttcctggcggcaccgacagagattgccattcaaagaaagcagcttaaggaaatcatcttctcacttctacctgcatgcacagaacctgatttggatactggaacacctttcagagctcaggcaataatcgcgaatcctcctgcttatggtcatctacacatagcagaagcacttggagcacctctgcatatcttcttcacttttccatggacgccaactaatgaattcccacatccattggcacgaatgcctcaaagtgcaacttataggctatcgtatcttattctggatttaatagtttggtggggctccaggggattcataaatgatttcaggaagaaattaaatttgccccctattgcttacttcagcacataccatggatctatatcacacttacctactggatacatgtggagcccgcaacttatgccaaagccaaaagattggggtcctctagtggatgttgtgggatattgcttcttaaatcttggaacaaagtatcaaccgccaccacaactgtcacagtggcttcaacaggggcccaagccaatatacattggttttggtagcatgcctcttgatgatgagaaaaaagtcactgctatcattttagatgcacttagagaaacaggacaaaggggaatcattagccgtggttggggagctcttggaagtttttcagaagttccagttgatgtcttcatcttggaggattgccctcacgattggctcttccctcggtgtgctgcagtggtgcatcatggtggagcaggtactacagcagcagggctgatagctgggtgtcctactactgtagtgccgttttttggagaccagttcttctggggcgagagagttcatgcacgaggagtgggtcctgcacctatatctatcgcagaacttactgtagaagcactatcaaatgcaataatattcatgcttgatccagaggtaaaatcacgaacaatggaactggcgatagcaataggcaatgaggatggtgtggcagcagctgtagatgcatttcatcgtcacctgccttcagaattgccgctgtcgccgcccgcacatgtggaggaagaacgcacagacttcttccaatggttttctcgaggcctggagaagtgttgtttcccattcagtttttaggtacggcagtccgtacgctaggtatatgtatgatttattcatttatgagttgaaaaggtatatcacagtaattttctaaaattggaataaatgctggtataagccaatggtgaggatgcaataaaaaagatcgacgcaattgtaaatgtttgggcagctacaattgtattcagaatttgctggtaggcctgaaatttgtgccccgatgtgccttccagtatgagtgtagtagctacagaactgagcgatcacgactgcaaaaatgtgtttaatttgctcgttttttccaaagaactatagaatatacaaagtgaattcatattttgcatgcgat

SEQ ID NO: 35946 - DNA, 2047 bp, Zea Mays
aaaaggccctctagctgaatcgatcagatggttaagtagcattgtaaagtatttggccatagtaaatcgacagctactacttctggtaccattaaagggcaagataacgtttttgtaaggtcatactctgataggttgctgaagtgtgacctcactttggatatgctatcagaaaatgagaagataaagataaccgagagattggtaaagatccagaatgatggtacagtggaggtagatgtgacgcgcagtgctcttgttgcctcagaactctcggagattgatgcttttggttgtgtaccacacgatattgaagaagttacacctggaatcaccaaatcagtcccaaagctgaagattgctatacttgtagttggaacccgaggggatgtacagccttttatagcattagctaaacgactgcaggaattcggtcattatgttagattggcaactcatgtcaattttcgtacttttgtgaagtcagctggcattgatttttacccattgggtggtgatcctcgggttatggctcagtatatgacaaaaaacaaagggtttttcctggcggcaccgacagagattgccattcaaagaaagcagcttaaggaaatcatcttctcacttctacctgcatgcacagaacctgatttggatactggaacacctttcagagctcaggcaataatcgcgaatcctcctgcttatggtcatctacacatagcagaagcacttggagcacctctgcatatcttcttcacttttccatggacgccaactaatgaattcccacatccattggcacgaatgcctcaaagtgcaacttataggctatcgtatcttattctggatttaatagtttggtggggctccaggggattcataaatgatttcaggaagaaattaaatttgccccctattgcttacttcagcacataccatggatctatatcacacttacctactggatacatgtggagcccgcaacttatgccaaagccaaaagattggggtcctctagtggatgttgtgggatattgcttcttaaatcttggaacaaagtatcaaccgccaccacaactgtcacagtggcttcaacaggggcccaagccaatatacattggttttggtagcatgcctcttgatgatgagaaaaaagtcactgctatcattttagatgcacttagagaaacaggacaaaggggaatcattagccgtggttggggagctcttggaagtttttcagaagttccagttgatgtcttcatcttggaggattgccctcacgattggctcttccctcggtgtgctgcagtggtgcatcatggtggagcaggtactacagcagcagggctgatagctgggtgtcctactactgtagtgccgttttttggagaccagttcttctggggcgagagagttcatgcacgaggagtgggtcctgcacctatatctatcgcagaacttactgtagaagcactatcaaatgcaataatattcatgcttgatccagaggtaaaatcacgaacaatggaactggcgatagcaataggcaatgaggatggtgtggcagcagctgtagatgcatttcatcgtcacctgccttcagaattgccgctgtcgccgcccgcacatgtggaggaagaacgcacagacttcttccaatggttttctcgaggcctggagaagtgttgtttcccattcagtttttaggtacggcagtccgtacgctaggtatatgtatgatttattcatttatgagttgaaaaggtatatcacagtaattttctaaaattggaataaatgctggtataagccaatggtgaggatgcaataaaaaagatcgacgcaattgtaaatgtttgggcagctacaattgtattcagaatttgctggtaggcctgaaatttgtgccccgatgtgccttccagtatgagtgtagtagctacagaactgagcgatcacgactgcaaaaatgtgtttaatttgctcgttttttccaaagaactatagaatatacaaagtgaattcatattttgcatgcgat

SEQ ID NO: 35947 - DNA, 2017 bp, Zea Mays
gtgctccttcatttgaaaaagcaagttaatgaacactatgccatctgtatttggccatagtaaatcgacagctactacttctggtaccattaaagggcaagataacgtttttgtaaggtcatactctgataggttgctgaagtgtgacctcactttggatatgctatcagaaaatgagaagataaagataaccgagagattggtaaagatccagaatgatggtacagtggaggtagatgtgacgcgcagtgctcttgttgcctcagaactctcggagattgatgcttttggttgtgtaccacacgatattgaagaagttacacctggaatcaccaaatcagtcccaaagctgaagattgctatacttgtagttggaacccgaggggatgtacagccttttatagcattagctaaacgactgcaggaattcggtcattatgttagattggcaactcatgtcaattttcgtacttttgtgaagtcagctggcattgatttttacccattgggtggtgatcctcgggttatggctcagtatatgacaaaaaacaaagggtttttcctggcggcaccgacagagattgccattcaaagaaagcagcttaaggaaatcatcttctcacttctacctgcatgcacagaacctgatttggatactggaacacctttcagagctcaggcaataatcgcgaatcctcctgcttatggtcatctacacatagcagaagcacttggagcacctctgcatatcttcttcacttttccatggacgccaactaatgaattcccacatccattggcacgaatgcctcaaagtgcaacttataggtttggtggggctccaggggattcataaatgatttcaggaagaaattaaatttgccccctattgcttacttcagcacataccatggatctatatcacacttacctactggatacatgtggagcccgcaacttatgccaaagccaaaagattggggtcctctagtggatgttgtgggatattgcttcttaaatcttggaacaaagtatcaaccgccaccacaactgtcacagtggcttcaacaggggcccaagccaatatacattggttttggtagcatgcctcttgatgatgagaaaaaagtcactgctatcattttagatgcacttagagaaacaggacaaaggggaatcattagccgtggttggggagctcttggaagtttttcagaagttccagttgatgtcttcatcttggaggattgccctcacgattggctcttccctcggtgtgctgcagtggtgcatcatggtggagcaggtactacagcagcagggctgatagctgggtgtcctactactgtagtgccgttttttggagaccagttcttctggggcgagagagttcatgcacgaggagtgggtcctgcacctatatctatcgcagaacttactgtagaagcactatcaaatgcaataatattcatgcttgatccagaggtaaaatcacgaacaatggaactggcgatagcaataggcaatgaggatggtgtggcagcagctgtagatgcatttcatcgtcacctgccttcagaattgccgctgtcgccgcccgcacatgtggaggaagaacgcacagacttcttccaatggttttctcgaggcctggagaagtgttgtttcccattcagtttttaggtacggcagtccgtacgctaggtatatgtatgatttattcatttatgagttgaaaaggtatatcacagtaattttctaaaattggaataaatgctggtataagccaatggtgaggatgcaataaaaaagatcgacgcaattgtaaatgtttgggcagctacaattgtattcagaatttgctggtaggcctgaaatttgtgccccgatgtgccttccagtatgagtgtagtagctacagaactgagcgatcacgactgcaaaaatgtgtttaatttgctcgttttttccaaagaactatagaatatacaaagtgaattcatattttgcatgcgat

SEQ ID NO: 35948 - DNA, 2009 bp, Zea Mays
ctagaagtgtgctccttcatttgaaaaagcaagttaatgaacactatgccatctgtatttggccatagtaaatcgacagctactacttctggtaccattaaagggcaagataacgtttttgtaaggtcatactctgataggttgctgaagtgtgacctcactttggatatgctatcagaaaatgagaagataaagataaccgagagattggtaaagatccagaatgatggtacagtggaggtagatgtgacgcgcagtgctcttgttgcctcagaactctcggagattgatgcttttggttgtgtaccacacgatattgaagaagttacacctggaatcaccaaatcagtcccaaagctgaagattgctatacttgtagttggaacccgaggggatgtacagccttttatagcattagctaaacgactgcaggaattcggtcattatgttagattggcaactcatgtcaattttcgtacttttgtgaagtcagctggcattgatttttacccattgggtggtgatcctcgggttatggctcagtatatgacaaaaaacaaagggtttttcctggcggcaccgacagagattgccattcaaagaaagcagcttaaggaaatcatcttctcacttctacctgcatgcacagaacctgatttggatactggaacacctttcagagctcaggcaataatcgcgaatcctcctgcttatggtcatctacacatagcagaagcacttggagcacctctgcatatcttcttcacttttccatggacgccaactaatgaattcccacatccattggcacgaatgcctcaaagtgcaacttatagggggattcataaatgatttcaggaagaaattaaatttgccccctattgcttacttcagcacataccatggatctatatcacacttacctactggatacatgtggagcccgcaacttatgccaaagccaaaagattggggtcctctagtggatgttgtgggatattgcttcttaaatcttggaacaaagtatcaaccgccaccacaactgtcacagtggcttcaacaggggcccaagccaatatacattggttttggtagcatgcctcttgatgatgagaaaaaagtcactgctatcattttagatgcacttagagaaacaggacaaaggggaatcattagccgtggttggggagctcttggaagtttttcagaagttccagttgatgtcttcatcttggaggattgccctcacgattggctcttccctcggtgtgctgcagtggtgcatcatggtggagcaggtactacagcagcagggctgatagctgggtgtcctactactgtagtgccgttttttggagaccagttcttctggggcgagagagttcatgcacgaggagtgggtcctgcacctatatctatcgcagaacttactgtagaagcactatcaaatgcaataatattcatgcttgatccagaggtaaaatcacgaacaatggaactggcgatagcaataggcaatgaggatggtgtggcagcagctgtagatgcatttcatcgtcacctgccttcagaattgccgctgtcgccgcccgcacatgtggaggaagaacgcacagacttcttccaatggttttctcgaggcctggagaagtgttgtttcccattcagtttttaggtacggcagtccgtacgctaggtatatgtatgatttattcatttatgagttgaaaaggtatatcacagtaattttctaaaattggaataaatgctggtataagccaatggtgaggatgcaataaaaaagatcgacgcaattgtaaatgtttgggcagctacaattgtattcagaatttgctggtaggcctgaaatttgtgccccgatgtgccttccagtatgagtgtagtagctacagaactgagcgatcacgactgcaaaaatgtgtttaatttgctcgttttttccaaagaactatagaatatacaaagtgaattcatattttgcatgcgat

SEQ ID NO: 35949 - DNA, 2406 bp, Zea Mays
cactccgtcagtctcccctccggcctcacgccgcgctcgcggtgctgcctcccgggctcccgttccagcattccaggctcgcatcgcacggcctggccccgcccgctccgacccttctcggcgacactcctcgtaggctcgtactggcacgtccccgctctgtcttctgcccaccaggcactagcgggtgcgggtccacgcttccaagggttccaaactctcggcggcgcaagcaatggcggcgcggggccgggagcactggtagtttcgcatatcgcggcggcttgttgccacctcgccatcgcagattatggggatcaacggcgaggagtgggaggagacggtactgggcgacggcgttgggaggcggaagggtggtgctgaggcttccggtttggtcgcatcctcctcctttgctgaggggatgggggaattcgtgctgaggtctatggacgccaggttctccggatcggtcgacgacgatgaatatgtctcgtctcggcagccagtatttggccatagtaaatcgacagctactacttctggtaccattaaagggcaagataacgtttttgtaaggtcatactctgataggttgctgaagtgtgacctcactttggatatgctatcagaaaatgagaagataaagataaccgagagattggtaaagatccagaatgatggtacagtggaggtagatgtgacgcgcagtgctcttgttgcctcagaactctcggagattgatgcttttggttgtgtaccacacgatattgaagaagttacacctggaatcaccaaatcagtcccaaagctgaagattgctatacttgtagttggaacccgaggggatgtacagccttttatagcattagctaaacgactgcaggaattcggtcattatgttagattggcaactcatgtcaattttcgtacttttgtgaagtcagctggcattgatttttacccattgggtggtgatcctcgggttatggctcagtatatgacaaaaaacaaagggtttttcctggcggcaccgacagagattgccattcaaagaaagcagcttaaggaaatcatcttctcacttctacctgcatgcacagaacctgatttggatactggaacacctttcagagctcaggcaataatcgcgaatcctcctgcttatggtcatctacacatagcagaagcacttggagcacctctgcatatcttcttcacttttccatggacgccaactaatgaattcccacatccattggcacgaatgcctcaaagtgcaacttataggcacataccatggatctatatcacacttacctactggatacatgtggagcccgcaacttatgccaaagccaaaagattggggtcctctagtggatgttgtgggatattgcttcttaaatcttggaacaaagtatcaaccgccaccacaactgtcacagtggcttcaacaggggcccaagccaatatacattggttttggtagcatgcctcttgatgatgagaaaaaagtcactgctatcattttagatgcacttagagaaacaggacaaaggggaatcattagccgtggttggggagctcttggaagtttttcagaagttccagttgatgtcttcatcttggaggattgccctcacgattggctcttccctcggtgtgctgcagtggtgcatcatggtggagcaggtactacagcagcagggctgatagctgggtgtcctactactgtagtgccgttttttggagaccagttcttctggggcgagagagttcatgcacgaggagtgggtcctgcacctatatctatcgcagaacttactgtagaagcactatcaaatgcaataatattcatgcttgatccagaggtaaaatcacgaacaatggaactggcgatagcaataggcaatgaggatggtgtggcagcagctgtagatgcatttcatcgtcacctgccttcagaattgccgctgtcgccgcccgcacatgtggaggaagaacgcacagacttcttccaatggttttctcgaggcctggagaagtgttgtttcccattcagtttttaggtacggcagtccgtacgctaggtatatgtatgatttattcatttatgagttgaaaaggtatatcacagtaattttctaaaattggaataaatgctggtataagccaatggtgaggatgcaataaaaaagatcgacgcaattgtaaatgtttgggcagctacaattgtattcagaatttgctggtaggcctgaaatttgtgccccgatgtgccttccagtatgagtgtagtagctacagaactgagcgatcacgactgcaaaaatgtgtttaatttgctcgttttttccaaagaactatagaatatacaaagtgaattcatattttgcatgcgat

SEQ ID NO: 35950 - DNA, 2564 bp, Zea Mays
cactccgtcagtctcccctccggcctcacgccgcgctcgcggtgctgcctcccgggctcccgttccagcattccaggctcgcatcgcacggcctggccccgcccgctccgacccttctcggcgacactcctcgtaggctcgtactggcacgtccccgctctgtcttctgcccaccaggcactagcgggtgcgggtccacgcttccaagggttccaaactctcggcggcgcaagcaatggcggcgcggggccgggagcactggtagtttcgcatatcgcggcggcttgttgccacctcgccatcgcagattatggggatcaacggcgaggagtgggaggagacggtactgggcgacggcgttgggaggcggaagggtggtgctgaggcttccggtttggtcgcatcctcctcctttgctgaggggatgggggaattcgtgctgaggtctatggacgccaggttctccggatcggtcgacgacgatgaatatgtctcgtctcggcagccagagctagaagtgtgctccttcatttgaaaaagcaagttaatgaacactatgccatctgtatttggccatagtaaatcgacagctactacttctggtaccattaaagggcaagataacgtttttgtaaggtcatactctgataggttgctgaagtgtgacctcactttggatatgctatcagaaaatgagaagataaagataaccgagagattggtaaagatccagaatgatggtacagtggaggtagatgtgacgcgcagtgctcttgttgcctcagaactctcggagattgatgcttttggttgtgtaccacacgatattgaagaagttacacctggaatcaccaaatcagtcccaaagctgaagattgctatacttgtagttggaacccgaggggatgtacagccttttatagcattagctaaacgactgcaggaattcggtcattatgttagattggcaactcatgtcaattttcgtacttttgtgaagtcagctggcattgatttttacccattgggtggtgatcctcgggttatggctcagtatatgacaaaaaacaaagggtttttcctggcggcaccgacagagattgccattcaaagaaagcagcttaaggaaatcatcttctcacttctacctgcatgcacagaacctgatttggatactggaacacctttcagagctcaggcaataatcgcgaatcctcctgcttatggtcatctacacatagcagaagcacttggagcacctctgcatatcttcttcacttttccatggacgccaactaatgaattcccacatccattggcacgaatgcctcaaagtgcaacttataggctatcgtatcttattctggatttaatagtttggtggggctccaggggattcataaatgatttcaggaagaaattaaatttgccccctattgcttacttcagcacataccatggatctatatcacacttacctactggatacatgtggagcccgcaacttatgccaaagccaaaagattggggtcctctagtggatgttgtgggatattgcttcttaaatcttggaacaaagtatcaaccgccaccacaactgtcacagtggcttcaacaggggcccaagccaatatacattggttttggtagcatgcctcttgatgatgagaaaaaagtcactgctatcattttagatgcacttagagaaacaggacaaaggggaatcattagccgtggttggggagctcttggaagtttttcagaagttccagttgatgtcttcatcttggaggattgccctcacgattggctcttccctcggtgtgctgcagtggtgcatcatggtggagcaggtactacagcagcagggctgatagctgggtgtcctactactgtagtgccgttttttggagaccagttcttctggggcgagagagttcatgcacgaggagtgggtcctgcacctatatctatcgcagaacttactgtagaagcactatcaaatgcaataatattcatgcttgatccagaggtaaaatcacgaacaatggaactggcgatagcaataggcaatgaggatggtgtggcagcagctgtagatgcatttcatcgtcacctgccttcagaattgccgctgtcgccgcccgcacatgtggaggaagaacgcacagacttcttccaatggttttctcgaggcctggagaagtgttgtttcccattcagtttttaggtacggcagtccgtacgctaggtatatgtatgatttattcatttatgagttgaaaaggtatatcacagtaattttctaaaattggaataaatgctggtataagccaatggtgaggatgcaataaaaaagatcgacgcaattgtaaatgtttgggcagctacaattgtattcagaatttgctggtaggcctgaaatttgtgccccgatgtgccttccagtatgagtgtagtagctacagaactgagcgatcacgactgcaaaaatgtgtttaatttgctcgttttttccaaagaactatagaatatacaaagtgaattcatattttgcatgcgat

SEQ ID NO: 35951 - DNA, 2315 bp, Zea Mays
cactccgtcagtctcccctccggcctcacgccgcgctcgcggtgctgcctcccgggctcccgttccagcattccaggctcgcatcgcacggcctggccccgcccgctccgacccttctcggcgacactcctcgtaggctcgtactggcacgtccccgctctgtcttctgcccaccaggcactagcgggtgcgggtccacgcttccaagggttccaaactctcggcggcgcaagcaatggcggcgcggggccgggagcactggtagtttcgcatatcgcggcggcttgttgccacctcgccatcgcagattatggggatcaacggcgaggagtgggaggagacggtactgggcgacggcgttgggaggcggaagggtggtgctgaggcttccggtttggtcgcatcctcctcctttgctgaggggatgggggaattcgtgctgaggtctatggacgccaggttctccggatcggtcgacgacgatgaatatgtctcgtctcggcagccagtatttggccatagtaaatcgacagctactacttctggtaccattaaagggcaagataacgtttttgtaaggtcatactctgataggttgctgaagtgtgacctcactttggatatgctatcagaaaatgagaagataaagataaccgagagattggtaaagatccagaatgatggtacagtggaggaattcggtcattatgttagattggcaactcatgtcaattttcgtacttttgtgaagtcagctggcattgatttttacccattgggtggtgatcctcgggttatggctcagtatatgacaaaaaacaaagggtttttcctggcggcaccgacagagattgccattcaaagaaagcagcttaaggaaatcatcttctcacttctacctgcatgcacagaacctgatttggatactggaacacctttcagagctcaggcaataatcgcgaatcctcctgcttatggtcatctacacatagcagaagcacttggagcacctctgcatatcttcttcacttttccatggacgccaactaatgaattcccacatccattggcacgaatgcctcaaagtgcaacttataggctatcgtatcttattctggatttaatagtttggtggggctccaggggattcataaatgatttcaggaagaaattaaatttgccccctattgcttacttcagcacataccatggatctatatcacacttacctactggatacatgtggagcccgcaacttatgccaaagccaaaagattggggtcctctagtggatgttgtgggatattgcttcttaaatcttggaacaaagtatcaaccgccaccacaactgtcacagtggcttcaacaggggcccaagccaatatacattggttttggtagcatgcctcttgatgatgagaaaaaagtcactgctatcattttagatgcacttagagaaacaggacaaaggggaatcattagccgtggttggggagctcttggaagtttttcagaagttccagttgatgtcttcatcttggaggattgccctcacgattggctcttccctcggtgtgctgcagtggtgcatcatggtggagcaggtactacagcagcagggctgatagctgggtgtcctactactgtagtgccgttttttggagaccagttcttctggggcgagagagttcatgcacgaggagtgggtcctgcacctatatctatcgcagaacttactgtagaagcactatcaaatgcaataatattcatgcttgatccagaggtaaaatcacgaacaatggaactggcgatagcaataggcaatgaggatggtgtggcagcagctgtagatgcatttcatcgtcacctgccttcagaattgccgctgtcgccgcccgcacatgtggaggaagaacgcacagacttcttccaatggttttctcgaggcctggagaagtgttgtttcccattcagtttttaggtacggcagtccgtacgctaggtatatgtatgatttattcatttatgagttgaaaaggtatatcacagtaattttctaaaattggaataaatgctggtataagccaatggtgaggatgcaataaaaaagatcgacgcaattgtaaatgtttgggcagctacaattgtattcagaatttgctggtaggcctgaaatttgtgccccgatgtgccttccagtatgagtgtagtagctacagaactgagcgatcacgactgcaaaaatgtgtttaatttgctcgttttttccaaagaactatagaatatacaaagtgaattcatattttgcatgcgat

SEQ ID NO: 35952 - DNA, 2681 bp, Zea Mays
cactccgtcagtctcccctccggcctcacgccgcgctcgcggtgctgcctcccgggctcccgttccagcattccaggctcgcatcgcacggcctggccccgcccgctccgacccttctcggcgacactcctcgtaggctcgtactggcacgtccccgctctgtcttctgcccaccaggcactagcgggtgcgggtccacgcttccaagggttccaaactctcggcggcgcaagcaatggcggcgcggggccgggagcactggtagtttcgcatatcgcggcggcttgttgccacctcgccatcgcagattatggggatcaacggcgaggagtgggaggagacggtactgggcgacggcgttgggaggcggaagggtggtgctgaggcttccggtttggtcgcatcctcctcctttgctgaggggatgggggaattcgtgctgaggtctatggacgccaggttctccggatcggtcgacgacgatgaatatgtctcgtctcggcagccagtatttggccatagtaaatcgacagctactacttctggtaccattaaagggcaagataacgtttttgtaaggtcatactctgataggttgctgaagtgtgacctcactttggatatgctatcagaaaatgagaagataaagataaccgagagattggtaaagatccagaatgatggtacagtggaggtagatgtgacgcgcagtgctcttgttgcctcagaactctcggagattgatgcttttggttgtgtaccacacgatattgaagaagttacacctggaatcaccaaatcagtcccaaagctgaagattgctatacttgtagttggaacccgaggggatgtacagccttttatagcattagctaaacgactgcaggtaggtgaacctgcaagcatctgctagagagaccaagaggctccccagaaaataaatacattgtgcagcatacagatctataatggggataaaatgcagatttttaattcacttttttgagcatgcagccaagcatggaattcggtcattatgttagattggcaactcatgtcaattttcgtacttttgtgaagtcagctggcattgatttttacccattgggtggtgatcctcgggttatggctcagtatatgacaaaaaacaaagggtttttcctggcggcaccgacagagattgccattcaaagaaagcagcttaaggaaatcatcttctcacttctacctgcatgcacagaacctgatttggatactggaacacctttcagagctcaggcaataatcgcgaatcctcctgcttatggtcatctacacatagcagaagcacttggagcacctctgcatatcttcttcacttttccatggacgccaactaatgaattcccacatccattggcacgaatgcctcaaagtgcaacttataggaaaaaaattctgacatcttcgcacctctcacgttcagctatcgtatcttattctggatttaatagtttggtggggctccaggggattcataaatgatttcaggaagaaattaaatttgccccctattgcttacttcagcacataccatggatctatatcacacttacctactggatacatgtggagcccgcaacttatgccaaagccaaaagattggggtcctctagtggatgttgtgggatattgcttcttaaatcttggaacaaagtatcaaccgccaccacaactgtcacagtggcttcaacaggggcccaagccaatatacattggttttggtagcatgcctcttgatgatgagaaaaaagtcactgctatcattttagatgcacttagagaaacaggacaaaggggaatcattagccgtggttggggagctcttggaagtttttcagaagttccagttgatgtcttcatcttggaggattgccctcacgattggctcttccctcggtgtgctgcagtggtgcatcatggtggagcaggtactacagcagcagggctgatagctgggtgtcctactactgtagtgccgttttttggagaccagttcttctggggcgagagagttcatgcacgaggagtgggtcctgcacctatatctatcgcagaacttactgtagaagcactatcaaatgcaataatattcatgcttgatccagaggtaaaatcacgaacaatggaactggcgatagcaataggcaatgaggatggtgtggcagcagctgtagatgcatttcatcgtcacctgccttcagaattgccgctgtcgccgcccgcacatgtggaggaagaacgcacagacttcttccaatggttttctcgaggcctggagaagtgttgtttcccattcagtttttaggtacggcagtccgtacgctaggtatatgtatgatttattcatttatgagttgaaaaggtatatcacagtaattttctaaaattggaataaatgctggtataagccaatggtgaggatgcaataaaaaagatcgacgcaattgtaaatgtttgggcagctacaattgtattcagaatttgctggtaggcctgaaatttgtgccccgatgtgccttccagtatgagtgtagtagctacagaactgagcgatcacgactgcaaaaatgtgtttaatttgctcgttttttccaaagaactatagaatatacaaagtgaattcatattttgcatgcgat

SEQ ID NO: 35953 - DNA, 2600 bp, Zea Mays
cactccgtcagtctcccctccggcctcacgccgcgctcgcggtgctgcctcccgggctcccgttccagcattccaggctcgcatcgcacggcctggccccgcccgctccgacccttctcggcgacactcctcgtaggctcgtactggcacgtccccgctctgtcttctgcccaccaggcactagcgggtgcgggtccacgcttccaagggttccaaactctcggcggcgcaagcaatggcggcgcggggccgggagcactggtagtttcgcatatcgcggcggcttgttgccacctcgccatcgcagattatggggatcaacggcgaggagtgggaggagacggtactgggcgacggcgttgggaggcggaagggtggtgctgaggcttccggtttggtcgcatcctcctcctttgctgaggggatgggggaattcgtgctgaggtctatggacgccaggttctccggatcggtcgacgacgatgaatatgtctcgtctcggcagccagtatttggccatagtaaatcgacagctactacttctggtaccattaaagggcaagataacgtttttgtaaggtcatactctgataggttgctgaagtgtgacctcactttggatatgctatcagaaaatgagaagataaagataaccgagagattggtaaagatccagaatgatggtacagtggaggtagatgtgacgcgcagtgctcttgttgcctcagaactctcggagattgatgcttttggttgtgtaccacacgatattgaagaagttacacctggaatcaccaaatcagtcccaaagctgaagattgctatacttgtagttggaacccgaggggatgtacagccttttatagcattagctaaacgactgcaggtaggtgaacctgcaagcatctgctagagagaccaagaggctccccagaaaataaatacattgtgcagcatacagatctataatggggataaaatgcagatttttaattcacttttttgagcatgcagccaagcatggaattcggtcattatgttagattggcaactcatgtcaattttcgtacttttgtgaagtcagctggcattgatttttacccattgggtggtgatcctcgggttatggctcagtatatgacaaaaaacaaagggtttttcctggcggcaccgacagagattgccattcaaagaaagcagcttaaggaaatcatcttctcacttctacctgcatgcacagaacctgatttggatactggaacacctttcagagctcaggcaataatcgcgaatcctcctgcttatggtcatctacacatagcagaagcacttggagcacctctgcatatcttcttcacttttccatggacgccaactaatgaattcccacatccattggcacgaatgcctcaaagtgcaacttatagggggattcataaatgatttcaggaagaaattaaatttgccccctattgcttacttcagcacataccatggatctatatcacacttacctactggatacatgtggagcccgcaacttatgccaaagccaaaagattggggtcctctagtggatgttgtgggatattgcttcttaaatcttggaacaaagtatcaaccgccaccacaactgtcacagtggcttcaacaggggcccaagccaatatacattggttttggtagcatgcctcttgatgatgagaaaaaagtcactgctatcattttagatgcacttagagaaacaggacaaaggggaatcattagccgtggttggggagctcttggaagtttttcagaagttccagttgatgtcttcatcttggaggattgccctcacgattggctcttccctcggtgtgctgcagtggtgcatcatggtggagcaggtactacagcagcagggctgatagctgggtgtcctactactgtagtgccgttttttggagaccagttcttctggggcgagagagttcatgcacgaggagtgggtcctgcacctatatctatcgcagaacttactgtagaagcactatcaaatgcaataatattcatgcttgatccagaggtaaaatcacgaacaatggaactggcgatagcaataggcaatgaggatggtgtggcagcagctgtagatgcatttcatcgtcacctgccttcagaattgccgctgtcgccgcccgcacatgtggaggaagaacgcacagacttcttccaatggttttctcgaggcctggagaagtgttgtttcccattcagtttttaggtacggcagtccgtacgctaggtatatgtatgatttattcatttatgagttgaaaaggtatatcacagtaattttctaaaattggaataaatgctggtataagccaatggtgaggatgcaataaaaaagatcgacgcaattgtaaatgtttgggcagctacaattgtattcagaatttgctggtaggcctgaaatttgtgccccgatgtgccttccagtatgagtgtagtagctacagaactgagcgatcacgactgcaaaaatgtgtttaatttgctcgttttttccaaagaactatagaatatacaaagtgaattcatattttgcatgcgat

SEQ ID NO: 35954 - DNA, 2373 bp, Zea Mays
cactccgtcagtctcccctccggcctcacgccgcgctcgcggtgctgcctcccgggctcccgttccagcattccaggctcgcatcgcacggcctggccccgcccgctccgacccttctcggcgacactcctcgtaggctcgtactggcacgtccccgctctgtcttctgcccaccaggcactagcgggtgcgggtccacgcttccaagggttccaaactctcggcggcgcaagcaatggcggcgcggggccgggagcactggtagtttcgcatatcgcggcggcttgttgccacctcgccatcgcagattatggggatcaacggcgaggagtgggaggagacggtactgggcgacggcgttgggaggcggaagggtggtgctgaggcttccggtttggtcgcatcctcctcctttgctgaggggatgggggaattcgtgctgaggtctatggacgccaggttctccggatcggtcgacgacgatgaatatgtctcgtctcggcagccagataaagataaccgagagattggtaaagatccagaatgatggtacagtggaggtagatgtgacgcgcagtgctcttgttgcctcagaactctcggagattgatgcttttggttgtgtaccacacgatattgaagaagttacacctggaatcaccaaatcagtcccaaagctgaagattgctatacttgtagttggaacccgaggggatgtacagccttttatagcattagctaaacgactgcaggaattcggtcattatgttagattggcaactcatgtcaattttcgtacttttgtgaagtcagctggcattgatttttacccattgggtggtgatcctcgggttatggctcagtatatgacaaaaaacaaagggtttttcctggcggcaccgacagagattgccattcaaagaaagcagcttaaggaaatcatcttctcacttctacctgcatgcacagaacctgatttggatactggaacacctttcagagctcaggcaataatcgcgaatcctcctgcttatggtcatctacacatagcagaagcacttggagcacctctgcatatcttcttcacttttccatggacgccaactaatgaattcccacatccattggcacgaatgcctcaaagtgcaacttataggctatcgtatcttattctggatttaatagtttggtggggctccaggggattcataaatgatttcaggaagaaattaaatttgccccctattgcttacttcagcacataccatggatctatatcacacttacctactggatacatgtggagcccgcaacttatgccaaagccaaaagattggggtcctctagtggatgttgtgggatattgcttcttaaatcttggaacaaagtatcaaccgccaccacaactgtcacagtggcttcaacaggggcccaagccaatatacattggttttggtagcatgcctcttgatgatgagaaaaaagtcactgctatcattttagatgcacttagagaaacaggacaaaggggaatcattagccgtggttggggagctcttggaagtttttcagaagttccagttgatgtcttcatcttggaggattgccctcacgattggctcttccctcggtgtgctgcagtggtgcatcatggtggagcaggtactacagcagcagggctgatagctgggtgtcctactactgtagtgccgttttttggagaccagttcttctggggcgagagagttcatgcacgaggagtgggtcctgcacctatatctatcgcagaacttactgtagaagcactatcaaatgcaataatattcatgcttgatccagaggtaaaatcacgaacaatggaactggcgatagcaataggcaatgaggatggtgtggcagcagctgtagatgcatttcatcgtcacctgccttcagaattgccgctgtcgccgcccgcacatgtggaggaagaacgcacagacttcttccaatggttttctcgaggcctggagaagtgttgtttcccattcagtttttaggtacggcagtccgtacgctaggtatatgtatgatttattcatttatgagttgaaaaggtatatcacagtaattttctaaaattggaataaatgctggtataagccaatggtgaggatgcaataaaaaagatcgacgcaattgtaaatgtttgggcagctacaattgtattcagaatttgctggtaggcctgaaatttgtgccccgatgtgccttccagtatgagtgtagtagctacagaactgagcgatcacgactgcaaaaatgtgtttaatttgctcgttttttccaaagaactatagaatatacaaagtgaattcatattttgcatgcgat

SEQ ID NO: 35955 - DNA, 1805 bp, Zea Mays
cactccgtcagtctcccctccggcctcacgccgcgctcgcggtgctgcctcccgggctcccgttccagcattccaggctcgcatcgcacggcctggccccgcccgctccgacccttctcggcgacactcctcgtaggctcgtactggcacgtccccgctctgtcttctgcccaccaggcactagcgggtgcgggtccacgcttccaagggttccaaactctcggcggcgcaagcaatggcggcgcggggccgggagcactggtagtttcgcatatcgcggcggcttgttgccacctcgccatcgcagattatggggatcaacggcgaggagtgggaggagacggtactgggcgacggcgttgggaggcggaagggtggtgctgaggcttccggtttggtcgcatcctcctcctttgctgaggggatgggggaattcgtgctgaggtctatggacgccaggttctccggatcggtcgacgacgatgaatatgtctcgtctcggcagccagtatttggccatagtaaatcgacagctactacttctggtaccattaaagggcaagataacgtttttgtaaggtcatactctgataggttgctgaagtgtgacctcactttggatatgctatcagaaaatgagaagataaagataaccgagagattggtaaagatccagaatgatggtacagtggaggtagatgtgacgcgcagtgctcttgttgcctcagaactctcggagattgatgcttttggttgtgtaccacacgatattgaagaagttacacctggaatcaccaaatcagtcccaaagctgaagattgctatacttgtagttggaacccgaggggatgtacagccttttatagcattagctaaacgactgcaggaattcggtcattatgttagattggcaactcatgtcaattttcgtacttttgtgaagtcagctggcattgatttttacccattgggtggtgatcctcgggttatggctcagtatatgacaaaaaacaaagggtttttcctggcggcaccgacagagattgccattcaaagaaagcagcttaaggaaatcatcttctcacttctacctgcatgcacagaacctgatttggatactggaacacctttcagagctcaggcaataatcgcgaatcctcctgcttatggtcatctacacatagcagaagcacttggagcacctctgcatatcttcttcacttttccatggacgccaactaatgaattcccacatccattggcacgaatgcctcaaagtgcaacttataggctatcgtatcttattctggatttaatagtttggtggggctccaggggattcataaatgatttcaggaagaaattaaatttgccccctattgcttacttcagcacataccatggatctatatcacacttacctactggatacatgtggagcccgcaacttatgccaaagccaaaagattggggtcctctagtggatgttgtgggatattgcttcttaaatcttggaacaaagtatcaaccgccaccacaactgtcacagtggcttcaacaggggcccaagccaatatacattggttttggtagcatgcctcttgatgatgagaaaaaagtcactgctatcattttagatgcacttagagaaacaggacaaaggggaatcattagccgtggttggggagctcttggaagtttttcagaagttccagttgatgtcttcatcttggaggattgccctcacgattggctcttccctcggtgtgctgcagtggaggagcagcgagggagggctaatctct

SEQ ID NO: 35956 - DNA, 1792 bp, Zea Mays
cactccgtcagtctcccctccggcctcacgccgcgctcgcggtgctgcctcccgggctcccgttccagcattccaggctcgcatcgcacggcctggccccgcccgctccgacccttctcggcgacactcctcgtaggctcgtactggcacgtccccgctctgtcttctgcccaccaggcactagcgggtgcgggtccacgcttccaagggttccaaactctcggcggcgcaagcaatggcggcgcggggccgggagcactggtagtttcgcatatcgcggcggcttgttgccacctcgccatcgcagattatggggatcaacggcgaggagtgggaggagacggtactgggcgacggcgttgggaggcggaagggtggtgctgaggcttccggtttggtcgcatcctcctcctttgctgaggggatgggggaattcgtgctgaggtctatggacgccaggttctccggatcggtcgacgacgatgaatatgtctcgtctcggcagccagtatttggccatagtaaatcgacagctactacttctggtaccattaaagggcaagataacgtttttgtaaggtcatactctgataggttgctgaagtgtgacctcactttggatatgctatcagaaaatgagaagataaagataaccgagagattggtaaagatccagaatgatggtacagtggaggtagatgtgacgcgcagtgctcttgttgcctcagaactctcggagattgatgcttttggttgtgtaccacacgatattgaagaagttacacctggaatcaccaaatcagtcccaaagctgaagattgctatacttgtagttggaacccgaggggatgtacagccttttatagcattagctaaacgactgcaggaattcggtcattatgttagattggcaactcatgtcaattttcgtacttttgtgaagtcagctggcattgatttttacccattgggtggtgatcctcgggttatggctcagtatatgacaaaaaacaaagggtttttcctggcggcaccgacagagattgccattcaaagaaagcagcttaaggaaatcatcttctcacttctacctgcatgcacagaacctgatttggatactggaacacctttcagagctcaggcaataatcgcgaatcctcctgcttatggtcatctacacatagcagaagcacttggagcacctctgcatatcttcttcacttttccatggacgccaactaatgaattcccacatccattggcacgaatgcctcaaagtgcaacttataggtttggtggggctccaggggattcataaatgatttcaggaagaaattaaatttgccccctattgcttacttcagcacataccatggatctatatcacacttacctactggatacatgtggagcccgcaacttatgccaaagccaaaagattggggtcctctagtggatgttgtgggatattgcttcttaaatcttggaacaaagtatcaaccgccaccacaactgtcacagtggcttcaacaggggcccaagccaatatacattggttttggtagcatgcctcttgatgatgagaaaaaagtcactgctatcattttagatgcacttagagaaacaggacaaaggggaatcattagccgtggttggggagctcttggaagtttttcagaagttccagttgatgtcttcatcttggaggattgccctcacgattggctcttccctcggtgtgctgcagtggataatgagatcatcgaacacatcctttgtggctgtgtgtttg

SEQ ID NO: 35957 - DNA, 1545 bp, Zea Mays
cactccgtcagtctcccctccggcctcacgccgcgctcgcggtgctgcctcccgggctcccgttccagcattccaggctcgcatcgcacggcctggccccgcccgctccgacccttctcggcgacactcctcgtaggctcgtactggcacgtccccgctctgtcttctgcccaccaggcactagcgggtgcgggtccacgcttccaagggttccaaactctcggcggcgcaagcaatggcggcgcggggccgggagcactggtagtttcgcatatcgcggcggcttgttgccacctcgccatcgcagattatggggatcaacggcgaggagtgggaggagacggtactgggcgacggcgttgggaggcggaagggtggtgctgaggcttccggtttggtcgcatcctcctcctttgctgaggggatgggggaattcgtgctgaggtctatggacgccaggttctccggatcggtcgacgacgatgaatatgtctcgtctcggcagccagtatttggccatagtaaatcgacagctactacttctggtaccattaaagggcaagataacgtttttgtaaggtcatactctgataggttgctgaagtgtgacctcactttggatatgctatcagaaaatgagaagataaagataaccgagagattggtaaagatccagaatgatggtacagtggaggtagatgtgacgcgcagtgctcttgttgcctcagaactctcggagattgatgcttttggttgtgtaccacacgatattgaagaagttacacctggaatcaccaaatcagtcccaaagctgaagattgctatacttgtagttggaacccgaggggatgtacagccttttatagcattagctaaacgactgcaggaattcggtcattatgttagattggcaactcatgtcaattttcgtacttttgtgaagtcagctggcattgatttttacccattgggtggtgatcctcgggttatggctcagtatatgacaaaaaacaaagggtttttcctggcggcaccgacagagattgccattcaaagaaagcagcttaaggaaatcatcttctcacttctacctgcatgcacagaacctgatttggatactggaacacctttcagagctcaggcaataatcgcgaatcctcctgcttatggtcatctacacatagcagaagcacttggagcacctctgcatatcttcttcacttttccatggacgccaactaatgaattcccacatccattggcacgaatgcctcaaagtgcaacttataggctatcgtatcttattctggatttaatagtttggtggggctccaggggattcataaatgatttcaggaagaaattaaatttgccccctattgcttacttcagcacataccatggatctatatcacacttacctactggatacatgtggagcccgcaacttatgccaaagccaaaagggcataaaatatttcttgtgcatatgcaaagctagagggatatactttacattgaacaaaagggaagtcatgtaccgta

SEQ ID NO: 35958 - DNA, 1517 bp, Zea Mays
cactccgtcagtctcccctccggcctcacgccgcgctcgcggtgctgcctcccgggctcccgttccagcattccaggctcgcatcgcacggcctggccccgcccgctccgacccttctcggcgacactcctcgtaggctcgtactggcacgtccccgctctgtcttctgcccaccaggcactagcgggtgcgggtccacgcttccaagggttccaaactctcggcggcgcaagcaatggcggcgcggggccgggagcactggtagtttcgcatatcgcggcggcttgttgccacctcgccatcgcagattatggggatcaacggcgaggagtgggaggagacggtactgggcgacggcgttgggaggcggaagggtggtgctgaggcttccggtttggtcgcatcctcctcctttgctgaggggatgggggaattcgtgctgaggtctatggacgccaggttctccggatcggtcgacgacgatgaatatgtctcgtctcggcagccagtatttggccatagtaaatcgacagctactacttctggtaccattaaagggcaagataacgtttttgtaaggtcatactctgataggttgctgaagtgtgacctcactttggatatgctatcagaaaatgagaagataaagataaccgagagattggtaaagatccagaatgatggtacagtggaggtagatgtgacgcgcagtgctcttgttgcctcagaactctcggagattgatgcttttggttgtgtaccacacgatattgaagaagttacacctggaatcaccaaatcagtcccaaagctgaagattgctatacttgtagttggaacccgaggggatgtacagccttttatagcattagctaaacgactgcaggaattcggtcattatgttagattggcaactcatgtcaattttcgtacttttgtgaagtcagctggcattgatttttacccattgggtggtgatcctcgggttatggctcagtatatgacaaaaaacaaagggtttttcctggcggcaccgacagagattgccattcaaagaaagcagcttaaggaaatcatcttctcacttctacctgcatgcacagaacctgatttggatactggaacacctttcagagctcaggcaataatcgcgaatcctcctgcttatggtcatctacacatagcagaagcacttggagcacctctgcatatcttcttcacttttccatggacgccaactaatgaattcccacatccattggcacgaatgcctcaaagtgcaacttataggtttggtggggctccaggggattcataaatgatttcaggaagaaattaaatttgccccctattgcttacttcagcacataccatggatctatatcacacttacctactggatacatgtggagcccgcaacttatgccaaagccaaaagggcataaaatatttcttgtgcatatgcaaagctagagggatatactttacattgaacaaaagggaagtcatgtaccgta

SEQ ID NO: 35959 - DNA, 3782 bp, Zea Mays
ggggagaggggagaagtgggaaacggggaacggcgagaacacgcggatttcgctgcgggagaaccggagaaggatagcatgcggtcgacggtgttggtggcgcggagcctgcagaaggcgtccgtcccgccggccttgctctcagacccgacgcccggcagcctccagcccacccgcctcgccgcccatgtcaatggcgccggctcctcgtgctctgtttacctcgcctctggctgccgcgtctacaggatcgagatggaagataagactggatgctagtgtgatgctgtccaaaggaaaggagagcctcttgattcctgataatgcacaggtcatcagttcgtcggttgtggatcgctgcccacatcgttctgagatccagagtgtagctcttgcagagggcgaagatgactgtttgattctgggaacggttgactcatatggtcatcttattgtatctcgtttggacatcgtggctgatggacatcctattcagtaccacctcgtgattgtggtgttggggaaggcagttgggctggggtatgctttagcccaatgcagcaatccatggtagctgttgctcgtcagttgtgcaagaccattgatatctatgatcaagatattcacgttcggagtttacgcacatagagcctatattacaagctactgcatacccaaaatgactctagcttcctcatcgactcttaatgatctttgtatgcacaatctttttattcaaaggaggctgctgtggattcaacacataaaccatgagttcttttagcagcatccattatctcacaattgcagactgtaatttgcacgatttagggggtaaaacttaacttgcaggctatggtatccatcttcgtttagctttgttcaatactctccacatgtgaacgaaagtagttctctcttggcaactgcagaaggttctcagctgagcatctgggacctaagaatgaataacaatgggggatgcgtacatcgcattactggatcagttggagacattatatactccacatgtagctcaccttcaggactgattgctagtggtggaactgatcgtgctgtcaccatctatgatcctcgcaggtggtctgctctgtcaagatgggtgggctgctccaagtttgagattacaggtcttgcgttttcatcagttgacgaatctttcatctacgtccaaggtgttgattatgagattacctgtggacattggaaacaaagtgagcgagcattctcatttcgaggggattccaactggttggggttttcaaagtgtgccaacaatgatgtgatagcagggtggtgcgagtctggaagtatcttcattgctgatgctaggcagctataggatcaatatccccttcatctggtgccctggagccccggaagtcaccagtatgtgttgtgttttgccatttctgtaagaatgtgatgtttacaggaggaactgttcttaactctccagtaccaagtagcatgcgaactcatgcccattggccattatggttcttgaaaaacatgattattccagatttcatccagcaaattgaattgaatttggtcaccagaaggggtattggcttgtaccaatcattggtatcttttattaatggggtctcagcagtcatcatatcacgtcaagttcacgctttatcttgaatattttgatcattcaagcaccaacaaggtacacgcctctggaagctccctggcattacgatgtttcagtttacgcagaatgactggcgtcacccgttccaagagctgcatcaaccaaatgtattctttagagaaacatataaaacggctaccccaagaaaagcaaatgaacattgctcaagtcagtaaatccaaagccaaactgaagagccataaaagagtgtgcttagttagaaggcgaggttggatgggaatgggatcatctttctggggatatgatcatccaagttgtatgtttagttgagttttatggtagtcaatattttttggtaggagtgaggatgaatagaatagttagctaaatcatgtcttgtaaatctgatatgctaatattcgacctaacactcacaaatatttttcaatgttaacattctcacaaaccattaacatagtatttatcactaacaatcctttgattgacccgccagctgtacactaatcagcacaacacttaccaatcacaattttatgatgataaatactaattgttacaatattctaaccataattaatcatttaaccagttatcaccattagattaagtggatgataaaaaaggatgggatcccgtcccgcaaaaatccaaacggaggtggatcgatgcgatgatgagatatgcttctttcgtagttccatttttgaccatgtgcctgaacggtgtgagaaaacgtcaccgtctcgattcctattgatagtgacaaaactacgcgatatctaattgcattcggcttaagcttgacaaatggggctgcaacagataagtactttcaggattgcaggctcgagccttttttttttaaaaaaacacaggtgtaattggccccatgaaaaagtaaaagatgaaaaggacaatgtcacacttgtcatgtgttgctgcaacgcaattgcaagctatcaacatcaaatgttgtctatttgccaaaccacttaggccggctacgaaggagccttagacacgttagctcattggagtgtcaaataggcaaaggataccaaacttccagattcgagaaagcgtaggaaattgcttatcttaagcatgaacagtgttttgttaaccatgattgtggtccttacgtatgttgttgttgaagacagtcttctcatatttgggaacatgagtgctaaactgagatgaaaggctgctttataatttctgaagcgatgggttcagccgttccagaggtatattatttgactaaacactcccaagtaccagcaataacaagtactgtgtcctaggctggtttcaaacgtcatccaaccgaatttcaataatcttcgaatttaatgggccatataaactaacataatacatgcatgcacttcacacccgttaaccaaaggaagttacctctttaagccgcttctggtgccgctcttcctgaaatacacgaacatcaaaagcttatgacaagggaatggcaacatcatttagaaggtaagatgtttgcatatcgataaagatgaacattcatgaggcactggtatctgaaaagaatggtttcacacacaatcagattatgcatagtagagagatgaaatgaattggggaaaataacacaacggatttttttctctctatgtaactactgtgcatctatactacatgcattgggacttgcatgaatatggtttacataatttttgtaagattttgtattgcaaagttttggtgctgtgctatgactagtctagaagtactaaaaggtcactgaaaataagtgtcaccacgatatattttgactgcagaatccaatttgtgtttgaattcacctagtcatggatactacacagtttcccacacaaacccaatgtgtcagagtcgagtattacctgttctctcaacaactcggcattctcctcctcgaggtgcgttaccagcgattctagctcggcgatataagccttcagcaaccgagcaaaagacaaacaaattccccacttacattcgcacaattggaagcttaacaatcacgttaaattgcaacatctgtgcacccacctgcttcctctcccgtgaccgggcagcagactcgcggtttttg

SEQ ID NO: 35960 - DNA, 1537 bp, Zea Mays
ggggagaggggagaagtgggaaacggggaacggcgagaacacgcggatttcgctgcgggagaaccggagaaggatagcatgcggtcgacggtgttggtggcgcggagcctgcagaaggcgtccgtcccgccggccttgctctcagacccgacgcccggcagcctccagcccacccgcctcgccgcccatgtcaatggcgccggctcctcgtgctctgtttacctcgcctctggctgccgcgtctacaggatcgagataagactggatgctagtgtgatgctgtccaaaggaaaggagagcctcttgattcctgataatgcacaggtcatcagttcgtcggttgtggatcgctgcccacatcgttctgagatccagagtgtagctcttgcagagggcgaagatgactgtttgattctgggaacggttgactcatatggtcatcttattgtatctcgtttggacatcgtggctgatggacatcctattcagtaccacctcgtgattgtggtgttggggaaggcagttgggctggggtatgctttagcccaatgcagcaatccatggtagctgttgctcgtcagttgtgcaagaccattgatatctatgatcaagatattcacgttcggagtttacgcacgctatggtatccatcttcgtttagctttgttcaatactctccacatgtgaacgaaagtagttctctcttggcaactgcagaaggttctcagctgagcatctgggacctaagaatgaataacaatgggggatgcgtacatcgcattactggatcagttggagacattatatactccacatgtagctcaccttcaggactgattgctagtggtggaactgatcgtgctgtcaccatctatgatcctcgcaggtggtctgctctgtcaagatgggtgggctgctccaagtttgagattacaggtcttgcgttttcatcagttgacgaatctttcatctacgtccaaggtgttgattatgagattacctgtggacattggaaacaaagtgagcgagcattctcatttcgaggggattccaactggttggggttttcaaagtgtgccaacaatgatgtgatagcagggtggtgcgagtctggaagtatcttcattgctgatgctaggcagctataggatcaatatccccttcatctggtgccctggagccccggaagtcaccagtatgtgttgtgttttgccatttctgtaagaatgtgatgtttacaggaggaactgttcttaactctccagtaccaagtagcatgcgaactcatgcccattggccattatggttcttgaaaaacatgattattccagatttcatccagcaaattgaattgaatttggtcaccagaaggggtattggcttgtaccaatcattggtatcttttattaatggggtctcagcagtcatcatatcacgtcaagttcacgctttatcttgaatattttgatcattcaagcaccaacaaggtacacgcctctggaagctccctggcattacgatgtttcagtttacgcag

SEQ ID NO: 35961 - DNA, 1546 bp, Zea Mays
ggggagaggggagaagtgggaaacggggaacggcgagaacacgcggatttcgctgcgggagaaccggagaaggatagcatgcggtcgacggtgttggtggcgcggagcctgcagaaggcgtccgtcccgccggccttgctctcagacccgacgcccggcagcctccagcccacccgcctcgccgcccatgtcaatggcgccggctcctcgtgctctgtttacctcgcctctggctgccgcgtctacaggatcgagatggaagataagactggatgctagtgtgatgctgtccaaaggaaaggagagcctcttgattcctgataatgcacagttcgtcggttgtggatcgctgcccacatcgttctgagatccagagtgtagctcttgcagagggcgaagatgactgtttgattctgggaacggttgactcatatggtcatcttattgtatctcgtttggacatcgtggctgatgacattgacaggacatcctattcagtaccacctcgtgattgtggtgttggggaaggcagttgggctggggtatgctttagcccaatgcagcaatccatggtagctgttgctcgtcagttgtgcaagaccattgatatctatgatcaagatattcacgttcggagtttacgcacgctatggtatccatcttcgtttagctttgttcaatactctccacatgtgaacgaaagtagttctctcttggcaactgcagaaggttctcagctgagcatctgggacctaagaatgaataacaatgggggatgcgtacatcgcattactggatcagttggagacattatatactccacatgtagctcaccttcaggactgattgctagtggtggaactgatcgtgctgtcaccatctatgatcctcgcaggtggtctgctctgtcaagatgggtgggctgctccaagtttgagattacaggtcttgcgttttcatcagttgacgaatctttcatctacgtccaaggtgttgattatgagattacctgtggacattggaaacaaagtgagcgagcattctcatttcgaggggattccaactggttggggttttcaaagtgtgccaacaatgatgtgatagcagggtggtgcgagtctggaagtatcttcattgctgatgctaggcagctataggatcaatatccccttcatctggtgccctggagccccggaagtcaccagtatgtgttgtgttttgccatttctgtaagaatgtgatgtttacaggaggaactgttcttaactctccagtaccaagtagcatgcgaactcatgcccattggccattatggttcttgaaaaacatgattattccagatttcatccagcaaattgaattgaatttggtcaccagaaggggtattggcttgtaccaatcattggtatcttttattaatggggtctcagcagtcatcatatcacgtcaagttcacgctttatcttgaatattttgatcattcaagcaccaacaaggtacacgcctctggaagctccctggcattacgatgtttcagtttacgcag

SEQ ID NO: 35962 - DNA, 1532 bp, Zea Mays
ggggagaggggagaagtgggaaacggggaacggcgagaacacgcggatttcgctgcgggagaaccggagaaggatagcatgcggtcgacggtgttggtggcgcggagcctgcagaaggcgtccgtcccgccggccttgctctcagacccgacgcccggcagcctccagcccacccgcctcgccgcccatgtcaatggcgccggctcctcgtgctctgtttacctcgcctctggctgccgcgtctacaggatcgagactggatgctagtgtgatgctgtccaaaggaaaggagagcctcttgattcctgataatgcacaggtcatcagttcgtcggttgtggatcgctgcccacatcgttctgagatccagagtgtagctcttgcagagggcgaagatgactgtttgattctgggaacggttgactcatatggtcatcttattgtatctcgtttggacatcgtggctgatggacatcctattcagtaccacctcgtgattgtggtgttggggaaggcagttgggctggggtatgctttagcccaatgcagcaatccatggtagctgttgctcgtcagttgtgcaagaccattgatatctatgatcaagatattcacgttcggagtttacgcacgctatggtatccatcttcgtttagctttgttcaatactctccacatgtgaacgaaagtagttctctcttggcaactgcagaaggttctcagctgagcatctgggacctaagaatgaataacaatgggggatgcgtacatcgcattactggatcagttggagacattatatactccacatgtagctcaccttcaggactgattgctagtggtggaactgatcgtgctgtcaccatctatgatcctcgcaggtggtctgctctgtcaagatgggtgggctgctccaagtttgagattacaggtcttgcgttttcatcagttgacgaatctttcatctacgtccaaggtgttgattatgagattacctgtggacattggaaacaaagtgagcgagcattctcatttcgaggggattccaactggttggggttttcaaagtgtgccaacaatgatgtgatagcagggtggtgcgagtctggaagtatcttcattgctgatgctaggcagctataggatcaatatccccttcatctggtgccctggagccccggaagtcaccagtatgtgttgtgttttgccatttctgtaagaatgtgatgtttacaggaggaactgttcttaactctccagtaccaagtagcatgcgaactcatgcccattggccattatggttcttgaaaaacatgattattccagatttcatccagcaaattgaattgaatttggtcaccagaaggggtattggcttgtaccaatcattggtatcttttattaatggggtctcagcagtcatcatatcacgtcaagttcacgctttatcttgaatattttgatcattcaagcaccaacaaggtacacgcctctggaagctccctggcattacgatgtttcagtttacgcag

SEQ ID NO: 35963 - DNA, 2114 bp, Zea Mays
ggggagaggggagaagtgggaaacggggaacggcgagaacacgcggatttcgctgcgggagaaccggagaaggatagcatgcggtcgacggtgttggtggcgcggagcctgcagaaggcgtccgtcccgccggccttgctctcagacccgacgcccggcagcctccagcccacccgcctcgccgcccatgtcaatggcgccggctcctcgtgctctgtttacctcgcctctggctgccgcgtctacaggatcgaggtttgcgtcccctactattgctcctctcgtttcgtacaactggattgtatagcaaatcatgcttgcttgtgaagcagctagttagagtgttcggcggtgatttctgttatcacatcaacccttagaatggatatagttgtgtttgatgttaagccgtaaactcaacggattgggtttggaaatttcgaaattgtagatactaaaaattgttgtgtgattgtctaattgctgagttcctgttgatgttagagattacagtggtgaggtatgttagtggcagaacgagaatgtagcccattttactgtttttacagtgacatttttgtgaagttgatttttcctctctttggagatggaagataagactggatgctagtgtgatgctgtccaaaggaaaggagagcctcttgattcctgataatgcacaggtcatcagttcgtcggttgtggatcgctgcccacatcgttctgagatccagagtgtagctcttgcagagggcgaagatgactgtttgattctgggaacggttgactcatatggtcatcttattgtatctcgtttggacatcgtggctgatgacattgacaggacatcctattcagtaccacctcgtgattgtggtgttggggaaggcagttgggctggggtatgctttagcccaatgcagcaatccatggtagctgttgctcgtcagttgtgcaagaccattgatatctatgatcaagatattcacgttcggagtttacgcacatagagcctatattacaagctactgcatacccaaaatgactctagcttcctcatcgactcttaatgatctttgtatgcacaatctttttattcaaaggaggctgctgtggattcaacacataaaccatgagttcttttagcagcatccattatctcacaattgcagactgtaatttgcacgatttagggggtaaaacttaacttgcaggctatggtatccatcttcgtttagctttgttcaatactctccacatgtgaacgaaagtagttctctcttggcaactgcagaaggttctcagctgagcatctgggacctaagaatgaataacaatgggggatgcgtacatcgcattactggatcagttggagacattatatactccacatgtagctcaccttcaggactgattgctagtggtggaactgatcgtgctgtcaccatctatgatcctcgcaggtggtctgctctgtcaagatgggtgggctgctccaagtttgagattacaggtcttgcgttttcatcagttgacgaatctttcatctacgtccaaggtgttgattatgagattacctgtggacattggaaacaaagtgagcgagcattctcatttcgaggggattccaactggttggggttttcaaagtgtgccaacaatgatgtgatagcagggtggtgcgagtctggaagtatcttcattgctgatgctaggcagctataggatcaatatccccttcatctggtgccctggagccccggaagtcaccagtatgtgttgtgttttgccatttctgtaagaatgtgatgtttacaggaggaactgttcttaactctccagtaccaagtagcatgcgaactcatgcccattggccattatggttcttgaaaaacatgattattccagatttcatccagcaaattgaattgaatttggtcaccagaaggggtattggcttgtaccaatcattggtatcttttattaatggggtctcagcagtcatcatatcacgtcaagttcacgctttatcttgaatattttgatcattcaagcaccaacaaggtacacgcctctggaagctccctggcattacgatgtttcagtttacgcag

SEQ ID NO: 35964 - DNA, 1768 bp, Zea Mays
ggcaacccgacccggggagaggggagaagtgggaaacggggaacggcgagaacacgcggatttcgctgcgggagaaccggagaaggatagcatgcggtcgacggtgttggtggcgcggagcctgcagaaggcgtccgtcccgccggccttgctctcagacccgacgcccggcagcctccagcccacccgcctcgccgcccatgtcaatggcgccggctcctcgtgctctgtttacctcgcctctggctgccgcgtctacaggatcgagataagactggatgctagtgtgatgctgtccaaaggaaaggagagcctcttgattcctgataatgcacaggtcatcagttcgtcggttgtggatcgctgcccacatcgttctgagatccagagtgtagctcttgcagagggcgaagatgactgtttgattctgggaacggttgactcatatggtcatcttattgtatctcgtttggacatcgtggctgatgacattgacaggacatcctattcagtaccacctcgtgattgtggtgttggggaaggcagttgggctggggtatgctttagcccaatgcagcaatccatggtagctgttgctcgtcagttgtgcaagaccattgatatctatgatcaagatattcacgttcggagtttacgcacatagagcctatattacaagctactgcatacccaaaatgactctagcttcctcatcgactcttaatgatctttgtatgcacaatctttttattcaaaggaggctgctgtggattcaacacataaaccatgagttcttttagcagcatccattatctcacaattgcagactgtaatttgcacgatttagggggtaaaacttaacttgcaggctatggtatccatcttcgtttagctttgttcaatactctccacatgtgaacgaaagtagttctctcttggcaactgcagaaggttctcagctgagcatctgggacctaagaatgaataacaatgggggatgcgtacatcgcattactggatcagttggagacattatatactccacatgtagctcaccttcaggactgattgctagtggtggaactgatcgtgctgtcaccatctatgatcctcgcaggtggtctgctctgtcaagatgggtgggctgctccaagtttgagattacaggtcttgcgttttcatcagttgacgaatctttcatctacgtccaaggtgttgattatgagattacctgtggacattggaaacaaagtgagcgagcattctcatttcgaggggattccaactggttggggttttcaaagtgtgccaacaatgatgtgatagcagggtggtgcgagtctggaagtatcttcattgctgatgctaggcagctataggatcaatatccccttcatctggtgccctggagccccggaagtcaccagtatgtgttgtgttttgccatttctgtaagaatgtgatgtttacaggaggaactgttcttaactctccagtaccaagtagcatgcgaactcatgcccattggccattatggttcttgaaaaacatgattattccagatttcatccagcaaattgaattgaatttggtcaccagaaggggtattggcttgtaccaatcattggtatcttttattaatggggtctcagcagtcatcatatcacgtcaagttcacgctttatcttgaatattttgatcattcaagcaccaacaaggtacacgcctctggaagctccctggcattacgatgtttcagtttacgcag

SEQ ID NO: 35965 - DNA, 1842 bp, Zea Mays
gttgtcttccccatggtggagagttttggcgcctttcaactaggctcagacgatcccacttaagctcggcaacccgacccggggagaggggagaagtgggaaacggggaacggcgagaacacgcggatttcgctgcgggagaaccggagaaggatagcatgcggtcgacggtgttggtggcgcggagcctgcagaaggcgtccgtcccgccggccttgctctcagacccgacgcccggcagcctccagcccacccgcctcgccgcccatgtcaatggcgccggctcctcgtgctctgtttacctcgcctctggctgccgcgtctacaggatcgagatggaagataagactggatgctagtgtgatgctgtccaaaggaaaggagagcctcttgattcctgataatgcacaggtcatcagttcgtcggttgtggatcgctgcccacatcgttctgagatccagagtgtagctcttgcagagggcgaagatgactgtttgattctgggaacggttgactcatatggtcatcttattgtatctcgtttggacatcgtggctgatgacattgacaggacatcctattcagtaccacctcgtgattgtggtgttggggaaggcagttgggctggggtatgctttagcccaatgcagcaatccatggtagctgttgctcgtcagttgtgcaagaccattgatatctatgatcaagatattcacgttcggagtttacgcacatagagcctatattacaagctactgcatacccaaaatgactctagcttcctcatcgactcttaatgatctttgtatgcacaatctttttattcaaaggaggctgctgtggattcaacacataaaccatgagttcttttagcagcatccattatctcacaattgcagactgtaatttgcacgatttagggggtaaaacttaacttgcaggctatggtatccatcttcgtttagctttgttcaatactctccacatgtgaacgaaagtagttctctcttggcaactgcagaaggttctcagctgagcatctgggacctaagaatgaataacaatgggggatgcgtacatcgcattactggatcagttggagacattatatactccacatgtagctcaccttcaggactgattgctagtggtggaactgatcgtgctgtcaccatctatgatcctcgcaggtggtctgctctgtcaagatgggtgggctgctccaagtttgagattacaggtcttgcgttttcatcagttgacgaatctttcatctacgtccaaggtgttgattatgagattacctgtggacattggaaacaaagtgagcgagcattctcatttcgaggggattccaactggttggggttttcaaagtgtgccaacaatgatgtgatagcagggtggtgcgagtctggaagtatcttcattgctgatgctaggcagctataggatcaatatccccttcatctggtgccctggagccccggaagtcaccagtatgtgttgtgttttgccatttctgtaagaatgtgatgtttacaggaggaactgttcttaactctccagtaccaagtagcatgcgaactcatgcccattggccattatggttcttgaaaaacatgattattccagatttcatccagcaaattgaattgaatttggtcaccagaaggggtattggcttgtaccaatcattggtatcttttattaatggggtctcagcagtcatcatatcacgtcaagttcacgctttatcttgaatattttgatcattcaagcaccaacaaggtacacgcctctggaagctccctggcattacgatgtttcagtttacgcag

SEQ ID NO: 35966 - DNA, 1476 bp, Zea Mays
gtcagttttgggctcgagttttactcgagggtcgaagacgccaactaagattgcgttgtcttccccatggtggagagttttggcgcctttcaactaggctcagacgatcccacttaaggtcaatggcgccggctcctcgtgctctgtttacctcgcctctggctgccgcgtctacaggatcgagataagactggatgctagtgtgatgctgtccaaaggaaaggagagcctcttgattcctgataatgcacaggtcatcagttcgtcggttgtggatcgctgcccacatcgttctgagatccagagtgtagctcttgcagagggcgaagatgactgtttgattctgggaacggttgactcatatggtcatcttattgtatctcgtttggacatcgtggctgatgacattgacaggacatcctattcagtaccacctcgtgattgtggtgttggggaaggcagttgggctggggtatgctttagcccaatgcagcaatccatggtagctgttgctcgtcagttgtgcaagaccattgatatctatgatcaagatattcacgttcggagtttacgcacgctatggtatccatcttcgtttagctttgttcaatactctccacatgtgaacgaaagtagttctctcttggcaactgcagaaggttctcagctgagcatctgggacctaagaatgaataacaatgggggatgcgtacatcgcattactggatcagttggagacattatatactccacatgtagctcaccttcaggactgattgctagtggtggaactgatcgtgctgtcaccatctatgatcctcgcaggtggtctgctctgtcaagatgggtgggctgctccaagtttgagattacaggtcttgcgttttcatcagttgacgaatctttcatctacgtccaaggtgttgattatgagattacctgtggacattggaaacaaagtgagcgagcattctcatttcgaggggattccaactggttggggttttcaaagtgtgccaacaatgatgtgatagcagggtggtgcgagtctggaagtatcttcattgctgatgctaggcagctataggatcaatatccccttcatctggtgccctggagccccggaagtcaccagtatgtgttgtgttttgccatttctgtaagaatgtgatgtttacaggaggaactgttcttaactctccagtaccaagtagcatgcgaactcatgcccattggccattatggttcttgaaaaacatgattattccagatttcatccagcaaattgaattgaatttggtcaccagaaggggtattggcttgtaccaatcattggtatcttttattaatggggtctcagcagtcatcatatcacgtcaagttcacgctttatcttgaatattttgatcattcaagcaccaacaaggtacacgcctctggaagctccctggcattacgatgtttcagtttacgcag

SEQ ID NO: 35967 - DNA, 1685 bp, Zea Mays
accaatgatggatttggaacctgatttagtttcttgttaggctatgcccggtagttatgatgtctatgtttaatcaactaaaaggggcagcttgtagtggctgtttcttttgcatatgcgctttctattgttgttgtcatttcaaaggaggccatagtctcctggattttgtatgccttgttatctggaattggtgaccatagatgtcatttcgtagcatagtccgtgatgttagggatggcttcggcagcttgtcaaggagaagctttgagcctggtcctcgagatggaaatacaatggtccagtgttttataaagaggaataagtcaaaatccacttaccatctctacctgtgccttagcaatgttgttacttcagaaagtgggaaattcctcttatcagctaaacgacaccgcaaaaccacatgcaccgagtacactatatcaatggattctggcaacatctcaagatcaaaaagaacctacattggaaaaataaggtctaacttccttggcacaagatttttaatttatgatacacaaccgccctataatggggctgtagttcctcctgccggaaggacaagcaggaggttcaactccacaaaagtctctccaaagctgccttcagtcagttacaacatcgcacaggtatcgtatgagttaaatgtccttggcacgagaggtcctaggcggatgcgttgcatcatgcactccatacctgcatcatcagtggagccaggtggcacagtgcctggacagccagagcagattgtacctcgagccctggaggattcattccgcagcacggcttccttctcgcagtcgttccgtagcactgcctcattctccaagtccatcatggactcatccatggatttcaatagcgctcgcttctctgacatcgctggcagcagcgctcgcttcacgggcgttcctggtagcagcgctcgcttcgcgggcgttcctggcagcagcgctcgcttctcgggcattgctggcgccagactggacaacgacgaggagagtgaaaccaaggagaggccactggtgcttcgtaataagccgcctaggtggcacgaacagctgcagtgttggtgcctcaacttccgtggccgtgtgacaattgcctcggtgaagaacttccagctgatcgccgcggctaccccgccaccggcaggtgcgccaaccccctctcagcctgccccgtcagatcccgacaaggtgattctccagtttggcaaagtggcaagggatatgttcacgatggactatcgctaccctctctcggctttccaggcctttgccatttgtctgagtagctttgatacaaagttagcctgtgaataaatggagaagaacaaaggtaaaggagaacatcaggttgcttgcattaggccatcagtgtacctctttccatctggctctcgtgttgccttggttgtatttgtgcttaatgtagccatgaatttggtggcccatatatggacgcatgtgttgttgttggccctctcccttagaagtgattaaaagttgcatttggaccacatgttacccgatctgtaatatacttgcagtggcatcgcatgccgcgtgataacaaagttcccgttcgtgattggacttgtatggtttcagaaaagcagcaaacaaagtttggtacggtgtgcattttttttgctcgtc

SEQ ID NO: 35968 - DNA, 2155 bp, Zea Mays
caaccactgcgtttattctgctgctacgtccagaagctcccatgcgaattgggcactcacatgtgcccatgtttgtgtagcttaagctacagatttcttcggttcaaagtgatgctcgctccggacctaacataggttatggagtcaagtcaaaggtctccgcttgcatcccgaccaatgatggatttggaacctgatttagtttcttgttaggctatgcccggtagttatgatgtctatgtttaatcaactaaaaggggcagcttgtagtggctgtttcttttgcatatgcgctttctattgttgttgtcatttcaaaggaggccatagtctcctggattttgtatgccttgttatctggaattggtgaccatagatgtcatttcgtagcatagtccgtgatgttagggatggcttcggcagcttgtcaaggagaagctttgaggtgaccctcgcaagcatttatggccttactgggcatcacaaagggaagacccagagctcatcacatgtgctcgacgactcaccttccataattcgtgaaagtcgatgggcgaatctacctcctgaactcatccgtgatatcatacggagactggaggctgatgagagcacctggccagcgcggaagcacgtcgtttgcttcgcagctgtttgtaggacatggagagaaatgtgtaaagagattgtgttgagcccggagttttgtggcaagctcaccttccctgtgtctctaaaacagcctggtcctcgagatggaaatacaatggtccagtgttttataaagaggaataagtcaaaatccacttaccatctctacctgtgccttagcaatgttgttacttcagaaagtgggaaattcctcttatcagctaaacgacaccgcaaaaccacatgcaccgagtacactatatcaatggattctggcaacatctcaagatcaaaaagaacctacattggaaaaataaggtctaacttccttggcacaagatttttaatttatgatacacaaccgccctataatggggctgtagttcctcctgccggaaggacaagcaggaggttcaactccacaaaagtctctccaaagctgccttcagtcagttacaacatcgcacaggtatcgtatgagttaaatgtccttggcacgagaggtcctaggcggatgcgttgcatcatgcactccatacctgcatcatcagtggagccaggtggcacagtgcctggacagccagagcagattgtacctcgagccctggaggattcattccgcagcacggcttccttctcgcagtcgttccgtagcactgcctcattctccaagtccatcatggactcatccatggatttcaatagcgctcgcttctctgacatcgctggcagcagcgctcgcttcacgggcgttcctggtagcagcgctcgcttcgcgggcgttcctggcagcagcgctcgcttctcgggcattgctggcgccagactggacaacgacgaggagagtgaaaccaaggagaggccactggtgcttcgtaataagccgcctaggtggcacgaacagctgcagtgttggtgcctcaacttccgtggccgtgtgacaattgcctcggtgaagaacttccagctgatcgccgcggctaccccgccaccggcaggtgcgccaaccccctctcagcctgccccgtcagatcccgacaaggtgattctccagtttggcaaagtggcaagggatatgttcacgatggactatcgctaccctctctcggctttccaggcctttgccatttgtctgagtagctttgatacaaagttagcctgtgaataaatggagaagaacaaaggtaaaggagaacatcaggttgcttgcattaggccatcagtgtacctctttccatctggctctcgtgttgccttggttgtatttgtgcttaatgtagccatgaatttggtggcccatatatggacgcatgtgttgttgttggccctctcccttagaagtgattaaaagttgcatttggaccacatgttacccgatctgtaatatacttgcagtggcatcgcatgccgcgtgataacaaagttcccgttcgtgattggacttgtatggtttcagaaaagcagcaaacaaagtttggtacggtgtgcattttttttgctcgtc

SEQ ID NO: 35969 - DNA, 1712 bp, Zea Mays
gggcaaggcaagtagccgctgcgcggtgctgccacctgacctgactgccgtcccggtccccggtccatccgaacgccgttacggggccgcccaccgcgacggaacggaaaggggcagcttgtagtggctgtttcttttgcatatgcgctttctattgttgttgtcatttcaaaggaggccatagtctcctggattttgtatgccttgttatctggaattggtgaccatagatgtcatttcgtagcatagtccgtgatgttagggatggcttcggcagcttgtcaaggagaagctttgagcctggtcctcgagatggaaatacaatggtccagtgttttataaagaggaataagtcaaaatccacttaccatctctacctgtgccttagcaatgttgttacttcagaaagtgggaaattcctcttatcagctaaacgacaccgcaaaaccacatgcaccgagtacactatatcaatggattctggcaacatctcaagatcaaaaagaacctacattggaaaaataaggtctaacttccttggcacaagatttttaatttatgatacacaaccgccctataatggggctgtagttcctcctgccggaaggacaagcaggaggttcaactccacaaaagtctctccaaagctgccttcagtcagttacaacatcgcacaggtatcgtatgagttaaatgtccttggcacgagaggtcctaggcggatgcgttgcatcatgcactccatacctgcatcatcagtggagccaggtggcacagtgcctggacagccagagcagattgtacctcgagccctggaggattcattccgcagcacggcttccttctcgcagtcgttccgtagcactgcctcattctccaagtccatcatggactcatccatggatttcaatagcgctcgcttctctgacatcgctggcagcagcgctcgcttcacgggcgttcctggtagcagcgctcgcttcgcgggcgttcctggcagcagcgctcgcttctcgggcattgctggcgccagactggacaacgacgaggagagtgaaaccaaggagaggccactggtgcttcgtaataagccgcctaggtggcacgaacagctgcagtgttggtgcctcaacttccgtggccgtgtgacaattgcctcggtgaagaacttccagctgatcgccgcggctaccccgccaccggcaggtgcgccaaccccctctcagcctgccccgtcagatcccgacaaggtgattctccagtttggcaaagtggcaagggatatgttcacgatggactatcgctaccctctctcggctttccaggcctttgccatttgtctgagtagctttgatacaaagttagcctgtgaataaatggagaagaacaaaggtaaaggagaacatcaggttgcttgcattaggccatcagtgtacctctttccatctggctctcgtgttgccttggttgtatttgtgcttaatgtagccatgaatttggtggcccatatatggacgcatgtgttgttgttggccctctcccttagaagtgattaaaagttgcatttggaccacatgttacccgatctgtaatatacttgcagtggcatcgcatgccgcgtgataacaaagttcccgttcgtgattggacttgtatggtttcagaaaagcagcaaacaaagtttggtacggtgtgcattttttttgctcgtc

SEQ ID NO: 35970 - DNA, 759 bp, Zea Mays
tctctctctctctccatctccatatctttgggatttacatcatcaaggacaaggacaacgtcactctggaggacgtgctgcaacctggcaagaacatgctcgccgccggatactgcatgtacggcagttcctgcacgctcgttctgagcactggaactggtgtcaatggcttcacgctcgacccttcacttggggagttcatactaacccatccagacatcaagatacctaagaaggggaagatctattcagtcaacgaagggaacgccaagaactgggacgcgcctgttgccaagtttgtggagaagtgcaagtaccccaaagatggctcgccaccaagatctttgagatacattggaagtatggttgctgacgtgcaccgtaccttgctatacggcggtgtgtttttgtaccctgctgacgagaagaacccaaacggaaagctccgtatcctgtacgaagttttccccatgtcgttcctaatggagcaggcaggaggccagtccttcacaggcaaagaacgggtccccgatattcctcggaagctacgacgacgtggaggagatcaaagcgttgtacgccgagcaggcgaagtcgagctcggcttcatcctaagtgagggtgtaaatcgacttttcctggcttaatttgttgcttacctgattcagacattcgtttccgtttcccttggtgtcgtcgtaagtgtgacattcagtgcaatatgtatagcaactaagggactccgtaaaagttaaagaa

SEQ ID NO: 35971 - DNA, 2912 bp, Zea Mays
gcctcgctctcgtctctaatgccaatcgctctcccttaccttcctacgccctgccgcgcgctacgtacgccaccggaccaccaccacaagcgctggacgcgagcggcccagcctgacgcagcgcggatagagggataggcctcgacgccgattccgttggagctccgcgacccttggctcccagcctcactttctcgctcgccgtgctaccctaccccgcagagacacgtcccgtcccgtcccgtcccaccctgtgccagccagctcccgaccggcgcccgccccgcgggatcttgtctaataatataccgtgcgcgcgggagcagcagctggttcgtcgtgcccgcgcgctcactgcactccgtgatcaccaccacaccgctatcctgctagctaggtagctgaattcggagccaggctcgagcgaggggagggcggaggcgagatggaccacgcggcggacgcgcaccggacggacctgatgaccatcacgcggcacgtgctgaacgagcagagccggaaccccgagtcccgcggcgacttcaccatcctgctctcccacatcgtcctcggctgcaagttcgtcgcctccgccgtcaacaaggccgggctcgcccagctcatcgggctcgccggcgagaccaacgtgcagggagaggagcagaagaagctggacgtcctgtccaacgaggtgttcgtcaaggccctcgtcagcagcggtcgcacctgcgtccttgtgtccgaggaggacgaggaagcaacgttcgtggaccctaagctgcgtggaaggtactgcgtctgctttgatcccctcgacggctcctccaacatcgactgtggcgtctccatcggaacgatctttgggatttacatcatcaaggacaaggacaacgtcactctggaggacgtgctgcaacctggcaagaacatgctcgccgccggatactgcatgtacggcagttcctgcacgctcgttctgagcactggaactggtgtcaatggcttcacgctcgacccttcacttggggagttcatactaacccatccagacatcaagatacctaagaaggggaagatctattcagtcaacgaagggaacgccaagaactgggacgcgcctgttgccaagtttgtggagaagtgcaagtaccccaaagatggctcgccaccaagatctttgagatacattggaagtatggttgctgacgtgcaccgtaccttgctatacggcggtgtgtttttgtaccctgctgacgagaagaacccaaacggaaagctccgtatcctgtacgaagttttccccatgtcgttcctaatggagcaggcaggaggccagtccttcacaggcaaagaacgggctcttgatctgatcccaaccaagatccacgacaggtccccgatattcctcggaagctacgacgacgtggaggagatcaaagcgttgtacgccgagcaggcgaagtcgagctcggcttcatcctaagtgagggtgtaaatcgacttttcctggcttaatttgttgcttacctgattcagacattcgtttccgtttcccttggtgtcgtcgtaagtgtgacattcagtgcaatatgtatagcaactaagggactccgtaaaagttacatgcatctctagcacctaaagcattgcgttataaccaacctaaaaagaggtgatcaggtgtcatagatgatgaaactactgtcgcaggctctgcaaaaatgtattgcgcatagagatccctgcaaaaaaaaaatatggccgtgtcataaattgttcgatacttggaagaccatagtcgatcctgtgtgatgtaaggcctgaaaacgctcgagttggacactgacatggagtgctggattatggcatttcaccaaagctgccctgtttggtttgttcatattcttagaagggctactgcaactcaaggttcaggttcagtgaggtgttccaaacacatctgggtgttgtttggttcaagaaatgtaacgcaaatggtaatggtttacgctatcaaacatgatttaacgttatcaattacccattacgttacaaatatgtgaaccaaacggcaccttggagaggagggaaagatacgacggcccttcttgagtttcttccacagagagggcggcagttcacccactctatgatcagcaaacagcccgctgtgcaaactctcttctgcagtagccgcaagaagagcttgcggcgggtacaaggacacggtttccaaatcgtagccagaaaatctgatccacgttgcctgccaaactgtactgcacacaagccgatcttgccgtgtactcacctgacggttcaagggtccaaacggtcgtgtcatcctccagatcgtcggccgagaaaccactgtcagcaattaggggccataggcggaagtagtcgctgagaaggtcccccttgtcttcgaagttatggtctgcaagtatatatcaatacaagcaaggcatgctactactccatatttctattgccatcagacggaactgtgtgcatacgtgctagcaacatgtgcaaatacaagtcagctatggtgctgccacgaccgatgtgctgctgttcacgggggtccatgcaaacgtgcacagacaccttggaatatttatgacagaaagaaattacaactccagcagccccatatgcacaaaaaagagtatcgtcaggtactacaatgtacaattcaatgcaatcgctacaatatatacgatataacatagaagcttgcataaattattttcacagcttaaactgtaaactactgcagttccagcactaaaatacttccagccagctttaggctatctccagcaatctacccatccccgtacctatattcaaactatagtctgtgaatagtgtggtctaaaataatgcagaacacagtgcttttg

SEQ ID NO: 35972 - DNA, 1998 bp, Zea Mays
atggcggtgtgctgggctgttaagatgggcccagtgtcagactcgtcttctcatgtggggtgcgaccgaatccaacagaagagccgaagaggaaaggggcggttgctttatattccttctcggctgcaatctgcgtccatctatccagccgtctcggggcgtcgtgtgcgcgtggatctctccgtagaagggatgaagatcacggcgctccttgtgctgaagccgtcgacctccggagccggtagctcctcgtccggcggccagtcgggcccggaggcggtcgtgctcgcgaacgcgacggacgtcagccacttcggctacttccagcgcagcgccgcccgcgagttcatcgtcttcgttgcccgcaccgtcgctcagcgcacccagccaggccagcggcagtccgtccagcacgaagaatataaggttcactcccacaacagaaatgggctttgtgcggtggcatttatggatgatcactatcctgtacgaagtgcattttctcttctgaatcaggttcttgatgagtaccagaaggcttttggggactcctggaaatctgctactgcagatggaactcaacagtgggctttcctgacagacgccttggcaagatttcaggaccctgcggaagctgacaaactaatgaaaattcagagggacttggatgaaacaaaaattattcttcataaaactattgatagtgtcctggccagaggagagagattggatagcttggttgagaaaagttctgatctaagtgctgcttctcagtctcagtactcagtagtactccatccaattttgatgaacttataaggtctaaaaatgttttcagaattgataagtgcgtaatgctcagcagctgtatccagatgttctacaagcaggcaaagaagacaaaccaatgttgcacaatactttaaactttggtgcttcaatcatgtttgcaagaaacaaaaacgatcgatattgtgctaatttactgtaagttaaatcgcccatgaagcgtggacacgcggttgcaaggctcgagctcagtgctgttggtctcagtttgcaaggctatagttttctccaagacctgccgattggactgttttcttgtgagaattcctgctctccaaacagcacatggagtatcattctttagtggttatgaaactgcgtagtgcctgctaacaccatttattgtactatataaggcttgcctcaaactgcagaaattaccaaatattgttaaattctcaaagcttactggcagtggcgaagacagcacaagctgatagtctcttcttgcttctatatcctccacctctttctccaatgcagtaggggttcatttttcttcttctcctttgtcctctatacttcaccagtttcatggacgtagcgggggctggagccctccctagcccccttcagatctgcccctcgcatttgttgtccacagcgactgaaagcctgatgcttatatagttatatcaaccgtttacattagtttatctcagctcatatattacatccagagttccatatctcaaccaagcattacattgatcaaaaccactaccagcaccgattcataaaactagtcacattatgctgcttggagcatcagccttttgccagatttctttacaaacagatggtcaccccagcagtagcttgcatatatggcgcttttgcagagttcttcaaccgcatcacgacattctccagattcaagcgatttccagcttgacataggattttccaattttccaccgttatagctacctcccaaatgacttttcaggttcctccaccctgtgttctggaagcaaaaagcatttcttatggtgtgtttggttttgattggatgtataaagagagatggaggagagcagtcacaatttctatagtgtttagaatagtttctgtagtgtttagatgagagtcacgtaagagcgagttaaacatcagagtaattttttgtggcgacgtgatctcaaaaaa

SEQ ID NO: 35973 - DNA, 870 bp, Zea Mays
atggcggtgtgctgggctgttaagatgggcccagtgtcagactcgtcttctcatgtggggtgcgaccgaatccaacagaagagccgaagaggaaaggggcggttgctttatattccttctcggctgcaatctgcgtccatctatccagccgtctcggggcgtcgtgtgcgcgtggatctctccgtagaagggatgaagatcacggcgctccttgtgctgaagccgtcgacctccggagccggtagctcctcgtccggcggccagtcgggcccggaggcggtcgtgctcgcgaacgcgacggacgtcagccacttcggctacttccagcgcagcgccgcccgcgagttcatcgtcttcgttgcccgcaccgtcgctcagcgcacccagccaggccagcggcagtccgtccagcacgaagaatataaggttcactcccacaacagaaatgggctttgtgcggtggcatttatggatgatcactatcctgtacgaagtgcattttctcttctgaatcaggttcttgatgagtaccagaaggcttttggggactcctggaaatctgctactgcagatggaactcaacagtgggctttcctgacagacgccttggcaagatttcaggaccctgcggaagctgacaaactaatgaaaattcagagggacttggatgaaacaaaaattattcttcataaaactattgatagtgtcctggccagaggagagagattggatagcttggttgagaaaagttctgatctaagtgctgcttctcagatgttctacaagcaggcaaagaagacaaaccaatgttgcacaatactttaaactttggtgcttcaatcatgtttgcaaggaagttttctgttcttt

SEQ ID NO: 35974 - DNA, 666 bp, Zea Mays
atggcggtgtgctgggctgttaagatgggcccagtgtcagactcgtcttctcatgtggggtgcgaccgaatccaacagaagagccgaagaggaaaggggcggttgctttatattccttctcggctgcaatctgcgtccatctatccagccgtctcggggcgtcgtgtgcgcgtggatctctccgtagaagggatgaagatcacggcgctccttgtgctgaagccgtcgacctccggagccggtagctcctcgtccggcggccagtcgggcccggaggcggtcgtgctcgcgaacgcgacggacgtcagccacttcggctacttccagcgcagcgccgcccgcgagttcatcgtcttcgttgcccgcaccgtcgctcagcgcacccagccaggccagcggcagtccgtccagcacgaagaatataaggttcactcccacaacagaaatgggctttgtgcggtggcatttatggatgatcactatcctgtacgaagtgcattttctcttctgaatcaggttcttgatgagtaccagaaggcttttggggactcctggaaatctgctactgcagatggaactcaacagtgggctttcctgacagacgccttggcaagatttcagataaatgggttgatcccaataatttgtttgtttctggtatcttcg

SEQ ID NO: 35975 - DNA, 1547 bp, Zea Mays
cgagttcgaggtcctcgcggagatagccaaggcgagagggaagaccgtggcgcaggagggaggaagacgtcgccgggacctactgctccgtgcctccagttggtacgcgtcccacgctccgtgcctctagccataggctacttcgtgggggcgccccgccgggagggaggaagccgccactgggagggactcgttgctccgtgcctccggttggtccgtgcctcgtgctctcgatgccttcagcgggtctgcgcccctactcgcactccagatccagaggcactgcaagctttcggcctgctgctcctatgtgagatccagtcgtcgacgtgatcttcttaacagtagtgtgtgagatccagacaccgacgcgatcttcttgacagcagcagcagtctcctccaggcaaggagcacaaccctctactatctataaatgttgccaccctttgcctatatgggttcttaacgtcgttatttcctatgaaatgggatgaatcgtattattcccaatgatgaggttgaaccaatagaagtagttgctgcccccgatgatgatgagagacagtatcctgggtttgttgacaagtgggatatgctagaatttgaggactataatggagacattttcacaggggcacaatttaaagagactgataaagaggaggaggaagaaaacatagctatgggggtggatgagcaaggagagggtggtgatgtaccaagaaatgattatgacagagataatccatccttaaaagaaggcaacacatttgcatcgatgaccgaatttaggaatgcacttgatacctattgcatcaaaggcgagtatgattatgtaattgacaagagtgagccaactagaatgactgttcattgcgcatttgagagctgtcagtggaggatatatgcttccagtatgcggaatagtacaattattcaggtcaaagtgaatccatctcctcgcacttgtccaagtgaaagaaaagggtcacataagtagctaaaagtagatggtgtgcaaatgcagtattagaatgggcgacatataactcatgcattggtacaactgaaccggtaaagaagatcaaagagaagtacaacattttggtgccttacatgatagtgtattatggcaaggaaatggctcttgacaagatttatggcccatgtaaggaaagctttaacttattattcactttcaaagctgaagtggagaaggcgtgcccaggtagtgttgttgagattgaccatcatacggtggattataaagtgagaggcaagattttgaacaaagaatgttttataagggtgttcgtttcattcaaagcatgttggagtaggttcttagctggttgcaggccttatttagcagtggatgcaacaactctttatgggaggtttagaggccagttagtagctgcttgtgtcattgatgcacataattggctactaggtatatgcccgtgcgttgcgacggcatataaattattcgatacaaagttagtatataacgattacataaaaataaacaatacatattatcat

SEQ ID NO: 35976 - DNA, 1966 bp, Zea Mays
tttctcccttgctctggcaccgattttgttccgaggaagtgatcggctgtaggctttcgtttcgatagacccccccgctcgagcttcccgtcgctgctgacttcgatttttttcgtgtccatttttctgttttttgtcatgtttgtctcggctctggagttcggataggcggtgtgaacactgaggaatggctgaagaggatgtccagccccttgtgtgcgacaatggcactggaatggttaaggcaggtttcgctggtgacgacgcgccgagggcagtctttcccagcatcgtaggcaggccacgccacactggcgtgatggtgggcatgggccaaaaggatgcatacgtgggcgacgaagcccagtccaagagaggcattctgacgctcaagtacccaatcgagcacggcattgtgggcaactgggatgacatggagaagatctggcaccacaccttctacaacgagctccgtgtggcgcctgaggagcaccctatactgctgaccgaggctcctctgaaccccaaggccaacagggagaagatgacccagatcatgtttgagacgttcagctgcccggcaatgtatgtgtccatccaggccgttctttccctgtacgccagtggacgaacgactggtattgtgctcgactctggtgacggcgtgagccacactgtccccatctacgaagggtacacgcttcctcatgctattattcgattggaccttgccggtcgtgacctcaccgacaacctgatgaagatcctcaccgagaggggttactccttcaccacgacagccgagcgagagattgtcagggacatcaaggaaaaacttgcctacgttgcacttgattacgagcaggagctggagacggccaggaccagctccaccgtcgagaagagctacgagctgcccgatggccaggtcatcacaatcggcgcagaaaggtttaggtgccctgaggtgctattccagccatccttcattggcatggaatctcctggcatccatgaagccacgtacaactccatcatgaagtgcgacgtcgatatcagaaaggacctgtacggtaatgttgtcctcagtggtggctccactatgttccctggcatcggtgaccgcatgagcaaggagatcactgcgcttgcccccagcagcatgaaggtgaaggtggttgctccgccggagaggaagtacagcgtttggattggtggctccattctggcctctctcagtaccttccagcagatgtggatctccaaggaagagtatgatgaatctggtccaggcatcgtccacatgaagtgtttctgaattctggagctgtatatctgttatttacttatattttcagttagttgggatgctagattgtcccatggtttctctagcattcttggttctttctaaatcattgaagggctgttggccatgaagcattgtgaaagatggttaggtcgactgatgtactacatgaagaaacatgtgtaacttcagtagtacggatggtcaggtcagtgttttttttttcaagaccaccagatcagtgcgttcctgatatgcgcgatctgggtttctacacgacgcaagggtgccggctgtcgcgtgtcgcccatgcagtttgagtctttgagagttcagttggtttatgcacttctgtacgtggtcatggaatcattcgcatttgcgccccgccgtggcgtggttgttgatttatacttggatatgtttgttttattccttctcatgaaacagctgttgttgtctctaagtgctagtttgggagatataaacccggagaggattggaggggctaaattacccttcttattcaattttgagtaagaaggggaatttaactccttcaattccttccggttttatggctctcaaactagtcctaaaggggtaaattgtttatccttcaggacttgtttgggtaatcttggattggagtggatt

SEQ ID NO: 35977 - DNA, 1990 bp, Zea Mays
cgtccctgcgctcgggaccgctgccgctaaagcacacgcccagcgcccgcagaccagtcacacacacatacttcggctgctgctctcccatttgtctcacctcgctctcacgcctgcctgcgtcaccggaagcgaccccgcgggcgagcgatccgatccccttcgcggcctcgtcaacgacgccgagcattctgctgcagaacactgaggaatggctgaagaggatgtccagccccttgtgtgcgacaatggcactggaatggttaaggcaggtttcgctggtgacgacgcgccgagggcagtctttcccagcatcgtaggcaggccacgccacactggcgtgatggtgggcatgggccaaaaggatgcatacgtgggcgacgaagcccagtccaagagaggcattctgacgctcaagtacccaatcgagcacggcattgtgggcaactgggatgacatggagaagatctggcaccacaccttctacaacgagctccgtgtggcgcctgaggagcaccctatactgctgaccgaggctcctctgaaccccaaggccaacagggagaagatgacccagatcatgtttgagacgttcagctgcccggcaatgtatgtgtccatccaggccgttctttccctgtacgccagtggacgaacgactggtattgtgctcgactctggtgacggcgtgagccacactgtccccatctacgaagggtacacgcttcctcatgctattattcgattggaccttgccggtcgtgacctcaccgacaacctgatgaagatcctcaccgagaggggttactccttcaccacgacagccgagcgagagattgtcagggacatcaaggaaaaacttgcctacgttgcacttgattacgagcaggagctggagacggccaggaccagctccaccgtcgagaagagctacgagctgcccgatggccaggtcatcacaatcggcgcagaaaggtttaggtgccctgaggtgctattccagccatccttcattggcatggaatctcctggcatccatgaagccacgtacaactccatcatgaagtgcgacgtcgatatcagaaaggacctgtacggtaatgttgtcctcagtggtggctccactatgttccctggcatcggtgaccgcatgagcaaggagatcactgcgcttgcccccagcagcatgaaggtgaaggtggttgctccgccggagaggaagtacagcgtttggattggtggctccattctggcctctctcagtaccttccagcagatgtggatctccaaggaagagtatgatgaatctggtccaggcatcgtccacatgaagtgtttctgaattctggagctgtatatctgttatttacttatattttcagttagttgggatgctagattgtcccatggtttctctagcattcttggttctttctaaatcattgaagggctgttggccatgaagcattgtgaaagatggttaggtcgactgatgtactacatgaagaaacatgtgtaacttcagtagtacggatggtcaggtcagtgttttttttttcaagaccaccagatcagtgcgttcctgatatgcgcgatctgggtttctacacgacgcaagggtgccggctgtcgcgtgtcgcccatgcagtttgagtctttgagagttcagttggtttatgcacttctgtacgtggtcatggaatcattcgcatttgcgccccgccgtggcgtggttgttgatttatacttggatatgtttgttttattccttctcatgaaacagctgttgttgtctctaagtgctagtttgggagatataaacccggagaggattggaggggctaaattacccttcttattcaattttgagtaagaaggggaatttaactccttcaattccttccggttttatggctctcaaactagtcctaaaggggtaaattgtttatccttcaggacttgtttgggtaatcttggattggagtggatt

SEQ ID NO: 35978 - DNA, 1525 bp, Zea Mays
ataaattccgttcacggcgccgccaacccgtccatcatccatccgtccacaaccacatagagagccagtaaacaccgcgcacgcaaacgcaacagcgagatcgtgtcgagcagccggggcgacttgcgaggcatggacttccaccacggctgccacaacagcagcatccacgcggcggcggcgccgccggcgcggccgtggagcaaggaggagaacaagatgttcgagagcgcgctggtgatgtggcccgagcacacgcccgagcgctgggcgctcgtcgcggcgcagctccacgggcgcacgccgcgggaggcctgggagcactacgaggcgctcgtcgccgacatcgcacttatcgagcgcggcggggtcgacgtgcccgcctgctggaacgacgacaaccaagtccgcggcggctgcgagggtggcactggcaacagccgccgcgccggcgctgaccgggcgcaccgcgagggccggcgccccgggaaaccctggagcgaggaagagcacaggctcttccttcaagggctggagaagtacgggcgcggggactggcgtaacatctcgcgcttcacggtgcggacgcgcacgccggcgcaggtggccagccacgcgcagaagtacttcaaccggcagctcaaccccgccagccggaactccaagcggaagagcatccacgacatcaccaccccttgaccctggccgccgacggcgacgcgcgctccctgcttacagccactcatctcatctcgagatcagaatagaagaaacaagtaggcattactcgtagtccatgacaagagctaaatccttaggtcgcatggttgggtcgttccagtcagcagctagcacatggtttaggcttactcgtagtcattaaaatagaattaggagtccaaacatctaatggagtctgacgtggcaccgtcgcgtcgagtttaggcgaatgcagaatgggatgagtttctcgcttgagaaacaccggtttcctgcctgtaaattttcttgttcccgctactgacccggaaacgaaaaacggttccgttttcagtgttatttagatttagaattttataatacaagagtcaaacgaaaaacggttcggttttcagtgttatttaggtttagatttaaaaatacaagagtcaaactttggtcacaaaacggcatccgaaaaatgcagaaccaaattgtaatcctatcaatgcccgagtcactgttctagtattgtattggtttatcaatggtgcttttatttttatagttgtattgttgttgtctgggggtgttccattccatccaaaggaaacaggcaatgcgtacgcaggtggacaacacgtgtcgatcgctgacgacgagacgggcggtgaggctccagggcttgagcagttgagcggcacgtggtagcagcaaaagcatctttgcgtcgtcaccgttcttgctcgacaacaacttggattatgtgccacaagattgcataataaatttatgcacgcgtgcaaaacctgaacagagactaggc

SEQ ID NO: 35979 - DNA, 1632 bp, Zea Mays
acggaaaatccaatcagggaaaaaatccatttccctttcttctgaagtcgtcctcttcttcccgtcgcttcgccgtgccgcacctgcgaggagaggagacttcgccgcgaagctcaccatgatctcgccggagaggagctcgtcacagagccagcggtcggcggcggcgggggcgccgttcctgtcgatctccgtcacggatcccgtaaagatgggtaccggcgtgcagtcctacatctcctaccgcgtcatcaccaagaccaacctccctgaatttgagggaccagagaaaattgttattcggcgctatagtgattttgaatggttgcatgatcggcttgctgagaggtacaaaggcatttttataccccctcttccggagaagaatgctgttgagaaattccggtttagcaaggagttcattgaattgcggcgtcaagctctggatttattcgttaacaggatagcttcacaccctgaactcaagcaaagtgatgtcttgaggacatttttgcaagcagatgaagagataatggatagggcaagatcttatgagactggtatttttaagaaaccggcagatttcatacagatgtttaagtcaaaagtcagtgatgttgttctgggaaaagaaaagcctgtggaggaatctactcctgaatatgagaagcttaaaaattacatatttgagctagaaaatcatttagcagaggcccaaaaacaagcataccgtcttgtgaaaagacacagagaacttggtcaatctttggcggactttggaaaggcgattaagcatttaggtgcttgtgaaggagatttgatggaaaaggtgttttctgaagttggttcgaagtcagagatgttgtcaataaagctgcaaagagagacaaccttctctttaactttgaagaacccttgaaagattatgtgcgtgctgtacaatctataaaagccactatgcttgatcgagccaatgctttcaggcagcacttcgatttggatcaggagaggaagtataaagagcttaatcttgaaaaattgaagttcatgaaccctgaaaagtatgccgaagcagaatctgagtttcgagagttgaaagcagacagtgaggaggctactaagaagtttgaacacatagttagactaatgaatgaagagcttgctcgtttccaggagcaaaagacagctgatattggactcgcattccatgaatttgccaagggtcaggctaagctagctaaagacattgcggatgcatggcgcagcgtcctcccaaagctcgaagcttgttccacatcataaatgtgatttgtgtttcctcatgatgtttgggaatgggatagggggttggcagctggtgagtttaggctgttttttcccagcctgttttgacactgattactgtatacttgaactgcggtttggaaatgctccagctgttaggttcagttgacgtcatttcttgctgtttgagcttttaaccgtcttcttttcttagatcaactgaaatagctactggaatctcgtgatattgataatcaatgatgtaccatgatgctacttcctggaacttctttagcttgattttttttcctgaagtgttcaagcgagaaatagatagcaggatttaga

SEQ ID NO: 35980 - DNA, 1636 bp, Zea Mays
acggaaaatccaatcagggaaaaaatccatttccctttcttctgaagtcgtcctcttcttcccgtcgcttcgccgtgccgcacctgcgaggagaggagacttcgccgcgaagctcaccatgatctcgccggagaggagctcgtcacagagccagcggtcggcggcggcgggggcgccgttcctgtcgatctccgtcacggatcccgtaaagatgggtaccggcgtgcagtcctacatctcctaccgcgtcatcaccaagaccaacctccctgaatttgagggaccagagaaaattgttattcggcgctatagtgattttgaatggttgcatgatcggcttgctgagaggtacaaaggcatttttataccccctcttccggagaagaatgctgttgagaaattccggtttagcaaggagttcattgaattgcggcgtcaagctctggatttattcgttaacaggatagcttcacaccctgaactcaagcaaagtgatgtcttgaggacatttttgcaagcagatgaagagataatggatagggcaagatcttatgagactggtatttttaagaaaccggcagatttcatacagatgtttaagtcaaaagtcagtgatgttgttctgggaaaagaaaagcctgtggaggaatctactcctgaatatgagaagcttaaaaattacatatttgagctagaaaatcatttagcagaggcccaaaaacaagcataccgtcttgtgaaaagacacagagaacttggtcaatctttggcggactttggaaaggcgattaagcatttaggtgcttgtgaaggagatttgatggaaaaggtgttttctgaagttggttcgaagtcagagatgttgtcaataaagctgcaaagagaggcagacaaccttctctttaactttgaagaacccttgaaagattatgtgcgtgctgtacaatctataaaagccactatgcttgatcgagccaatgctttcaggcagcacttcgatttggatcaggagaggaagtataaagagcttaatcttgaaaaattgaagttcatgaaccctgaaaagtatgccgaagcagaatctgagtttcgagagttgaaagcagacagtgaggaggctactaagaagtttgaacacatagttagactaatgaatgaagagcttgctcgtttccaggagcaaaagacagctgatattggactcgcattccatgaatttgccaagggtcaggctaagctagctaaagacattgcggatgcatggcgcagcgtcctcccaaagctcgaagcttgttccacatcataaatgtgatttgtgtttcctcatgatgtttgggaatgggatagggggttggcagctggtgagtttaggctgttttttcccagcctgttttgacactgattactgtatacttgaactgcggtttggaaatgctccagctgttaggttcagttgacgtcatttcttgctgtttgagcttttaaccgtcttcttttcttagatcaactgaaatagctactggaatctcgtgatattgataatcaatgatgtaccatgatgctacttcctggaacttctttagcttgattttttttcctgaagtgttcaagcgagaaatagatagcaggatttaga

SEQ ID NO: 35981 - DNA, 1562 bp, Zea Mays
caaaaatacccacggaaaatccaatcagggaaaaaatccatttccctttcttctgaagtcgtcctcttcttcccgtcgcttcgccgtgccgcacctgcgaggagaggagacttcgccgcgaagctcaccatgatctcgccggagaggagctcgtcacagagccagcggtcggcggcggcgggggcgccgttcctgtcgatctccgtcacggatcccgtaaagatgggtaccggcgtgcagtcctacatctcctaccgcgtcatcaccaagaccaacctccctgaatttgagggaccagagaaaattgttattcggcgctatagtgattttgaatggttgcatgatcggcttgctgagaggtacaaaggcatttttataccccctcttccggagaagaatgctgttgagaaattccggtttagcaaggagttcattgaattgcggcgtcaagctctggatttattcgttaacaggatagcttcacaccctgaactcaagcaaagtgatgtcttgaggacatttttgcaagcagatgaagagataatggatagggcaagatcttatgagactggtatttttaagaaaccggcagatttcatacagatgtttaagtcaaaagtcagtgatgttgttctgggaaaagaaaagcctgtggaggaatctactcctgaatatgagaagcttaaaaattacatatttgagctagaaaatcatttagcagaggcccaaaaacaagcataccgtcttgtgaaaagacacagagaacttggtcaatctttggcggactttggaaaggcgattaagcatttaggtgcttgtgaaggagatttgatggaaaaggtgttttctgaagttggttcgaagtcagagatgttgtcaataaagctgcaaagagagacaaccttctctttaactttgaagaacccttgaaagattatgtgcgtgctgtacaatctataaaagccactatgcttgatcgagccaatgctttcaggcagcacttcgatttggatcaggagaggaagtataaagagcttaatcttgaaaaattgaagttcatgaaccctgaaaagtatgccgaagcagaatctgagtttcgagaggagcaaaagacagctgatattggactcgcattccatgaatttgccaagggtcaggctaagctagctaaagacattgcggatgcatggcgcagcgtcctcccaaagctcgaagcttgttccacatcataaatgtgatttgtgtttcctcatgatgtttgggaatgggatagggggttggcagctggtgagtttaggctgttttttcccagcctgttttgacactgattactgtatacttgaactgcggtttggaaatgctccagctgttaggttcagttgacgtcatttcttgctgtttgagcttttaaccgtcttcttttcttagatcaactgaaatagctactggaatctcgtgatattgataatcaatgatgtaccatgatgctacttcctggaacttctttagcttgattttttttcctgaagtgttcaagcgagaaatagatagcaggatttaga

SEQ ID NO: 35982 - DNA, 1429 bp, Zea Mays
caacgaagagactttcaaagacaagagcaggaattagacggctgaccaactatgtgctgttcacaatatgtttttcatcagaagcttaggatagtgtagtttggacacacatggaactgaaggagacgggacatgtttgtctgcccaccgtcacagattgatacctgggtggtgatacagttacttctattccatggaagcatgatactgaatatctccagttggttctatctgtttcctatttgcacagactgggagatcaagaatagcaaggtcttccagttggttctgttgggtgtgtcctctacagctggtcatcagtgaccggattgggctaaacccaactatctatctctttaaatgggcccttgattgggagggccacacactaacctcggctggagaccctaggcacacgacgctataaatataggactaaggggtcgcaggaaaaactaacgctagtacctcgccccaaaaccctagtccccagaggccccatcgcctaggcgtcggagtgtctggaaacgcgacaacctacaacggctcggatctcgatgcctgctgcttctctgcagggcgacgatatgaagataacaacagcaacaataaggtgtgttttcccaattcctctcaatagatcagatctactcgttatcaaaattttacttccagttacggatttgttttctaaggacttaggaatcgatcctagacagtatagattctaacaggttctacctccagatggttcagtttcatccttatgaattgcagggcccagcacctaattgagtgtcttcaacaaaactttcatcccctttttttcttccccaactaacatctgtgttcacgccacaaatgcagtctattgggaaaataaagaacctcaacttttcactggggtcataaatgagcactacaaacttgatgtttttcttgcattgatttgcaattgaaaacgagcctctcagtaaagaatgttcaaatccactggtttgtaacgggctgggcctgatctgactacagtatgaagggtctgactacagtatcaagtcttttagcactcatgaggttctgagtttaggttggggttaaaaaaaatctcttgtctatctcacaccaaaggtccatggttccgtcatggtcattctcacgttgcctacggtgccgttatgtatgggtagagcaggagttcgtcgattttctcgacttgtatgaggtcttattaatgcaatacttagatgttgtcttatccccgcaggttttttacattattaagtcttttggcatttagcaagggtaggttttctatatctaaaaatccaaagcaggcagggcaggttgaaacatccagagatcttgttaagggcttgttcggttaggtgtggattgaggggattaaatcaactcctattctgaataggag

SEQ ID NO: 35983 - DNA, 1483 bp, Zea Mays
atggggtcacgcgaacgaccagaggggtcttcttcttcgtatctatcccccgcgaatcgcaacagaatatggttcatgctgatctccgtcgagcgtaacaacccgggccgtgatcccttggcctcggaactatatggacgatgcgctatctgcatgaagacgcgacgctggaggagatgctgaacccaagacaatcaagtgttcatgcccccagcgtgcggcgcggacctgagttcctccagcgccgccctggcctggtcctgcagcaggttcatccgacgcagcttgtcgacaattagaggctctcccattcttggatccacttaagcattttagaggtgttgtattctactatcaaaggttagcatgattgtttctacacatctcctactcccttctttgcttagtaatggttgataagtataagcacatgaatagtatggaagaaaaaaagataatacattattacaaaaagtaacttggtcttggttcattttctgaatgaaagtagtctcttgttgttcttatgcttcctctaatataacttttattttatataacatatgttaagtaatacaatgtcgagcttgtgtgtattggggttttttattggggtataaagtttatatgcattcttctggtatatttcggttgatgctaatttttagataaaatgatagtggggaggcttagctggtagtatactttgagttcggtgcacttggatccgttcacaattctctttgtcatctgcttctgttcatgttcttttccgaatataccattcaacacaaaggcaaacaccctttagtgtttctcttcatgttcttttccagttacatcggttgctctgtgagacaaccactcacttgcatttcttaagaagcatcgacagttatctgtagcagtcccatagtacctctcgcgtcaacaaacatgaaacatataacaacctagggagactgtccgcataagctcacttgaaatcagaacctcgatgacgacatgatgactgatgagattaaatggctttagaaagtaaacgacatgataattgatcagaaactcgatgacgacatgagaattgatgagaataaaaggctttacaaagtaataacttttttgagcttctggcaacatatattttcatgaggatttttatgggctacagcggaaagtatgtttaatatagcttcaggttgttcgacgactaccatgatgaggatttttatgggctactgcagaaatacaatattgtcgctcgagtagatgttaaattcccgattgaaccagttatcgtgacagataacattttattttatctgacatcaatgtaagccaacaattctttaagtttcatttacaaagttacacgatcttcataccatcgcctattctcctactgaaatactattagggagccaagatcgaggccataacatcttggtatgagacagtcaatatctctacaattgtcgatata

SEQ ID NO: 35984 - DNA, 1046 bp, Zea Mays
acggctcaccgctcagcgctcacacagtcacactcacacggccacgtccggactccagaggcctcgtcttcagtcttcaccctcttttcaacggttccggtgagccccgaaaacctaggtcgacacggccagcgctggtgtgacgaagcgggcgaggccgtctggctgactattggcggaaccgcggaagaagcgcgcgtgaatctcctggatttacagactcgagggggagctgagaaaagagatgggttggggaatatcaaggttgattggactgaaggctgctgtcctgctttctgtggcgtgttttttccaaggattaggagtgatccttatctcatttcctctcatatatgcatccgtgattgcaatactagtctccatagcttcccacccatcaattgatcttcctttacttcttggcaaggcatccgatggaagttttccgctgtggtcatggatcatcttctcaccatttcttcttttcattcacctgtttgtgctgatacgaagatttgtgaaaaacgagcccttatacactgaggttgcagatggagtgtttgttggaggatggccttcttcggttgaacacctgccaccaggtgaccctgcaatcatagattgcacgtgtgagttgccaaaaagctcaactatatctaacaatgcatatctgtgtgttgctacctgggatacgagggctcctcaaccatcacaaattgagtctgccgtgcgatgggctgtgagacagcggtcacagaacaaacctgtctatgtccactgtgcctatggtcatggcagaagtgtctgtgtgatgtgtgcgcttcttgtcgcattaggattggctgaagattggaaagctgctgagcaaatgatccatgagaagcgaccttctattagcatgaacactcttcaccgcaaaagcttggaggaatggtcaaaacatttgctcccctctaaaagaagtggggaagcagatttagtcctctctggcaagtgagcagccagaatcttgtgtaactgatttgttctctcctgacacgcacaaa

SEQ ID NO: 35985 - DNA, 1715 bp, Zea Mays
acggctcaccgctcagcgctcacacagtcacactcacacggccacgtccggactccagaggcctcgtcttcagtcttcaccctcttttcaacggttccggtgagccccgaaaacctaggtcgacacggccagcgctggtgtgacgaagcgggcgaggccgtctggctgactattggcggaaccgcggaagaagcgcgcgtgaatctcctggatttacagactcgagggggagctgagaaaagagatgggttggggaatatcaaggttgattggactgaaggctgctgtcctgctttctgtggcgtgttttttccaaggattaggagtgatccttatctcatttcctctcatatatgcatccgtgattgcaatactagtctccatagcttcccacccatcaattgatcttcctttacttcttggcaaggcatccgatggaagttttccgctgtggtcatggatcatcttctcaccatttcttcttttcattcacctgtttgtgctgatacgaagatttgtgaaaaacgagcccttatacactgaggttgcagatggagtgtttgttggaggatggccttcttcggttgaacacctgccaccaggtgaccctgcaatcatagattgcacgtgtgagttgccaaaaagctcaactatatctaacaatgcatatctgtgtgttgctacctgggatacgagggctcctcaaccatcacaaattgagtctgccgtgcgatgggctgtgagacagcggtcacagaacaaacctgtctatgtccactgtgcctatggtaattttgctcttctgcctatgtttggataaggaactgtgttgtctttcatatatgtctttcttgcaaatagatatatttatgttcttaaatgtatttctgtggattagccatatttagataactgttgagatcatgatgatccacaatggaatttcatgtattggcgaaccatatattgtgtagcaactggagtcaggagacaacagtaagctgatatgttatttttttcatttctggtgtcatcttatttcatgcgactatttgccatgtcttatttagttgttcttatctgcaacaagatcataagaagtaaaaatgccatgtataagctgaacagcatttgcattacattcagacagtataagggtcatcatatatgttgtgtagatagtcttataatagtatcagactttaaagagattttttagccaaatttaagcttaaacattgaaagaaaattaagctctggatatgtgctttggctggacttttaggtttggctcttagcttaaacttccctgttactaattttaaaataaaacctctttattaagtcttgttcttaccacttcctcacttacctaatatgccatcaaattgaacttaagtccaataatattgatcgcttggatttctttatgtgatggcgtgttatatctctaacaggtcatggcagaagtgtctgtgtgatgtgtgcgcttcttgtcgcattaggattggctgaagattggaaagctgctgagcaaatgatccatgagaagcgaccttctattagcatgaacactcttcaccgcaaaagcttggaggaatggtcaaaacatttgctcccctctaaaagaagtggggaagcagatttagtcctctctggcaagtgagcagccagaatcttgtgtaactgatttgttctctcctgacacgcacaaa

SEQ ID NO: 35986 - DNA, 1590 bp, Zea Mays
acggctcaccgctcagcgctcacacagtcacactcacacggccacgtccggactccagaggcctcgtcttcagtcttcaccctcttttcaacggttccggtgagccccgaaaacctaggtcgacacggccagcgctggtgtgacgaagcgggcgaggccgtctggctgactattggcggaaccgcggaagaagcgcgcgtgaatctcctggatttacagactcgagggggagctgagaaaagatggagtgtttgttggaggatggccttcttcggttgaacacctgccaccaggtgaccctgcaatcatagattgcacgtgtgagttgccaaaaagctcaactatatctaacaatgcatatctgtgtgttgctacctgggatacgagggctcctcaaccatcacaaattgagtctgccgtgcgatgggctgtgagacagcggtcacagaacaaacctgtctatgtccactgtgcctatggtaattttgctcttctgcctatgtttggataaggaactgtgttgtctttcatatatgtctttcttgcaaatagatatatttatgttcttaaatgtatttctgtggattagccatatttagataactgttgagatcatgatgatccacaatggaatttcatgtattggcgaaccatatattgtgtagcaactggagtcaggagacaacagtaagctgatatgttatttttttcatttctggtgtcatcttatttcatgcgactatttgccatgtcttatttagttgttcttatctgcaacaagatcataagaagtaaaaatgccatgtataagctgaacagcatttgcattacattcagacagtataagggtcatcatatatgttgtgtagatagtcttataatagtatcagactttaaagagattttttagccaaatttaagcttaaacattgaaagaaaattaagctctggatatgtgctttggctggacttttaggtttggctcttagcttaaacttccctgttactaattttaaaataaaacctctttattaagtcttgttcttaccacttcctcacttacctaatatgccatcaaattgaacttaagtccaataatattgatcgcttggatttctttatgtgatggcgtgttatatctctaacaggtcatggcagaagtgtctgtgtgatgtgtgcgcttcttgtcgcattaggattggctgaagattggaaagctgctgagcaaatgatccatgagaagcgaccttctattagcatgaacactcttcaccgcaaaagcttggaggaatggtcaaaacatttgctcccctctaaaagaagtggggaagcagatgtgagttctgttatccattcggattataaccggaaataaaattagaccagcaagagacaggcgtgttcagatatttaagatgcattgtacatttggttgtattgtttgctcctgtcctagtgaatgcctatggttcaagttaccattttgtggtaattgtgttgtaaaaactatatgtatcgaattatattagtactgtagctttacacagttagttctttacggaagatttatgaggtgtttggtttgatgaa

SEQ ID NO: 35987 - DNA, 1136 bp, Zea Mays
acggctcaccgctcagcgctcacacagtcacactcacacggccacgtccggactccagaggcctcgtcttcagtcttcaccctcttttcaacggttccggtgagccccgaaaacctaggtcgacacggccagcgctggtgtgacgaagcgggcgaggccgtctggctgactattggcggaaccgcggaagaagcgcgcgtgaatctcctggatttacagactcgagggggagctgagaaaagagatgggttggggaatatcaaggttgattggactgaaggctgctgtcctgctttctgtggcgtgttttttccaaggattaggagtgatccttatctcatttcctctcatatatgcatccgtgattgcaatactagtctccatagcttcccacccatcaattgatcttcctttacttcttggcaaggcatccgatggaagttttccgctgtggtcatggatcatcttctcaccatttcttcttttcattcacctgtttgtgctgatacgaagatttgtgaaaaacgagcccttatacactgaggttgcagatggagtgtttgttggaggatggccttcttcggttgaacacctgccaccagggctcctcaaccatcacaaattgagtctgccgtgcgatgggctgtgagacagcggtcacagaacaaacctgtctatgtccactgtgcctatggtcatggcagaagtgtctgtgtgatgtgtgcgcttcttgtcgcattaggattggctgaagattggaaagctgctgagcaaatgatccatgagaagcgaccttctattagcatgaacactcttcaccgcaaaagcttggaggaatggtcaaaacatttgctcccctctaaaagaagtggggaagcagatgtgagttctgttatccattcggattataaccggaaataaaattagaccagcaagagacaggcgtgttcagatatttaagatgcattgtacatttggttgtattgtttgctcctgtcctagtgaatgcctatggttcaagttaccattttgtggtaattgtgttgtaaaaactatatgtatcgaattatattagtactgtagctttacacagttagttctttacggaagatttatgaggtgtttggtttgatgaa

SEQ ID NO: 35988 - DNA, 666 bp, Zea Mays
ctgaggaacgttattgaggaggagagccgctcaacttccgcctcagggaagtctgtttcgggctctatgtcgacgagctccgagatggcgcgcacagttctcgagaacccatctgctgattcatcgaacaggcacacctcaacgccgtctttaatatcttctccggctaccggcggggccgcggccatcaccggcgagggggctaagcgggaggcttgaggagtccggctggtaagccgcagaggaggtggcggacgcgacagaggatggggattctttcggtagaaccgaatgggctaaggaagcttagggtggttccgatggagggactggggaggaagagagcgttgcgccgacgaggcggctgcgggcaccgcgcgggcaacggctgtcctaggaaggcggccgtggagacgagaggaagagatccggccgtgggtgcggaggcctgacgggaagagcaggcccgctcaggaggaagccgcgggaccggcgccacagccacgcacgggaggaggaagccgcgggaccggcggccacgcgcggagagggaactacggacggcggcggctacgagctaaccgaacggaagaacaccacaccccctcacgcgcatgaaaaacgggaagtggggttgggctttatgatatggggcggattgtgagg

SEQ ID NO: 35989 - DNA, 254 bp, Zea Mays
cgcatatagaataaaatcaaagctgcaataattgaagaaacttagtcaagattcggtcaagatagtaatgtaattttacatggataatcaagtactagaaataaattaaagagggcagaagacttattttaatagcataattattccgaacttcatcacactctcagatttatacttaataacaaagtaaaaggatcaatggtgcaaaacaataaacaattagaactattgtcttcaggatatttaagaatttg

SEQ ID NO: 35990 - DNA, 758 bp, Zea Mays
gttcaattaactttgttccgagacgaagcgggtgtagaatagtgtcagcgaccataaatcacatgatcacatcacgaaattcgatacaactcagtacaatagcatgtcagcgtccaggaaccacatcaggaaaccagaatctcgagcactatggcatttattatttcctcccgaatgcatcatgttctgttcacatcataaggtaacagttaggaaccacattagggaacaatttctagctggatttcttctctaagttatataagttttgattagctgaaacgattccaaatccattcctagacaaacgaacaagcccttacacagaatggaacgcaaaagctcaggttcgcatgcactggtactaccgcaactatcaggacccaggttccataccatatgtattcagaacctggggactgcaattctaagatgcaaaggtctattgcatcggttctcccctatgcacagctaagccaaccaccctcggcgacccggtcaaaagtagcagaaaagaatagagtagaacctaccaccatctgtgtgacaagcctctgtttctcgaagagcattccagattgcggctcttcagattctctggcatcgtatgatgcctgcagcacctccatagcacagccatctctggctacccttgttcatgttccaccgcacttgattcaaagcgacagaattcggagggacgacattaaggtctttaggggattgaacacccttgtcgttccatgttccatcattct

SEQ ID NO: 35991 - DNA, 3322 bp, Zea Mays
gcctgcaactctctcgtcccggcaaaggtcacaccttcctccctcgtccacatccgtgcctccagccaccggccgcctagggcggcgctcttgccaccggctgtcgagcccgccgaccttgccgccgtttccacgccgcctgacctgcccccacgacctgctgccgtcacgccatccgacctgccccaggacagcccaagcccccgcgaggccgcgacctgctggggaggagattgataggagaggtggtcggcggcgtggataccaacgacggagacatagtgattgccgcccgtcgtcccctgtttccgacacgctgaagcctcacgccacgagcgagcagagggccccaactgccagcagcaaccttaggcactggttgcttgaaggcaagcgcgtcgtatgttatccgttttctatcacattaccgtcgtaattatcatatccctctccccagttatccaagcattatgcagggacagaaactataaaacttctagcaatcttgttgacccaaacgatttgccttgtttcagttcttgatcttcttctttgccctcagctgaaaatgggagaagcaagggaaacattaggaaatcacaccaatcagcaaaacaattaaacccttgattgtgattttcagctgtgcaaatcttaattagatatctcagataatccatcaactagacaaacatacaaagtgaaccgaacaactctcaaacaatatgatatttcctaggcaactctcaaaggaaaaagtcacatagcaaatgacataatttagtacatgtaatgaattctgatgatgtatgccaagtttatcactagcgtacatgtctaaagctgactggcatccgcttgcttatacaaatccaaaatatgacattactacagtaaggcatcaccattcacaaacaagaaaatagtacctcgttgttgtggccacatttcttcttgcggcagttaacagccttggtgtgcaagcgagtatagcacctggatcagatatttgacatcaagcacttagactaccctaggttcatactgaatataagaatttccaatgcaaacacaatactatttacaaaactatctaggggggaaatcaaatggtcctttgtaataatgtttacgaacaaagcaaactaggtgcaagacagtaaacgtcaaaacacagacaaaacaagaaccagagaaacttgcagtgatcaaaagtctgaatgattggcaggccagacaaaatatatgcctcaaaagttaagctcgtaaggcgacttacacatctaattgattcatcattccagccaatcaactatgagcataggaaagcacaaatcccagaccaaactcaaaagatacttcaactgaacaaacaagttatactacctaattggttcatcacccctgccaatccactaaactgaatacaatgaaacaaagatagtggactgtcacaagtggttatatgttgcatattttaagacattcccggttgttgaaaatttaggagattagaccttcattagtatagatgcagatcattggtctcctcatacgagccaaattttcaagaaataccaacgaaggtgatggcacacaagttgatgcacacaatgataccacgcaagatgatgcacttgaagtaaccaaacattcggacgcgcataaaatcgccacgcacgcatcgctggttttgccgtcgcagagcagaaggcactccgggacggcagcgtgctctgcagacgctgaaggcaggatgtggctggaagaggtgaggcggagggagcgtggagagcttcgcgctcggcggtttgaggccgccgcccgagcgtgccgcacggcttcgctcgcgctctccaatcgcaaggagtttgtcaccccacatcacggcgccgtcaactcgctccaggttgatttgacagaggggaggtacctgctctccggggcatcggatgggtcggccgctgtgttcgatgtgtggaacgcgactgaatacgaaaccgggttcatagcaaagcacaggaacatactgcttgtggacaagcaacaccagaatggccacaagttcgccatctcggcggccgtttggtatcctgtggatacggggctgtttgtcacagcatcctttgaccagtttgtcaaagtttgggatacaaattcgactcaagtcgtcatggaatttaagatgcctggaaaagtgtacactgcagccatgtctccaatcgcaacaacgcacgtgctcattgctactgggagtgcagatgttcagatggtatcatgtctttggagtggtctgcctcaagtgagtggattttgatgagtggtggctgtgacggggcaatacgtttttgggacattagaagagctggatgctttcgggttctggaccaatcaaggtctcaacttggaaaaaggccccttgttaaaagtgctctatataaggatcacacagattccttaggaccttcaccttccgcaaggagaaggacaggcatttctaagaagagttcatcagctttgcgcaaaattcaaaacccgacacatggacacatgcaacagagattgcatcctggtttgtcatctagtcaaaaccgtgctactgctcattatggtgctgttactggtttacgaacaactgcagatgggatgtaccttcttagctcaggatctgattctcgcttaagactatgggacatcgattcaggctgcaatacgctggtcaattttgaagctatgcgattgcagacaggcaagccattacaattagctgtcactgaggatccttcacttgtatttgttccatgtatggcaagcatcaaggcatacaatttatggtctggtaaaacatttcaaacattccgggggcactatgaacttgtgagttgctgctactatagtgaacaggaccaagaagatgatgacaagatcctttctgcagctgatgaggataactggagcgactgagaaaccctggagccgggaggagtgtgtcttgtatctactgacatcgatgttactgatgttaacaaataacatgtcgaggttgttaggtcttgttagcagcccctaaatgatgatattgtcttggtgtattttcaaaaatatgtacattaccatgtgaaaatttgacagatcattgaataatttgtagatttatctcaggaggatagagggatgtttgacgttcgccaaaatgttgtttagccctggagccttgttttcttcactgtgtattaatgctttacccaaaaataagaatttttctgagcaaataggaagaagtgtagctttaagggctagtttgggagctaaaatagtgaag

SEQ ID NO: 35992 - DNA, 4184 bp, Zea Mays
gcctgcaactctctcgtcccggcaaaggtcacaccttcctccctcgtccacatccgtgcctccagccaccggccgcctagggcggcgctcttgccaccggctgtcgagcccgccgaccttgccgccgtttccacgccgcctgacctgcccccacgacctgctgccgtcacgccatccgacctgccccaggacagcccaagcccccgcgaggccgcgacctgctggggaggagattgataggagaggtggtcggcggcgtggataccaacgacggagacatagtgattgccgcccgtcgtcccctgtttccgacacgctgaagcctcacgccacgagcgagcagagggccccaactgccagcagcaaccttaggcactggttgcttgaaggcaagcgcgtcgtatgttatccgttttctatcacattaccgtcgtaattatcatatccctctccccagttatccaagcattatgcagggacagaaactataaaacttctagcaatcttgttgacccaaacgatttgccttgtttcagttcttgatcttcttctttgccctcagctgaaaatgggagaagcaagggaaacattaggaaatcacaccaatcagcaaaacaattaaacccttgattgtgattttcagctgtgcaaatcttaattagatatctcagataatccatcaactagacaaacatacaaagtgaaccgaacaactctcaaacaatatgatatttcctaggcaactctcaaaggaaaaagtcacatagcaaatgacataatttagtacatgtaatgaattctgatgatgtatgccaagtttatcactagcgtacatgtctaaagctgactggcatccgcttgcttatacaaatccaaaatatgacattactacagtaaggcatcaccattcacaaacaagaaaatagtacctcgttgttgtggccacatttcttcttgcggcagttaacagccttggtgtgcaagcgagtatagcacctggatcagatatttgacatcaagcacttagactaccctaggttcatactgaatataagaatttccaatgcaaacacaatactatttacaaaactatctaggggggaaatcaaatggtcctttgtaataatgtttacgaacaaagcaaactaggtgcaagacagtaaacgtcaaaacacagacaaaacaagaaccagagaaacttgcagtgatcaaaagtctgaatgattggcaggccagacaaaatatatgcctcaaaagttaagctcgtaaggcgacttacacatctaattgattcatcattccagccaatcaactatgagcataggaaagcacaaatcccagaccaaactcaaaagatacttcaactgaacaaacaagttatactacctaattggttcatcacccctgccaatccactaaactgaatacaatgaaacaaagatagtggactgtcacaagtggttatatgttgcatattttaagacattcccggttgttgaaaatttaggagattagaccttcattagtatagatgcagatcattggtctcctcatacgagccaaattttcaagaaataccaacgaaggtgatggcacacaagttgatgcacacaatgataccacgcaagatgatgcacttgaaggcaaggaagatgattgtttgtgctactatgccgctccataattttattcgtgagcattctagtggtgatgtgggctttgcaaattgtggttgagatcctgattttgtgcctactatcccaatttcccaaatagatacaataaataactgaataatcagtgtcaccacatgcctcagatcaatccacttctaaatcaagttttactacaatggatgcatttcgtgatagtatagcaacgactctcacttgtgtggaattagcaccaaatatttatgcaatattttgcaacatctatttgtagtgacttgtgtgaagagtgaagacaatgattatgtaatatgttactagtttattattgctgcaaggttgaatatttgaatttatttgaaaaaatcatatagtgatttatctttgttgtattgttgaatagtcaagttcatagcaaaaatagttgcataaagatcattattctcaataaaacaattagctaaaacaaccaaatgataggaaggtcattgcagcctcaaacttcacttttctagagttggatgcacctttctggtcaaacacagtcaaaactccagaggagagcagctccagtctggagttatagagcaaagctactctgaagtggagtggagccatacaaacacaccttagttggcgtagatttttgtgaatccgcttttggctagcgataacgtcttctgggtttccaaaggcttctactcgactcctctaggccttttgggacgtgaccttcatcttgtgcgacttgccaaacgaatccgtcacaatactgccgaatgcaatggaagcttcctaccataacagtcgacccttttcacaccggtcaacgcagtaaccaaacattcggacgcgcataaaatcgccacgcacgcatcgctggttttgccgtcgcagagcagaaggcactccgggacggcagcgtgctctgcagacgctgaaggcaggatgtggctggaagaggtgaggcggagggagcgtggagagcttcgcgctcggcggtttgaggccgccgcccgagcgtgccgcacggcttcgctcgcgctctccaatcgcaaggagtttgtcaccccacatcacggcgccgtcaactcgctccaggttgatttgacagaggggaggtacctgctctccggggcatcggatgggtcggccgctgtgttcgatgtgtggaacgcgactgaatacgaaaccgggttcatagcaaagcacaggaacatactgcttgtggacaagcaacaccagaatggccacaagttcgccatctcggcggccgtttggtatcctgtggatacggggctgtttgtcacagcatcctttgaccagtttgtcaaagtttgggatacaaattcgactcaagtcgtcatggaatttaagatgcctggaaaagtgtacactgcagccatgtctccaatcgcaacaacgcacgtgctcattgctactgggagtgcagatgttcagatggtatcatgtctttggagtggtctgcctcaagtgagtggattttgatgagtggtggctgtgacggggcaatacgtttttgggacattagaagagctggatgctttcgggttctggaccaatcaaggtctcaacttggaaaaaggccccttgttaaaagtgctctatataaggatcacacagattccttaggaccttcaccttccgcaaggagaaggacaggcatttctaagaagagttcatcagctttgcgcaaaattcaaaacccgacacatggacacatgcaacagagattgcatcctggtttgtcatctagtcaaaaccgtgctactgctcattatggtgctgttactggtttacgaacaactgcagatgggatgtaccttcttagctcaggatctgattctcgcttaagactatgggacatcgattcaggctgcaatacgctggtcaattttgaagctatgcgattgcagacaggcaagccattacaattagctgtcactgaggatccttcacttgtatttgttccatgtatggcaagcatcaaggcatacaatttatggtctggtaaaacatttcaaacattccgggggcactatgaacttgtgagttgctgctactatagtgaacaggaccaagaagatgatgacaagatcctttctgcagctgatgaggataactggagcgactgagaaaccctggagccgggaggagtgtgtcttgtatctactgacatcgatgttactgatgttaacaaataacatgtcgaggttgttaggtcttgttagcagcccctaaatgatgatattgtcttggtgtattttcaaaaatatgtacattaccatgtgaaaatttgacagatcattgaataatttgtagatttatctcaggaggatagagggatgtttgacgttcgccaaaatgttgtttagccctggagccttgttttcttcactgtgtattaatgctttacccaaaaataagaatttttctgagcaaataggaagaagtgtagctttaagggctagtttgggagctaaaatagtgaag

SEQ ID NO: 35993 - DNA, 2131 bp, Zea Mays
gcctgcaactctctcgtcccggcaaaggtcacaccttcctccctcgtccacatccgtgcctccagccaccggccgcctagggcggcgctcttgccaccggctgtcgagcccgccgaccttgccgccgtttccacgccgcctgacctgcccccacgacctgctgccgtcacgccatccgacctgccccaggacagcccaagcccccgcgaggccgcgacctgctggggaggagattgataggagaggtggtcggcggcgtggataccaacgacggagacatagtgattgccgcccgtcgtcccctgtttccgacacgctgaagcctcacgccacgagcgagcagagggccccaactgccagcagcaaccttaggcactggttgcttgaaggcaagcgcgtctaaccaaacattcggacgcgcataaaatcgccacgcacgcatcgctggttttgccgtcgcagagcagaaggcactccgggacggcagcgtgctctgcagacgctgaaggcaggatgtggctggaagaggtgaggcggagggagcgtggagagcttcgcgctcggcggtttgaggccgccgcccgagcgtgccgcacggcttcgctcgcgctctccaatcgcaaggagtttgtcaccccacatcacggcgccgtcaactcgctccaggttgatttgacagaggggaggtacctgctctccggggcatcggatgggtcggccgctgtgttcgatgtgtggaacgcgactgaatacgaaaccgggttcatagcaaagcacaggaacatactgcttgtggacaagcaacaccagaatggccacaagttcgccatctcggcggccgtttggtatcctgtggatacggggctgtttgtcacagcatcctttgaccagtttgtcaaagtttgggatacaaattcgactcaagtcgtcatggaatttaagatgcctggaaaagtgtacactgcagccatgtctccaatcgcaacaacgcacgtgctcattgctactgggagtgcagatgttcagtggtctgcctcaagtgagtggattttgatgagtggtggctgtgacggggcaatacgtttttgggacattagaagagctggatgctttcgggttctggaccaatcaaggtctcaacttggaaaaaggccccttgttaaaagtgctctatataaggatcacacagattccttaggaccttcaccttccgcaaggagaaggacaggcatttctaagaagagttcatcagctttgcgcaaaattcaaaacccgacacatggacacatgcaacagagattgcatcctggtttgtcatctagtcaaaaccgtgctactgctcattatggtgctgttactggtttacgaacaactgcagatgggatgtaccttcttagctcaggatctgattctcgcttaagactatgggacatcgattcaggctgcaatacgctggtcaattttgaagctatgcgattgcagacaggcaagccattacaattagctgtcactgaggatccttcacttgtatttgttccatgtatggcaagcatcaaggcatacaatttatggtctggtaaaacatttcaaacattccgggggcactatgaacttgtgagttgctgctactatagtgaacaggaccaagaactttatactggcagcaacgacaggcaaattcttgtgtggtctccatcaactccagcttttactaaaatggaagatgatgacaagatcctttctgcagctgatgaggataactggagcgactgagaaaccctggagccgggaggagtgtgtcttgtatctactgacatcgatgttactgatgttaacaaataacatgtcgaggttgttaggtcttgttagcagcccctaaatgatgatattgtcttggtgtattttcaaaaatatgtacattaccatgtgaaaatttgacagatcattgaataatttgtagatttatctcaggaggatagagggatgtttgacgttcgccaaaatgttgtttagccctggagccttgttttcttcactgtgtattaatgctttacccaaaaataagaatttttctgagcaaataggaagaagtgtagctttaagggctagtttgggagctaaaatagtgaag

SEQ ID NO: 35994 - DNA, 2127 bp, Zea Mays
gcctgcaactctctcgtcccggcaaaggtcacaccttcctccctcgtccacatccgtgcctccagccaccggccgcctagggcggcgctcttgccaccggctgtcgagcccgccgaccttgccgccgtttccacgccgcctgacctgcccccacgacctgctgccgtcacgccatccgacctgccccaggacagcccaagcccccgcgaggccgcgacctgctggggaggagattgataggagaggtggtcggcggcgtggataccaacgacggagacatagtgattgccgcccgtcgtcccctgtttccgacacgctgaagcctcacgccacgagcgagcagagggccccaactgccagcagcaaccttaggcactggttgcttgaagtaaccaaacattcggacgcgcataaaatcgccacgcacgcatcgctggttttgccgtcgcagagcagaaggcactccgggacggcagcgtgctctgcagacgctgaaggcaggatgtggctggaagaggtgaggcggagggagcgtggagagcttcgcgctcggcggtttgaggccgccgcccgagcgtgccgcacggcttcgctcgcgctctccaatcgcaaggagtttgtcaccccacatcacggcgccgtcaactcgctccagaggggaggtacctgctctccggggcatcggatgggtcggccgctgtgttcgatgtgtggaacgcgactgaatacgaaaccgggttcatagcaaagcacaggaacatactgcttgtggacaagcaacaccagaatggccacaagttcgccatctcggcggccgtttggtatcctgtggatacggggctgtttgtcacagcatcctttgaccagtttgtcaaagtttgggatacaaattcgactcaagtcgtcatggaatttaagatgcctggaaaagtgtacactgcagccatgtctccaatcgcaacaacgcacgtgctcattgctactgggagtgcagatgttcagatggtatcatgtctttggagtggtctgcctcaagtgagtggattttgatgagtggtggctgtgacggggcaatacgtttttgggacattagaagagctggatgctttcgggttctggaccaatcaaggtctcaacttggaaaaaggccccttgttaaaagtgctctatataaggatcacacagattccttaggaccttcaccttccgcaaggagaaggacaggcatttctaagaagagttcatcagctttgcgcaaaattcaaaacccgacacatggacacatgcaacagagattgcatcctggtttgtcatctagtcaaaaccgtgctactgctcattatggtgctgttactggtttacgaacaactgcagatgggatgtaccttcttagctcaggatctgattctcgcttaagactatgggacatcgattcaggctgcaatacgctggtcaattttgaagctatgcgattgcagacaggcaagccattacaattagctgtcactgaggatccttcacttgtatttgttccatgtatggcaagcatcaaggcatacaatttatggtctggtaaaacatttcaaacattccgggggcactatgaacttgtgagttgctgctactatagtgaacaggaccaagaactttatactggcagcaacgacaggcaaattcttgtgtggtctccatcaactccagcttttactaaaatggaagatgatgacaagatcctttctgcagctgatgaggataactggagcgactgagaaaccctggagccgggaggagtgtgtcttgtatctactgacatcgatgttactgatgttaacaaataacatgtcgaggttgttaggtcttgttagcagcccctaaatgatgatattgtcttggtgtattttcaaaaatatgtacattaccatgtgaaaatttgacagatcattgaataatttgtagatttatctcaggaggatagagggatgtttgacgttcgccaaaatgttgtttagccctggagccttgttttcttcactgtgtattaatgctttacccaaaaataagaatttttctgagcaaataggaagaagtgtagctttaagggctagtttgggagctaaaatagtgaag

SEQ ID NO: 35995 - DNA, 2151 bp, Zea Mays
gcctgcaactctctcgtcccggcaaaggtcacaccttcctccctcgtccacatccgtgcctccagccaccggccgcctagggcggcgctcttgccaccggctgtcgagcccgccgaccttgccgccgtttccacgccgcctgacctgcccccacgacctgctgccgtcacgccatccgacctgccccaggacagcccaagcccccgcgaggccgcgacctgctggggaggagattgataggagaggtggtcggcggcgtggataccaacgacggagacatagtgattgccgcccgtcgtcccctgtttccgacacgctgaagcctcacgccacgagcgagcagagggccccaactgccagcagcaaccttaggcactggttgcttgaaggcaagcgcgtctaaccaaacattcggacgcgcataaaatcgccacgcacgcatcgctggttttgccgtcgcagagcagaaggcactccgggacggcagcgtgctctgcagacgctgaaggcaggatgtggctggaagaggtgaggcggagggagcgtggagagcttcgcgctcggcggtttgaggccgccgcccgagcgtgccgcacggcttcgctcgcgctctccaatcgcaaggagtttgtcaccccacatcacggcgccgtcaactcgctccaggttgatttgacagaggggaggtacctgctctccggggcatcggatgggtcggccgctgtgttcgatgtgtggaacgcgactgaatacgaaaccgggttcatagcaaagcacaggaacatactgcttgtggacaagcaacaccagaatggccacaagttcgccatctcggcggccgtttggtatcctgtggatacggggctgtttgtcacagcatcctttgaccagtttgtcaaagtttgggatacaaattcgactcaagtcgtcatggaatttaagatgcctggaaaagtgtacactgcagccatgtctccaatcgcaacaacgcacgtgctcattgctactgggagtgcagatgttcagatggtatcatgtctttggagtggtctgcctcaagtgagtggattttgatgagtggtggctgtgacggggcaatacgtttttgggacattagaagagctggatgctttcgggttctggaccaatcaaggtctcaacttggaaaaaggccccttgttaaaagtgctctatataaggatcacacagattccttaggaccttcaccttccgcaaggagaaggacaggcatttctaagaagagttcatcagctttgcgcaaaattcaaaacccgacacatggacacatgcaacagagattgcatcctggtttgtcatctagtcaaaaccgtgctactgctcattatggtgctgttactggtttacgaacaactgcagatgggatgtaccttcttagctcaggatctgattctcgcttaagactatgggacatcgattcaggctgcaatacgctggtcaattttgaagctatgcgattgcagacaggcaagccattacaattagctgtcactgaggatccttcacttgtatttgttccatgtatggcaagcatcaaggcatacaatttatggtctggtaaaacatttcaaacattccgggggcactatgaacttgtgagttgctgctactatagtgaacaggaccaagaactttatactggcagcaacgacaggcaaattcttgtgtggtctccatcaactccagcttttactaaaatggaagatgatgacaagatcctttctgcagctgatgaggataactggagcgactgagaaaccctggagccgggaggagtgtgtcttgtatctactgacatcgatgttactgatgttaacaaataacatgtcgaggttgttaggtcttgttagcagcccctaaatgatgatattgtcttggtgtattttcaaaaatatgtacattaccatgtgaaaatttgacagatcattgaataatttgtagatttatctcaggaggatagagggatgtttgacgttcgccaaaatgttgtttagccctggagccttgttttcttcactgtgtattaatgctttacccaaaaataagaatttttctgagcaaataggaagaagtgtagctttaagggctagtttgggagctaaaatagtgaag

SEQ ID NO: 35996 - DNA, 2198 bp, Zea Mays
gcctgcaactctctcgtcccggcaaaggtcacaccttcctccctcgtccacatccgtgcctccagccaccggccgcctagggcggcgctcttgccaccggctgtcgagcccgccgaccttgccgccgtttccacgccgcctgacctgcccccacgacctgctgccgtcacgccatccgacctgccccaggacagcccaagcccccgcgaggccgcgacctgctggggaggagattgataggagaggtggtcggcggcgtggataccaacgacggagacatagtgattgccgcccgtcgtcccctgtttccgacacgctgaagcctcacgccacgagcgagcagagggccccaactgccagcagcaaccttaggcactggttgcttgaagtaaccaaacattcggacgcgcataaaatcgccacgcacgcatcgctggttttgccgtcgcagagcagaaggcactccgggacggcagcgtgctctgcagacgctgaaggcaggatgtggctggaagaggtgaggcggagggagcgtggagagcttcgcgctcggcggtttgaggccgccgcccgagcgtgccgcacggcttcgctcgcgctctccaatcgcaaggagtttgtcaccccacatcacggcgccgtcaactcgctccaggttgatttgacagaggggaggtacctgctctccggggcatcggatgggtcggccgctgtgttcgatgtgtggaacgcgactgaatacgaaaccgggttcatagcaaagcacaggaacatactgcttgtggacaagcaacaccagaatggccacaagttcgccatctcggcggccgtttggtatcctgtggatacggggctgtttgtcacagcatcctttgaccagtttgtcaaagtttgggatacaaattcgactcaagtcgtcatggaatttaagatgcctggaaaagtgtacactgcagccatgtctccaatcgcaacaacgcacgtgctcattgctactgggagtgcagatgttcaggtccgtctatgtgacattgcttctggagcctttacccacacgttgtctggtcatcgtgatggtatcatgtctttggagtggtctgcctcaagtgagtggattttgatgagtggtggctgtgacggggcaatacgtttttgggacattagaagagctggatgctttcgggttctggaccaatcaaggtctcaacttggaaaaaggccccttgttaaaagtgctctatataaggatcacacagattccttaggaccttcaccttccgcaaggagaaggacaggcatttctaagaagagttcatcagctttgcgcaaaattcaaaacccgacacatggacacatgcaacagagattgcatcctggtttgtcatctagtcaaaaccgtgctactgctcattatggtgctgttactggtttacgaacaactgcagatgggatgtaccttcttagctcaggatctgattctcgcttaagactatgggacatcgattcaggctgcaatacgctggtcaattttgaagctatgcgattgcagacaggcaagccattacaattagctgtcactgaggatccttcacttgtatttgttccatgtatggcaagcatcaaggcatacaatttatggtctggtaaaacatttcaaacattccgggggcactatgaacttgtgagttgctgctactatagtgaacaggaccaagaactttatactggcagcaacgacaggcaaattcttgtgtggtctccatcaactccagcttttactaaaatggaagatgatgacaagatcctttctgcagctgatgaggataactggagcgactgagaaaccctggagccgggaggagtgtgtcttgtatctactgacatcgatgttactgatgttaacaaataacatgtcgaggttgttaggtcttgttagcagcccctaaatgatgatattgtcttggtgtattttcaaaaatatgtacattaccatgtgaaaatttgacagatcattgaataatttgtagatttatctcaggaggatagagggatgtttgacgttcgccaaaatgttgtttagccctggagccttgttttcttcactgtgtattaatgctttacccaaaaataagaatttttctgagcaaataggaagaagtgtagctttaagggctagtttgggagctaaaatagtgaag

SEQ ID NO: 35997 - DNA, 2113 bp, Zea Mays
gcctgcaactctctcgtcccggcaaaggtcacaccttcctccctcgtccacatccgtgcctccagccaccggccgcctagggcggcgctcttgccaccggctgtcgagcccgccgaccttgccgccgtttccacgccgcctgacctgcccccacgacctgctgccgtcacgccatccgacctgccccaggacagcccaagcccccgcgaggccgcgacctgctggggaggagattgataggagaggtggtcggcggcgtggataccaacgacggagacatagtgattgccgcccgtcgtcccctgtttccgacacgctgaagcctcacgccacgagcgagcagagggccccaactgccagcagcaaccttaggcactggttgcttgaagtaaccaaacattcggacgcgcataaaatcgccacgcacgcatcgctggttttgccgtcgcagagcagaaggcactccgggacggcagcgtgctctgcagacgctgaaggcaggatgtggctggaagaggtgaggcggagggagcgtggagagcttcgcgctcggcggtttgaggccgccgcccgagcgtgccgcacggcttcgctcgcgctctccaatcgcaaggagtttgtcaccccacatcacggcgccgtcaactcgctccagaggggaggtacctgctctccggggcatcggatgggtcggccgctgtgttcgatgtgtggaacgcgactgaatacgaaaccgggttcatagcaaagcacaggaacatactgcttgtggacaagcaacaccagaatggccacaagttcgccatctcggcggccgtttggtatcctgtggatacggggctgtttgtcacagcatcctttgaccagtttgtcaaagtttgggatacaaattcgactcaagtcgtcatggaatttaagatgcctggaaaagtgtacactgcagccatgtctccaatcgcaacaacgcacgtgctcattgctactgggagtgcagatgttcaggtccgtctatgtgacattgcttctggagcctttacccacacgttgtctggtcatcgtgatggtatcatgtctttggagtggtctgcctcaagtgagtggattttgatgagtggtggctgtgacggggcaatacgtttttgggacattagaagagctggatgctttcgggttctggaccaatcaaggtctcaacttggaaaaaggccccttgttaaaagtgctctatataaggatcacacagattccttaggaccttcaccttccgcaaggagaaggacaggcatttctaagaagagttcatcagctttgcgcaaaattcaaaacccgacacatggacacatgcaacagagattgcatcctggtttgtcatctagtcaaaaccgtgctactgctcattatggtgctgttactggtttacgaacaactgcagatgggatgtaccttcttagctcaggatctgattctcgcttaagactatgggacatcgattcaggctgcaatacgctggtcaattttgaagctatgcgattgcagacaggcaagccattacaattagctgtcactgaggatccttcacttgtatttgttccatgtatggcaagcatcaaggcatacaatttatggtctggtaaaacatttcaaacattccgggggcactatgaacttgtgagttgctgctactatagtgaacaggaccaagaagatgatgacaagatcctttctgcagctgatgaggataactggagcgactgagaaaccctggagccgggaggagtgtgtcttgtatctactgacatcgatgttactgatgttaacaaataacatgtcgaggttgttaggtcttgttagcagcccctaaatgatgatattgtcttggtgtattttcaaaaatatgtacattaccatgtgaaaatttgacagatcattgaataatttgtagatttatctcaggaggatagagggatgtttgacgttcgccaaaatgttgtttagccctggagccttgttttcttcactgtgtattaatgctttacccaaaaataagaatttttctgagcaaataggaagaagtgtagctttaagggctagtttgggagctaaaatagtgaag

SEQ ID NO: 35998 - DNA, 4301 bp, Zea Mays
gcctgcaactctctcgtcccggcaaaggtcacaccttcctccctcgtccacatccgtgcctccagccaccggccgcctagggcggcgctcttgccaccggctgtcgagcccgccgaccttgccgccgtttccacgccgcctgacctgcccccacgacctgctgccgtcacgccatccgacctgccccaggacagcccaagcccccgcgaggccgcgacctgctggggaggagattgataggagaggtggtcggcggcgtggataccaacgacggagacatagtgattgccgcccgtcgtcccctgtttccgacacgctgaagcctcacgccacgagcgagcagagggccccaactgccagcagcaaccttaggcactggttgcttgaaggcaagcgcgtcgtatgttatccgttttctatcacattaccgtcgtaattatcatatccctctccccagttatccaagcattatgcagggacagaaactataaaacttctagcaatcttgttgacccaaacgatttgccttgtttcagttcttgatcttcttctttgccctcagctgaaaatgggagaagcaagggaaacattaggaaatcacaccaatcagcaaaacaattaaacccttgattgtgattttcagctgtgcaaatcttaattagatatctcagataatccatcaactagacaaacatacaaagtgaaccgaacaactctcaaacaatatgatatttcctaggcaactctcaaaggaaaaagtcacatagcaaatgacataatttagtacatgtaatgaattctgatgatgtatgccaagtttatcactagcgtacatgtctaaagctgactggcatccgcttgcttatacaaatccaaaatatgacattactacagtaaggcatcaccattcacaaacaagaaaatagtacctcgttgttgtggccacatttcttcttgcggcagttaacagccttggtgtgcaagcgagtatagcacctggatcagatatttgacatcaagcacttagactaccctaggttcatactgaatataagaatttccaatgcaaacacaatactatttacaaaactatctaggggggaaatcaaatggtcctttgtaataatgtttacgaacaaagcaaactaggtgcaagacagtaaacgtcaaaacacagacaaaacaagaaccagagaaacttgcagtgatcaaaagtctgaatgattggcaggccagacaaaatatatgcctcaaaagttaagctcgtaaggcgacttacacatctaattgattcatcattccagccaatcaactatgagcataggaaagcacaaatcccagaccaaactcaaaagatacttcaactgaacaaacaagttatactacctaattggttcatcacccctgccaatccactaaactgaatacaatgaaacaaagatagtggactgtcacaagtggttatatgttgcatattttaagacattcccggttgttgaaaatttaggagattagaccttcattagtatagatgcagatcattggtctcctcatacgagccaaattttcaagaaataccaacgaaggtgatggcacacaagttgatgcacacaatgataccacgcaagatgatgcacttgaaggcaaggaagatgattgtttgtgctactatgccgctccataattttattcgtgagcattctagtggtgatgtgggctttgcaaattgtggttgagatcctgattttgtgcctactatcccaatttcccaaatagatacaataaataactgaataatcagtgtcaccacatgcctcagatcaatccacttctaaatcaagttttactacaatggatgcatttcgtgatagtatagcaacgactctcacttgtgtggaattagcaccaaatatttatgcaatattttgcaacatctatttgtagtgacttgtgtgaagagtgaagacaatgattatgtaatatgttactagtttattattgctgcaaggttgaatatttgaatttatttgaaaaaatcatatagtgatttatctttgttgtattgttgaatagtcaagttcatagcaaaaatagttgcataaagatcattattctcaataaaacaattagctaaaacaaccaaatgataggaaggtcattgcagcctcaaacttcacttttctagagttggatgcacctttctggtcaaacacagtcaaaactccagaggagagcagctccagtctggagttatagagcaaagctactctgaagtggagtggagccatacaaacacaccttagttggcgtagatttttgtgaatccgcttttggctagcgataacgtcttctgggtttccaaaggcttctactcgactcctctaggccttttgggacgtgaccttcatcttgtgcgacttgccaaacgaatccgtcacaatactgccgaatgcaatggaagcttcctaccataacagtcgacccttttcacaccggtcaacgcagtaaccaaacattcggacgcgcataaaatcgccacgcacgcatcgctggttttgccgtcgcagagcagaaggcactccgggacggcagcgtgctctgcagacgctgaaggcaggatgtggctggaagaggtgaggcggagggagcgtggagagcttcgcgctcggcggtttgaggccgccgcccgagcgtgccgcacggcttcgctcgcgctctccaatcgcaaggagtttgtcaccccacatcacggcgccgtcaactcgctccagaggggaggtacctgctctccggggcatcggatgggtcggccgctgtgttcgatgtgtggaacgcgactgaatacgaaaccgggttcatagcaaagcacaggaacatactgcttgtggacaagcaacaccagaatggccacaagttcgccatctcggcggccgtttggtatcctgtggatacggggctgtttgtcacagcatcctttgaccagtttgtcaaagtttgggatacaaattcgactcaagtcgtcatggaatttaagatgcctggaaaagtgtacactgcagccatgtctccaatcgcaacaacgcacgtgctcattgctactgggagtgcagatgttcaggtccgtctatgtgacattgcttctggagcctttacccacacgttgtctggtcatcgtgatggtatcatgtctttggagtggtctgcctcaagtgagtggattttgatgagtggtggctgtgacggggcaatacgtttttgggacattagaagagctggatgctttcgggttctggaccaatcaaggtctcaacttggaaaaaggccccttgttaaaagtgctctatataaggatcacacagattccttaggaccttcaccttccgcaaggagaaggacaggcatttctaagaagagttcatcagctttgcgcaaaattcaaaacccgacacatggacacatgcaacagagattgcatcctggtttgtcatctagtcaaaaccgtgctactgctcattatggtgctgttactggtttacgaacaactgcagatgggatgtaccttcttagctcaggatctgattctcgcttaagactatgggacatcgattcaggctgcaatacgctggtcaattttgaagctatgcgattgcagacaggcaagccattacaattagctgtcactgaggatccttcacttgtatttgttccatgtatggcaagcatcaaggcatacaatttatggtctggtaaaacatttcaaacattccgggggcactatgaacttgtgagttgctgctactatagtgaacaggaccaagaactttatactggcagcaacgacaggcaaattcttgtgtggtctccatcaactccagcttttactaaaatggaagatgatgacaagatcctttctgcagctgatgaggataactggagcgactgagaaaccctggagccgggaggagtgtgtcttgtatctactgacatcgatgttactgatgttaacaaataacatgtcgaggttgttaggtcttgttagcagcccctaaatgatgatattgtcttggtgtattttcaaaaatatgtacattaccatgtgaaaatttgacagatcattgaataatttgtagatttatctcaggaggatagagggatgtttgacgttcgccaaaatgttgtttagccctggagccttgttttcttcactgtgtattaatgctttacccaaaaataagaatttttctgagcaaataggaagaagtgtagctttaagggctagtttgggagctaaaatagtgaag

SEQ ID NO: 35999 - DNA, 2099 bp, Zea Mays
gcctgcaactctctcgtcccggcaaaggtcacaccttcctccctcgtccacatccgtgcctccagccaccggccgcctagggcggcgctcttgccaccggctgtcgagcccgccgaccttgccgccgtttccacgccgcctgacctgcccccacgacctgctgccgtcacgccatccgacctgccccaggacagcccaagcccccgcgaggccgcgacctgctggggaggagattgataggagaggtggtcggcggcgtggataccaacgacggagacatagtgattgccgcccgtcgtcccctgtttccgacacgctgaagcctcacgccacgagcgagcagagggccccaactgccagcagcaaccttaggcactggttgcttgaagtaaccaaacattcggacgcgcataaaatcgccacgcacgcatcgctggttttgccgtcgcagagcagaaggcactccgggacggcagcgtgctctgcagacgctgaaggcaggatgtggctggaagaggtgaggcggagggagcgtggagagcttcgcgctcggcggtttgaggccgccgcccgagcgtgccgcacggcttcgctcgcgctctccaatcgcaaggagtttgtcaccccacatcacggcgccgtcaactcgctccagaggggaggtacctgctctccggggcatcggatgggtcggccgctgtgttcgatgtgtggaacgcgactgaatacgaaaccgggttcatagcaaagcacaggaacatactgcttgtggacaagcaacaccagaatggccacaagttcgccatctcggcggccgtttggtatcctgtggatacggggctgtttgtcacagcatcctttgaccagtttgtcaaagtttgggatacaaattcgactcaagtcgtcatggaatttaagatgcctggaaaagtgtacactgcagccatgtctccaatcgcaacaacgcacgtgctcattgctactgggagtgcagatgttcagatggtatcatgtctttggagtggtctgcctcaagtgagtggattttgatgagtggtggctgtgacggggcaatacgtttttgggacattagaagagctggatgctttcgggttctggaccaatcaaggtctcaacttggaaaaaggccccttgttaaaagtgctctatataaggatcacacagattccttaggaccttcaccttccgcaaggagaaggacaggcatttctaagaagagttcatcagctttgcgcaaaattcaaaacccgacacatggacacatgcaacagagattgcatcctggtttgtcatctagtcaaaaccgtgctactgctcattatggtgctgttactggtttacgaacaactgcagatgggatgtaccttcttagctcaggatctgattctcgcttaagactatgggacatcgattcaggctgcaatacgctggtcaattttgaagctatgcgattgcagacaggcaagccattacaattagctgtcactgaggatccttcacttgtatttgttccatgtatggcaagcatcaaggcatacaatttatggtctggtaaaacatttcaaacattccgggggcactatgaacttgtgagttgctgctactatagtgaacaggaccaagaactttatactggcagcaacgacaggcaaattcttgtgtggtctccatcaactccagcttttactaaaatgctgatgaggataactggagcgactgagaaaccctggagccgggaggagtgtgtcttgtatctactgacatcgatgttactgatgttaacaaataacatgtcgaggttgttaggtcttgttagcagcccctaaatgatgatattgtcttggtgtattttcaaaaatatgtacattaccatgtgaaaatttgacagatcattgaataatttgtagatttatctcaggaggatagagggatgtttgacgttcgccaaaatgttgtttagccctggagccttgttttcttcactgtgtattaatgctttacccaaaaataagaatttttctgagcaaataggaagaagtgtagctttaagggctagtttgggagctaaaatagtgaag

SEQ ID NO: 36000 - DNA, 2196 bp, Zea Mays
gcctgcaactctctcgtcccggcaaaggtcacaccttcctccctcgtccacatccgtgcctccagccaccggccgcctagggcggcgctcttgccaccggctgtcgagcccgccgaccttgccgccgtttccacgccgcctgacctgcccccacgacctgctgccgtcacgccatccgacctgccccaggacagcccaagcccccgcgaggccgcgacctgctggggaggagattgataggagaggtggtcggcggcgtggataccaacgacggagacatagtgattgccgcccgtcgtcccctgtttccgacacgctgaagcctcacgccacgagcgagcagagggccccaactgccagcagcaaccttaggcactggttgcttgaaggcaagcgcgtctaaccaaacattcggacgcgcataaaatcgccacgcacgcatcgctggttttgccgtcgcagagcagaaggcactccgggacggcagcgtgctctgcagacgctgaaggcaggatgtggctggaagaggtgaggcggagggagcgtggagagcttcgcgctcggcggtttgaggccgccgcccgagcgtgccgcacggcttcgctcgcgctctccaatcgcaaggagtttgtcaccccacatcacggcgccgtcaactcgctccagaggggaggtacctgctctccggggcatcggatgggtcggccgctgtgttcgatgtgtggaacgcgactgaatacgaaaccgggttcatagcaaagcacaggaacatactgcttgtggacaagcaacaccagaatggccacaagttcgccatctcggcggccgtttggtatcctgtggatacggggctgtttgtcacagcatcctttgaccagtttgtcaaagtttgggatacaaattcgactcaagtcgtcatggaatttaagatgcctggaaaagtgtacactgcagccatgtctccaatcgcaacaacgcacgtgctcattgctactgggagtgcagatgttcaggtccgtctatgtgacattgcttctggagcctttacccacacgttgtctggtcatcgtgatggtatcatgtctttggagtggtctgcctcaagtgagtggattttgatgagtggtggctgtgacggggcaatacgtttttgggacattagaagagctggatgctttcgggttctggaccaatcaaggtctcaacttggaaaaaggccccttgttaaaagtgctctatataaggatcacacagattccttaggaccttcaccttccgcaaggagaaggacaggcatttctaagaagagttcatcagctttgcgcaaaattcaaaacccgacacatggacacatgcaacagagattgcatcctggtttgtcatctagtcaaaaccgtgctactgctcattatggtgctgttactggtttacgaacaactgcagatgggatgtaccttcttagctcaggatctgattctcgcttaagactatgggacatcgattcaggctgcaatacgctggtcaattttgaagctatgcgattgcagacaggcaagccattacaattagctgtcactgaggatccttcacttgtatttgttccatgtatggcaagcatcaaggcatacaatttatggtctggtaaaacatttcaaacattccgggggcactatgaacttgtgagttgctgctactatagtgaacaggaccaagaactttatactggcagcaacgacaggcaaattcttgtgtggtctccatcaactccagcttttactaaaatggaagatgatgacaagatcctttctgcagctgatgaggataactggagcgactgagaaaccctggagccgggaggagtgtgtcttgtatctactgacatcgatgttactgatgttaacaaataacatgtcgaggttgttaggtcttgttagcagcccctaaatgatgatattgtcttggtgtattttcaaaaatatgtacattaccatgtgaaaatttgacagatcattgaataatttgtagatttatctcaggaggatagagggatgtttgacgttcgccaaaatgttgtttagccctggagccttgttttcttcactgtgtattaatgctttacccaaaaataagaatttttctgagcaaataggaagaagtgtagctttaagggctagtttgggagctaaaatagtgaag

SEQ ID NO: 36001 - DNA, 2140 bp, Zea Mays
gcctgcaactctctcgtcccggcaaaggtcacaccttcctccctcgtccacatccgtgcctccagccaccggccgcctagggcggcgctcttgccaccggctgtcgagcccgccgaccttgccgccgtttccacgccgcctgacctgcccccacgacctgctgccgtcacgccatccgacctgccccaggacagcccaagcccccgcgaggccgcgacctgctggggaggagattgataggagaggtggtcggcggcgtggataccaacgacggagacatagtgattgccgcccgtcgtcccctgtttccgacacgctgaagcctcacgccacgagcgagcagagggccccaactgccagcagcaaccttaggcactggttgcttgaagtaaccaaacattcggacgcgcataaaatcgccacgcacgcatcgctggttttgccgtcgcagagcagaaggcactccgggacggcagcgtgctctgcagacgctgaaggcaggatgtggctggaagaggtgaggcggagggagcgtggagagcttcgcgctcggcggtttgaggccgccgcccgagcgtgccgcacggcttcgctcgcgctctccaatcgcaaggagtttgtcaccccacatcacggcgccgtcaactcgctccaggttgatttgacagaggggaggtacctgctctccggggcatcggatgggtcggccgctgtgttcgatgtgtggaacgcgactgaatacgaaaccgggttcatagcaaagcacaggaacatactgcttgtggacaagcaacaccagaatggccacaagttcgccatctcggcggccgtttggtatcctgtggatacggggctgtttgtcacagcatcctttgaccagtttgtcaaagtttgggatacaaattcgactcaagtcgtcatggaatttaagatgcctggaaaagtgtacactgcagccatgtctccaatcgcaacaacgcacgtgctcattgctactgggagtgcagatgttcagatggtatcatgtctttggagtggtctgcctcaagtgagtggattttgatgagtggtggctgtgacggggcaatacgtttttgggacattagaagagctggatgctttcgggttctggaccaatcaaggtctcaacttggaaaaaggccccttgttaaaagtgctctatataaggatcacacagattccttaggaccttcaccttccgcaaggagaaggacaggcatttctaagaagagttcatcagctttgcgcaaaattcaaaacccgacacatggacacatgcaacagagattgcatcctggtttgtcatctagtcaaaaccgtgctactgctcattatggtgctgttactggtttacgaacaactgcagatgggatgtaccttcttagctcaggatctgattctcgcttaagactatgggacatcgattcaggctgcaatacgctggtcaattttgaagctatgcgattgcagacaggcaagccattacaattagctgtcactgaggatccttcacttgtatttgttccatgtatggcaagcatcaaggcatacaatttatggtctggtaaaacatttcaaacattccgggggcactatgaacttgtgagttgctgctactatagtgaacaggaccaagaactttatactggcagcaacgacaggcaaattcttgtgtggtctccatcaactccagcttttactaaaatggaagatgatgacaagatcctttctgcagctgatgaggataactggagcgactgagaaaccctggagccgggaggagtgtgtcttgtatctactgacatcgatgttactgatgttaacaaataacatgtcgaggttgttaggtcttgttagcagcccctaaatgatgatattgtcttggtgtattttcaaaaatatgtacattaccatgtgaaaatttgacagatcattgaataatttgtagatttatctcaggaggatagagggatgtttgacgttcgccaaaatgttgtttagccctggagccttgttttcttcactgtgtattaatgctttacccaaaaataagaatttttctgagcaaataggaagaagtgtagctttaagggctagtttgggagctaaaatagtgaag

SEQ ID NO: 36002 - DNA, 2107 bp, Zea Mays
gcctgcaactctctcgtcccggcaaaggtcacaccttcctccctcgtccacatccgtgcctccagccaccggccgcctagggcggcgctcttgccaccggctgtcgagcccgccgaccttgccgccgtttccacgccgcctgacctgcccccacgacctgctgccgtcacgccatccgacctgccccaggacagcccaagcccccgcgaggccgcgacctgctggggaggagattgataggagaggtggtcggcggcgtggataccaacgacggagacatagtgattgccgcccgtcgtcccctgtttccgacacgctgaagcctcacgccacgagcgagcagagggccccaactgccagcagcaaccttaggcactggttgcttgaagtaaccaaacattcggacgcgcataaaatcgccacgcacgcatcgctggttttgccgtcgcagagcagaaggcactccgggacggcagcgtgctctgcagacgctgaaggcaggatgtggctggaagaggtgaggcggagggagcgtggagagcttcgcgctcggcggtttgaggccgccgcccgagcgtgccgcacggcttcgctcgcgctctccaatcgcaaggagtttgtcaccccacatcacggcgccgtcaactcgctccagaggggaggtacctgctctccggggcatcggatgggtcggccgctgtgttcgatgtgtggaacgcgactgaatacgaaaccgggttcatagcaaagcacaggaacatactgcttgtggacaagcaacaccagaatggccacaagttcgccatctcggcggccgtttggtatcctgtggatacggggctgtttgtcacagcatcctttgaccagtttgtcaaagtttgggatacaaattcgactcaagtcgtcatggaatttaagatgcctggaaaagtgtacactgcagccatgtctccaatcgcaacaacgcacgtgctcattgctactgggagtgcagatgttcagtggtctgcctcaagtgagtggattttgatgagtggtggctgtgacggggcaatacgtttttgggacattagaagagctggatgctttcgggttctggaccaatcaaggtctcaacttggaaaaaggccccttgttaaaagtgctctatataaggatcacacagattccttaggaccttcaccttccgcaaggagaaggacaggcatttctaagaagagttcatcagctttgcgcaaaattcaaaacccgacacatggacacatgcaacagagattgcatcctggtttgtcatctagtcaaaaccgtgctactgctcattatggtgctgttactggtttacgaacaactgcagatgggatgtaccttcttagctcaggatctgattctcgcttaagactatgggacatcgattcaggctgcaatacgctggtcaattttgaagctatgcgattgcagacaggcaagccattacaattagctgtcactgaggatccttcacttgtatttgttccatgtatggcaagcatcaaggcatacaatttatggtctggtaaaacatttcaaacattccgggggcactatgaacttgtgagttgctgctactatagtgaacaggaccaagaactttatactggcagcaacgacaggcaaattcttgtgtggtctccatcaactccagcttttactaaaatggaagatgatgacaagatcctttctgcagctgatgaggataactggagcgactgagaaaccctggagccgggaggagtgtgtcttgtatctactgacatcgatgttactgatgttaacaaataacatgtcgaggttgttaggtcttgttagcagcccctaaatgatgatattgtcttggtgtattttcaaaaatatgtacattaccatgtgaaaatttgacagatcattgaataatttgtagatttatctcaggaggatagagggatgtttgacgttcgccaaaatgttgtttagccctggagccttgttttcttcactgtgtattaatgctttacccaaaaataagaatttttctgagcaaataggaagaagtgtagctttaagggctagtttgggagctaaaatagtgaag

SEQ ID NO: 36003 - DNA, 4256 bp, Zea Mays
gcctgcaactctctcgtcccggcaaaggtcacaccttcctccctcgtccacatccgtgcctccagccaccggccgcctagggcggcgctcttgccaccggctgtcgagcccgccgaccttgccgccgtttccacgccgcctgacctgcccccacgacctgctgccgtcacgccatccgacctgccccaggacagcccaagcccccgcgaggccgcgacctgctggggaggagattgataggagaggtggtcggcggcgtggataccaacgacggagacatagtgattgccgcccgtcgtcccctgtttccgacacgctgaagcctcacgccacgagcgagcagagggccccaactgccagcagcaaccttaggcactggttgcttgaaggcaagcgcgtcgtatgttatccgttttctatcacattaccgtcgtaattatcatatccctctccccagttatccaagcattatgcagggacagaaactataaaacttctagcaatcttgttgacccaaacgatttgccttgtttcagttcttgatcttcttctttgccctcagctgaaaatgggagaagcaagggaaacattaggaaatcacaccaatcagcaaaacaattaaacccttgattgtgattttcagctgtgcaaatcttaattagatatctcagataatccatcaactagacaaacatacaaagtgaaccgaacaactctcaaacaatatgatatttcctaggcaactctcaaaggaaaaagtcacatagcaaatgacataatttagtacatgtaatgaattctgatgatgtatgccaagtttatcactagcgtacatgtctaaagctgactggcatccgcttgcttatacaaatccaaaatatgacattactacagtaaggcatcaccattcacaaacaagaaaatagtacctcgttgttgtggccacatttcttcttgcggcagttaacagccttggtgtgcaagcgagtatagcacctggatcagatatttgacatcaagcacttagactaccctaggttcatactgaatataagaatttccaatgcaaacacaatactatttacaaaactatctaggggggaaatcaaatggtcctttgtaataatgtttacgaacaaagcaaactaggtgcaagacagtaaacgtcaaaacacagacaaaacaagaaccagagaaacttgcagtgatcaaaagtctgaatgattggcaggccagacaaaatatatgcctcaaaagttaagctcgtaaggcgacttacacatctaattgattcatcattccagccaatcaactatgagcataggaaagcacaaatcccagaccaaactcaaaagatacttcaactgaacaaacaagttatactacctaattggttcatcacccctgccaatccactaaactgaatacaatgaaacaaagatagtggactgtcacaagtggttatatgttgcatattttaagacattcccggttgttgaaaatttaggagattagaccttcattagtatagatgcagatcattggtctcctcatacgagccaaattttcaagaaataccaacgaaggtgatggcacacaagttgatgcacacaatgataccacgcaagatgatgcacttgaaggcaaggaagatgattgtttgtgctactatgccgctccataattttattcgtgagcattctagtggtgatgtgggctttgcaaattgtggttgagatcctgattttgtgcctactatcccaatttcccaaatagatacaataaataactgaataatcagtgtcaccacatgcctcagatcaatccacttctaaatcaagttttactacaatggatgcatttcgtgatagtatagcaacgactctcacttgtgtggaattagcaccaaatatttatgcaatattttgcaacatctatttgtagtgacttgtgtgaagagtgaagacaatgattatgtaatatgttactagtttattattgctgcaaggttgaatatttgaatttatttgaaaaaatcatatagtgatttatctttgttgtattgttgaatagtcaagttcatagcaaaaatagttgcataaagatcattattctcaataaaacaattagctaaaacaaccaaatgataggaaggtcattgcagcctcaaacttcacttttctagagttggatgcacctttctggtcaaacacagtcaaaactccagaggagagcagctccagtctggagttatagagcaaagctactctgaagtggagtggagccatacaaacacaccttagttggcgtagatttttgtgaatccgcttttggctagcgataacgtcttctgggtttccaaaggcttctactcgactcctctaggccttttgggacgtgaccttcatcttgtgcgacttgccaaacgaatccgtcacaatactgccgaatgcaatggaagcttcctaccataacagtcgacccttttcacaccggtcaacgcagtaaccaaacattcggacgcgcataaaatcgccacgcacgcatcgctggttttgccgtcgcagagcagaaggcactccgggacggcagcgtgctctgcagacgctgaaggcaggatgtggctggaagaggtgaggcggagggagcgtggagagcttcgcgctcggcggtttgaggccgccgcccgagcgtgccgcacggcttcgctcgcgctctccaatcgcaaggagtttgtcaccccacatcacggcgccgtcaactcgctccaggttgatttgacagaggggaggtacctgctctccggggcatcggatgggtcggccgctgtgttcgatgtgtggaacgcgactgaatacgaaaccgggttcatagcaaagcacaggaacatactgcttgtggacaagcaacaccagaatggccacaagttcgccatctcggcggccgtttggtatcctgtggatacggggctgtttgtcacagcatcctttgaccagtttgtcaaagtttgggatacaaattcgactcaagtcgtcatggaatttaagatgcctggaaaagtgtacactgcagccatgtctccaatcgcaacaacgcacgtgctcattgctactgggagtgcagatgttcagatggtatcatgtctttggagtggtctgcctcaagtgagtggattttgatgagtggtggctgtgacggggcaatacgtttttgggacattagaagagctggatgctttcgggttctggaccaatcaaggtctcaacttggaaaaaggccccttgttaaaagtgctctatataaggatcacacagattccttaggaccttcaccttccgcaaggagaaggacaggcatttctaagaagagttcatcagctttgcgcaaaattcaaaacccgacacatggacacatgcaacagagattgcatcctggtttgtcatctagtcaaaaccgtgctactgctcattatggtgctgttactggtttacgaacaactgcagatgggatgtaccttcttagctcaggatctgattctcgcttaagactatgggacatcgattcaggctgcaatacgctggtcaattttgaagctatgcgattgcagacaggcaagccattacaattagctgtcactgaggatccttcacttgtatttgttccatgtatggcaagcatcaaggcatacaatttatggtctggtaaaacatttcaaacattccgggggcactatgaacttgtgagttgctgctactatagtgaacaggaccaagaactttatactggcagcaacgacaggcaaattcttgtgtggtctccatcaactccagcttttactaaaatggaagatgatgacaagatcctttctgcagctgatgaggataactggagcgactgagaaaccctggagccgggaggagtgtgtcttgtatctactgacatcgatgttactgatgttaacaaataacatgtcgaggttgttaggtcttgttagcagcccctaaatgatgatattgtcttggtgtattttcaaaaatatgtacattaccatgtgaaaatttgacagatcattgaataatttgtagatttatctcaggaggatagagggatgtttgacgttcgccaaaatgttgtttagccctggagccttgttttcttcactgtgtattaatgctttacccaaaaataagaatttttctgagcaaataggaagaagtgtagctttaagggctagtttgggagctaaaatagtgaag

SEQ ID NO: 36004 - DNA, 4314 bp, Zea Mays
gcctgcaactctctcgtcccggcaaaggtcacaccttcctccctcgtccacatccgtgcctccagccaccggccgcctagggcggcgctcttgccaccggctgtcgagcccgccgaccttgccgccgtttccacgccgcctgacctgcccccacgacctgctgccgtcacgccatccgacctgccccaggacagcccaagcccccgcgaggccgcgacctgctggggaggagattgataggagaggtggtcggcggcgtggataccaacgacggagacatagtgattgccgcccgtcgtcccctgtttccgacacgctgaagcctcacgccacgagcgagcagagggccccaactgccagcagcaaccttaggcactggttgcttgaaggcaagcgcgtcgtatgttatccgttttctatcacattaccgtcgtaattatcatatccctctccccagttatccaagcattatgcagggacagaaactataaaacttctagcaatcttgttgacccaaacgatttgccttgtttcagttcttgatcttcttctttgccctcagctgaaaatgggagaagcaagggaaacattaggaaatcacaccaatcagcaaaacaattaaacccttgattgtgattttcagctgtgcaaatcttaattagatatctcagataatccatcaactagacaaacatacaaagtgaaccgaacaactctcaaacaatatgatatttcctaggcaactctcaaaggaaaaagtcacatagcaaatgacataatttagtacatgtaatgaattctgatgatgtatgccaagtttatcactagcgtacatgtctaaagctgactggcatccgcttgcttatacaaatccaaaatatgacattactacagtaaggcatcaccattcacaaacaagaaaatagtacctcgttgttgtggccacatttcttcttgcggcagttaacagccttggtgtgcaagcgagtatagcacctggatcagatatttgacatcaagcacttagactaccctaggttcatactgaatataagaatttccaatgcaaacacaatactatttacaaaactatctaggggggaaatcaaatggtcctttgtaataatgtttacgaacaaagcaaactaggtgcaagacagtaaacgtcaaaacacagacaaaacaagaaccagagaaacttgcagtgatcaaaagtctgaatgattggcaggccagacaaaatatatgcctcaaaagttaagctcgtaaggcgacttacacatctaattgattcatcattccagccaatcaactatgagcataggaaagcacaaatcccagaccaaactcaaaagatacttcaactgaacaaacaagttatactacctaattggttcatcacccctgccaatccactaaactgaatacaatgaaacaaagatagtggactgtcacaagtggttatatgttgcatattttaagacattcccggttgttgaaaatttaggagattagaccttcattagtatagatgcagatcattggtctcctcatacgagccaaattttcaagaaataccaacgaaggtgatggcacacaagttgatgcacacaatgataccacgcaagatgatgcacttgaaggcaaggaagatgattgtttgtgctactatgccgctccataattttattcgtgagcattctagtggtgatgtgggctttgcaaattgtggttgagatcctgattttgtgcctactatcccaatttcccaaatagatacaataaataactgaataatcagtgtcaccacatgcctcagatcaatccacttctaaatcaagttttactacaatggatgcatttcgtgatagtatagcaacgactctcacttgtgtggaattagcaccaaatatttatgcaatattttgcaacatctatttgtagtgacttgtgtgaagagtgaagacaatgattatgtaatatgttactagtttattattgctgcaaggttgaatatttgaatttatttgaaaaaatcatatagtgatttatctttgttgtattgttgaatagtcaagttcatagcaaaaatagttgcataaagatcattattctcaataaaacaattagctaaaacaaccaaatgataggaaggtcattgcagcctcaaacttcacttttctagagttggatgcacctttctggtcaaacacagtcaaaactccagaggagagcagctccagtctggagttatagagcaaagctactctgaagtggagtggagccatacaaacacaccttagttggcgtagatttttgtgaatccgcttttggctagcgataacgtcttctgggtttccaaaggcttctactcgactcctctaggccttttgggacgtgaccttcatcttgtgcgacttgccaaacgaatccgtcacaatactgccgaatgcaatggaagcttcctaccataacagtcgacccttttcacaccggtcaacgcagtaaccaaacattcggacgcgcataaaatcgccacgcacgcatcgctggttttgccgtcgcagagcagaaggcactccgggacggcagcgtgctctgcagacgctgaaggcaggatgtggctggaagaggtgaggcggagggagcgtggagagcttcgcgctcggcggtttgaggccgccgcccgagcgtgccgcacggcttcgctcgcgctctccaatcgcaaggagtttgtcaccccacatcacggcgccgtcaactcgctccaggttgatttgacagaggggaggtacctgctctccggggcatcggatgggtcggccgctgtgttcgatgtgtggaacgcgactgaatacgaaaccgggttcatagcaaagcacaggaacatactgcttgtggacaagcaacaccagaatggccacaagttcgccatctcggcggccgtttggtatcctgtggatacggggctgtttgtcacagcatcctttgaccagtttgtcaaagtttgggatacaaattcgactcaagtcgtcatggaatttaagatgcctggaaaagtgtacactgcagccatgtctccaatcgcaacaacgcacgtgctcattgctactgggagtgcagatgttcaggtccgtctatgtgacattgcttctggagcctttacccacacgttgtctggtcatcgtgatggtatcatgtctttggagtggtctgcctcaagtgagtggattttgatgagtggtggctgtgacggggcaatacgtttttgggacattagaagagctggatgctttcgggttctggaccaatcaaggtctcaacttggaaaaaggccccttgttaaaagtgctctatataaggatcacacagattccttaggaccttcaccttccgcaaggagaaggacaggcatttctaagaagagttcatcagctttgcgcaaaattcaaaacccgacacatggacacatgcaacagagattgcatcctggtttgtcatctagtcaaaaccgtgctactgctcattatggtgctgttactggtttacgaacaactgcagatgggatgtaccttcttagctcaggatctgattctcgcttaagactatgggacatcgattcaggctgcaatacgctggtcaattttgaagctatgcgattgcagacaggcaagccattacaattagctgtcactgaggatccttcacttgtatttgttccatgtatggcaagcatcaaggcatacaatttatggtctggtaaaacatttcaaacattccgggggcactatgaacttgtgagttgctgctactatagtgaacaggaccaagaactttatactggcagcaacgacaggcaaattcttgtgtggtctccatcaactccagcttttactaaaatggaagatgatgacaagatcctttctgcagctgatgaggataactggagcgactgagaaaccctggagccgggaggagtgtgtcttgtatctactgacatcgatgttactgatgttaacaaataacatgtcgaggttgttaggtcttgttagcagcccctaaatgatgatattgtcttggtgtattttcaaaaatatgtacattaccatgtgaaaatttgacagatcattgaataatttgtagatttatctcaggaggatagagggatgtttgacgttcgccaaaatgttgtttagccctggagccttgttttcttcactgtgtattaatgctttacccaaaaataagaatttttctgagcaaataggaagaagtgtagctttaagggctagtttgggagctaaaatagtgaag

SEQ ID NO: 36005 - DNA, 2185 bp, Zea Mays
gcctgcaactctctcgtcccggcaaaggtcacaccttcctccctcgtccacatccgtgcctccagccaccggccgcctagggcggcgctcttgccaccggctgtcgagcccgccgaccttgccgccgtttccacgccgcctgacctgcccccacgacctgctgccgtcacgccatccgacctgccccaggacagcccaagcccccgcgaggccgcgacctgctggggaggagattgataggagaggtggtcggcggcgtggataccaacgacggagacatagtgattgccgcccgtcgtcccctgtttccgacacgctgaagcctcacgccacgagcgagcagagggccccaactgccagcagcaaccttaggcactggttgcttgaagtaaccaaacattcggacgcgcataaaatcgccacgcacgcatcgctggttttgccgtcgcagagcagaaggcactccgggacggcagcgtgctctgcagacgctgaaggcaggatgtggctggaagaggtgaggcggagggagcgtggagagcttcgcgctcggcggtttgaggccgccgcccgagcgtgccgcacggcttcgctcgcgctctccaatcgcaaggagtttgtcaccccacatcacggcgccgtcaactcgctccagaggggaggtacctgctctccggggcatcggatgggtcggccgctgtgttcgatgtgtggaacgcgactgaatacgaaaccgggttcatagcaaagcacaggaacatactgcttgtggacaagcaacaccagaatggccacaagttcgccatctcggcggccgtttggtatcctgtggatacggggctgtttgtcacagcatcctttgaccagtttgtcaaagtttgggatacaaattcgactcaagtcgtcatggaatttaagatgcctggaaaagtgtacactgcagccatgtctccaatcgcaacaacgcacgtgctcattgctactgggagtgcagatgttcaggtccgtctatgtgacattgcttctggagcctttacccacacgttgtctggtcatcgtgatggtatcatgtctttggagtggtctgcctcaagtgagtggattttgatgagtggtggctgtgacggggcaatacgtttttgggacattagaagagctggatgctttcgggttctggaccaatcaaggtctcaacttggaaaaaggccccttgttaaaagtgctctatataaggatcacacagattccttaggaccttcaccttccgcaaggagaaggacaggcatttctaagaagagttcatcagctttgcgcaaaattcaaaacccgacacatggacacatgcaacagagattgcatcctggtttgtcatctagtcaaaaccgtgctactgctcattatggtgctgttactggtttacgaacaactgcagatgggatgtaccttcttagctcaggatctgattctcgcttaagactatgggacatcgattcaggctgcaatacgctggtcaattttgaagctatgcgattgcagacaggcaagccattacaattagctgtcactgaggatccttcacttgtatttgttccatgtatggcaagcatcaaggcatacaatttatggtctggtaaaacatttcaaacattccgggggcactatgaacttgtgagttgctgctactatagtgaacaggaccaagaactttatactggcagcaacgacaggcaaattcttgtgtggtctccatcaactccagcttttactaaaatggaagatgatgacaagatcctttctgcagctgatgaggataactggagcgactgagaaaccctggagccgggaggagtgtgtcttgtatctactgacatcgatgttactgatgttaacaaataacatgtcgaggttgttaggtcttgttagcagcccctaaatgatgatattgtcttggtgtattttcaaaaatatgtacattaccatgtgaaaatttgacagatcattgaataatttgtagatttatctcaggaggatagagggatgtttgacgttcgccaaaatgttgtttagccctggagccttgttttcttcactgtgtattaatgctttacccaaaaataagaatttttctgagcaaataggaagaagtgtagctttaagggctagtttgggagctaaaatagtgaag

SEQ ID NO: 36006 - DNA, 4286 bp, Zea Mays
gcctgcaactctctcgtcccggcaaaggtcacaccttcctccctcgtccacatccgtgcctccagccaccggccgcctagggcggcgctcttgccaccggctgtcgagcccgccgaccttgccgccgtttccacgccgcctgacctgcccccacgacctgctgccgtcacgccatccgacctgccccaggacagcccaagcccccgcgaggccgcgacctgctggggaggagattgataggagaggtggtcggcggcgtggataccaacgacggagacatagtgattgccgcccgtcgtcccctgtttccgacacgctgaagcctcacgccacgagcgagcagagggccccaactgccagcagcaaccttaggcactggttgcttgaaggcaagcgcgtcgtatgttatccgttttctatcacattaccgtcgtaattatcatatccctctccccagttatccaagcattatgcagggacagaaactataaaacttctagcaatcttgttgacccaaacgatttgccttgtttcagttcttgatcttcttctttgccctcagctgaaaatgggagaagcaagggaaacattaggaaatcacaccaatcagcaaaacaattaaacccttgattgtgattttcagctgtgcaaatcttaattagatatctcagataatccatcaactagacaaacatacaaagtgaaccgaacaactctcaaacaatatgatatttcctaggcaactctcaaaggaaaaagtcacatagcaaatgacataatttagtacatgtaatgaattctgatgatgtatgccaagtttatcactagcgtacatgtctaaagctgactggcatccgcttgcttatacaaatccaaaatatgacattactacagtaaggcatcaccattcacaaacaagaaaatagtacctcgttgttgtggccacatttcttcttgcggcagttaacagccttggtgtgcaagcgagtatagcacctggatcagatatttgacatcaagcacttagactaccctaggttcatactgaatataagaatttccaatgcaaacacaatactatttacaaaactatctaggggggaaatcaaatggtcctttgtaataatgtttacgaacaaagcaaactaggtgcaagacagtaaacgtcaaaacacagacaaaacaagaaccagagaaacttgcagtgatcaaaagtctgaatgattggcaggccagacaaaatatatgcctcaaaagttaagctcgtaaggcgacttacacatctaattgattcatcattccagccaatcaactatgagcataggaaagcacaaatcccagaccaaactcaaaagatacttcaactgaacaaacaagttatactacctaattggttcatcacccctgccaatccactaaactgaatacaatgaaacaaagatagtggactgtcacaagtggttatatgttgcatattttaagacattcccggttgttgaaaatttaggagattagaccttcattagtatagatgcagatcattggtctcctcatacgagccaaattttcaagaaataccaacgaaggtgatggcacacaagttgatgcacacaatgataccacgcaagatgatgcacttgaaggcaaggaagatgattgtttgtgctactatgccgctccataattttattcgtgagcattctagtggtgatgtgggctttgcaaattgtggttgagatcctgattttgtgcctactatcccaatttcccaaatagatacaataaataactgaataatcagtgtcaccacatgcctcagatcaatccacttctaaatcaagttttactacaatggatgcatttcgtgatagtatagcaacgactctcacttgtgtggaattagcaccaaatatttatgcaatattttgcaacatctatttgtagtgacttgtgtgaagagtgaagacaatgattatgtaatatgttactagtttattattgctgcaaggttgaatatttgaatttatttgaaaaaatcatatagtgatttatctttgttgtattgttgaatagtcaagttcatagcaaaaatagttgcataaagatcattattctcaataaaacaattagctaaaacaaccaaatgataggaaggtcattgcagcctcaaacttcacttttctagagttggatgcacctttctggtcaaacacagtcaaaactccagaggagagcagctccagtctggagttatagagcaaagctactctgaagtggagtggagccatacaaacacaccttagttggcgtagatttttgtgaatccgcttttggctagcgataacgtcttctgggtttccaaaggcttctactcgactcctctaggccttttgggacgtgaccttcatcttgtgcgacttgccaaacgaatccgtcacaatactgccgaatgcaatggaagcttcctaccataacagtcgacccttttcacaccggtcaacgcagtaaccaaacattcggacgcgcataaaatcgccacgcacgcatcgctggttttgccgtcgcagagcagaaggcactccgggacggcagcgtgctctgcagacgctgaaggcaggatgtggctggaagaggtgaggcggagggagcgtggagagcttcgcgctcggcggtttgaggccgccgcccgagcgtgccgcacggcttcgctcgcgctctccaatcgcaaggagtttgtcaccccacatcacggcgccgtcaactcgctccaggttgatttgacagaggggaggtacctgctctccggggcatcggatgggtcggccgctgtgttcgatgtgtggaacgcgactgaatacgaaaccgggttcatagcaaagcacaggaacatactgcttgtggacaagcaacaccagaatggccacaagttcgccatctcggcggccgtttggtatcctgtggatacggggctgtttgtcacagcatcctttgaccagtttgtcaaagtttgggatacaaattcgactcaagtcgtcatggaatttaagatgcctggaaaagtgtacactgcagccatgtctccaatcgcaacaacgcacgtgctcattgctactgggagtgcagatgttcaggtccgtctatgtgacattgcttctggagcctttacccacacgttgtctggtcatcgtgatggtatcatgtctttggagtggtctgcctcaagtgagtggattttgatgagtggtggctgtgacggggcaatacgtttttgggacattagaagagctggatgctttcgggttctggaccaatcaaggtctcaacttggaaaaaggccccttgttaaaagtgctctatataaggatcacacagattccttaggaccttcaccttccgcaaggagaaggacaggcatttctaagaagagttcatcagctttgcgcaaaattcaaaacccgacacatggacacatgcaacagagattgcatcctggtttgtcatctagtcaaaaccgtgctactgctcattatggtgctgttactggtttacgaacaactgcagatgggatgtaccttcttagctcaggatctgattctcgcttaagactatgggacatcgattcaggctgcaatacgctggtcaattttgaagctatgcgattgcagacaggcaagccattacaattagctgtcactgaggatccttcacttgtatttgttccatgtatggcaagcatcaaggcatacaatttatggtctggtaaaacatttcaaacattccgggggcactatgaacttgtgagttgctgctactatagtgaacaggaccaagaactttatactggcagcaacgacaggcaaattcttgtgtggtctccatcaactccagcttttactaaaatgctgatgaggataactggagcgactgagaaaccctggagccgggaggagtgtgtcttgtatctactgacatcgatgttactgatgttaacaaataacatgtcgaggttgttaggtcttgttagcagcccctaaatgatgatattgtcttggtgtattttcaaaaatatgtacattaccatgtgaaaatttgacagatcattgaataatttgtagatttatctcaggaggatagagggatgtttgacgttcgccaaaatgttgtttagccctggagccttgttttcttcactgtgtattaatgctttacccaaaaataagaatttttctgagcaaataggaagaagtgtagctttaagggctagtttgggagctaaaatagtgaag

SEQ ID NO: 36007 - DNA, 4243 bp, Zea Mays
gcctgcaactctctcgtcccggcaaaggtcacaccttcctccctcgtccacatccgtgcctccagccaccggccgcctagggcggcgctcttgccaccggctgtcgagcccgccgaccttgccgccgtttccacgccgcctgacctgcccccacgacctgctgccgtcacgccatccgacctgccccaggacagcccaagcccccgcgaggccgcgacctgctggggaggagattgataggagaggtggtcggcggcgtggataccaacgacggagacatagtgattgccgcccgtcgtcccctgtttccgacacgctgaagcctcacgccacgagcgagcagagggccccaactgccagcagcaaccttaggcactggttgcttgaaggcaagcgcgtcgtatgttatccgttttctatcacattaccgtcgtaattatcatatccctctccccagttatccaagcattatgcagggacagaaactataaaacttctagcaatcttgttgacccaaacgatttgccttgtttcagttcttgatcttcttctttgccctcagctgaaaatgggagaagcaagggaaacattaggaaatcacaccaatcagcaaaacaattaaacccttgattgtgattttcagctgtgcaaatcttaattagatatctcagataatccatcaactagacaaacatacaaagtgaaccgaacaactctcaaacaatatgatatttcctaggcaactctcaaaggaaaaagtcacatagcaaatgacataatttagtacatgtaatgaattctgatgatgtatgccaagtttatcactagcgtacatgtctaaagctgactggcatccgcttgcttatacaaatccaaaatatgacattactacagtaaggcatcaccattcacaaacaagaaaatagtacctcgttgttgtggccacatttcttcttgcggcagttaacagccttggtgtgcaagcgagtatagcacctggatcagatatttgacatcaagcacttagactaccctaggttcatactgaatataagaatttccaatgcaaacacaatactatttacaaaactatctaggggggaaatcaaatggtcctttgtaataatgtttacgaacaaagcaaactaggtgcaagacagtaaacgtcaaaacacagacaaaacaagaaccagagaaacttgcagtgatcaaaagtctgaatgattggcaggccagacaaaatatatgcctcaaaagttaagctcgtaaggcgacttacacatctaattgattcatcattccagccaatcaactatgagcataggaaagcacaaatcccagaccaaactcaaaagatacttcaactgaacaaacaagttatactacctaattggttcatcacccctgccaatccactaaactgaatacaatgaaacaaagatagtggactgtcacaagtggttatatgttgcatattttaagacattcccggttgttgaaaatttaggagattagaccttcattagtatagatgcagatcattggtctcctcatacgagccaaattttcaagaaataccaacgaaggtgatggcacacaagttgatgcacacaatgataccacgcaagatgatgcacttgaaggcaaggaagatgattgtttgtgctactatgccgctccataattttattcgtgagcattctagtggtgatgtgggctttgcaaattgtggttgagatcctgattttgtgcctactatcccaatttcccaaatagatacaataaataactgaataatcagtgtcaccacatgcctcagatcaatccacttctaaatcaagttttactacaatggatgcatttcgtgatagtatagcaacgactctcacttgtgtggaattagcaccaaatatttatgcaatattttgcaacatctatttgtagtgacttgtgtgaagagtgaagacaatgattatgtaatatgttactagtttattattgctgcaaggttgaatatttgaatttatttgaaaaaatcatatagtgatttatctttgttgtattgttgaatagtcaagttcatagcaaaaatagttgcataaagatcattattctcaataaaacaattagctaaaacaaccaaatgataggaaggtcattgcagcctcaaacttcacttttctagagttggatgcacctttctggtcaaacacagtcaaaactccagaggagagcagctccagtctggagttatagagcaaagctactctgaagtggagtggagccatacaaacacaccttagttggcgtagatttttgtgaatccgcttttggctagcgataacgtcttctgggtttccaaaggcttctactcgactcctctaggccttttgggacgtgaccttcatcttgtgcgacttgccaaacgaatccgtcacaatactgccgaatgcaatggaagcttcctaccataacagtcgacccttttcacaccggtcaacgcagtaaccaaacattcggacgcgcataaaatcgccacgcacgcatcgctggttttgccgtcgcagagcagaaggcactccgggacggcagcgtgctctgcagacgctgaaggcaggatgtggctggaagaggtgaggcggagggagcgtggagagcttcgcgctcggcggtttgaggccgccgcccgagcgtgccgcacggcttcgctcgcgctctccaatcgcaaggagtttgtcaccccacatcacggcgccgtcaactcgctccagaggggaggtacctgctctccggggcatcggatgggtcggccgctgtgttcgatgtgtggaacgcgactgaatacgaaaccgggttcatagcaaagcacaggaacatactgcttgtggacaagcaacaccagaatggccacaagttcgccatctcggcggccgtttggtatcctgtggatacggggctgtttgtcacagcatcctttgaccagtttgtcaaagtttgggatacaaattcgactcaagtcgtcatggaatttaagatgcctggaaaagtgtacactgcagccatgtctccaatcgcaacaacgcacgtgctcattgctactgggagtgcagatgttcagatggtatcatgtctttggagtggtctgcctcaagtgagtggattttgatgagtggtggctgtgacggggcaatacgtttttgggacattagaagagctggatgctttcgggttctggaccaatcaaggtctcaacttggaaaaaggccccttgttaaaagtgctctatataaggatcacacagattccttaggaccttcaccttccgcaaggagaaggacaggcatttctaagaagagttcatcagctttgcgcaaaattcaaaacccgacacatggacacatgcaacagagattgcatcctggtttgtcatctagtcaaaaccgtgctactgctcattatggtgctgttactggtttacgaacaactgcagatgggatgtaccttcttagctcaggatctgattctcgcttaagactatgggacatcgattcaggctgcaatacgctggtcaattttgaagctatgcgattgcagacaggcaagccattacaattagctgtcactgaggatccttcacttgtatttgttccatgtatggcaagcatcaaggcatacaatttatggtctggtaaaacatttcaaacattccgggggcactatgaacttgtgagttgctgctactatagtgaacaggaccaagaactttatactggcagcaacgacaggcaaattcttgtgtggtctccatcaactccagcttttactaaaatggaagatgatgacaagatcctttctgcagctgatgaggataactggagcgactgagaaaccctggagccgggaggagtgtgtcttgtatctactgacatcgatgttactgatgttaacaaataacatgtcgaggttgttaggtcttgttagcagcccctaaatgatgatattgtcttggtgtattttcaaaaatatgtacattaccatgtgaaaatttgacagatcattgaataatttgtagatttatctcaggaggatagagggatgtttgacgttcgccaaaatgttgtttagccctggagccttgttttcttcactgtgtattaatgctttacccaaaaataagaatttttctgagcaaataggaagaagtgtagctttaagggctagtttgggagctaaaatagtgaag

SEQ ID NO: 36008 - DNA, 2120 bp, Zea Mays
gcctgcaactctctcgtcccggcaaaggtcacaccttcctccctcgtccacatccgtgcctccagccaccggccgcctagggcggcgctcttgccaccggctgtcgagcccgccgaccttgccgccgtttccacgccgcctgacctgcccccacgacctgctgccgtcacgccatccgacctgccccaggacagcccaagcccccgcgaggccgcgacctgctggggaggagattgataggagaggtggtcggcggcgtggataccaacgacggagacatagtgattgccgcccgtcgtcccctgtttccgacacgctgaagcctcacgccacgagcgagcagagggccccaactgccagcagcaaccttaggcactggttgcttgaagtaaccaaacattcggacgcgcataaaatcgccacgcacgcatcgctggttttgccgtcgcagagcagaaggcactccgggacggcagcgtgctctgcagacgctgaaggcaggatgtggctggaagaggtgaggcggagggagcgtggagagcttcgcgctcggcggtttgaggccgccgcccgagcgtgccgcacggcttcgctcgcgctctccaatcgcaaggagtttgtcaccccacatcacggcgccgtcaactcgctccaggttgatttgacagaggggaggtacctgctctccggggcatcggatgggtcggccgctgtgttcgatgtgtggaacgcgactgaatacgaaaccgggttcatagcaaagcacaggaacatactgcttgtggacaagcaacaccagaatggccacaagttcgccatctcggcggccgtttggtatcctgtggatacggggctgtttgtcacagcatcctttgaccagtttgtcaaagtttgggatacaaattcgactcaagtcgtcatggaatttaagatgcctggaaaagtgtacactgcagccatgtctccaatcgcaacaacgcacgtgctcattgctactgggagtgcagatgttcagtggtctgcctcaagtgagtggattttgatgagtggtggctgtgacggggcaatacgtttttgggacattagaagagctggatgctttcgggttctggaccaatcaaggtctcaacttggaaaaaggccccttgttaaaagtgctctatataaggatcacacagattccttaggaccttcaccttccgcaaggagaaggacaggcatttctaagaagagttcatcagctttgcgcaaaattcaaaacccgacacatggacacatgcaacagagattgcatcctggtttgtcatctagtcaaaaccgtgctactgctcattatggtgctgttactggtttacgaacaactgcagatgggatgtaccttcttagctcaggatctgattctcgcttaagactatgggacatcgattcaggctgcaatacgctggtcaattttgaagctatgcgattgcagacaggcaagccattacaattagctgtcactgaggatccttcacttgtatttgttccatgtatggcaagcatcaaggcatacaatttatggtctggtaaaacatttcaaacattccgggggcactatgaacttgtgagttgctgctactatagtgaacaggaccaagaactttatactggcagcaacgacaggcaaattcttgtgtggtctccatcaactccagcttttactaaaatggaagatgatgacaagatcctttctgcagctgatgaggataactggagcgactgagaaaccctggagccgggaggagtgtgtcttgtatctactgacatcgatgttactgatgttaacaaataacatgtcgaggttgttaggtcttgttagcagcccctaaatgatgatattgtcttggtgtattttcaaaaatatgtacattaccatgtgaaaatttgacagatcattgaataatttgtagatttatctcaggaggatagagggatgtttgacgttcgccaaaatgttgtttagccctggagccttgttttcttcactgtgtattaatgctttacccaaaaataagaatttttctgagcaaataggaagaagtgtagctttaagggctagtttgggagctaaaatagtgaag

SEQ ID NO: 36009 - DNA, 4195 bp, Zea Mays
gcctgcaactctctcgtcccggcaaaggtcacaccttcctccctcgtccacatccgtgcctccagccaccggccgcctagggcggcgctcttgccaccggctgtcgagcccgccgaccttgccgccgtttccacgccgcctgacctgcccccacgacctgctgccgtcacgccatccgacctgccccaggacagcccaagcccccgcgaggccgcgacctgctggggaggagattgataggagaggtggtcggcggcgtggataccaacgacggagacatagtgattgccgcccgtcgtcccctgtttccgacacgctgaagcctcacgccacgagcgagcagagggccccaactgccagcagcaaccttaggcactggttgcttgaaggcaagcgcgtcgtatgttatccgttttctatcacattaccgtcgtaattatcatatccctctccccagttatccaagcattatgcagggacagaaactataaaacttctagcaatcttgttgacccaaacgatttgccttgtttcagttcttgatcttcttctttgccctcagctgaaaatgggagaagcaagggaaacattaggaaatcacaccaatcagcaaaacaattaaacccttgattgtgattttcagctgtgcaaatcttaattagatatctcagataatccatcaactagacaaacatacaaagtgaaccgaacaactctcaaacaatatgatatttcctaggcaactctcaaaggaaaaagtcacatagcaaatgacataatttagtacatgtaatgaattctgatgatgtatgccaagtttatcactagcgtacatgtctaaagctgactggcatccgcttgcttatacaaatccaaaatatgacattactacagtaaggcatcaccattcacaaacaagaaaatagtacctcgttgttgtggccacatttcttcttgcggcagttaacagccttggtgtgcaagcgagtatagcacctggatcagatatttgacatcaagcacttagactaccctaggttcatactgaatataagaatttccaatgcaaacacaatactatttacaaaactatctaggggggaaatcaaatggtcctttgtaataatgtttacgaacaaagcaaactaggtgcaagacagtaaacgtcaaaacacagacaaaacaagaaccagagaaacttgcagtgatcaaaagtctgaatgattggcaggccagacaaaatatatgcctcaaaagttaagctcgtaaggcgacttacacatctaattgattcatcattccagccaatcaactatgagcataggaaagcacaaatcccagaccaaactcaaaagatacttcaactgaacaaacaagttatactacctaattggttcatcacccctgccaatccactaaactgaatacaatgaaacaaagatagtggactgtcacaagtggttatatgttgcatattttaagacattcccggttgttgaaaatttaggagattagaccttcattagtatagatgcagatcattggtctcctcatacgagccaaattttcaagaaataccaacgaaggtgatggcacacaagttgatgcacacaatgataccacgcaagatgatgcacttgaaggcaaggaagatgattgtttgtgctactatgccgctccataattttattcgtgagcattctagtggtgatgtgggctttgcaaattgtggttgagatcctgattttgtgcctactatcccaatttcccaaatagatacaataaataactgaataatcagtgtcaccacatgcctcagatcaatccacttctaaatcaagttttactacaatggatgcatttcgtgatagtatagcaacgactctcacttgtgtggaattagcaccaaatatttatgcaatattttgcaacatctatttgtagtgacttgtgtgaagagtgaagacaatgattatgtaatatgttactagtttattattgctgcaaggttgaatatttgaatttatttgaaaaaatcatatagtgatttatctttgttgtattgttgaatagtcaagttcatagcaaaaatagttgcataaagatcattattctcaataaaacaattagctaaaacaaccaaatgataggaaggtcattgcagcctcaaacttcacttttctagagttggatgcacctttctggtcaaacacagtcaaaactccagaggagagcagctccagtctggagttatagagcaaagctactctgaagtggagtggagccatacaaacacaccttagttggcgtagatttttgtgaatccgcttttggctagcgataacgtcttctgggtttccaaaggcttctactcgactcctctaggccttttgggacgtgaccttcatcttgtgcgacttgccaaacgaatccgtcacaatactgccgaatgcaatggaagcttcctaccataacagtcgacccttttcacaccggtcaacgcagtaaccaaacattcggacgcgcataaaatcgccacgcacgcatcgctggttttgccgtcgcagagcagaaggcactccgggacggcagcgtgctctgcagacgctgaaggcaggatgtggctggaagaggtgaggcggagggagcgtggagagcttcgcgctcggcggtttgaggccgccgcccgagcgtgccgcacggcttcgctcgcgctctccaatcgcaaggagtttgtcaccccacatcacggcgccgtcaactcgctccagaggggaggtacctgctctccggggcatcggatgggtcggccgctgtgttcgatgtgtggaacgcgactgaatacgaaaccgggttcatagcaaagcacaggaacatactgcttgtggacaagcaacaccagaatggccacaagttcgccatctcggcggccgtttggtatcctgtggatacggggctgtttgtcacagcatcctttgaccagtttgtcaaagtttgggatacaaattcgactcaagtcgtcatggaatttaagatgcctggaaaagtgtacactgcagccatgtctccaatcgcaacaacgcacgtgctcattgctactgggagtgcagatgttcagtggtctgcctcaagtgagtggattttgatgagtggtggctgtgacggggcaatacgtttttgggacattagaagagctggatgctttcgggttctggaccaatcaaggtctcaacttggaaaaaggccccttgttaaaagtgctctatataaggatcacacagattccttaggaccttcaccttccgcaaggagaaggacaggcatttctaagaagagttcatcagctttgcgcaaaattcaaaacccgacacatggacacatgcaacagagattgcatcctggtttgtcatctagtcaaaaccgtgctactgctcattatggtgctgttactggtttacgaacaactgcagatgggatgtaccttcttagctcaggatctgattctcgcttaagactatgggacatcgattcaggctgcaatacgctggtcaattttgaagctatgcgattgcagacaggcaagccattacaattagctgtcactgaggatccttcacttgtatttgttccatgtatggcaagcatcaaggcatacaatttatggtctggtaaaacatttcaaacattccgggggcactatgaacttgtgagttgctgctactatagtgaacaggaccaagaactttatactggcagcaacgacaggcaaattcttgtgtggtctccatcaactccagcttttactaaaatgctgatgaggataactggagcgactgagaaaccctggagccgggaggagtgtgtcttgtatctactgacatcgatgttactgatgttaacaaataacatgtcgaggttgttaggtcttgttagcagcccctaaatgatgatattgtcttggtgtattttcaaaaatatgtacattaccatgtgaaaatttgacagatcattgaataatttgtagatttatctcaggaggatagagggatgtttgacgttcgccaaaatgttgtttagccctggagccttgttttcttcactgtgtattaatgctttacccaaaaataagaatttttctgagcaaataggaagaagtgtagctttaagggctagtttgggagctaaaatagtgaag

SEQ ID NO: 36010 - DNA, 4164 bp, Zea Mays
gcctgcaactctctcgtcccggcaaaggtcacaccttcctccctcgtccacatccgtgcctccagccaccggccgcctagggcggcgctcttgccaccggctgtcgagcccgccgaccttgccgccgtttccacgccgcctgacctgcccccacgacctgctgccgtcacgccatccgacctgccccaggacagcccaagcccccgcgaggccgcgacctgctggggaggagattgataggagaggtggtcggcggcgtggataccaacgacggagacatagtgattgccgcccgtcgtcccctgtttccgacacgctgaagcctcacgccacgagcgagcagagggccccaactgccagcagcaaccttaggcactggttgcttgaaggcaagcgcgtcgtatgttatccgttttctatcacattaccgtcgtaattatcatatccctctccccagttatccaagcattatgcagggacagaaactataaaacttctagcaatcttgttgacccaaacgatttgccttgtttcagttcttgatcttcttctttgccctcagctgaaaatgggagaagcaagggaaacattaggaaatcacaccaatcagcaaaacaattaaacccttgattgtgattttcagctgtgcaaatcttaattagatatctcagataatccatcaactagacaaacatacaaagtgaaccgaacaactctcaaacaatatgatatttcctaggcaactctcaaaggaaaaagtcacatagcaaatgacataatttagtacatgtaatgaattctgatgatgtatgccaagtttatcactagcgtacatgtctaaagctgactggcatccgcttgcttatacaaatccaaaatatgacattactacagtaaggcatcaccattcacaaacaagaaaatagtacctcgttgttgtggccacatttcttcttgcggcagttaacagccttggtgtgcaagcgagtatagcacctggatcagatatttgacatcaagcacttagactaccctaggttcatactgaatataagaatttccaatgcaaacacaatactatttacaaaactatctaggggggaaatcaaatggtcctttgtaataatgtttacgaacaaagcaaactaggtgcaagacagtaaacgtcaaaacacagacaaaacaagaaccagagaaacttgcagtgatcaaaagtctgaatgattggcaggccagacaaaatatatgcctcaaaagttaagctcgtaaggcgacttacacatctaattgattcatcattccagccaatcaactatgagcataggaaagcacaaatcccagaccaaactcaaaagatacttcaactgaacaaacaagttatactacctaattggttcatcacccctgccaatccactaaactgaatacaatgaaacaaagatagtggactgtcacaagtggttatatgttgcatattttaagacattcccggttgttgaaaatttaggagattagaccttcattagtatagatgcagatcattggtctcctcatacgagccaaattttcaagaaataccaacgaaggtgatggcacacaagttgatgcacacaatgataccacgcaagatgatgcacttgaaggcaaggaagatgattgtttgtgctactatgccgctccataattttattcgtgagcattctagtggtgatgtgggctttgcaaattgtggttgagatcctgattttgtgcctactatcccaatttcccaaatagatacaataaataactgaataatcagtgtcaccacatgcctcagatcaatccacttctaaatcaagttttactacaatggatgcatttcgtgatagtatagcaacgactctcacttgtgtggaattagcaccaaatatttatgcaatattttgcaacatctatttgtagtgacttgtgtgaagagtgaagacaatgattatgtaatatgttactagtttattattgctgcaaggttgaatatttgaatttatttgaaaaaatcatatagtgatttatctttgttgtattgttgaatagtcaagttcatagcaaaaatagttgcataaagatcattattctcaataaaacaattagctaaaacaaccaaatgataggaaggtcattgcagcctcaaacttcacttttctagagttggatgcacctttctggtcaaacacagtcaaaactccagaggagagcagctccagtctggagttatagagcaaagctactctgaagtggagtggagccatacaaacacaccttagttggcgtagatttttgtgaatccgcttttggctagcgataacgtcttctgggtttccaaaggcttctactcgactcctctaggccttttgggacgtgaccttcatcttgtgcgacttgccaaacgaatccgtcacaatactgccgaatgcaatggaagcttcctaccataacagtcgacccttttcacaccggtcaacgcagtaaccaaacattcggacgcgcataaaatcgccacgcacgcatcgctggttttgccgtcgcagagcagaaggcactccgggacggcagcgtgctctgcagacgctgaaggcaggatgtggctggaagaggtgaggcggagggagcgtggagagcttcgcgctcggcggtttgaggccgccgcccgagcgtgccgcacggcttcgctcgcgctctccaatcgcaaggagtttgtcaccccacatcacggcgccgtcaactcgctccaggttgatttgacagaggggaggtacctgctctccggggcatcggatgggtcggccgctgtgttcgatgtgtggaacgcgactgaatacgaaaccgggttcatagcaaagcacaggaacatactgcttgtggacaagcaacaccagaatggccacaagttcgccatctcggcggccgtttggtatcctgtggatacggggctgtttgtcacagcatcctttgaccagtttgtcaaagtttgggatacaaattcgactcaagtcgtcatggaatttaagatgcctggaaaagtgtacactgcagccatgtctccaatcgcaacaacgcacgtgctcattgctactgggagtgcagatgttcagtggtctgcctcaagtgagtggattttgatgagtggtggctgtgacggggcaatacgtttttgggacattagaagagctggatgctttcgggttctggaccaatcaaggtctcaacttggaaaaaggccccttgttaaaagtgctctatataaggatcacacagattccttaggaccttcaccttccgcaaggagaaggacaggcatttctaagaagagttcatcagctttgcgcaaaattcaaaacccgacacatggacacatgcaacagagattgcatcctggtttgtcatctagtcaaaaccgtgctactgctcattatggtgctgttactggtttacgaacaactgcagatgggatgtaccttcttagctcaggatctgattctcgcttaagactatgggacatcgattcaggctgcaatacgctggtcaattttgaagctatgcgattgcagacaggcaagccattacaattagctgtcactgaggatccttcacttgtatttgttccatgtatggcaagcatcaaggcatacaatttatggtctggtaaaacatttcaaacattccgggggcactatgaacttgtgagttgctgctactatagtgaacaggaccaagaagatgatgacaagatcctttctgcagctgatgaggataactggagcgactgagaaaccctggagccgggaggagtgtgtcttgtatctactgacatcgatgttactgatgttaacaaataacatgtcgaggttgttaggtcttgttagcagcccctaaatgatgatattgtcttggtgtattttcaaaaatatgtacattaccatgtgaaaatttgacagatcattgaataatttgtagatttatctcaggaggatagagggatgtttgacgttcgccaaaatgttgtttagccctggagccttgttttcttcactgtgtattaatgctttacccaaaaataagaatttttctgagcaaataggaagaagtgtagctttaagggctagtttgggagctaaaatagtgaag

SEQ ID NO: 36011 - DNA, 4236 bp, Zea Mays
gcctgcaactctctcgtcccggcaaaggtcacaccttcctccctcgtccacatccgtgcctccagccaccggccgcctagggcggcgctcttgccaccggctgtcgagcccgccgaccttgccgccgtttccacgccgcctgacctgcccccacgacctgctgccgtcacgccatccgacctgccccaggacagcccaagcccccgcgaggccgcgacctgctggggaggagattgataggagaggtggtcggcggcgtggataccaacgacggagacatagtgattgccgcccgtcgtcccctgtttccgacacgctgaagcctcacgccacgagcgagcagagggccccaactgccagcagcaaccttaggcactggttgcttgaaggcaagcgcgtcgtatgttatccgttttctatcacattaccgtcgtaattatcatatccctctccccagttatccaagcattatgcagggacagaaactataaaacttctagcaatcttgttgacccaaacgatttgccttgtttcagttcttgatcttcttctttgccctcagctgaaaatgggagaagcaagggaaacattaggaaatcacaccaatcagcaaaacaattaaacccttgattgtgattttcagctgtgcaaatcttaattagatatctcagataatccatcaactagacaaacatacaaagtgaaccgaacaactctcaaacaatatgatatttcctaggcaactctcaaaggaaaaagtcacatagcaaatgacataatttagtacatgtaatgaattctgatgatgtatgccaagtttatcactagcgtacatgtctaaagctgactggcatccgcttgcttatacaaatccaaaatatgacattactacagtaaggcatcaccattcacaaacaagaaaatagtacctcgttgttgtggccacatttcttcttgcggcagttaacagccttggtgtgcaagcgagtatagcacctggatcagatatttgacatcaagcacttagactaccctaggttcatactgaatataagaatttccaatgcaaacacaatactatttacaaaactatctaggggggaaatcaaatggtcctttgtaataatgtttacgaacaaagcaaactaggtgcaagacagtaaacgtcaaaacacagacaaaacaagaaccagagaaacttgcagtgatcaaaagtctgaatgattggcaggccagacaaaatatatgcctcaaaagttaagctcgtaaggcgacttacacatctaattgattcatcattccagccaatcaactatgagcataggaaagcacaaatcccagaccaaactcaaaagatacttcaactgaacaaacaagttatactacctaattggttcatcacccctgccaatccactaaactgaatacaatgaaacaaagatagtggactgtcacaagtggttatatgttgcatattttaagacattcccggttgttgaaaatttaggagattagaccttcattagtatagatgcagatcattggtctcctcatacgagccaaattttcaagaaataccaacgaaggtgatggcacacaagttgatgcacacaatgataccacgcaagatgatgcacttgaaggcaaggaagatgattgtttgtgctactatgccgctccataattttattcgtgagcattctagtggtgatgtgggctttgcaaattgtggttgagatcctgattttgtgcctactatcccaatttcccaaatagatacaataaataactgaataatcagtgtcaccacatgcctcagatcaatccacttctaaatcaagttttactacaatggatgcatttcgtgatagtatagcaacgactctcacttgtgtggaattagcaccaaatatttatgcaatattttgcaacatctatttgtagtgacttgtgtgaagagtgaagacaatgattatgtaatatgttactagtttattattgctgcaaggttgaatatttgaatttatttgaaaaaatcatatagtgatttatctttgttgtattgttgaatagtcaagttcatagcaaaaatagttgcataaagatcattattctcaataaaacaattagctaaaacaaccaaatgataggaaggtcattgcagcctcaaacttcacttttctagagttggatgcacctttctggtcaaacacagtcaaaactccagaggagagcagctccagtctggagttatagagcaaagctactctgaagtggagtggagccatacaaacacaccttagttggcgtagatttttgtgaatccgcttttggctagcgataacgtcttctgggtttccaaaggcttctactcgactcctctaggccttttgggacgtgaccttcatcttgtgcgacttgccaaacgaatccgtcacaatactgccgaatgcaatggaagcttcctaccataacagtcgacccttttcacaccggtcaacgcagtaaccaaacattcggacgcgcataaaatcgccacgcacgcatcgctggttttgccgtcgcagagcagaaggcactccgggacggcagcgtgctctgcagacgctgaaggcaggatgtggctggaagaggtgaggcggagggagcgtggagagcttcgcgctcggcggtttgaggccgccgcccgagcgtgccgcacggcttcgctcgcgctctccaatcgcaaggagtttgtcaccccacatcacggcgccgtcaactcgctccaggttgatttgacagaggggaggtacctgctctccggggcatcggatgggtcggccgctgtgttcgatgtgtggaacgcgactgaatacgaaaccgggttcatagcaaagcacaggaacatactgcttgtggacaagcaacaccagaatggccacaagttcgccatctcggcggccgtttggtatcctgtggatacggggctgtttgtcacagcatcctttgaccagtttgtcaaagtttgggatacaaattcgactcaagtcgtcatggaatttaagatgcctggaaaagtgtacactgcagccatgtctccaatcgcaacaacgcacgtgctcattgctactgggagtgcagatgttcagtggtctgcctcaagtgagtggattttgatgagtggtggctgtgacggggcaatacgtttttgggacattagaagagctggatgctttcgggttctggaccaatcaaggtctcaacttggaaaaaggccccttgttaaaagtgctctatataaggatcacacagattccttaggaccttcaccttccgcaaggagaaggacaggcatttctaagaagagttcatcagctttgcgcaaaattcaaaacccgacacatggacacatgcaacagagattgcatcctggtttgtcatctagtcaaaaccgtgctactgctcattatggtgctgttactggtttacgaacaactgcagatgggatgtaccttcttagctcaggatctgattctcgcttaagactatgggacatcgattcaggctgcaatacgctggtcaattttgaagctatgcgattgcagacaggcaagccattacaattagctgtcactgaggatccttcacttgtatttgttccatgtatggcaagcatcaaggcatacaatttatggtctggtaaaacatttcaaacattccgggggcactatgaacttgtgagttgctgctactatagtgaacaggaccaagaactttatactggcagcaacgacaggcaaattcttgtgtggtctccatcaactccagcttttactaaaatggaagatgatgacaagatcctttctgcagctgatgaggataactggagcgactgagaaaccctggagccgggaggagtgtgtcttgtatctactgacatcgatgttactgatgttaacaaataacatgtcgaggttgttaggtcttgttagcagcccctaaatgatgatattgtcttggtgtattttcaaaaatatgtacattaccatgtgaaaatttgacagatcattgaataatttgtagatttatctcaggaggatagagggatgtttgacgttcgccaaaatgttgtttagccctggagccttgttttcttcactgtgtattaatgctttacccaaaaataagaatttttctgagcaaataggaagaagtgtagctttaagggctagtttgggagctaaaatagtgaag

SEQ ID NO: 36012 - DNA, 3452 bp, Zea Mays
gcctgcaactctctcgtcccggcaaaggtcacaccttcctccctcgtccacatccgtgcctccagccaccggccgcctagggcggcgctcttgccaccggctgtcgagcccgccgaccttgccgccgtttccacgccgcctgacctgcccccacgacctgctgccgtcacgccatccgacctgccccaggacagcccaagcccccgcgaggccgcgacctgctggggaggagattgataggagaggtggtcggcggcgtggataccaacgacggagacatagtgattgccgcccgtcgtcccctgtttccgacacgctgaagcctcacgccacgagcgagcagagggccccaactgccagcagcaaccttaggcactggttgcttgaaggcaagcgcgtcgtatgttatccgttttctatcacattaccgtcgtaattatcatatccctctccccagttatccaagcattatgcagggacagaaactataaaacttctagcaatcttgttgacccaaacgatttgccttgtttcagttcttgatcttcttctttgccctcagctgaaaatgggagaagcaagggaaacattaggaaatcacaccaatcagcaaaacaattaaacccttgattgtgattttcagctgtgcaaatcttaattagatatctcagataatccatcaactagacaaacatacaaagtgaaccgaacaactctcaaacaatatgatatttcctaggcaactctcaaaggaaaaagtcacatagcaaatgacataatttagtacatgtaatgaattctgatgatgtatgccaagtttatcactagcgtacatgtctaaagctgactggcatccgcttgcttatacaaatccaaaatatgacattactacagtaaggcatcaccattcacaaacaagaaaatagtacctcgttgttgtggccacatttcttcttgcggcagttaacagccttggtgtgcaagcgagtatagcacctggatcagatatttgacatcaagcacttagactaccctaggttcatactgaatataagaatttccaatgcaaacacaatactatttacaaaactatctaggggggaaatcaaatggtcctttgtaataatgtttacgaacaaagcaaactaggtgcaagacagtaaacgtcaaaacacagacaaaacaagaaccagagaaacttgcagtgatcaaaagtctgaatgattggcaggccagacaaaatatatgcctcaaaagttaagctcgtaaggcgacttacacatctaattgattcatcattccagccaatcaactatgagcataggaaagcacaaatcccagaccaaactcaaaagatacttcaactgaacaaacaagttatactacctaattggttcatcacccctgccaatccactaaactgaatacaatgaaacaaagatagtggactgtcacaagtggttatatgttgcatattttaagacattcccggttgttgaaaatttaggagattagaccttcattagtatagatgcagatcattggtctcctcatacgagccaaattttcaagaaataccaacgaaggtgatggcacacaagttgatgcacacaatgataccacgcaagatgatgcacttgaagtaaccaaacattcggacgcgcataaaatcgccacgcacgcatcgctggttttgccgtcgcagagcagaaggcactccgggacggcagcgtgctctgcagacgctgaaggcaggatgtggctggaagaggtgaggcggagggagcgtggagagcttcgcgctcggcggtttgaggccgccgcccgagcgtgccgcacggcttcgctcgcgctctccaatcgcaaggagtttgtcaccccacatcacggcgccgtcaactcgctccaggttgatttgacagaggggaggtacctgctctccggggcatcggatgggtcggccgctgtgttcgatgtgtggaacgcgactgaatacgaaaccgggttcatagcaaagcacaggaacatactgcttgtggacaagcaacaccagaatggccacaagttcgccatctcggcggccgtttggtatcctgtggatacggggctgtttgtcacagcatcctttgaccagtttgtcaaagtttgggatacaaattcgactcaagtcgtcatggaatttaagatgcctggaaaagtgtacactgcagccatgtctccaatcgcaacaacgcacgtgctcattgctactgggagtgcagatgttcaggtccgtctatgtgacattgcttctggagcctttacccacacgttgtctggtcatcgtgatggtatcatgtctttggagtggtctgcctcaagtgagtggattttgatgagtggtggctgtgacggggcaatacgtttttgggacattagaagagctggatgctttcgggttctggaccaatcaaggtctcaacttggaaaaaggccccttgttaaaagtgctctatataaggatcacacagattccttaggaccttcaccttccgcaaggagaaggacaggcatttctaagaagagttcatcagctttgcgcaaaattcaaaacccgacacatggacacatgcaacagagattgcatcctggtttgtcatctagtcaaaaccgtgctactgctcattatggtgctgttactggtttacgaacaactgcagatgggatgtaccttcttagctcaggatctgattctcgcttaagactatgggacatcgattcaggctgcaatacgctggtcaattttgaagctatgcgattgcagacaggcaagccattacaattagctgtcactgaggatccttcacttgtatttgttccatgtatggcaagcatcaaggcatacaatttatggtctggtaaaacatttcaaacattccgggggcactatgaacttgtgagttgctgctactatagtgaacaggaccaagaactttatactggcagcaacgacaggcaaattcttgtgtggtctccatcaactccagcttttactaaaatggaagatgatgacaagatcctttctgcagctgatgaggataactggagcgactgagaaaccctggagccgggaggagtgtgtcttgtatctactgacatcgatgttactgatgttaacaaataacatgtcgaggttgttaggtcttgttagcagcccctaaatgatgatattgtcttggtgtattttcaaaaatatgtacattaccatgtgaaaatttgacagatcattgaataatttgtagatttatctcaggaggatagagggatgtttgacgttcgccaaaatgttgtttagccctggagccttgttttcttcactgtgtattaatgctttacccaaaaataagaatttttctgagcaaataggaagaagtgtagctttaagggctagtttgggagctaaaatagtgaag

SEQ ID NO: 36013 - DNA, 3374 bp, Zea Mays
gcctgcaactctctcgtcccggcaaaggtcacaccttcctccctcgtccacatccgtgcctccagccaccggccgcctagggcggcgctcttgccaccggctgtcgagcccgccgaccttgccgccgtttccacgccgcctgacctgcccccacgacctgctgccgtcacgccatccgacctgccccaggacagcccaagcccccgcgaggccgcgacctgctggggaggagattgataggagaggtggtcggcggcgtggataccaacgacggagacatagtgattgccgcccgtcgtcccctgtttccgacacgctgaagcctcacgccacgagcgagcagagggccccaactgccagcagcaaccttaggcactggttgcttgaaggcaagcgcgtcgtatgttatccgttttctatcacattaccgtcgtaattatcatatccctctccccagttatccaagcattatgcagggacagaaactataaaacttctagcaatcttgttgacccaaacgatttgccttgtttcagttcttgatcttcttctttgccctcagctgaaaatgggagaagcaagggaaacattaggaaatcacaccaatcagcaaaacaattaaacccttgattgtgattttcagctgtgcaaatcttaattagatatctcagataatccatcaactagacaaacatacaaagtgaaccgaacaactctcaaacaatatgatatttcctaggcaactctcaaaggaaaaagtcacatagcaaatgacataatttagtacatgtaatgaattctgatgatgtatgccaagtttatcactagcgtacatgtctaaagctgactggcatccgcttgcttatacaaatccaaaatatgacattactacagtaaggcatcaccattcacaaacaagaaaatagtacctcgttgttgtggccacatttcttcttgcggcagttaacagccttggtgtgcaagcgagtatagcacctggatcagatatttgacatcaagcacttagactaccctaggttcatactgaatataagaatttccaatgcaaacacaatactatttacaaaactatctaggggggaaatcaaatggtcctttgtaataatgtttacgaacaaagcaaactaggtgcaagacagtaaacgtcaaaacacagacaaaacaagaaccagagaaacttgcagtgatcaaaagtctgaatgattggcaggccagacaaaatatatgcctcaaaagttaagctcgtaaggcgacttacacatctaattgattcatcattccagccaatcaactatgagcataggaaagcacaaatcccagaccaaactcaaaagatacttcaactgaacaaacaagttatactacctaattggttcatcacccctgccaatccactaaactgaatacaatgaaacaaagatagtggactgtcacaagtggttatatgttgcatattttaagacattcccggttgttgaaaatttaggagattagaccttcattagtatagatgcagatcattggtctcctcatacgagccaaattttcaagaaataccaacgaaggtgatggcacacaagttgatgcacacaatgataccacgcaagatgatgcacttgaagtaaccaaacattcggacgcgcataaaatcgccacgcacgcatcgctggttttgccgtcgcagagcagaaggcactccgggacggcagcgtgctctgcagacgctgaaggcaggatgtggctggaagaggtgaggcggagggagcgtggagagcttcgcgctcggcggtttgaggccgccgcccgagcgtgccgcacggcttcgctcgcgctctccaatcgcaaggagtttgtcaccccacatcacggcgccgtcaactcgctccaggttgatttgacagaggggaggtacctgctctccggggcatcggatgggtcggccgctgtgttcgatgtgtggaacgcgactgaatacgaaaccgggttcatagcaaagcacaggaacatactgcttgtggacaagcaacaccagaatggccacaagttcgccatctcggcggccgtttggtatcctgtggatacggggctgtttgtcacagcatcctttgaccagtttgtcaaagtttgggatacaaattcgactcaagtcgtcatggaatttaagatgcctggaaaagtgtacactgcagccatgtctccaatcgcaacaacgcacgtgctcattgctactgggagtgcagatgttcagtggtctgcctcaagtgagtggattttgatgagtggtggctgtgacggggcaatacgtttttgggacattagaagagctggatgctttcgggttctggaccaatcaaggtctcaacttggaaaaaggccccttgttaaaagtgctctatataaggatcacacagattccttaggaccttcaccttccgcaaggagaaggacaggcatttctaagaagagttcatcagctttgcgcaaaattcaaaacccgacacatggacacatgcaacagagattgcatcctggtttgtcatctagtcaaaaccgtgctactgctcattatggtgctgttactggtttacgaacaactgcagatgggatgtaccttcttagctcaggatctgattctcgcttaagactatgggacatcgattcaggctgcaatacgctggtcaattttgaagctatgcgattgcagacaggcaagccattacaattagctgtcactgaggatccttcacttgtatttgttccatgtatggcaagcatcaaggcatacaatttatggtctggtaaaacatttcaaacattccgggggcactatgaacttgtgagttgctgctactatagtgaacaggaccaagaactttatactggcagcaacgacaggcaaattcttgtgtggtctccatcaactccagcttttactaaaatggaagatgatgacaagatcctttctgcagctgatgaggataactggagcgactgagaaaccctggagccgggaggagtgtgtcttgtatctactgacatcgatgttactgatgttaacaaataacatgtcgaggttgttaggtcttgttagcagcccctaaatgatgatattgtcttggtgtattttcaaaaatatgtacattaccatgtgaaaatttgacagatcattgaataatttgtagatttatctcaggaggatagagggatgtttgacgttcgccaaaatgttgtttagccctggagccttgttttcttcactgtgtattaatgctttacccaaaaataagaatttttctgagcaaataggaagaagtgtagctttaagggctagtttgggagctaaaatagtgaag

SEQ ID NO: 36014 - DNA, 4262 bp, Zea Mays
caattttttaacatccttgagtcgctctaaacgggcctgcaactctctcgtcccggcaaaggtcacaccttcctccctcgtccacatccgtgcctccagccaccggccgcctagggcggcgctcttgccaccggctgtcgagcccgccgaccttgccgccgtttccacgccgcctgacctgcccccacgacctgctgccgtcacgccatccgacctgccccaggacagcccaagcccccgcgaggccgcgacctgctggggaggagattgataggagaggtggtcggcggcgtggataccaacgacggagacatagtgattgccgcccgtcgtcccctgtttccgacacgctgaagcctcacgccacgagcgagcagagggccccaactgccagcagcaaccttaggcactggttgcttgaaggcaagcgcgtcgtatgttatccgttttctatcacattaccgtcgtaattatcatatccctctccccagttatccaagcattatgcagggacagaaactataaaacttctagcaatcttgttgacccaaacgatttgccttgtttcagttcttgatcttcttctttgccctcagctgaaaatgggagaagcaagggaaacattaggaaatcacaccaatcagcaaaacaattaaacccttgattgtgattttcagctgtgcaaatcttaattagatatctcagataatccatcaactagacaaacatacaaagtgaaccgaacaactctcaaacaatatgatatttcctaggcaactctcaaaggaaaaagtcacatagcaaatgacataatttagtacatgtaatgaattctgatgatgtatgccaagtttatcactagcgtacatgtctaaagctgactggcatccgcttgcttatacaaatccaaaatatgacattactacagtaaggcatcaccattcacaaacaagaaaatagtacctcgttgttgtggccacatttcttcttgcggcagttaacagccttggtgtgcaagcgagtatagcacctggatcagatatttgacatcaagcacttagactaccctaggttcatactgaatataagaatttccaatgcaaacacaatactatttacaaaactatctaggggggaaatcaaatggtcctttgtaataatgtttacgaacaaagcaaactaggtgcaagacagtaaacgtcaaaacacagacaaaacaagaaccagagaaacttgcagtgatcaaaagtctgaatgattggcaggccagacaaaatatatgcctcaaaagttaagctcgtaaggcgacttacacatctaattgattcatcattccagccaatcaactatgagcataggaaagcacaaatcccagaccaaactcaaaagatacttcaactgaacaaacaagttatactacctaattggttcatcacccctgccaatccactaaactgaatacaatgaaacaaagatagtggactgtcacaagtggttatatgttgcatattttaagacattcccggttgttgaaaatttaggagattagaccttcattagtatagatgcagatcattggtctcctcatacgagccaaattttcaagaaataccaacgaaggtgatggcacacaagttgatgcacacaatgataccacgcaagatgatgcacttgaaggcaaggaagatgattgtttgtgctactatgccgctccataattttattcgtgagcattctagtggtgatgtgggctttgcaaattgtggttgagatcctgattttgtgcctactatcccaatttcccaaatagatacaataaataactgaataatcagtgtcaccacatgcctcagatcaatccacttctaaatcaagttttactacaatggatgcatttcgtgatagtatagcaacgactctcacttgtgtggaattagcaccaaatatttatgcaatattttgcaacatctatttgtagtgacttgtgtgaagagtgaagacaatgattatgtaatatgttactagtttattattgctgcaaggttgaatatttgaatttatttgaaaaaatcatatagtgatttatctttgttgtattgttgaatagtcaagttcatagcaaaaatagttgcataaagatcattattctcaataaaacaattagctaaaacaaccaaatgataggaaggtcattgcagcctcaaacttcacttttctagagttggatgcacctttctggtcaaacacagtcaaaactccagaggagagcagctccagtctggagttatagagcaaagctactctgaagtggagtggagccatacaaacacaccttagttggcgtagatttttgtgaatccgcttttggctagcgataacgtcttctgggtttccaaaggcttctactcgactcctctaggccttttgggacgtgaccttcatcttgtgcgacttgccaaacgaatccgtcacaatactgccgaatgcaatggaagcttcctaccataacagtcgacccttttcacaccggtcaacgcagtaaccaaacattcggacgcgcataaaatcgccacgcacgcatcgctggttttgccgtcgcagagcagaaggcactccgggacggcagcgtgctctgcagacgctgaaggcaggatgtggctggaagaggtgaggcggagggagcgtggagagcttcgcgctcggcggtttgaggccgccgcccgagcgtgccgcacggcttcgctcgcgctctccaatcgcaaggagtttgtcaccccacatcacggcgccgtcaactcgctccaggttgatttgacagaggggaggtacctgctctccggggcatcggatgggtcggccgctgtgttcgatgtgtggaacgcgactgaatacgaaaccgggttcatagcaaagcacaggaacatactgcttgtggacaagcaacaccagaatggccacaagttcgccatctcggcggccgtttggtatcctgtggatacggggctgtttgtcacagcatcctttgaccagtttgtcaaagtttgggatacaaattcgactcaagtcgtcatggaatttaagatgcctggaaaagtgtacactgcagccatgtctccaatcgcaacaacgcacgtgctcattgctactgggagtgcagatgttcagatggtatcatgtctttggagtggtctgcctcaagtgagtggattttgatgagtggtggctgtgacggggcaatacgtttttgggacattagaagagctggatgctttcgggttctggaccaatcaaggtctcaacttggaaaaaggccccttgttaaaagtgctctatataaggatcacacagattccttaggaccttcaccttccgcaaggagaaggacaggcatttctaagaagagttcatcagctttgcgcaaaattcaaaacccgacacatggacacatgcaacagagattgcatcctggtttgtcatctagtcaaaaccgtgctactgctcattatggtgctgttactggtttacgaacaactgcagatgggatgtaccttcttagctcaggatctgattctcgcttaagactatgggacatcgattcaggctgcaatacgctggtcaattttgaagctatgcgattgcagacaggcaagccattacaattagctgtcactgaggatccttcacttgtatttgttccatgtatggcaagcatcaaggcatacaatttatggtctggtaaaacatttcaaacattccgggggcactatgaacttgtgagttgctgctactatagtgaacaggaccaagaactttatactggcagcaacgacaggcaaattcttgtgtggtctccatcaactccagcttttactaaaatgctgatgaggataactggagcgactgagaaaccctggagccgggaggagtgtgtcttgtatctactgacatcgatgttactgatgttaacaaataacatgtcgaggttgttaggtcttgttagcagcccctaaatgatgatattgtcttggtgtattttcaaaaatatgtacattaccatgtgaaaatttgacagatcattgaataatttgtagatttatctcaggaggatagagggatgtttgacgttcgccaaaatgttgtttagccctggagccttgttttcttcactgtgtattaatgctttacccaaaaataagaatttttctgagcaaataggaagaagtgtagctttaagggctagtttgggagctaaaatagtgaag

SEQ ID NO: 36015 - DNA, 3196 bp, Zea Mays
ctgctgcttatctcgtggccgatccgcgctcgccccgtccccgcatctcgccgccgcgccccggtcagtgtgcgcttgagacatcgcccacacgagacatcgtgtgtgatgcccgcccccaacccttccccggtgtgatgcccgccgttgacgtctcttctctcgcccccatcctcctcaacctcggcgccgcccctgcccctgtcctcgatggcaaggaaacttcccccgggcataaatctcactgctcacgcgccattagcgccatacccgctacctcctctggcatgccacacgccgccatccccctagcccatcgtgtgtcacgcgcccagatctcctatttttacgcccccacgcaacataggccatcccaccatggagcaagaaaccctagcgtagccaccaaccactgctgccccacatggcatcctgactgtggctgcatccatctcggcgcctcgcccaccacgttgcaccaccaccgccgctcctcctccccaccgcgctgtcgccctgagtaccaccgccaccgccaccgtgcatgtcgctagggccgcatctctcgatgttagggcccaaccgaacatcgtcgtcgcctccacctctgcgtctgggccaccgcaagagtttagggctcctccggggttcgagatcatgtccgaccagcagagcagcatcctcagcaccatgctcgacaaccccctccacctcggtactggcgtcttcgccctcgggtacgcaccacaccttttctcaccatccgagcattgccaaggagctcctctccatccccaacgcgcgccacgccccaccaccaacgatgaatgggtgcttcagattcactaagacgatggcgcgtctgcggcaaggagcttcagattcactgccatcagaaacttgcaggtgaggaaggagagggtccaagttcctgacctctgcatcgattgggagggtccaagttcctgacccctgcattgactgattatctttgagtttaatcattatgttgaaattggtgtgcattcaaaatattcaattgattctcacggctaccatggctcctagcgaaacttgtttatcgttggtgtatctggcgtattaatggaaaaaatttaccttctctctttgagggttccagtccatttcgttctctataattgtcacctacccttcctgagcctacttttgttgctaatgtaagaataagaaagaaaaaagcttcatctctatttgtttctgctatgcattgtgtagcttagagttgtcacttaacttacaatcttacgttggtgtaaaacagtgaccacactaaaagcacaaatgcaaggttttatagaccatgtgtgatgctgctaccactaacatgtacaaataggaaaggcaacaaaatggcttagagcaagtattttttaaagaaaaaaatgatccatttaagaaaccttttaataagttactcctgataccaactcctcaattcgcgagtgtcttcagcttcgctttctctatttgttgtatgctggtgtttcttcgtcttgtgtgtgagttggatgagaactggacaactggtaggaaccactctcagtttcagtttctgattgtgtttcactttggttcaggttgtctgcgctcttctcttagggatcgagaatcgcagggaggttcctcgcttctataagaaagatgtgcttttttatttcattttccttgtggagttgtagttcagttcagtttgtcttcatgcatggggagtgcttggttcgattgttcatagccataggtgctacagattcgtctatggccaagacagaagtttttgttttcatgatgttttcatggaagaagatggcgagaagctctctgcccttctcatagttaactcttttgattaagtgattaaccaatttagtaacacatatttaatgtttcagcttgtttggtttagacatggtccctcagtaaattttttatttttttattatctttatccataaactaagttggtatgtagtgacgggtaagaaatactgtggtggtttggacctcagttattggccagatgaagggcgaaggccattatcagatcctcgtccacctttgggctattgctgacaagtggacgagtgtcgtacacctctccaattccccccttcaatgtggtcagtgttgaatcatctacgtcatacagtgagcaagggcatactgatgagggaagggatgacatggatttttctcgttcgagcatcaggttttgtgcgttgattatggtgtgctcgttggtgagactgcgacgtcctcgttcaagtcagctgataatcgtgtcctccaagagcaactactacagaaggtcctctctctctatttttatttccaatttaaattctttaatatgacaaaagttctgtctaaaaaatcatgctaattgcagaatgtggaaatcaacgatttataagaaaaagtttttcacgttgagcaataactctcagcaaaagtggatatatcctctgagaaggaagctgattgtgcacatcaggagactattgatttgaaatctaaacttcagtccaaggttcttttactgataatgttctttcactttgtgtatttgagccccttgtgtagtgcatattcttcaacatacaatattcatggtttggttactgacctttcaccaaattttctgttatgtccttcctgtaattctacttgatagaaatagtatgcatgttcattagatggctatatgcaaactgcttgtattttatgctttccttgttgatatttaagccaaccaactttgatgatgtactttggtaggaagctaaaattgaaaagatgaaatatgagcatctggcgagggaggctgctttggtagaggatcttcttgaagaggagtacaagaaaaagtttgatgaggcaaacaaggaactatctcttgagaatgatctagcaagcatgtgggttcttgttgctaagttgaaaagaggggctttagacacatctgatttgaatgttgatgatcgaactaaagtgtaagggcgtagagatcgccacactgttgtctcataattggtgttaataaaaaataacatggtgctgcacggaatctctactttgtcttgtaagcaggattgttctgtcggtataatttgatttgtatgtataatgtcttcatgctttacttgcccttttatga

SEQ ID NO: 36016 - DNA, 2944 bp, Zea Mays
ctgctgcttatctcgtggccgatccgcgctcgccccgtccccgcatctcgccgccgcgccccggtcagtgtgcgcttgagacatcgcccacacgagacatcgtgtgtgatgcccgcccccaacccttccccggtgtgatgcccgccgttgacgtctcttctctcgcccccatcctcctcaacctcggcgccgcccctgcccctgtcctcgatggcaaggaaacttcccccgggcataaatctcactgctcacgcgccattagcgccatacccgctacctcctctggcatgccacacgccgccatccccctagcccatcgtgtgtcacgcgcccagatctcctatttttacgcccccacgcaacataggccatcccaccatggagcaagaaaccctagcgtagccaccaaccactgctgccccacatggcatcctgactgtggctgcatccatctcggcgcctcgcccaccacgttgcaccaccaccgccgctcctcctccccaccgcgctgtcgccctgagtaccaccgccaccgccaccgtgcatgtcgctagggccgcatctctcgatgttagggcccaaccgaacatcgtcgtcgcctccacctctgcgtctgggccaccgcaagagtttagggctcctccggggttcgagatcatgtccgaccagcagagcagcatcctcagcaccatgctcgacaaccccctccacctcggtactggcgtcttcgccctcgggtacgcaccacaccttttctcaccatccgagcattgccaaggagctcctctccatccccaacgcgcgccacgccccaccaccaacgatgaatgggtgcttcagattcactaagacgatggcgcgtctgcggcaaggagcttcagattcactgccatcagaaacttgcaggtgaggaaggagagggtccaagttcctgacctctgcatcgattgggagggtccaagttcctgacccctgcattgactgattatctttgagtttaatcattatgttgaaattggtgtgcattcaaaatattcaattgattctcacggctaccatggctcctagcgaaacttgtttatcgttggtgtatctggcgtattaatggaaaaaatttaccttctctctttgagggttccagtccatttcgttctctataattgtcacctacccttcctgagcctacttttgttgctaatgtaagaataagaaagaaaaaagcttcatctctatttgtttctgctatgcattgtgtagcttagagttgtcacttaacttacaatcttacgttggtgtaaaacagtgaccacactaaaagcacaaatgcaaggttttatagaccatgtgtgatgctgctaccactaacatgtacaaataggaaaggcaacaaaatggcttagagcaagtattttttaaagaaaaaaatgatccatttaagaaaccttttaataagttactcctgataccaactcctcaattcgcgagtgtcttcagcttcgctttctctatttgttgtatgctggtgtttcttcgtcttgtgtgtgagttggatgagaactggacaactggtaggaaccactctcagtttcagtttctgattgtgtttcactttggttcaggttgtctgcgctcttctcttagggatcgagaatcgcagggaggttcctcgcttctataagaaagatgtgcttttttatttcattttccttgtggagttgtagttcagttcagtttgtcttcatgcatggggagtgcttggttcgattgttcatagccataggtgctacagattcgtctatggccaagacagaagtttttgttttcatgatgttttcatggaagaagatggcgagaagctctctgcccttctcatagttaactcttttgattaagtgattaaccaatttagtaacacatatttaatgtttcagcttgtttggtttagacatggtccctcagtaaattttttatttttttattatctttatccataaactaagttggtatgtagtgacgggtaagaaatactgtggtggtttggacctcagttattggccagatgaagggcgaaggccattatcagatcctcgtccacctttgggctattgctgacaagtggacgagtgtcgtacacctctccaattccccccttcaatgtggtcagtgttgaatcatctacgtcatacagtgagcaagggcatactgatgagggaagggatgacatggatttttctcgttcgagcatcaggttttgtgcgttgattatggtgtgctcgttggtgagactgcgacgtcctcgttcaagtcagctgataatcgtgtcctccaagagcaactactacagaaggtcctctctctctatttttatttccaatttaaattctttaatatgacaaaagttctgtctaaaaaatcatgctaattgcagaatgtggaaatcaacgatttataagaaaaagtttttcacgttgagcaataactctcagcaaaagtggatatatcctctgagaaggaagctgattgtgcacatcaggagactattgatttgaaatctaaacttcagtccaagctaaaattgaaaagatgaaatatgagcatctggcgagggaggctgctttggtagaggatcttcttgaagaggagtacaagaaaaagtttgatgaggcaaacaaggaactatctcttgagaatgatctagcaagcatgtgggttcttgttgctaagttgaaaagaggggctttagacacatctgatttgaatgttgatgatcgaactaaagtgtaagggcgtagagatcgccacactgttgtctcataattggtgttaataaaaaataacatggtgctgcacggaatctctactttgtcttgtaagcaggattgttctgtcggtataatttgatttgtatgtataatgtcttcatgctttacttgcccttttatga

SEQ ID NO: 36017 - DNA, 1461 bp, Zea Mays
ctgctgcttatctcgtggccgatccgcgctcgccccgtccccgcatctcgccgccgcgccccggtcagtgtgcgcttgagacatcgcccacacgagacatcgtgtgtgatgcccgcccccaacccttccccggtgtgatgcccgccgttgacgtctcttctctcgcccccatcctcctcaacctcggcgccgcccctgcccctgtcctcgatggttgtctgcgctcttctcttagggatcgagaatcgcagggaggttcctcgcttctataagaaagatgtgcttttttatttcattttccttgtggagttgtagttcagttcagtttgtcttcatgcatggggagtgcttggttcgattgttcatagccataggtgctacagattcgtctatggccaagacagaagtttttgttttcatgatgttttcatggaagaagatggcgagaagctctctgcccttctcatagttaactcttttgattaagtgattaaccaatttagtaacacatatttaatgtttcagcttgtttggtttagacatggtccctcagtaaattttttatttttttattatctttatccataaactaagttggtatgtagtgacgggtaagaaatactgtggtggtttggacctcagttattggccagatgaagggcgaaggccattatcagatcctcgtccacctttgggctattgctgacaagtggacgagtgtcgtacacctctccaattccccccttcaatgtggtcagtgttgaatcatctacgtcatacagtgagcaagggcatactgatgagggaagggatgacatggatttttctcgttcgagcatcaggttttgtgcgttgattatggtgtgctcgttggtgagactgcgacgtcctcgttcaagtcagctgataatcgtgtcctccaagagcaactactacagaagaatgtggaaatcaacgatttataagaaaaagtttttcacgttgagcaataactctcagcaaaagtggatatatcctctgagaaggaagctgattgtgcacatcaggagactattgatttgaaatctaaacttcagtccaaggaagctaaaattgaaaagatgaaatatgagcatctggcgagggaggctgctttggtagaggatcttcttgaagaggagtacaagaaaaagtttgatgaggcaaacaaggaactatctcttgagaatgatctagcaagcatgtgggttcttgttgctaagttgaaaagaggggctttagacacatctgatttgaatgttgatgatcgaactaaagtgtaagggcgtagagatcgccacactgttgtctcataattggtgttaataaaaaataacatggtgctgcacggaatctctactttgtcttgtaagcaggattgttctgtcggtataatttgatttgtatgtataatgtcttcatgctttacttgcccttttatga

SEQ ID NO: 36018 - DNA, 1947 bp, Zea Mays
ctgctgcttatctcgtggccgatccgcgctcgccccgtccccgcatctcgccgccgcgccccggtcagtgtgcgcttgagacatcgcccacacgagacatcgtgtgtgatgcccgcccccaacccttccccggtgtgatgcccgccgttgacgtctcttctctcgcccccatcctcctcaacctcggcgccgcccctgcccctgtcctcgatggcaaggaaacttcccccgggcataaatctcactgctcacgcgccattagcgccatacccgctacctcctctggcatgccacacgccgccatccccctagcccatcgtgtgtcacgcgcccagatctcctatttttacgcccccacgcaacataggccatcccaccatggagcaagaaaccctagcgtagccaccaaccactgctgccccacatggcatcctgactgtggctgcatccatctcggcgcctcgcccaccacgttgcaccaccaccgccgctcctcctccccaccgcgctgtcgccctgagtaccaccgccaccgccaccgtgcatgtcgctagggccgcatctctcgatgttagggcccaaccgaacatcgtcgtcgcctccacctctgcgtctgggccaccgcaagagtttagggctcctccggggttcgagatcatgtccgaccagcagagcagcatcctcagcaccatgctcgacaaccccctccacctcggtactggcgtcttcgccctcgggttgtctgcgctcttctcttagggatcgagaatcgcagggaggttcctcgcttctataagaaagatgtgcttttttatttcattttccttgtggagttgtagttcagttcagtttgtcttcatgcatggggagtgcttggttcgattgttcatagccataggtgctacagattcgtctatggccaagacagaagtttttgttttcatgatgttttcatggaagaagatggcgagaagctctctgcccttctcatagttaactcttttgattaagtgattaaccaatttagtaacacatatttaatgtttcagcttgtttggtttagacatggtccctcagtaaattttttatttttttattatctttatccataaactaagttggtatgtagtgacgggtaagaaatactgtggtggtttggacctcagttattggccagatgaagggcgaaggccattatcagatcctcgtccacctttgggctattgctgacaagtggacgagtgtcgtacacctctccaattccccccttcaatgtggtcagtgttgaatcatctacgtcatacagtgagcaagggcatactgatgaggttttgtgcgttgattatggtgtgctcgttggtgagactgcgacgtcctcgttcaagtcagctgataatcgtgtcctccaagagcaactactacagaagaatgtggaaatcaacgatttataagaaaaagtttttcacgttgagcaataactctcagcaaaagtggatatatcctctgagaaggaagctgattgtgcacatcaggagactattgatttgaaatctaaacttcagtccaaggaagctaaaattgaaaagatgaaatatgagcatctggcgagggaggctgctttggtagaggatcttcttgaagaggagtacaagaaaaagtttgatgaggcaaacaaggaactatctcttgagaatgatctagcaagcatgtgggttcttgttgctaagttgaaaagaggggctttagacacatctgatttgaatgttgatgatcgaactaaagtgtaagggcgtagagatcgccacactgttgtctcataattggtgttaataaaaaataacatggtgctgcacggaatctctactttgtcttgtaagcaggattgttctgtcggtataatttgatttgtatgtataatgtcttcatgctttacttgcccttttatga

SEQ ID NO: 36019 - DNA, 2862 bp, Zea Mays
ctgctgcttatctcgtggccgatccgcgctcgccccgtccccgcatctcgccgccgcgccccggtcagtgtgcgcttgagacatcgcccacacgagacatcgtgtgtgatgcccgcccccaacccttccccggtgtgatgcccgccgttgacgtctcttctctcgcccccatcctcctcaacctcggcgccgcccctgcccctgtcctcgatggcaaggaaacttcccccgggcataaatctcactgctcacgcgccattagcgccatacccgctacctcctctggcatgccacacgccgccatccccctagcccatcgtgtgtcacgcgcccagatctcctatttttacgcccccacgcaacataggccatcccaccatggagcaagaaaccctagcgtagccaccaaccactgctgccccacatggcatcctgactgtggctgcatccatctcggcgcctcgcccaccacgttgcaccaccaccgccgctcctcctccccaccgcgctgtcgccctgagtaccaccgccaccgccaccgtgcatgtcgctagggccgcatctctcgatgttagggcccaaccgaacatcgtcgtcgcctccacctctgcgtctgggccaccgcaagagtttagggctcctccggggttcgagatcatgtccgaccagcagagcagcatcctcagcaccatgctcgacaaccccctccacctcggtactggcgtcttcgccctcgggtacgcaccacaccttttctcaccatccgagcattgccaaggagctcctctccatccccaacgcgcgccacgccccaccaccaacgatgaatgggtgcttcagattcactaagacgatggcgcgtctgcggcaaggagcttcagattcactgccatcagaaacttgcaggtgaggaaggagagggtccaagttcctgacctctgcatcgattgggagggtccaagttcctgacccctgcattgactgattatctttgagtttaatcattatgttgaaattggtgtgcattcaaaatattcaattgattctcacggctaccatggctcctagcgaaacttgtttatcgttggtgtatctggcgtattaatggaaaaaatttaccttctctctttgagggttccagtccatttcgttctctataattgtcacctacccttcctgagcctacttttgttgctaatgtaagaataagaaagaaaaaagcttcatctctatttgtttctgctatgcattgtgtagcttagagttgtcacttaacttacaatcttacgttggtgtaaaacagtgaccacactaaaagcacaaatgcaaggttttatagaccatgtgtgatgctgctaccactaacatgtacaaataggaaaggcaacaaaatggcttagagcaagtattttttaaagaaaaaaatgatccatttaagaaaccttttaataagttactcctgataccaactcctcaattcgcgagtgtcttcagcttcgctttctctatttgttgtatgctggtgtttcttcgtcttgtgtgtgagttggatgagaactggacaactggtaggaaccactctcagtttcagtttctgattgtgtttcactttggttcaggttgtctgcgctcttctcttagggatcgagaatcgcagggaggttcctcgcttctataagaaagatgtgcttttttatttcattttccttgtggagttgtagttcagttcagtttgtcttcatgcatggggagtgcttggttcgattgttcatagccataggtgctacagattcgtctatggccaagacagaagtttttgttttcatgatgttttcatggaagaagatggcgagaagctctctgcccttctcatagttaactcttttgattaagtgattaaccaatttagtaacacatatttaatgtttcagcttgtttggtttagacatggtccctcagtaaattttttatttttttattatctttatccataaactaagttggtatgtagtgacgggtaagaaatactgtggtggtttggacctcagttattggccagatgaagggcgaaggccattatcagatcctcgtccacctttgggctattgctgacaagtggacgagtgtcgtacacctctccaattccccccttcaatgtggtcagtgttgaatcatctacgtcatacagtgagcaagggcatactgatgagggatgacatggatttttctcgttcgagcatcaggttttgtgcgttgattatggtgtgctcgttggtgagactgcgacgtcctcgttcaagtcagctgataatcgtgtcctccaagagcaactactacagaagaatgtggaaatcaacgatttataagaaaaagtttttcacgttgagcaataactctcagcaaaagtggatatatcctctgagaaggaagctgattgtgcacatcaggagactattgatttgaaatctaaacttcagtccaaggaagctaaaattgaaaagatgaaatatgagcatctggcgagggaggctgctttggtagaggatcttcttgaagaggagtacaagaaaaagtttgatgaggcaaacaaggaactatctcttgagaatgatctagcaagcatgtgggttcttgttgctaagttgaaaagaggggctttagacacatctgatttgaatgttgatgatcgaactaaagtgtaagggcgtagagatcgccacactgttgtctcataattggtgttaataaaaaataacatggtgctgcacggaatctctactttgtcttgtaagcaggattgttctgtcggtataatttgatttgtatgtataatgtcttcatgctttacttgcccttttatga

SEQ ID NO: 36020 - DNA, 1556 bp, Zea Mays
ctgctgcttatctcgtggccgatccgcgctcgccccgtccccgcatctcgccgccgcgccccggtcagtgtgcgcttgagacatcgcccacacgagacatcgtgtgtgatgcccgcccccaacccttccccggtgtgatgcccgccgttgacgtctcttctctcgcccccatcctcctcaacctcggcgccgcccctgcccctgtcctcgatggcaaggaaacttcccccgggcataaatctcactgctcacgcgccattagcgccatacccgctacctcctctggcatgccacacgccgccatccccctagcccatcgtgtgtcacgcgcccagatctcctatttttacgcccccacgcaacataggccatcccaccatggagcaagaaaccctagcgtagccaccaaccactgctgccccacatggcatcctgactgtggctgcatccatctcggcgcctcgcccaccacgttgcaccaccaccgccgctcctcctccccaccgcgctgtcgccctgagtaccaccgccaccgccaccgtgcatgtcgctagggccgcatctctcgatgttagggcccaaccgaacatcgtcgtcgcctccacctctgcgtctgggccaccgcaagagtttagggctcctccggggttcgagatcatgtccgaccagcagagcagcatcctcagcaccatgctcgacaaccccctccacctcggtactggcgtcttcgccctcggttattggccagatgaagggcgaaggccattatcagatcctcgtccacctttgggctattgctgacaagtggacgagtgtcgtacacctctccaattccccccttcaatgtggtcagtgttgaatcatctacgtcatacagtgagcaagggcatactgatgagggaagggatgacatggatttttctcgttcgagcatcaggttttgtgcgttgattatggtgtgctcgttggtgagactgcgacgtcctcgttcaagtcagctgataatcgtgtcctccaagagcaactactacagaagaatgtggaaatcaacgatttataagaaaaagtttttcacgttgagcaataactctcagcaaaagtggatatatcctctgagaaggaagctgattgtgcacatcaggagactattgatttgaaatctaaacttcagtccaaggaagctaaaattgaaaagatgaaatatgagcatctggcgagggaggctgctttggtagaggatcttcttgaagaggagtacaagaaaaagtttgatgaggcaaacaaggaactatctcttgagaatgatctagcaagcatgtgggttcttgttgctaagttgaaaagaggggctttagacacatctgatttgaatgttgatgatcgaactaaagtgtaagggcgtagagatcgccacactgttgtctcataattggtgttaataaaaaataacatggtgctgcacggaatctctactttgtcttgtaagcaggattgttctgtcggtataatttgatttgtatgtataatgtcttcatgctttacttgcccttttatga

SEQ ID NO: 36021 - DNA, 2149 bp, Zea Mays
ctgctgcttatctcgtggccgatccgcgctcgccccgtccccgcatctcgccgccgcgccccggtcagtgtgcgcttgagacatcgcccacacgagacatcgtgtgtgatgcccgcccccaacccttccccggtgtgatgcccgccgttgacgtctcttctctcgcccccatcctcctcaacctcggcgccgcccctgcccctgtcctcgatggcaaggaaacttcccccgggcataaatctcactgctcacgcgccattagcgccatacccgctacctcctctggcatgccacacgccgccatccccctagcccatcgtgtgtcacgcgcccagatctcctatttttacgcccccacgcaacataggccatcccaccatggagcaagaaaccctagcgtagccaccaaccactgctgccccacatggcatcctgactgtggctgcatccatctcggcgcctcgcccaccacgttgcaccaccaccgccgctcctcctccccaccgcgctgtcgccctgagtaccaccgccaccgccaccgtgcatgtcgctagggccgcatctctcgatgttagggcccaaccgaacatcgtcgtcgcctccacctctgcgtctgggccaccgcaagagtttagggctcctccggggttcgagatcatgtccgaccagcagagcagcatcctcagcaccatgctcgacaaccccctccacctcggtactggcgtcttcgccctcgggtacgcaccacaccttttctcaccatccgagcattgccaaggagctcctctccatccccaacgcgcgccacgccccaccaccaacgatgaatgggtgcttcagattcactaagacgatggcgcgtctgcggcaaggagcttcagattcactgccatcagaaacttgcaggttgtctgcgctcttctcttagggatcgagaatcgcagggaggttcctcgcttctataagaaagatgtgcttttttatttcattttccttgtggagttgtagttcagttcagtttgtcttcatgcatggggagtgcttggttcgattgttcatagccataggtgctacagattcgtctatggccaagacagaagtttttgttttcatgatgttttcatggaagaagatggcgagaagctctctgcccttctcatagttaactcttttgattaagtgattaaccaatttagtaacacatatttaatgtttcagcttgtttggtttagacatggtccctcagtaaattttttatttttttattatctttatccataaactaagttggtatgtagtgacgggtaagaaatactgtggtggtttggacctcagttattggccagatgaagggcgaaggccattatcagatcctcgtccacctttgggctattgctgacaagtggacgagtgtcgtacacctctccaattccccccttcaatgtggtcagtgttgaatcatctacgtcatacagtgagcaagggcatactgatgagggatgacatggatttttctcgttcgagcatcaggttttgtgcgttgattatggtgtgctcgttggtgagactgcgacgtcctcgttcaagtcagctgataatcgtgtcctccaagagcaactactacagaagaatgtggaaatcaacgatttataagaaaaagtttttcacgttgagcaataactctcagcaaaagtggatatatcctctgagaaggaagctgattgtgcacatcaggagactattgatttgaaatctaaacttcagtccaaggaagctaaaattgaaaagatgaaatatgagcatctggcgagggaggctgctttggtagaggatcttcttgaagaggagtacaagaaaaagtttgatgaggcaaacaaggaactatctcttgagaatgatctagcaagcatgtgggttcttgttgctaagttgaaaagaggggctttagacacatctgatttgaatgttgatgatcgaactaaagtgtaagggcgtagagatcgccacactgttgtctcataattggtgttaataaaaaataacatggtgctgcacggaatctctactttgtcttgtaagcaggattgttctgtcggtataatttgatttgtatgtataatgtcttcatgctttacttgcccttttatga

SEQ ID NO: 36022 - DNA, 2055 bp, Zea Mays
cccactgctgcttatctcgtggccgatccgcgctcgccccgtccccgcatctcgccgccgcgccccggtcagtgtgcgcttgagacatcgcccacacgagacatcgtgtgtgatgcccgcccccaacccttccccggtgtgatgcccgccgttgacgtctcttctctcgcccccatcctcctcaacctcggcgccgcccctgcccctgtcctcgatggcaaggaaacttcccccgggcataaatctcactgctcacgcgccattagcgccatacccgctacctcctctggcatgccacacgccgccatccccctagcccatcgtgtgtcacgcgcccagatctcctatttttacgcccccacgcaacataggccatcccaccatggagcaagaaaccctagcgtagccaccaaccactgctgccccacatggcatcctgactgtggctgcatccatctcggcgcctcgcccaccacgttgcaccaccaccgccgctcctcctccccaccgcgctgtcgccctgagtaccaccgccaccgccaccgtgcatgtcgctagggccgcatctctcgatgttagggcccaaccgaacatcgtcgtcgcctccacctctgcgtctgggccaccgcaagagtttagggctcctccggggttcgagatcatgtccgaccagcagagcagcatcctcagcaccatgctcgacaaccccctccacctcggtactggcgtcttcgccctcggattcactaagacgatggcgcgtctgcggcaaggagcttcagattcactgccatcagaaacttgcaggttgtctgcgctcttctcttagggatcgagaatcgcagggaggttcctcgcttctataagaaagatgtgcttttttatttcattttccttgtggagttgtagttcagttcagtttgtcttcatgcatggggagtgcttggttcgattgttcatagccataggtgctacagattcgtctatggccaagacagaagtttttgttttcatgatgttttcatggaagaagatggcgagaagctctctgcccttctcatagttaactcttttgattaagtgattaaccaatttagtaacacatatttaatgtttcagcttgtttggtttagacatggtccctcagtaaattttttatttttttattatctttatccataaactaagttggtatgtagtgacgggtaagaaatactgtggtggtttggacctcagttattggccagatgaagggcgaaggccattatcagatcctcgtccacctttgggctattgctgacaagtggacgagtgtcgtacacctctccaattccccccttcaatgtggtcagtgttgaatcatctacgtcatacagtgagcaagggcatactgatgagggaagggatgacatggatttttctcgttcgagcatcaggttttgtgcgttgattatggtgtgctcgttggtgagactgcgacgtcctcgttcaagtcagctgataatcgtgtcctccaagagcaactactacagaagaatgtggaaatcaacgatttataagaaaaagtttttcacgttgagcaataactctcagcaaaagtggatatatcctctgagaaggaagctgattgtgcacatcaggagactattgatttgaaatctaaacttcagtccaaggaagctaaaattgaaaagatgaaatatgagcatctggcgagggaggctgctttggtagaggatcttcttgaagaggagtacaagaaaaagtttgatgaggcaaacaaggaactatctcttgagaatgatctagcaagcatgtgggttcttgttgctaagttgaaaagaggggctttagacacatctgatttgaatgttgatgatcgaactaaagtgtaagggcgtagagatcgccacactgttgtctcataattggtgttaataaaaaataacatggtgctgcacggaatctctactttgtcttgtaagcaggattgttctgtcggtataatttgatttgtatgtataatgtcttcatgctttacttgcccttttatga

SEQ ID NO: 36023 - DNA, 2871 bp, Zea Mays
cccactgctgcttatctcgtggccgatccgcgctcgccccgtccccgcatctcgccgccgcgccccggtcagtgtgcgcttgagacatcgcccacacgagacatcgtgtgtgatgcccgcccccaacccttccccggtgtgatgcccgccgttgacgtctcttctctcgcccccatcctcctcaacctcggcgccgcccctgcccctgtcctcgatggcaaggaaacttcccccgggcataaatctcactgctcacgcgccattagcgccatacccgctacctcctctggcatgccacacgccgccatccccctagcccatcgtgtgtcacgcgcccagatctcctatttttacgcccccacgcaacataggccatcccaccatggagcaagaaaccctagcgtagccaccaaccactgctgccccacatggcatcctgactgtggctgcatccatctcggcgcctcgcccaccacgttgcaccaccaccgccgctcctcctccccaccgcgctgtcgccctgagtaccaccgccaccgccaccgtgcatgtcgctagggccgcatctctcgatgttagggcccaaccgaacatcgtcgtcgcctccacctctgcgtctgggccaccgcaagagtttagggctcctccggggttcgagatcatgtccgaccagcagagcagcatcctcagcaccatgctcgacaaccccctccacctcggtactggcgtcttcgccctcgggtacgcaccacaccttttctcaccatccgagcattgccaaggagctcctctccatccccaacgcgcgccacgccccaccaccaacgatgaatgggtgcttcagattcactaagacgatggcgcgtctgcggcaaggagcttcagattcactgccatcagaaacttgcaggtgaggaaggagagggtccaagttcctgacctctgcatcgattgggagggtccaagttcctgacccctgcattgactgattatctttgagtttaatcattatgttgaaattggtgtgcattcaaaatattcaattgattctcacggctaccatggctcctagcgaaacttgtttatcgttggtgtatctggcgtattaatggaaaaaatttaccttctctctttgagggttccagtccatttcgttctctataattgtcacctacccttcctgagcctacttttgttgctaatgtaagaataagaaagaaaaaagcttcatctctatttgtttctgctatgcattgtgtagcttagagttgtcacttaacttacaatcttacgttggtgtaaaacagtgaccacactaaaagcacaaatgcaaggttttatagaccatgtgtgatgctgctaccactaacatgtacaaataggaaaggcaacaaaatggcttagagcaagtattttttaaagaaaaaaatgatccatttaagaaaccttttaataagttactcctgataccaactcctcaattcgcgagtgtcttcagcttcgctttctctatttgttgtatgctggtgtttcttcgtcttgtgtgtgagttggatgagaactggacaactggtaggaaccactctcagtttcagtttctgattgtgtttcactttggttcaggttgtctgcgctcttctcttagggatcgagaatcgcagggaggttcctcgcttctataagaaagatgtgcttttttatttcattttccttgtggagttgtagttcagttcagtttgtcttcatgcatggggagtgcttggttcgattgttcatagccataggtgctacagattcgtctatggccaagacagaagtttttgttttcatgatgttttcatggaagaagatggcgagaagctctctgcccttctcatagttaactcttttgattaagtgattaaccaatttagtaacacatatttaatgtttcagcttgtttggtttagacatggtccctcagtaaattttttatttttttattatctttatccataaactaagttggtatgtagtgacgggtaagaaatactgtggtggtttggacctcagttattggccagatgaagggcgaaggccattatcagatcctcgtccacctttgggctattgctgacaagtggacgagtgtcgtacacctctccaattccccccttcaatgtggtcagtgttgaatcatctacgtcatacagtgagcaagggcatactgatgagggaagggatgacatggatttttctcgttcgagcatcaggttttgtgcgttgattatggtgtgctcgttggtgagactgcgacgtcctcgttcaagtcagctgataatcgtgtcctccaagagcaactactacagaagaatgtggaaatcaacgatttataagaaaaagtttttcacgttgagcaataactctcagcaaaagtggatatatcctctgagaaggaagctgattgtgcacatcaggagactattgatttgaaatctaaacttcagtccaaggaagctaaaattgaaaagatgaaatatgagcatctggcgagggaggctgctttggtagaggatcttcttgaagaggagtacaagaaaaagtttgatgaggcaaacaaggaactatctcttgagaatgatctagcaagcatgtgggttcttgttgctaagttgaaaagaggggctttagacacatctgatttgaatgttgatgatcgaactaaagtgtaagggcgtagagatcgccacactgttgtctcataattggtgttaataaaaaataacatggtgctgcacggaatctctactttgtcttgtaagcaggattgttctgtcggtataatttgatttgtatgtataatgtcttcatgctttacttgcccttttatga

SEQ ID NO: 36024 - DNA, 1143 bp, Zea Mays
ccgatgtcatgggtccatggctggggcagagagccaatgcggagttgttaataggatctgcctgtttcaatgcagctgacataaaagagcaattaaaactcaacatattcatggtcaggtgactttggatgtaaaaaatcatttgtgtggcttatatgcattagaattcagagaacataacatttcatttggagctaaatttgcttggtaggaaaacaggaggcagacagtgttacatcttggtagggttaacccaagcacataatggagttcaggtaatgagaaaaacctgacagcaattattccagttctcgtgatccatgttcatctctggagtatgtgttctacacatagcgctgaccggctaccaagcgttctacatttgcctggcatcgattgacgcaaagctatgtttgtaccctgcgaaatgggatgcaaagtgttttcacagctgatgtaatctattcgattatgtaattccagtttcaaatcatgcaatatgctactaccattttgtaactccaacgttggttaatcgatcaagcaaatatttttatcataaaaatagcaaatagtctatctaaacaactgttgcatttatctaacattctgttagaactacaaaggcagcatgtatacacttggcaatgatagccttggcacagttaacattttatctacactcatcatccacacttgagggcagcatgactgtttgtcgcaaacatattgtcaatttgtcattctcccttttatccttgcacttcccccagcctatatgcatacatgagcagaactaatgtttaccaccacactaatgaaagacaatgatgggagatcgcaactataacatttctactaaaatgttcaactacatgtatttaaatgtttatgtaatacaagtcttgcacaaagaaatcaattcaaatgattgtcagcttcatatcaactcttagtcactcggaactaaaaatcttgatcaatgtcggtcagatgttgacaagaggcaaggttcaaaaggaaaaaggaaatcaccccataggtgagccacttgccatatatgttttatgtttaggaggatgacaaaccaaggatggcagagtcctcaccatacgaaaactactctggcttaatcttcctcac

SEQ ID NO: 36025 - DNA, 2235 bp, Zea Mays
gttttaatatatgatggatttgaatttaaaattttatacaatgatagagtaggcaataaaatacattcataacatttttgatattttttgtgacttttgttagttagtttgtatggtatttgcacaaaaaattggtttgcacttgatacgttgcctagttttatggggtcgatccaaacaaggattagtaaaccatagttagaaatagttgcggtatatatagacttttttgtaaaactaaaagattgatgaataaacactgtatcgagccacgttatactaaggagacgtttatgacttatccactctatatttttcagtttcattctatactttttagttagttaggttcggtttctgttccacgcctaaaagagtgttccataaaattctataatttcctgtacagctgctttacggtgaagtttagcgagtacaattacagtcctaaatatctatatattatagaactagtacagtgcccgtgtgttgcgacggcacagaaaaatcttgacataattctagcatccattcaaccatttagggtagtgttaaaaaatatcaagacaataaaaaattgtaattctataaccaaatcattacgaaaattgaagatgagaatcatttggaccctagccattgtcgtaataatgatattggttgccccaaactataatgatcataattcttcttgtccaaacttctagcgccttgacgtgtcagagtcgaactgttcaaccttaactgaaacctcgaatccagtagtgctttgtgcatctatcgaacataacgatgtcctgctaatgtggtccagttcagaaaaccgttcctatgcctatgttcaaaaggtaaaagagaaatcatcaaagcacaagttcgatatacaataccacttgatgaaagcaataaagatacaaacaggtttgatagccaaaagaaaaggcaacaaactctgccaaactaaagttccaacaacttcaacattaataaaagaacctcgattaataaacaaactctgcagaactgtaagctccagacttcatttgtattatcatctacatttgcaacatgagaacttggtcttcgatttatacctttattagacatcttatttgcaccctatttctcatatttattgttttccctttgttcaaatcaaaaggtgttatgacttcattattcgcatattattctacaggaaatgattgcttgctccacgttgttcgggagaaggtgcggccgtgtaggtgaacttgaaatattccctttggaaatgttgttagataattcggccttcaaaattgatttggttggggtgatagcagcagctggagcaagtgaataaacgacacaccttaaacataaataaatgagacgaattcagtttatgtgcatgtctgagcagagaagcaagggtaggctcacgttgggctgactggggcacggggtcccactcaattttctggtttcagtggagtttttatcttattcattgtagctataaaggtccattagtaagtaggtttctatttaggccccactcaggttttgggccccactcaaacttctcgctttgctcgccacttcaaagaaggggtaatgtagttgggagcatgtagcatatgtgctgagcactcgggctattcttgacttcctgtactataaagaggatgtcacatatgatgcaagctactgtactgccagaagaagagaaatattttgccgcagtacatggggccaatggtttcaacttttaagtccctttctacatcccacctgtctttttctgtctcgagaaatttggccactttgtattgactaatatttcttgtatttgagtttggttttctgcttcctcgctaagagaaaaatggagggtctaggggcatgcacatgataattaggtattgtcctactgcagcattttcttctatgctttcattgtttctgaaatatttagactcacaccagaaaactggatttccactacaggtgttatcttgcaggtgtgaatcattaattggatctcttgtgaggtactttaatagatcatagaagatgcagatagtatgatagttactgttgaagaaagtattatatcagttagcttttggcaacatggatttgaattatcaaagtaccaactcgcagatcagaattttcgaaattatattaatactatctccaccgaaaaagagagacgttctggttttattttaagtgaaatgtcttacg

SEQ ID NO: 36026 - DNA, 230 bp, Zea Mays
gaccgcgcgcaggtgacggctggtgaattccaccgcggatagtcccaccgactccctcgcctatgcctcggtctggtgcttcaattgtgtaagggaagttaaaagctaggagggggaaagaggggcccgggcttcctttgtacccggtccagaagggtggtctagtctacccagttccgcggatttcgcggcgaagtggtcgcggcgcccgatttccacggcgagcgatc

SEQ ID NO: 36027 - DNA, 3354 bp, Zea Mays
cgcggcttgatttcacttggccctctagcgttgtttggtcaatcctctctctcccttccccatctccccgtaccccaaaccctaggacgcagcgccgccgccgtagcacccccacacgcagcaagatgaggccgcgcggcaggggcgacgacgtcgaagacgacgaggatgagtacgaggacatcacgccccctcgaagaacgccagagcctgaggccgaccccgtccgctcgccctcgccctcgcccgctcctgcccccgccccaccacatcccgcgcgtgcccctctcagcagtctcgttgtcaggccgccgccgcagcaacaggagaacggcggcggatcctccccgccctcatcctccgcccgctcgctttctcccagcaccggcggacaccgaggccgcggggcctcgcccccgcggcgacggcgggacttctcaccgccgcctccccgtggttgggtgaggcgccggtcgccgctgccgccaccgccggagaggcggcgtcctgggagcccgccgccccagcgccgacgcttcagcccaccgccccggtcccacctaccgcggcatccgcgcttccacgatgagcaggaagtgtaattgccaagcactgcaatctccagtaaaatatcaaatgaagtatggagtttgctgttgtactggaacactttccaacttgagttgcttggatgccattccttttcaaggaggacattattgctgatgctttggtattgtgctacctgatggtttgattaaattttccagcatagtgatgtggaagtattctgcctcgctgacacaaattttatgaaaaggcagacatttgcatgtgcagtatgtcgcgctctgaagttttggagttttgagaattgagataacatcgagtgaaggaatgagatggacttgaggtcatagtattaacacaacttgggcgtgttagtgtttaggcaatgcctagcaacataatgagtggaattagcttgaccatggatacgtagaaacttgaggaggacatcatcactcgccagttggtccgtactgtcatcaatatttcaaccgttgatttttggagatcagggcagaaatcaggaagctgtggttccagtgcttatctaaactaaagttgcatgcttgatgttgttagtatggaactgggtttagacatttataatatgaattcgaaaatgaccaacccaccctttcgagtttttttttggtaatttgtgttttctgcacaagccaagtcatcaggtatattttagacgtaggattatgccattttgtttgccagtctttgaacaacttgttagatgcttcagaggctgggacaatgacgttgggagaagaatgtaactagctgttctagaggcttatttgcaagtgaattgctgggcatattcacatcttcatgatttgaagcctcaaggatgttcatatagcatcgatattggagctgtctcctgtgcaatgtgagacattccaactactacttggtatacttgtaagctgaagttgcttttacagtcgagaaacagaaccaaggtgattggtgtggaacaccactttgtagcattcacagtaacatagcattcctggtgttttaccttttcccagttcaggttggaagttggaactcttcaagtaggtcccagtggggattagcttcgtggcacttggtgctttcttaatcttgtgcagtcatgtggagggagaagtattcggtcttgaagcgacctccttgattctaatatttgagatgccatcaagaatctgttgcagtggtctatatgtcattgacctgtcaaatgtttgtttgagttaacttgcaaatggaattgtgggatcctacattggctaaaggaattaagattttcttagcaacatcaactccactctttggacacgtagctactaattacaccgtgaactaccagaaggccgctattcagttgagctgcagtggcaatggatatggaatgcatgcaggcccttcgccaccacgcagagcagaagccagcaaatttgatgatgatgttagtccacgttacactcatggatatcaagggggtggtagaggaggtgcaaggttccgagagggtcctccaccatatggaagaggtagatcatatgggagaggttatggtgctccacatggaaaggatttgattaatattgatggagaatatgttcaccgaaatgacccaaatctgtcgccaagagaagttgtggaaatctcaattttgctcggcgaactcactgtaacaactgcaacaagttccgctattcagcacgtgaagcatatgaacctaggcgcagccctcccttcaggagttaccccagccctccacgagggcctccaaggatggttggtccacctggtgatcgagcccctgcaagagagatggccaggtacagatccccacctcatggttggggagcaagtgatcccagggcatatgcaggtcgatcccctccagaacgtgcaggacggtttacagatccatcaactaagggaagaatgggcttccgtggtgagcgtgacccaagggaccgtgtgaaatatgagtggtctgccactgatgactacgttcagagggagcgcccatatgatggttatcttgacaggagtcggcgtcgctcaggatctcctcgtggtaactggggaaatgatctgcgtgacagaagccgctctcctgcacggaacaggcctatgaagagttccttcaccggaagaggtcgacctgacgactatgctgctgatccatatggcagccgagggagacccaatggtatggaggccggccgtgggcgtgggcatgcttacagagcaggcagtggtccgtaccctggtgagactcgaggtgaccaacgcgctgctccacgcgctaggaacgaggatggctattagatcttcatgaagctgagtgacgtcattttgtctttgttggtcaggaaaggagaaccttagtcaagctggagcttgagaatatctgcagcttgtaatattaaagatcgtgcacacatcctgttcctgcatgttgtggagttatggttggcttctctcatgctcagtggtgggatctattaaagggtcatgggtggacacatatacacccaataatttctgcaaaaaaaattagtactcatcaagtagcaaataacgttctattgccgtgattctaagcgtctgtttagaagtatccagtttttaagaaactggtttatgtaaattgaggtggtttatagaaattggattcccatttcttaaaaaccaagaagctggccacttctaactaaaaaataaaattgcttccaaataggaccaaaatattttgaccttaccatttgt

SEQ ID NO: 36028 - DNA, 4947 bp, Zea Mays
cgcggcttgatttcacttggccctctagcgttgtttggtcaatcctctctctcccttccccatctccccgtaccccaaaccctaggacgcagcgccgccgccgtagcacccccacacgcagcaagatgaggccgcgcggcaggggcgacgacgtcgaagacgacgaggatgagtacgaggacatcacgccccctcgaagaacgccagagcctgaggccgaccccgtccgctcgccctcgccctcgcccgctcctgcccccgccccaccacatcccgcgcgtgcccctctcagcagtctcgttgtcaggccgccgccgcagcaacaggagaacggcggcggatcctccccgccctcatcctccgcccgctcgctttctcccagcaccggcggacaccgaggccgcggggcctcgcccccgcggcgacggcgggacttctcaccgccgcctccccgtggttgggtgaggcgccggtcgccgctgccgccaccgccggagaggcggcgtcctgggagcccgccgccccagcgccgacgcttcagcccaccgccccggtcccacctaccgcggcatccgcgcttccacgatgagcaggaaggtttgttgcaaatcctccaatctttctcttttcttgcaaaatgtttattataagtcattggaagctcgatccagtttaagtcgatttgtacatctccttatgtactatattgctgttttcgcacacccgtattttctttactttatttttatttgattctgattaatgcgcgttctgtgcgatgctgatgattccttaccttgaaggatacatctcttttttcgttttgaaggattaatcttctttattacaactaaatgcacggttgtatttcttgtggtgatattgattggaagtcatgtgattttacatagttatgtggcgactggcgatatatgtggaggacatgatgcttgttttaagctatgcaacacatgtatttaaattgctatcaacttattccatggctgttccaatagcagcacctttttattcttttagggcttctgtgctatgttcagatttcatcaagtgaaagttatgcaatggtggtttagttatgtatttgctcacatatatattgtccagagatgattttggctccagaacttcaactctctttttgattgcaatcgcaaagtttacaaacaacagttgctgttgcttgtaattgctaatacatattggaaatctaatgaccagcttgttgttggaatatactaatattgtatgggatggatataaatacttttgtgtgcattagtagctgaagtttgaaagatcaactgcatggaccaggagcaaaaacagaacagatatgacatagtttgatgatcatttttatatgtttcaagttgttattgcaattgggttctgttgcttctaatgggttgaagcagctagcaaatgctatctgaacaatctcttatattggtctaaagctcagaacggtatttgtggttcatgttgcttgatatatttaatatgaaattgccatgactcttagatgtgttttcctcttttgggtcatttcatgccttatttgcaagaagccatagaagatatgaatcatatagtttgtgtcatatttcatattaataatgtcaagtttgtttccacaagatttgcatgatatgttgttatccttgtattatgcatgattcctcatatcttaggtgctaatgtgctgtacaatttgcatcactcaaacaatgaaccatttagtgaaattcttttacctgcttctctcttctgttgattttattttattgtaaatgtagaactgtgcttttttttgtttgaactgttcgctaaacagactgctcatcatctttgaagtataatatgcataaatagactgcccgttacctttatttgaagtatagtatgcataaatagttatattgatcttgtgtgcaaatgctcatcatctttgaagtatagtatgcacacaagatctagcatttgaggaattgtcatggagtacagttaagacctttatttaatagtatattagtattgtgttatcatcatgatagttttatggatactttataactatattatatatttttactaatttctagttcagtttattctcagcatttcagcttccttcatttaccaaatataagtggtaccatgatttcatcatgttacacagtatgtctcttgacatctagcagtatcctgccgctatataactgctaaatggtttattttatataactagatatattattgttaattgttaaagaaccataattctaggaaaatgtttcacacagtgtgaatgtctgaaaccacctgatatgcttgaaaagttgttaatatcttctaatactctgctggcttggatgtccagtgtaattgccaagcactgcaatctccagtaaaatatcaaatgaagtatggagtttgctgttgtactggaacactttccaacttgagttgcttggatgccattccttttcaaggaggacattattgctgatgctttgacatttgcatgtgcagtatgtcgcgctctgaagttttggagttttgagaattgagataacatcgagtgaaggaatgagatggacttgaggtcatagtattaacacaacttgggcgtgttagtgtttaggcaatgcctagcaacataatgagtggaattagcttgaccatggatacgtagaaacttgaggaggacatcatcactcgccagttggtccgtactgtcatcaatatttcaaccgttgatttttggagatcagggcagaaatcaggaagctgtggttccagtgcttatctaaactaaagttgcatgcttgatgttgttagtatggaactgggtttagacatttataatatgaattcgaaaatgaccaacccaccctttcgagtttttttttggtaatttgtgttttctgcacaagccaagtcatcaggtatattttagacgtaggattatgccattttgtttgccagtctttgaacaacttgttagatgcttcagaggctgggacaatgacgttgggagaagaatgtaactagctgttctagaggcttatttgcaagtgaattgctgggcatattcacatcttcatgatttgaagcctcaaggatgttcatatagcatcgatattggagctgtctcctgtgcaatttcaggttggaagttggaactcttcaagtaggtcccagtggggattagcttcgtggcacttggtgctttcttaatcttgtgcagtcatgtggagggagaagtattcggtcttgaagcgacctccttgattctaatatttgagatgccatcaagaatctgttgcagtggtctatatgtcattgacctgtcaaatgtttgtttgagttaacttgcaaatggaattgtgggatcctacattggctaaaggaattaagattttcttagcaacatcaactccactctttggacacgtagctactaattacaccgtgaactaccagaaggccgctattcagttgagctgcagtggcaatggatatggaatgcatgcaggcccttcgccaccacgcagagcagaagccagcaaatttgatgatgatgttagtccacgttacactcatggatatcaagggggtggtagaggaggtgcaaggttccgagagggtcctccaccatatggaagaggtagatcatatgggagaggttatggtgctccacatggaaaggatttgattaatattgatggagaatatgttcaccgaaatgacccaaatctgtcgccaagagaaggtgattggatatgccagaaccctaattgtggaaatctcaattttgctcggcgaactcactgtaacaactgcaacaagttccgctattcagcacgtgaagcatatgaacctaggcgcagccctcccttcaggagttaccccagccctccacgagggcctccaaggatggttggtccacctggtgatcgagcccctgcaagagagatggccaggtacagatccccacctcatggttggggagcaagtgatcccagggcatatgcaggtcgatcccctccagaacgtgcaggacggtttacagatccatcaactaagggaagaatgggcttccgtggtgagcgtgacccaagggaccgtgtgaaatatgagtggtctgccactgatgactacgttcagagggagcgcccatatgatggttatcttgacaggagtcggcgtcgctcaggatctcctcgtggtaactggggaaatgatctgcgtgacagaagccgctctcctgcacggaacaggcctatgaagagttccttcaccggaagaggtcgacctgacgactatgctgctgatccatatggcagccgagggagacccaatggtatggaggccggccgtgggcgtgggcatgcttacagagcaggcagtggtccgtaccctggtgagactcgaggtgaccaacgcgctgctccacgcgctaggaacgaggatggctattagatcttcatgaagctgagtgacgtcattttgtctttgttggtcaggaaaggagaaccttagtcaagctggagcttgagaatatctgcagcttgtaatattaaagatcgtgcacacatcctgttcctgcatgttgtggagttatggttggcttctctcatgctcagtggtgggatctattaaagggtcatgggtggacacatatacacccaataatttctgcaaaaaaaattagtactcatcaagtagcaaataacgttctattgccgtgattctaagcgtctgtttagaagtatccagtttttaagaaactggtttatgtaaattgaggtggtttatagaaattggattcccatttcttaaaaaccaagaagctggccacttctaactaaaaaataaaattgcttccaaataggaccaaaatattttgaccttaccatttgt

SEQ ID NO: 36029 - DNA, 3724 bp, Zea Mays
cttagatgattatagtagtattgatacaaatatattttacccacgagtaaacgggtatgggtagtactaacccgtacccgtctacccaacaggtagaggttgttgcccattaacatactcgcgggtaaaaaaatcatcacggactcacctttatatcaagtaaaacctattagatattcgagtttcaggtacctgttacatccttgatgtttgagagttcgtaacagcttcttatagcctgacagacaaaaaaaaaaggaaaaaaaagctgaaacaggtaaaaaaaatgggcggactccggctggacttcaaaaccacgcgttggatacactccgaaaccgcggcttgatttcacttggccctctagcgttgtttggtcaatcctctctctcccttccccatctccccgtaccccaaaccctaggacgcagcgccgccgccgtagcacccccacacgcagcaagatgaggccgcgcggcaggggcgacgacgtcgaagacgacgaggatgagtacgaggacatcacgccccctcgaagaacgccagagcctgaggccgaccccgtccgctcgccctcgccctcgcccgctcctgcccccgccccaccacatcccgcgcgtgcccctctcagcagtctcgttgtcaggccgccgccgcagcaacaggagaacggcggcggatcctccccgccctcatcctccgcccgctcgctttctcccagcaccggcggacaccgaggccgcggggcctcgcccccgcggcgacggcgggacttctcaccgccgcctccccgtggttgggtgaggcgccggtcgccgctgccgccaccgccggagaggcggcgtcctgggagcccgccgccccagcgccgacgcttcagcccaccgccccggtcccacctaccgcggcatccgcgcttccacgatgagcaggaagtgtaattgccaagcactgcaatctccagtaaaatatcaaatgaagtatggagtttgctgttgtactggaacactttccaacttgagttgcttggatgccattccttttcaaggaggacattattgctgatgctttggtattgtgctacctgatggtttgattaaattttccagcatagtgatgtggaagtattctgcctcgctgacacaaattttatgaaaaggcagacatttgcatgtgcagtatgtcgcgctctgaagttttggagttttgagaattgagataacatcgagtgaaggaatgagatggacttgaggtcatagtattaacacaacttgggcgtgttagtgtttaggcaatgcctagcaacataatgagtggaattagcttgaccatggatacgtagaaacttgaggaggacatcatcactcgccagttggtccgtactgtcatcaatatttcaaccgttgatttttggagatcagggcagaaatcaggaagctgtggttccagtgcttatctaaactaaagttgcatgcttgatgttgttagtatggaactgggtttagacatttataatatgaattcgaaaatgaccaacccaccctttcgagtttttttttggtaatttgtgttttctgcacaagccaagtcatcaggtatattttagacgtaggattatgccattttgtttgccagtctttgaacaacttgttagatgcttcagaggctgggacaatgacgttgggagaagaatgtaactagctgttctagaggcttatttgcaagtgaattgctgggcatattcacatcttcatgatttgaagcctcaaggatgttcatatagcatcgatattggagctgtctcctgtgcaatgtgagacattccaactactacttggtatacttttcaggttggaagttggaactcttcaagtaggtcccagtggggattagcttcgtggcacttggtgctttcttaatcttgtgcagtcatgtggagggagaagtattcggtcttgaagcgacctccttgattctaatatttgagatgccatcaagaatctgttgcagtggtctatatgtcattgacctgtcaaatgtttgtttgagttaacttgcaaatggaattgtgggatcctacattggctaaaggaattaagattttcttagcaacatcaactccactctttggacacgtagctactaattacaccgtgaactaccagaaggccgctattcagttgagctgcagtggcaatggtatttccttctcagaaatgtggaccttgcaattataacttcgttcagcatatgaagagtagctcttctgaaagtagttctcatgaagtggttgcctgtttcagttccatgtgactggtgatatggaatgcatgcaggcccttcgccaccacgcagagcagaagccagcaaatttgatgatgatgttagtccacgttacactcatggatatcaagggggtggtagaggaggtgcaaggttccgagagggtcctccaccatatggaagaggtagatcatatgggagaggttatggtgctccacatggaaaggatttgattaatattgatggagaatatgttcaccgaaatgacccaaatctgtcgccaagagaaggtgattggatatgccagaaccctaattgtggaaatctcaattttgctcggcgaactcactgtaacaactgcaacaagttccgctattcagcacgtgaagcatatgaacctaggcgcagccctcccttcaggagttaccccagccctccacgagggcctccaaggatggttggtccacctggtgatcgagcccctgcaagagagatggccaggtacagatccccacctcatggttggggagcaagtgatcccagggcatatgcaggtcgatcccctccagaacgtgcaggacggtttacagatccatcaactaagggaagaatgggcttccgtggtgagcgtgacccaagggaccgtgtgaaatatgagtggtctgccactgatgactacgttcagagggagcgcccatatgatggttatcttgacaggagtcggcgtcgctcaggatctcctcgtggtaactggggaaatgatctgcgtgacagaagccgctctcctgcacggaacaggcctatgaagagttccttcaccggaagaggtcgacctgacgactatgctgctgatccatatggcagccgagggagacccaatggtatggaggccggccgtgggcgtgggcatgcttacagagcaggcagtggtccgtaccctggtgagactcgaggtgaccaacgcgctgctccacgcgctaggaacgaggatggctattagatcttcatgaagctgagtgacgtcattttgtctttgttggtcaggaaaggagaaccttagtcaagctggagcttgagaatatctgcagcttgtaatattaaagatcgtgcacacatcctgttcctgcatgttgtggagttatggttggcttctctcatgctcagtggtgggatctattaaagggtcatgggtggacacatatacacccaataatttctgcaaaaaaaattagtactcatcaagtagcaaataacgttctattgccgtgattctaagcgtctgtttagaagtatccagtttttaagaaactggtttatgtaaattgaggtggtttatagaaattggattcccatttcttaaaaaccaagaagctggccacttctaactaaaaaataaaattgcttccaaataggaccaaaatattttgaccttaccatttgt

SEQ ID NO: 36030 - DNA, 2237 bp, Zea Mays
taatagactctgtttgcatctggtctaatttcaccatctcatcaatacaacatcatttttattcatgaggttcacatcctgacttaggttgcagggcagcgatcaagtctccactctccggggatataacggcgatccgaatcgatttactcagctgaggatctctaaccacacgacatatgtagcacttaacccttgcatatgtcaaccgttcccacggatcctccactacatgaacaggtccacgccacccgagagcacaccaccccttttaggcgatcctttgccaggagggtacgtgccactctcgccatctctccactcccagtgcgcgattgtcttttcatgtatggaatagccgggttcaagcttaccctgtcccatatccagggcatgtggctagttaagatagtccttgatcatacaggcctacatacgcatccaatccttaactagcttgggcggagcatcacctgttcctagcccaagtcccgatttaagtacttccatccttaggattgtttgtgttccttaggatgaaaagagcatcaaagggaactttgcagtaagatcccaccatgctcttaatgaaaatattcttgcaggtagaagccatctttcctcaggataacccctgagctaggcattaatgcaaaagacaacctctatccacaagatctaagcagggctaagcatttttgtaaattatattttgatacttcacaaggaagtatctataaaggtatggatatcaaggaaggcaatgcatcaaagggtttccaagcaactcctataaacctaatgcacatttcactagacttaaagtgtgcaaaatttatttaaaaacacaaggaaggggttgcatgcaccggggcttgcctggaagaaacactaggttagtgtttgttaggtggcgaccacttggcgaccatcctttgccttggcactcgtttagtttatccatcttctggttcgttcatcagcaccatcttgtggagaagctcacgcgcggcgacatcttgtggtcgactccgctcgttttctgcggcacgcggttaatcaacgtacctaaatagtttgcataatgcacatgaatgcatataaacaagaatatcacaaacctaaataaggctacacgacaacgaattaaacacctagcggcgaggcgtttgtattatttcatacggaaactctagttatcaatatacgactacacaatgatttcacttctctagattaaccgaatctaacgcaaacatcacgaaacaataatatatacacattagtcatgattagtctaaacaccacttatcagttaattaattaatttctaaactcacccctcgctttataaattatgccctatcgctcacaaagaattgttttaatttaatttcacacctcatatattttacatgttaacaatcaattaaacatttcagatttaactaccaaaatatcctacaaaattaacgatgacaagcatagattatactaactactagcgtaggatatcgacttcatcttacgcgcactgaacacaattaacatcaatagacttattgataatggcttaaaatactaaacttaaccaacgcgttaccgaaataccacactctgcaaaatagaactagtctgaacatactcgacaactaaactcatcgaagcacatctcgcatcacttggtatttttaatttaaatttcatgagcataccaagcgtcttatttcacgatcataaaactaatactccctccgtttcgttttagttgtcgctggatagtgcaaaattaaactatccagcgacaagtaaaaagaaacggagggagtagtaagtaaaaatagcgaatcagctcaccacgtctcaattcgatttaatatttgcctaaacgacgaccggctgacgggcgcgacatccggtaggagtagagtgtagacgtgcggccaacaaggaagctgggcgagtgctggcagcacgacaacaaggagacggttgggagatggcagcgcggttcgggcaaggccacccgagtactggacgaggaaaatgacgggctcgacgacgctgtcgagttgagggcgagctcgatgagaaaaaggactcggctggggctagcatggaggcgagaacgccatggagtccggggcacggatgagcacagtggacccggtgtccaagcgccgagccggggcagactgaagaagccgaagctaggaacggtggtcgagcgctttctg

SEQ ID NO: 36031 - DNA, 3287 bp, Zea Mays
ctttagcaagaatcaacttagatacttttgcagaattagcttactaaagtgagtccttactttcaatattttagtgccagattaaatattaatagactctgtttgcatctggtctaatttcaccatctcatcaatacaacatcatttttattcatgaggttcacatcctgacttaggttgcagggcagcgatcaagtctccactctccggggatataacggcgatccgaatcgatttactcagctgaggatctctaaccacacgacatatgtagcacttaacccttgcatatgtcaaccgttcccacggatcctccactacatgaacaggtccacgccacccgagagcacaccaccccttttaggcgatcctttgccaggagggtacgtgccactctcgccatctctccactcccagtgcgcgattgtcttttcatgtatggaatagccgggttcaagcttaccctgtcccatatccagggcatgtggctagttaagatagtccttgatcatacaggcatacatacgcatccaatccttaactagcttgggcggagcatcacctgttcctagcccaagtcccgatttaagtacttccatccttaggattgtttgtgttccttaggatgaaaagagcatcaaagggaactttgcagtaagatcccaccacgctcttaataaaaatattcttgcaggtagaagccatctttcctcaggataacccctgagctaggcattaatgcaaaagacaacctctatccacaagatctaagcagggctaagcatttttgtaaattatattttgatacttcacaaggaagtatctataaaggtatggatatcaaggaaggcaatgcatcaaagggtttccaagcaactcctataaacctaatgcacatttcactagacttaaagtgtgcaaaatttatttaaaaacacaaggaaggggttgcatgcaccggggcttgcctggaagaaacactaggttagtgtttgttaggtggcgaccacttggcgaccatcctttgccttggcactcgtttagtttatccatcttctggttcgttcatcagcaccatcttgtggagaagctcacgcgcgacgacatcttgtggtcgactccgctcgttttccgcggcacgcggttaatcaacgtacctaaatggtttgcataatgcacatgaatgcatataaacaagaatatcacaaacctaaataaggctacacgacaacgaattaaacacctagcggcgaggcgtttgtattatttcatacggaaactctagttatcaatatacgactacacaatgatttcacttctctagattaaccgaatctaacgcaaacatcatgaaacaataatatatacacattagtcatgattagtctaaacaccacttatcagttaattaattaatttctaaactcacccctcgctttataaattatgccctatcgctcacaaagaattgttttaatttaatttcacacctcatatattttacatgttaacaatcaattaaacatttcaggtttaactaccaaaatatcctacaaaattaacgatgacaagcatagattatactaactactagcgtaggatatcgacttcatcttacgcgcactgaacacaattaacatcgatagacttatcgataatggcttaaaatactaaacttaaccaacgcgttaccgaaataccacactctgcaaaatagaactagtctgaacatactcgacaactaaactcatcgaagcacatctcgcatcacttggtatttttaatttaaatttcataagcataccaagcgtcttatttcacgatcataaaactaatagtaagtaaaaatagcgaatcagctcaccacctctcaattcgatttaatatttgcctgaacgacgaccggctgacgggcgcgacatccggtaggagtagagtgtagacgtgcggccaacaaggaagctgggcgagtgctggcagcacgacaacaaggagacggttgggagatggcagcgcggttcgggcaaggccacccgagtactggacgaggaaaatgacgggctcgacgacgctgtcgagttgagggcgagctcgatgagaaaaaggactcggctggggctagcatggaggcgagaacgccatggagtccggggcacggatgagcacagtggacccggtgtccaagcgccgagccggggcagactgaagaagccgacgctaggaacggcggtcgagcgctttctgggcgtgatgcagcggcagccaattgctaggggaaggagacggccgtgggagagggagcccgcaggaaatccggcgccgggaatagagaacagggaagcaggggcgcgcgctcaagcagagagcccagcgcggtgcaggagcttgaggggtgcggccatggcaagggaaaataaaacttgggcgcagggaacaaaggggatggaagataggaaaccacgacgccatggaagctccagacccgggagcaggaagccgacagaaggttgcgcgcggggaaggagagagatccggttggccgaagggagaagcaggggcgagcaggggagccagcgcggctggggagagctcgtctagcgagcatgggctgggcgcgacgcagccatggggtaaggcgaggagcagggaaccgagcagagggtctcctcgcgcggccctgtgcgtgcgactggtggagctcacccacgacgctgctgtggccagaggagaagagcaggtagataaagaagaggacaactaggcggctgaaaaaaaaatcttacagagagagaacagcaaggaactctgagagagagaaacacgcggcatcagcatagagggaggagataaggccgcgccagaggagaacggcggcggaatctccaccggcggtgagcggcggccaaaaaaatcaggcacggctgggaggagaggatgaggccgactgacgtgctgaggattagagagcgtatgcagtggccggtgatattcctttggatctttgtcgtacatggtgactagaaatatccaaatcgtacacggtgactagaaatatccaaaagaagagtagcgactaagataaaaaagagctgtgggaagataaggccaaaacaataaacaaaactaaatttcttttgtttttttttcagattttcagagatttacagatattttaaattggtatttttagcaatgtacattggatcaatacgctatttaactacgcattttattcccccgaatctcgaaacggaaatccgaggactaacgattttggctaaattttg

SEQ ID NO: 36032 - DNA, 987 bp, Zea Mays
ggaagacccacttggttcctacaacattttgattaggacgtggaactaaatgccatacctcattcctagtgaagttgttgagctcctcttgcatcgccatcacccaatccgaatcttggagtgcttcctctaccctgtgtggctcaatagaggaaacaaaagagtaatgctcacaaaaatgtgcaacccgagatcgagtggttacccccttatgaatgtcaccgaggatggtgtcgacggggtgatctcgttggattgcttggtggactcttgggtgtagcggccttggttgttcatcatccttgtcttgatcatgtgcatctcccccttgatcattgccgtcatcttgaggtggctcatctctttgatcttctccttcatcaacttgagcctcgtcctcattttgagttggtggagatgcttgcatggaggaggaaggttgatcttgtgcacttggaggctcttcggattccttaggacacacatccccaacggacatgttccttagcgcgatgcacggagcctgtttgtggcagaacctcccaagttattgggcccacatgcacctgttcttgtctcaaagacctcagactgctatgcatgtgcaccagataacttaacaggatccgtccgattgccccaaggacaccggataaaccacttacaaccagaaccgcgggattaagtaacacaaatcacacacaccaatattttgcagcggaaatcttattaccaaattttacaagttacaaaaattttacttcgtgcatgatcggagtgattactacagtgattcaaagaaagaaactttgaactgttataaattatttatagttttgaaatatatgctagctcaagtgaccatcctcaataagaagataaagacggggtatacttatataagaaggccgagcccaccggcacttaacaccatcaacagcagcacaaaactataacctgaaaaacaacagggaataaaaccctgag

SEQ ID NO: 36033 - DNA, 1272 bp, Zea Mays
attcctcctgccgacgacgagatctttgccctgctgtgccgcgagatcatgcacgcgatgtggaagcccgccaagttcaaatacatctacctgctggcgacgctgtacgtgttcacgctgacgctgccgtcgtcggcggccatgtactgggcgttcggcgacgagctgctgacccactcgaacgccttctcgctgctgcccaagacccggtggcgcgacgcggcggtgatcctgatgctgatccaccagttcatcaccttcggcttcgcgtgcacgccgctctacttcgtgtgggagaaggtgatcgggatgcacgacgccaagagcatcttcaagcgcgcgctggcgaggctgcccatcgtcgtgcccatctggttcctcgccatcatcttccccttcttcgggcccatcaactccgccgtcggcgcgctgctcgtcagcttcaccgtctacatcatcccggccctggcgcacgtcctcacctaccgcacggcgtccgcgcgcatgaacgccgcggagaagccgcccttcttcctgccgagctggacggggatgttcgtcctcaacatgttcatcgtggtgtgggtgctggtggtcggcttcgggctgggcggctgggccagcatggtcaacttcgtgaggcagatcgacacgttcgggctgttcgccaagtgctaccagtgcccgaagccgccggtcccggcggccgcgcagtcaccggcgccgctgccgcaccactagggcgcgcaggccccgtgacggcatggagctagcgtcgctgcttgcattgcagccggtgttaattgctactaggttttggtcgccttgtaatatacaagcctcctctagggtcgtagaactcgatcacagcagagtcacgcaaaggcggctcgtgccgtgccgtgccgccgccgcgttgctttcccgcccgccctcctctgcctgatcggtccgtcggcattggtgtcgttttgttttcgtttggcttgccaccggtattaaaaagttgagtgatggtcatggcttcttaatccatatgatgatatgacatacgtatcctatataggttcattagttatttttccttgttggttcgtggaggtcggtccatgttgtgtagcgtgtgggtgactgtaatggactgcgctggaatgctagctaaaggcagaaaacaaaaaaccacagtgcccttttgtttgttattgccctctgctcattagtttctcgctggaatttttattatgggcttcttcgaaaggaccacaaagcgat

SEQ ID NO: 36034 - DNA, 3366 bp, Zea Mays
gcaaggcgcttgttataaagccgcaagtggtaccatttctcactcgccctctctccgctcgctcgctctctctctcaccgaatcacacacacaggcaggccagtgaggcaggggcacgaaggcgcggctccctctctcaagcccctcgccattactcgctcataaaggaagaacagagcgagcgggtagcgaggaagaagctgggccgcggggcaagaggagagaggtccccagccgtaggtctgctgtgcaactccggctcgccgcctgccaaccgcgcggcgcggccaccacgctaggcccctcgccctcctccgggcggagacgggaaggccgtgcgctcaaggatggcgcgcgagcagctggaggagtccatcgtggccgacggcaacggcaaggaggaagaggtcggggtcatgggcatcggcgccgcggacggcgccgacgaccagcacggcggcggcaagctcagcatgaagagcctgctgtggcacggcggctccgtctgggacgcgtggttcagctgcgcctccaaccaggtggcgcaggtgctcctgacgctgccgtactccttctcccagctggggatgctgtccggcgtgctgctgcagatcttctacggcttccttggcagctggaccgcgtacctcatcagcgtcctctacgtcgagtaccgctcccgcaaggagaaggagggcgtcagcttcaagaaccacgtcatccagtggttcgaggtgctggacgggctgctgggcccctactggaaggcggcgggtctggccttcaactgcacgttcctgctgttcggctccgtcatccagctgatcgcctgcgcgagcaacatctactacatcaacgaccggctggacaagcggacatggacgtacatcttcggcgcctgctgcgccaccacggtgttcatcccgtccttccacaactaccggatctggtccttcctgggcctcggcatgaccacctacaccgcgtggtacctcgccatcgccgcgctcctcaacggccaggccgaaggcgtggcgcactccggccccaccaagctcgtgctctacttcaccggcgccaccaacatcctctacaccttcggcggccacgccgtcacagtcgagatcatgcacgcgatgtggaagcccgccaagttcaaatacatctacctgctggcgacgctgtacgtgttcacgctgacgctgccgtcgtcggcggccatgtactgggcgttcggcgacgagctgctgacccactcgaacgccttctcgctgctgcccaagacccggtggcgcgacgcggcggtgatcctgatgctgatccaccagttcatcaccttcggcttcgcgtgcacgccgctctacttcgtgtgggagaaggtgatcgggatgcacgacgccaagagcatcttcaagcgcgcgctggcgaggctgcccatcgtcgtgcccatctggttcctcgccatcatcttccccttcttcgggcccatcaactccgccgtcggcgcgctgctcgtcagcttcaccgtctacatcatcccggccctggcgcacgtcctcacctaccgcacggcgtccgcgcgcatggtacgtatacatatgcatgcgtgcatttgcattgcattgcacccccgtcgtttagcaaacaataacaacggcgtcctgtggcctggccggccgtcgcgttgcctaatgcctactggttcgggtacgagtaagtgacccgatccgttcatccccgttgcctagctagagtgcagtagtaccgccaccagtcgcagcagctgtcacgaacagtggcaggactgcaacacgaaatagacagtggagatccgtgcacacgcagcagccagttcacgttagatgcaaagcaccggtcccccacttgggcaaatcccccaatcattgaatggagacaacagccacattcaattcgaagccggccccgcccccgcggcgcccgacaacgatatgggacgacggatcggggatcggaacaccgcatcacccccacgtcatcatccgcgtctctgcccgtcgcctcgccgaatgccggtgcccatggcagatgtaggcttcactgtgccggttccgacagctggcgggggcggtttcggagcgacttttttgcgagtacggcacggcggcgatggcaacgccggcgtgggtcaaggaaccgcttgcctgtgacggaagatctgacgtagcgccgatgcggtgctgacgttgggtgtcgcgctgtgacggaagaccctcctggcgaggcgcgacgcgacggtggtcgcgacgtcgcggcactggcgcgcgtctggacgcactcggccggccaatcgcgctcccaggtcccagggcccggcatcgtgtggcggtgtggctggaacgcgagagatgatggctcctctgtcctccgtagacaacgggatggcgatggagatgtgagatctcggtgtgcgctggagggttcctttcctcgccctccgttttccccagctttttatttccgaaaggaattcgagcagtgaccctgtgaaaatgcctcgaaaaggatagggctaggaacaagctaaggcggggcacgccgcgatgcttatcttttattcataacgccgcggagaagccgcccttcttcctgccgagctggacggggatgttcgtcctcaacatgttcatcgtggtgtgggtgctggtggtcggcttcgggctgggcggctgggccagcatggtcaacttcgtgaggcagatcgacacgttcgggctgttcgccaagtgctaccagtgcccgaagccgccggtcccggcggccgcgcagtcaccggcgccgctgccgcaccactagggcgcgcaggccccgtgacggcatggagctagcgtcgctgcttgcattgcagccggtgttaattgctactaggttttggtcgccttgtaatatacaagcctcctctagggtcgtagaactcgatcacagcagagtcacgcaaaggcggctcgtgccgtgccgtgccgccgccgcgttgctttcccgcccgccctcctctgcctgatcggtccgtcggcattggtgtcgttttgttttcgtttggcttgccaccggtattaaaaagttgagtgatggtcatggcttcttaatccatatgatgatatgacatacgtatcctatataggttcattagttatttttccttgttggttcgtggaggtcggtccatgttgtgtagcgtgtgggtgactgtaatggactgcgctggaatgctagctaaaggcagaaaacaaaaaaccacagtgcccttttgtttgttattgccctctgctcattagtttctcgctggaatttttattatgggcttcttcgaaaggaccacaaagcgat

SEQ ID NO: 36035 - DNA, 1956 bp, Zea Mays
gcaaggcgcttgttataaagccgcaagtggtaccatttctcactcgccctctctccgctcgctcgctctctctctcaccgaatcacacacacaggcaggccagtgaggcaggggcacgaaggcgcggctccctctctcaagcccctcgccattactcgctcataaaggaagaacagagcgagcgggtagcgaggaagaagctgggccgcggggcaagaggagagaggtccccagccgtaggtctgctgtgcaactccggctcgccgcctgccaaccgcgcggcgcggccaccacgctaggcccctcgccctcctccgggcggagacgggaaggccgtgcgctcaaggatggcgcgcgagcagctggaggagtccatcgtggccgacggcaacggcaaggaggaagaggtcggggtcatgggcatcggcgccgcggacggcgccgacgaccagcacggcggcggcaagctcagcatgaagagcctgctgtggcacggcggctccgtctgggacgcgtggttcagctgcgcctccaaccaggtggcgcaggtgctcctgacgctgccgtactccttctcccagctggggatgctgtccggcgtgctgctgcagatcttctacggcttccttggcagctggaccgcgtacctcatcagcgtcctctacgtcgagtaccgctcccgcaaggagaaggagggcgtcagcttcaagaaccacgtcatccagcgagatcatgcacgcgatgtggaagcccgccaagttcaaatacatctacctgctggcgacgctgtacgtgttcacgctgacgctgccgtcgtcggcggccatgtactgggcgttcggcgacgagctgctgacccactcgaacgccttctcgctgctgcccaagacccggtggcgcgacgcggcggtgatcctgatgctgatccaccagttcatcaccttcggcttcgcgtgcacgccgctctacttcgtgtgggagaaggtgatcgggatgcacgacgccaagagcatcttcaagcgcgcgctggcgaggctgcccatcgtcgtgcccatctggttcctcgccatcatcttccccttcttcgggcccatcaactccgccgtcggcgcgctgctcgtcagcttcaccgtctacatcatcccggccctggcgcacgtcctcacctaccgcacggcgtccgcgcgcatgaacgccgcggagaagccgcccttcttcctgccgagctggacggggatgttcgtcctcaacatgttcatcgtggtgtgggtgctggtggtcggcttcgggctgggcggctgggccagcatggtcaacttcgtgaggcagatcgacacgttcgggctgttcgccaagtgctaccagtgcccgaagccgccggtcccggcggccgcgcagtcaccggcgccgctgccgcaccactagggcgcgcaggccccgtgacggcatggagctagcgtcgctgcttgcattgcagccggtgttaattgctactaggttttggtcgccttgtaatatacaagcctcctctagggtcgtagaactcgatcacagcagagtcacgcaaaggcggctcgtgccgtgccgtgccgccgccgcgttgctttcccgcccgccctcctctgcctgatcggtccgtcggcattggtgtcgttttgttttcgtttggcttgccaccggtattaaaaagttgagtgatggtcatggcttcttaatccatatgatgatatgacatacgtatcctatataggttcattagttatttttccttgttggttcgtggaggtcggtccatgttgtgtagcgtgtgggtgactgtaatggactgcgctggaatgctagctaaaggcagaaaacaaaaaaccacagtgcccttttgtttgttattgccctctgctcattagtttctcgctggaatttttattatgggcttcttcgaaaggaccacaaagcgat

SEQ ID NO: 36036 - DNA, 3696 bp, Zea Mays
gcaaggcgcttgttataaagccgcaagtggtaccatttctcactcgccctctctccgctcgctcgctctctctctcaccgaatcacacacacaggcaggccagtgaggcaggggcacgaaggcgcggctccctctctcaagcccctcgccattactcgctcataaaggaagaacagagcgagcgggtagcgaggaagaagctgggccgcggggcaagaggagagaggtccccagccgtaggtctgctgtgcaactccggctcgccgcctgccaaccgcgcggcgcggccaccacgctaggcccctcgccctcctcgtaggtgaacagagcctgcagtcgatacaacagtaaattccgcggcattccattcgctttccctctcgaaacgcaccctgcatttactgcacgtcgctcgccctccggccatccgcgatcttcaaatcttccactgtaaaaaggttcgtgctgttgttttttttttacttttttcgtgcgttcgcgttcgacgcctcgctcggctggttccttccttccttccgctgtgttcccttctgtttctcgggcggagacgggaaggccgtgcgctcaaggatggcgcgcgagcagctggaggagtccatcgtggccgacggcaacggcaaggaggaagaggtcggggtcatgggcatcggcgccgcggacggcgccgacgaccagcacggcggcggcaagctcagcatgaagagcctgctgtggcacggcggctccgtctgggacgcgtggttcagctgcgcctccaaccaggtggcgcaggtgctcctgacgctgccgtactccttctcccagctggggatgctgtccggcgtgctgctgcagatcttctacggcttccttggcagctggaccgcgtacctcatcagcgtcctctacgtcgagtaccgctcccgcaaggagaaggagggcgtcagcttcaagaaccacgtcatccagtggttcgaggtgctggacgggctgctgggcccctactggaaggcggcgggtctggccttcaactgcacgttcctgctgttcggctccgtcatccagctgatcgcctgcgcgagcaacatctactacatcaacgaccggctggacaagcggacatggacgtacatcttcggcgcctgctgcgccaccacggtgttcatcccgtccttccacaactaccggatctggtccttcctgggcctcggcatgaccacctacaccgcgtggtacctcgccatcgccgcgctcctcaacggccaggccgaaggcgtggcgcactccggccccaccaagctcgtgctctacttcaccggcgccaccaacatcctctacaccttcggcggccacgccgtcacagtcgagatcatgcacgcgatgtggaagcccgccaagttcaaatacatctacctgctggcgacgctgtacgtgttcacgctgacgctgccgtcgtcggcggccatgtactgggcgttcggcgacgagctgctgacccactcgaacgccttctcgctgctgcccaagacccggtggcgcgacgcggcggtgatcctgatgctgatccaccagttcatcaccttcggcttcgcgtgcacgccgctctacttcgtgtgggagaaggtgatcgggatgcacgacgccaagagcatcttcaagcgcgcgctggcgaggctgcccatcgtcgtgcccatctggttcctcgccatcatcttccccttcttcgggcccatcaactccgccgtcggcgcgctgctcgtcagcttcaccgtctacatcatcccggccctggcgcacgtcctcacctaccgcacggcgtccgcgcgcatggtacgtatacatatgcatgcgtgcatttgcattgcattgcacccccgtcgtttagcaaacaataacaacggcgtcctgtggcctggccggccgtcgcgttgcctaatgcctactggttcgggtacgagtaagtgacccgatccgttcatccccgttgcctagctagagtgcagtagtaccgccaccagtcgcagcagctgtcacgaacagtggcaggactgcaacacgaaatagacagtggagatccgtgcacacgcagcagccagttcacgttagatgcaaagcaccggtcccccacttgggcaaatcccccaatcattgaatggagacaacagccacattcaattcgaagccggccccgcccccgcggcgcccgacaacgatatgggacgacggatcggggatcggaacaccgcatcacccccacgtcatcatccgcgtctctgcccgtcgcctcgccgaatgccggtgcccatggcagatgtaggcttcactgtgccggttccgacagctggcgggggcggtttcggagcgacttttttgcgagtacggcacggcggcgatggcaacgccggcgtgggtcaaggaaccgcttgcctgtgacggaagatctgacgtagcgccgatgcggtgctgacgttgggtgtcgcgctgtgacggaagaccctcctggcgaggcgcgacgcgacggtggtcgcgacgtcgcggcactggcgcgcgtctggacgcactcggccggccaatcgcgctcccaggtcccagggcccggcatcgtgtggcggtgtggctggaacgcgagagatgatggctcctctgtcctccgtagacaacgggatggcgatggagatgtgagatctcggtgtgcgctggagggttcctttcctcgccctccgttttccccagctttttatttccgaaaggaattcgagcagtgaccctgtgaaaatgcctcgaaaaggatagggctaggaacaagctaaggcggggcacgccgcgatgcttatcttttattcatgtcagtgcttctggcgatcgatttcattctgacgactgctgctctgtgtttccctgcaaaaaaaaaattatttgtttttgcaacagaacgccgcggagaagccgcccttcttcctgccgagctggacggggatgttcgtcctcaacatgttcatcgtggtgtgggtgctggtggtcggcttcgggctgggcggctgggccagcatggtcaacttcgtgaggcagatcgacacgttcgggctgttcgccaagtgctaccagtgcccgaagccgccggtcccggcggccgcgcagtcaccggcgccgctgccgcaccactagggcgcgcaggccccgtgacggcatggagctagcgtcgctgcttgcattgcagccggtgttaattgctactaggttttggtcgccttgtaatatacaagcctcctctagggtcgtagaactcgatcacagcagagtcacgcaaaggcggctcgtgccgtgccgtgccgccgccgcgttgctttcccgcccgccctcctctgcctgatcggtccgtcggcattggtgtcgttttgttttcgtttggcttgccaccggtattaaaaagttgagtgatggtcatggcttcttaatccatatgatgatatgacatacgtatcctatataggttcattagttatttttccttgttggttcgtggaggtcggtccatgttgtgtagcgtgtgggtgactgtaatggactgcgctggaatgctagctaaaggcagaaaacaaaaaaccacagtgcccttttgtttgttattgccctctgctcattagtttctcgctggaatttttattatgggcttcttcgaaaggaccacaaagcgat

SEQ ID NO: 36037 - DNA, 1423 bp, Zea Mays
cagatggtgctgtgtgcgctggcaaatacctttcagcattgcaagaaaaaggctactactctaggagagccctgttttcagctgaacaaatcatacatcgagatttgtagatcaacccaagttccagcacttggaatgattgaattttctaacatgtgtatggttttgagtgatcaggggttcatgaagttggggcaatccaaggaagataagcttaggagagtaacacttcatattgacagttcagatatcacttttgcctttaagggaaatcgtttcttccaaaaatgcctggagcagcgatgctaaccagactcaatagtagatcaatacatgtagccaattgttgttatacactgtagtattagtttattgacattatcaagtaccatcagtttcaaccctggatgtatactcaggtgctttcatccaacatgatcaaaccttggttacatcacgaaactctttcttggagtgcagagataagtgtacatgtgacgagttatgacagtattacgtgacataatttttccaaaatatagttgagtgtagttatgctttctcaatttttggtttttccagaactgattgatcatgtagctaaccatttagcataccaagaacatttattgacacatttcttgctggaagttgacaccagtaatgagaaattacaaataattaatgtgtcttttccgaataagtgacattattttgatattttacagtagcattattcaggttgtaaaatgtctttagcaccccccccccttttggaaatttgaatagggcggcttctcgattaaagataaaaacaaatgaacttatagagacaatacaactgaatgaagtgatcgttatcttttgcaaacaactgctttccgttgtacactgtaatttacaattgttctctgcctttcatttctataccagaacttaatactacatctgttcacaaatatatgacatcgtttactttttttagaaaactttgaccactcgtcttattcaaaatattcattcaaaaatgtaaaattttaagtcaagcataaactacctgataaaaacaaatcataaaaaataaatgataattaatactaatttttaaataagacgtgtggtcaaagtttttttaaaaaattaatggtgtcatatatttatgaacggagagagtactcgtttgcaggatgaggagtcaggcttgttttctatatctattttttaaattattgttatgcgctggtaaatcgttttgtttatgctacacatgctgaaaaagattgggccttcccctcccccgagcgactagcttgactgggctatgaaattaggcctatgaccatcacattcgaagcccacttgagggcgtagggcagcgcatctgaattctgatagatgaaatgtcggaattgttttcctattt

SEQ ID NO: 36038 - DNA, 1388 bp, Zea Mays
tgttggcagatggtgctgtgtgcgctggcaaatacctttcagcattgcaagaaaaaggctactactctaggagagatcaacccaagttccagcacttggaatgattgaattttctaacatgtgtatggttttgagtgatcaggggttcatgaagttggggcaatccaaggaagataagcttaggagagtaacacttcatattgacagttcagatatcacttttgcctttaagggaaatcgtttcttccaaaaatgcctggagcagcgatgctaaccagactcaatagtagatcaatacatgtagccaattgttgttatacactgtagtattagtttattgacattatcaagtaccatcagtttcaaccctggatgtatactcaggtgctttcatccaacatgatcaaaccttggttacatcacgaaactctttcttggagtgcagagataagtgtacatgtgacgagttatgacagtattacgtgacataatttttccaaaatatagttgagtgtagttatgctttctcaatttttggtttttccagaactgattgatcatgtagctaaccatttagcataccaagaacatttattgacacatttcttgctggaagttgacaccagtaatgagaaattacaaataattaatgtgtcttttccgaataagtgacattattttgatattttacagtagcattattcaggttgtaaaatgtctttagcaccccccccccttttggaaatttgaatagggcggcttctcgattaaagataaaaacaaatgaacttatagagacaatacaactgaatgaagtgatcgttatcttttgcaaacaactgctttccgttgtacactgtaatttacaattgttctctgcctttcatttctataccagaacttaatactacatctgttcacaaatatatgacatcgtttactttttttagaaaactttgaccactcgtcttattcaaaatattcattcaaaaatgtaaaattttaagtcaagcataaactacctgataaaaacaaatcataaaaaataaatgataattaatactaatttttaaataagacgtgtggtcaaagtttttttaaaaaattaatggtgtcatatatttatgaacggagagagtactcgtttgcaggatgaggagtcaggcttgttttctatatctattttttaaattattgttatgcgctggtaaatcgttttgtttatgctacacatgctgaaaaagattgggccttcccctcccccgagcgactagcttgactgggctatgaaattaggcctatgaccatcacattcgaagcccacttgagggcgtagggcagcgcatctgaattctgatagatgaaatgtcggaattgttttcctattt

SEQ ID NO: 36039 - DNA, 2572 bp, Zea Mays
ccttatcgtccgcctaatcgcgatttatagcgattaatcaccgtgttgggcgatcagccgataggcctggtagtccaaaagccattttaggcgcctggtagtccaaaagccattttaggcttaaatgctgtctgggggaggccaaaggacgcccaatcccttcagatacagcttgggtagacgtgagcagtcaacagtcctttaaatgctgtctgggaggccaaaagacattttagacgtgagcagtcagcaacaccagccttctcccccattttatacatgagcagtcagcagccttctccgccattttagtcgcgaaaaacagcagctgagaagtccaacctcagatgagcagctcttctgaagatatgcatggacatcatggtgatggacgtcgtgctgctgctgttcaagtcatcttcccgcagtcccaaattgcccgagggaaggcgtcctctgtggctgaaactggcagcacagatcatgttccgtcgacgtcgtcaactgctgcagactcaagcacgcttgctgacaaggcaatagcaggtctgcctccagaccttctgaacaagctaacgattcgaagcggaaggctaagtcacaggaccctggctggaagttcggttggtggcctgatccgtctaagaaggagttcgtgcaatgtatcttttgcatgaaagtggtgccctctggaataaagaggttcaaacagcacctcgccagtggattcggcgacacgatgaagtgtgcaagggttctagaggttgtttcaaaggacatgcaagcttatcttaagaagaacacaaggtctgcacttgttttggatgacgatgaaagtatagaaggagaagacgatgctgctgctgctgcccccgttcaatctgaaccaagttctggtactaaatacaagcaagcaaagaagaaggtttctcaagctgcaatgtcctcctttgttgtctctgctcctccgaagccaactactcaaaaggtagtaaatcagtagctgtcatgctttgcaagagcccagaagaagtgattgccgaacggcacaacaacaaagcttcccagtccactctagagcactgcacgaagaaaggcaaggaggcccagcaaattgttgatgaccacgttgctgatttcttctacgagaacaacatgttggagtcgatagggcagtatggtcctggctaccgtggcccatcgtaccacgacattagggttccgtggcttgaaagggctgtcgagaggacatcatcaatgacggcgaagcatgaagaatcgtggaaggagtatggctgctcattgatgtcagattcatggacagatgttagaggacgtcatctaatcaactttttggcaaacagtccagcagggacacactttctgtgctctattgatgcatcaagtgagatagctaatgccaacatgttggcagatttgctagaaaatcagattgacaaaattggcagagaaaatgtagtgcaagtagtaactgacaatgggcaaacttcaaagctgctgggaggcttcttatggagaggattccacatttgttttggacaccgtgtgctgcccattgtttggatttgctgctggaggacattgggaagattaagtacttcaacacttgcatcaaccaagcaaagagggtgtgtcggttcctatacaaacatgggaggctgcacaaccttatgagacaaatgattggaggtgaccttgttaggcccggtattactaggtttgccacgtcttttctcaccctggctagcatgctcaagcataagaatggtttgaagagtgtgtttattagtaacgaatggcagcaaagcaagttctccaccagtcaagaaggcatccaagctgaaaatattatcctctctacagagttttggaatagtgttgagttctgtctacgagcttctcaaccaattctcattgccctaaggattgctgatggtgatgagacacctgctgctctggagattatgacagctatggataaagcaaaaaccaccatcaaagagaagaaaacaatgcagagttgagggagaagattattagtttggagaacgaggtttcgagtttggaagcagaagtagctcacatggatgaattggcgatgaatgttgctaagttgtgagagaaggatctgttgctgcaagggaagaatgatttgctgcttccccatgcgactactgtttttttcttcagtgatccttttagcctgttggtgctatccctttgtcgcaagtgtcgagtaggctgttagtgatctttttagcccttagtgtcaagtaagtgatgaattatgtcattatggaacttcaagtagcagtggagcggcggtggctggcatgcagctgtgtggtagcaccagaggccaatcgagcactactgctcatgtctgacagccaaacctcagctcccccgttctgatgatttcatgtggaagcccgacctactgcaatgggcaaagttgttccttgatcaatgcgctacacattttgtgtaagaatcatgtttcaaattgacttaatttgagaggtcaaggaacttaaacctaggctcaaac

SEQ ID NO: 36040 - DNA, 1715 bp, Zea Mays
atggagaagatcaagagacatgacttatctatgatggtccaagttgctagtgtgaacgctcagcttcggtatatatgggaatctgaggagctgcgttgtgctatggagccggtggatttgattagaagattgtcctcggctcccaaaggaaaaattgctgggaagaaggttcaggttgatgaaaggtttactgaaataactaagatagttctaaggctctatcccctgtatttaggggtgttcaacaagtatgaaaataaatcttccaggatcttgatcgagttagatgaccagaaagtagcatggacaatctggaagaaaatccaattggaatctagcgttcttgattcaaaaagtgccatgcgtgtgacagttttatcacactcaccgcatttactctttttcaccagggagaaagaattggctgttgtgaagatcaaccctgcggatgtcgaaattatcgctagtgagcttaagctggacaagaagatcgcgaagagaacgctctgtgagcacaagggtgatgccgtggctgcgcatctagtttggtttcttatcgaagcccacccgctcaaatcgacaacggtagagcccgaggtttgctctttttttgcatacccactggcccaatttcaacacacactgctcattcccacgctgttcgaccccatccgaaccccagcaagctctccagcggagcggagccaccggctcggcggctgcctgcgtgcgggccgcgtgacccggcggaagcacaccggctatcagggcatcactgcatcaggcaccggcaagcaaacaacagtccagcagacattaggcttgagcctagaggctagagcaaaggcacagtctgtttctaaaacagttcaaatcatgaagaggaacaagggtagtagtgctatgttgatcatttagtgcatctttatattgaacaattccaaaatagaacaattctatctatctatcgacagataagtcaaaataaaatatgtctaattttaacccatccatcggctagctagctactagtttctctttaagttttcagctacatctacatggtgatacaacctggccagtgcattatcaccggcggcagccggcagcagccaacatgcaacaacactgcagcaggggagcagcagcggcatcgagcaacaccagaagaaaacaatgcagagttgagggagaagattattagtttggagaacgaggtttcgagtttggaagcagaagtagctcacatggatgaattggcgatgaatgttgctaagttgtgagagaaggatctgttgctgcaagggaagaatgatttgctgcttccccatgcgactactgtttttttcttcagtgatccttttagcctgttggtgctatccctttgtcgcaagtgtcgagtaggctgttagtgatctttttagcccttagtgtcaagtaagtgatgaattatgtcattatggaacttcaagtagcagtggagcggcggtggctggcatgcagctgtgtggtagcaccagaggccaatcgagcactactgctcatgtctgacagccaaacctcagctcccccgttctgatgatttcatgtggaagcccgacctactgcaatgggcaaagttgttccttgatcaatgcgctacacattttgtgtaagaatcatgtttcaaattgacttaatttgagaggtcaaggaacttaaacctaggctcaaac

SEQ ID NO: 36041 - DNA, 738 bp, Zea Mays
cgggggtccatcaccaccactgcgaagccctccctgcacttgcgcagcgcctgcgccagcacggacagcagcagctcagcttctacatgacagatgaatgaagaagaaaggaaggtcgaggagtgaagcagtttgcgcatgaccctaaaattgcagcgactctttcccggaatgatattgagctcctggccttcctgttgaccatacgggaacgaggtgtataggtagaagtccaagagaacccaggatctgactgggactcgctgttgaagccagagaaacctccatggccggctggggatgtccggtcgcgagctgcctgcatagctgatgggattcgaagatggcacgacagctgctcgcgcataatcaggtcaagccaatgggggatttatgatttaggagtaaatgtacgtatgacaactactgttcacaatagtttgattggtggaggatgtcacaataggtatgtttacaattccactgccggagacgaaattgaccatggcatcgtcctttggcttgtcctctgaagcgttctcttgatgtcactgttgagtgttcaggtcaatggataggaacttgatgaaatgaactagacaggttccgaaacttgataaaataaactagagtggcatggcacctgattaatttagcatttaggtggcgaaatggactaagatagctgatccataaaataccgtcgggtgtccacttgcattcttattagtagccctc

SEQ ID NO: 36042 - DNA, 1893 bp, Zea Mays
atagaaaatgatattttatagtggtagtggggtataggggagtatttagggggaaccgctgcgggagaagaaaaaataggggggaaaagtgatatagggggaaaaatttaggggtaactgttgcggatagcctcaggcagcgttcctcgctgctgttaagtcaggctccactccagtgtcccgttttgggcctcaggcctccttttgtgcaatccagacgtcgtggtccaaacgcggatcggcggtgccgacggccgggaacccccctcgcgattaacgcccgagcgagatcgctatccgtggaccgtggttgtcgccgtcctcgtcgaaacctccttggaaccaactgaagatgcccgaccagacgtcggctgcggccgcgggcggcgcggcgttcgaccgttgcctgctggcgctgtacctcatcagcccgctcactgttctggcgctccgcttcatctccgcgccgtacggcaagctatcccggccgggctggggccccgtcctaccggccccactcgcgtggttcctcatggagagccccaccctctggctcccaccgctcgtcctcctccgctggccgccgccgccgctctccggcccactcgccgcactccccgccgcgctctacgcgttccactacgtccaccgcacgctggtccacccgctccgcctcgcccgcctgcgccgcgccccggcccccgtgccgctcctcatcgccgcctgcgccttgggattcaatatcctcaacgcctacctacaggcccgctccttcgccctccacgccggccgccaggcgtcccccttccgctgcctcgctgggctggccctcttcgcgtggggaatgcggacgaacatcgcggcggacaaggagctgctgcggctcaaggaggccggaggcgggtacaagatcccgaggggcgggtggttcgacctcgtcaccagccccaattacttcggcgagacggtggagtggctgggcttcgccgtggtggcgtggacgcccgcggcctgggcgttcttcctctacacctgcgccaacctcgggccgagggccagggaccaccgccgctggtacgtgcagaagttccgcggcgagtacccggcgtcgcgcaaggcgttcatcccctacatctactaggtgatggccgtggtttcggttcgttcttcttggccgccttatcttccttcgcggcggagcagaagcaggagagcaggctgagtttgcccatgtttcgactcgacgagaagatgtacaggcagagttgaatataaagccggctgaggcataacctggttactctcgtgtttgtactatgttccgactcgaacaggattgactcaagtctaatgtattgggcatggacagaatctctaattggagggttatttgacttggcgtagatactccaaccaaagatccacgtagtcgtactcactccggtaaggccacccgcgcgcgcagttccgccaccagcgccgcgcacctcgtcaataactggtaccggatatttgcctttgacagtgatggcagtgaggtgatggtaatccacatagaaccgccatgagccgtctttcttcttgaccaaaagcacggacgaagaaaacggactggcactgggttgaataatgccattagaaagcgtttcctgaagctgcctctcgatctcttccttaagtaccatctcttccttaagcgccggcgcataacgatatggcaccgaaaagttcaacagtgaagtttagctgaagctatcttaccaggccattttctctgtccttcctcagcccagcaactctgaccaaacttagtagactgcacacgatcctgagacctgggttgctaactgaacgacaactcctaatacactaaataagtacacaaatgcaaag

SEQ ID NO: 36043 - DNA, 2000 bp, Zea Mays
atagaaaatgatattttatagtggtagtggggtataggggagtatttagggggaaccgctgcgggagaagaaaaaataggggggaaaagtgatatagggggaaaaatttaggggtaactgttgcggatagcctcaggcagcgttcctcgctgctgttaagtcaggctccactccagtgtcccgttttgggcctcaggcctccttttgtgcaatccagacgtcgtggtccaaacgcggatcggcggtgccgacggccgggaacccccctcgcgattaacgcccgagcgagatcgctatccgtggaccgtggttgtcgccgtcctcgtcggttcgtccccatcgcacaccctactcccccggtcgtcagccctcagcactcatccggtcatccccaaaccccagaaacctccttggaaccaactgaagatgcccgaccagacgtcggctgcggccgcgggcggcgcggcgttcgaccgttgcctgctggcgctgtacctcatcagcccgctcactgttctggcgctccgcttcatctccgcgccgtacggcaagctatcccggccgggctggggccccgtcctaccggccccactcgcgtggttcctcatggagagccccaccctctggctcccaccgctcgtcctcctccgctggccgccgccgccgctctccggcccactcgccgcactccccgccgcgctctacgcgttccactacgtccaccgcacgctggtccacccgctccgcctcgcccgcctgcgccgcgccccggcccccgtgccgctcctcatcgccgcctgcgccttgggattcaatatcctcaacgcctacctacaggcccgctccttcgccctccacgccggccgccaggcgtcccccttccgctgcctcgctgggctggccctcttcgcgtggggaatgcggacgaacatcgcggcggacaaggagctgctgcggctcaaggaggccggaggcgggtacaagatcccgaggggcgggtggttcgacctcgtcaccagccccaattacttcggcgagacggtggagtggctgggcttcgccgtggtggcgtggacgcccgcggcctgggcgttcttcctctacacctgcgccaacctcgggccgagggccagggaccaccgccgctggtgatggccgtggtttcggttcgttcttcttggccgccttatcttccttcgcggcggagcagaagcaggagagcaggctgagtttgcccatgtttcgactcgacgagaaggcgagtagacgacagagaacctgcgatgcgattagctgcgcgagactgcaacctgttgaatctaatgttcttactattgctgctgtcgatgattttatagatgtacaggcagagttgaatataaagccggctgaggcataacctggttactctcgtgtttgtactatgttccgactcgaacaggattgactcaagtctaatgtattgggcatggacagaatctctaattggagggttatttgacttggcgtagatactccaaccaaagatccacgtagtcgtactcactccggtaaggccacccgcgcgcgcagttccgccaccagcgccgcgcacctcgtcaataactggtaccggatatttgcctttgacagtgatggcagtgaggtgatggtaatccacatagaaccgccatgagccgtctttcttcttgaccaaaagcacggacgaagaaaacggactggcactgggttgaataatgccattagaaagcgtttcctgaagctgcctctcgatctcttccttaagtaccatctcttccttaagcgccggcgcataacgatatggcaccgaaaagttcaacagtgaagtttagctgaagctatcttaccaggccattttctctgtccttcctcagcccagcaactctgaccaaacttagtagactgcacacgatcctgagacctgggttgctaactgaacgacaactcctaatacactaaataagtacacaaatgcaaag

SEQ ID NO: 36044 - DNA, 2036 bp, Zea Mays
gctgcgctcgtcgccgcgcccctcacctcgagcaaagaggagcgacaatggccatggccgcccccgctttcctcctgccatcactgttccccaagcccactctcctcgccgcgtccctccactccagcttcccacgcggcctctccctccgctgctcgcccaacggcgccgccgtgccggaattccctgaacctgcctcgcgccgcggccgcaaaaagtcaccgtccccgtcggcgccgaagccgagggctacgaggaggagaaccaagaaggcggaccgggatcccgactcggagggcgaggaggagccggtgaagcggaccaaccgccggacgaggaagtccaagggagaggctaaacaggaggaggtggcccaggcggcgaatcacgggacgggggatacgattcaaaaggccaacgaagaggaggatgcggtggaagtgggtagcgacgacgacgatttcgcgaacgagtggccgccgctggtgtgctgcttcggcgcgccgcggtgggagttcgtacccacggtgcgggtgtcggaccgccagatgcatcccgacatgtactccacgtggaggcacctgcaatgggaaccgcccgagttcgcgcgcgcgccggggagcgcggcgagcaacgtggcgattgcgctcacccggctcggcgggcgcgccgcagtgctgggcaaggtcggcgacgacgacttcggccgcgagcttgtgtaccgcatgaactgcgagcgggtgcagacacgtgccataaagttcgacgacaaagcggtcaccgccacggcgcgcatgaaggtgagcttccgggaccgggaggacggcaagggcgggacgaaacttgtagccgagacggtgaagagtgccgccgaggactccctccgcaggactgagatcaatgtagacgtgttgaaagaggctagaatgttccatttcaattcagaagtcctgctaaacccctcaatgcatgacacgctcttcagagccattgagctgtccaagaaatttggaagcaaagttttcttcgatctcaatttgccattgccattgtggacttccaaggataaaacaaaggaggtgataaacagggcgtggaaagaggctgaaatcatagaggtgtcaagggatgagctggaattcctcctagatcatgagtactatgaatacaagagaaacacccctcctcagtattatcttgaaggatttcattttacaagaaactggccacagtactaccactacagccctgaagagatcgctcctatttggcatgacggttcaggggatgctattgtggctgctgctattaggaagctgacaacttgtcctgaaatgtatgaagaccaggatacattggagaggcaactgagatttgctgttgccgctggaatcatatcacaatggacaattggtgctgtgcgaggatttcccactgagagtgccacccagaacctgaaggaagaagtctatgtgccttctatgtggtgaaatgataaaccatttgtgatgggaatgaacaaatatatgatacaagcatacttgatgaatggtctaacagaactgaacaagggggttttccttttttttgcgacaatagagctacaagagcaacttacatgcactaattggtcaggtctatggttgctttagttaggcggcagacaggtaggagtttgtgcttcatattgtccgatgaacaaggaatctttctatcatctggttgttctgcgaagggttccgctgtacgtacgactcatttgtacaacgccttttcaatcaacggagaaccaggatacaaatggcggaaaatcactcaaatgtactggttcatttgccaagaacgcaagattcatctggttgtaccggagatgtactttaggtgaagtatttccctttctgtcaatgtgatctgtgagaaacacctgtccctacgatttagcctgtggtttgtaactatgctgtgttttctgtggttactgcattctaacatgaatttacagaatgatttcttttcacttaaaagttgaatttcaa

SEQ ID NO: 36045 - DNA, 2154 bp, Zea Mays
gctgcgctcgtcgccgcgcccctcacctcgagcaaagaggagcgacaatggccatggccgcccccgctttcctcctgccatcactgttccccaagcccactctcctcgccgcgtccctccactccagcttcccacgcggcctctccctccgctgctcgcccaacggcgccgccgtgccggaattccctgaacctgcctcgcgccgcggccgcaaaaagtcaccgtccccgtcggcgccgaagccgagggctacgaggaggagaaccaagaaggcggaccgggatcccgactcggagggcgaggaggagccggtgaagcggaccaaccgccggacgaggaagtccaagggagaggctaaacaggaggaggtggcccaggcggcgaatcacgggacgggggatacgattcaaaaggccaacgaagaggaggatgcggtggaagtgggtagcgacgacgacgatttcgcgaacgagtggccgccgctggtgtgctgcttcggcgcgccgcggtgggagttcgtacccacggtgcgggtgtcggaccgccagatgcatcccgacatgtactccacgtggaggcacctgcaatgggaaccgcccgagttcgcgcgcgcgccggggagcgcggcgagcaacgtggcgattgcgctcacccggctcggcgggcgcgccgcagtgctgggcaaggtcggcgacgacgacttcggccgcgagcttgtgtaccgcatgaactgcgagcgggtgcagacacgtgccataaagttcgacgacaaagcggtcaccgccacggcgcgcatgaaggtgagcttccgggaccgggaggacggcaagggcgggacgaaacttgtagccgagacggtgaagagtgccgccgaggactccctccgcaggactgagatcaatgtagacgtgttgaaagaggctagaatgttccatttcaattcagaagtcctgctaaacccctcaatgcatgacacgctcttcagagccattgagctgtccaagaaatttggaagcaaagttttcttcgatctcaatttgccattgccattgtggacttccaaggataaaacaaaggaggtgataaacagggcgtggaaagaggctgaaatcatagaggtgtcaagggatgagctggaattcctcctagatcatgagtactatgaatacaagagaaacacccctcctcagtattatcttgaaggatttcattttacaagaaactggccacagtactaccactacagccctgaagagatcgctcctatttggcatgacggtataaagatcttgcttgtgacgtatgggacacttcggatccactattacacacctaagtttcatggctgtgtggttgggacagaggatgcactcataactccatacaccactgaccgaacaggttcaggggatgctattgtggctgctgctattaggaagctgacaacttgtcctgaaatgtatgaagaccaggatacattggagaggcaactgagatttgctgttgccgctggaatcatatcacaatggacaattggtgctgtgcgaggatttcccactgagagtgccacccagaacctgaaggaagaagtctatgtgccttctatgtggtgaaatgataaaccatttgtgatgggaatgaacaaatatatgatacaagcatacttgatgaatggtctaacagaactgaacaagggggttttccttttttttgcgacaatagagctacaagagcaacttacatgcactaattggtctatggttgctttagttaggcggcagacaggtaggagtttgtgcttcatattgtccgatgaacaaggaatctttctatcatctggttgttctgcgaagggttccgctgtacgtacgactcatttgtacaacgccttttcaatcaacggagaaccaggatacaaatggcggaaaatcactcaaatgtactggttcatttgccaagaacgcaagattcatctggttgtaccggagatgtactttaggtgaagtatttccctttctgtcaatgtgatctgtgagaaacacctgtccctacgatttagcctgtggtttgtaactatgctgtgttttctgtggttactgcattctaacatgaatttacagaatgatttcttttcacttaaaagttgaatttcaa

SEQ ID NO: 36046 - DNA, 2988 bp, Zea Mays
cgcgcgcacactgaaatagctgtgcctctggctgcttcgtcttcctccccttccttgtcctctgcctctgctgcactctgctccacccccttttttctttcccccatccatggtgcagcttttgccggcgctggtggcgctcgcccttctcctcgtcagaccggtggcggatgcggcgatggctaaatacacgttcacagtggggagcatgcagatcagtcagctgtgcagcagcaccagcattattgcggtgaacgggcagctgccgggcccgtcgatagaagtgaacgaaggcgacgatgtcgtcgtcaaggtcgtcaacaactcgccgtacaacgtgaccatccactggtaagtggtaactcctactactactactgccacttgagcaaaaaaaaaaaaaaaaagaagaagaagaagaagcagggcagggcaggcctgcatactggtttgctatgagtcgtttgctctctttagacacatcctgtgacatcaaagaaggtgccgtaaggaacctgccatcccagcgttttattggatcactggtgagatggttttgataggtttatctctgcccttccttagcctccacccggaagccgaaagtgaagcctctgattaggacgtcttacctgtcgaaacatagcctgtaactgtatctgtatggatgcccatccaaatattcgccaagtgtttaaaacagagtgaatccaaaaaggagagtgtgccatataaaactccacttaggacactcggtacttcggtagtggcttagcgtcagaatcaccaagaaaggtaacggaggttagtctagactgacagcgccagtaattatgagcaccccggcccgttaataataaagaacgatctgcacgcggtttccacaccgtcttttggacctgaaagctacggcagtggtctctattcggcatggcaccagctccacttgagtctgaaactttgaatctccagtgatggcctaacctgacacttcgggcgcttggcttgctgcgagaattgacaggcatggtgtgctccagctcatgaccccgtgggcggacggcccgagcatggtgacgcagtgccccatccagcccagcagctcctacacgtaccggttcagcgtgccggggcaggagggcacgctgtggtggcacgcgcactcctccttcctccgcgccacggtgtacggcgccttcatcatccgcccgaggcgcggcaacgcctaccctttcccggcgccggacaaggaggtccccatcgtgctcggcgagtggtggaaccgcaatgtagtcgacgtcgagagcgacgccatcttggccggtcagcttcccgcccagtccgacgcgttcacagttaacggcaaaaccggcctgctgtaccagtgcgcgaacgagacgttcacggcggtggtggagcccagcacgagggtgctcctccgggtcgtcaacgccggcctcaactcgcacctcttcttcaagctggccggccacaacttcaccgtcgtcgccgtggacgcgggctacacctccaacctcaacacggacacgctcgtgctcgcgccgggccagaccgtggacgcgctcgtcaccaccgccgccgcgcccgggagctactacatggcggtgctggcgcacgacaccatgagcccgctcgcgttcgcggcgtcggacacgaccaccgccaccgcgatcctccagtacaacggcacgtcgtccaccaacccgcccgcgatgcccgccatgccgtccagctccgactccgggacggccaacgccttctacttcgggctgaggggcctgggcgcgcccgcggtgccggcgccggtggacgtgagcatgaccatcgagctgggcctcggccagctgccctgcgacccgtcgcagaccaggtgcaacgggaccgcggccgccgccgcgatgaacggcgtctcgttccgcctcccgtcccccgagacgtctctcctcggggcgcacgtcgacggcgtcgcgggggtcttcacggcagatttcccggacggtccgccgccgagcggcacggcgatgtcggtggggaccaagctcaagaagctcagctacaactcggtggtggagatcgtgctgcagaacccggcggccgtcccgacggagaaccacccgatccacctccacggcttcaacttcttcgtgctggcgcaggggatgggtaccttcgccccgggaagcgtggcctacaacctggtggacccggtggcccgcaacaccatcgccgtgcctggcggtggctgggctgtcatacgcttcgtcgccaacaatccaggcatgtggttctttcactgccacctggacccgcacgtgcctatgggcctgggcatggtgttccaggtggacagcgggacgacgcccggctccacgctccctacgccgccgggggattgggtgggagtatgcgacgcgcagcactacgcggccgcggcggcggtagcagcagcgccggtgccagttccggccccagccccagtcccagcaccaatcctagcgccagcaccagcagaatcgccgttgccacctccgcgcgcggtggaccacaagccgtcgcccaaccttcctcagcgcagggagcacacgggtacctctaattccgctgctggacggagagctaaggggcacctcgcttgtttcttgtgttctgtcctccttttctttcttcttcgtcaacacaaggcctagctcatgggaagctttggcgtgatacccgcgcagaatctgcagttttgttcgttcgtgtaagtaatatgaaattgttttttctttaaatcttttatacacgtgtatatggatttatattctgatgtaattgtgtgaccttttccttctccacgtgggaagttgtgcatagcaaagttcatgtttagggtttattggctctctgtattcatgatagacattgatacaaagtaatatcatacactacggtttgatttgaaagcatagcgtatacttgaattaa

SEQ ID NO: 36047 - DNA, 2293 bp, Zea Mays
cgcgcgcacactgaaatagctgtgcctctggctgcttcgtcttcctccccttccttgtcctctgcctctgctgcactctgctccacccccttttttctttcccccatccatggtgcagcttttgccggcgctggtggcgctcgcccttctcctcgtcagaccggtggcggatgcggcgatggctaaatacacgttcacagtggggagcatgcagatcagtcagctgtgcagcagcaccagcattattgcggtgaacgggcagctgccgggcccgtcgatagaagtgaacgaaggcgacgatgtcgtcgtcaaggtcgtcaacaactcgccgtacaacgtgaccatccactggcatggtgtgctccagctcatgaccccgtgggcggacggcccgagcatggtgacgcagtgccccatccagcccagcagctcctacacgtaccggttcagcgtgccggggcaggagggcacgctgtggtggcacgcgcactcctccttcctccgcgccacggtgtacggcgccttcatcatccgcccgaggcgcggcaacgcctaccctttcccggcgccggacaaggaggtccccatcgtgctcggctgtcgtcatgagcaggcgagtggtggaaccgcaatgtagtcgacgtcgagagcgacgccatcttggccggtagtgacagagagattgtgtactatacagacgagacgttcacggcggtggtggagcccagcacgagggtgctcctccgggtcgtcaacgccggcctcaactcgcacctcttcttcaagctggccggccacaacttcaccgtcgtcgccgtggacgcgggctacacctccaacctcaacacggacacgctcgtgctcgcgccgggccagaccgtggacgcgctcgtcaccaccgccgccgcgcccgggagctactacatggcggtgctggcgcacgacaccatgagcccgctcgcgttcgcggcgtcggacacgaccaccgccaccgcgatcctccagtacaacggcacgtcgtccaccaacccgcccgcgatgcccgccatgccgtccagctccgactccgggacggccaacgccttctacttcgggctgaggggcctgggcgcgcccgcggtgccggcgccggtggacgtgagcatgaccatcgagctgggcctcggccagctgccctgcgacccgtcgcagaccaggtgcaacgggaccgcggccgccgccgcgatgaacggcgtctcgttccgcctcccgtcccccgagacgtctctcctcggggcgcacgtcgacggcgtcgcgggggtcttcacggcagatttcccggacggtccgccgccgagcggcacggcgatgtcggtggggaccaagctcaagaagctcagctacaactcggtggtggagatcgtgctgcagaacccggcggccgtcccgacggagaaccacccgatccacctccacggcttcaacttcttcgtgctggcgcaggggatgggtaccttcgccccgggaagcgtggcctacaacctggtggacccggtggcccgcaacaccatcgccgtgcctggcggtggctgggctgtcatacgcttcgtcgccaacaatccaggcatgtggttctttcactgccacctggacccgcacgtgcctatgggcctgggcatggtgttccaggtggacagcgggacgacgcccggctccacgctccctacgccgccgggggattgggtgggagtatgcgacgcgcagcactacgcggccgcggcggcggtagcagcagcgccggtgccagttccggccccagccccagtcccagcaccaatcctagcgccagcaccagcagaatcgccgttgccacctccgcgcgcggtggaccacaagccgtcgcccaaccttcctcagcgcagggagcacacgggtacctctaattccgctgctggacggagagctaaggggcacctcgcttgtttcttgtgttctgtcctccttttctttcttcttcgtcaacacaaggcctagctcatgggaagctttggcgtgatacccgcgcagaatctgcagttttgttcgttcgtgtaagtaatatgaaattgttttttctttaaatcttttatacacgtgtatatggatttatattctgatgtaattgtgtgaccttttccttctccacgtgggaagttgtgcatagcaaagttcatgtttagggtttattggctctctgtattcatgatagacattgatacaaagtaatatcatacactacggtttgatttgaaagcatagcgtatacttgaattaa

SEQ ID NO: 36048 - DNA, 1661 bp, Zea Mays
gacttaaaattttacattttcgaataagtattttgaataagacgaatgatcaaagtttttgaaaaaagtcaacgacgtcatatatttaagaacggaggtagtataactgtttttcactttgcttcatttgatgagccaagagcattgtagacctcacagtagagactggcttttcttttgtgcacggttggtagaactggaaattagtgagttctttatttctattggtaagcaacaaaggaacaaatcaattgtctgctaatatgaagtttttcaggttgaggccgcagaaacttcctattatctgaatcttgtagtttttggctttttgcattgtcttctaaaaaaatacttaacatatttttatcagttcaataatagattattttggaaatttatgcaatcgttttgcctataactagtacatccatggattggctgctcgaggagtgcattacttgcatcggcccggaccactgctccaggacttgggatttatggcccttccagagcttggccaagagaaaggttatcttagtgagagcttattcactttcatcttcatttccttttttctgtggagttttcacccttttgtttatcacagcaaacgcttttacactgttctactatggcgtagggtgctggcatttctagtggcttcacagtttttaaggattatgacattctattccactcaacttcctggtcccaattatcactgtcgtgagggctcaaaactggccactctcccaccaccaaataatgcacttgaagtgctcctgattaactttcctcgcggagtgctttttggttgtggcgatctgatattttcatctcacatgatcttcaccctagttttcgtgcgcacgtaccataaatatggctcaaacaggtacactgttaatttggttgtgttctttgttgataagaagctgcctgaaatgccagatcgtacaaatggattatctttgcttccagtaaacacaaaggataaagacgggaggatgaaggaagaactccataagcttgagaaggacgggaggatgatggatgagttccataaattattaaatggaaacactgtcgatgctacagattggcgacaacgagtgcagattaatggaaagcacggagaagacacgaaccacactgtctctgatgccacccctactggaacatgatcagtagcttttctttgttatatcgtttttaacatccacaggggagtctgcgatgaaaaaggaaattgcgtgttgtgcctctgtatctgaaaggcttctcaggtacccgcaaggctgcaacatagaatgttttgttgtgctctccatggcacgatgacaggaaaaaacgaggtgttgaagtagtggtagaaactataatagaatcaggatctcttcgcttttctaagagaccgcagctacagttttgcatccttcagacatttcaaaaacgacggtactagagagaaattgatgtttgatgtaaatgttgattcgattcagctagtcctagctacaaaaaaaaatccatttgtgccaatgagtaatgactaacttatgctgattggtaatttaacgtgagcagctgtaatgatcgcttttgttaccactttgaaggtctttttagaatgaaggaattttacgagactcggtttattt

SEQ ID NO: 36049 - DNA, 1575 bp, Zea Mays
gacttaaaattttacattttcgaataagtattttgaataagacgaatgatcaaagtttttgaaaaaagtcaacgacgtcatatatttaagaacggaggtagtataactgtttttcactttgcttcatttgatgagccaagagcattgtagacctcacagtagagactggcttttcttttgtgcacggttggtagaactggaaattagtgagttctttatttctattggtaagcaacaaaggaacaaatcaattgtctgctaatatgaagtttttcaggttgaggccgcagaaacttcctattatctgaatcttgtagtttttggctttttgcattgtcttctaaaaaaatacttaacatatttttatcagttcaataatagattattttggaaatttatgcaatcgttttgcctataactagtacatccatggattggctgctcgaggagtgcattacttgcatcggcccggaccactgctccaggacttgggatttatggcccttccagagcttggccaagagaaaggttatcttagtgagagcttattcactttcatcttcatttccttttttctgtggagttttcacccttttgtttatcacagcaaacgcttttacactgttctactatggcgtagggtgctggcatttctagtggcttcacagtttttaaggattatgacattctattccactcaacttcctggtcccaattatcactgtcgtgagggctcaaaactggccactctcccaccaccaaataatgcacttgaagtgctcctgattaactttcctcgcggagtgctttttggttgtggcgatctgatattttcatctcacatgatcttcaccctagttttcgtgcgcacgtaccataaatatggctcaaacagtaaacacaaaggataaagacgggaggatgaaggaagaactccataagcttgagaaggacgggaggatgatggatgagttccataaattattaaatggaaacactgtcgatgctacagattggcgacaacgagtgcagattaatggaaagcacggagaagacacgaaccacactgtctctgatgccacccctactggaacatgatcagtagcttttctttgttatatcgtttttaacatccacaggggagtctgcgatgaaaaaggaaattgcgtgttgtgcctctgtatctgaaaggcttctcaggtacccgcaaggctgcaacatagaatgttttgttgtgctctccatggcacgatgacaggaaaaaacgaggtgttgaagtagtggtagaaactataatagaatcaggatctcttcgcttttctaagagaccgcagctacagttttgcatccttcagacatttcaaaaacgacggtactagagagaaattgatgtttgatgtaaatgttgattcgattcagctagtcctagctacaaaaaaaaatccatttgtgccaatgagtaatgactaacttatgctgattggtaatttaacgtgagcagctgtaatgatcgcttttgttaccactttgaaggtctttttagaatgaaggaattttacgagactcggtttattt

SEQ ID NO: 36050 - DNA, 1977 bp, Zea Mays
gcacctcctcccacatccaaatcacacacagcagacgcccctccacacggttaccattccccctcctcttcctcgttggacaccattcctcgctgcgcagaactcaccgcgagcgtcttcctccgacaagccttctccccaaattgcgatctgttcccgagtttcgagggatcgaagacaaagcgttggcgaccaagtgacctagctcttcgagttctacaaggttgaagaccctgagcatctgtttggtgaaggcaagtgtcctctgacccattatgtcctattcacttataattcactttcccgcagtatttaattgaaatctaaggattgactagctttatactttaccttatccttgatgaccttttgggtgattatggttagcattttgctattgccttaacttaatcaatgaacatgatgtgactatttatgatacgatactgttatcctgattatattgttgatcttgtgatactctagggggctcaggctgtttcctgagtacctctccgtaaggacctgttcgttgagagaccacccgggataacagtgcaaccatgagggtggaatggggtgcccttagctaattaattagaggaactagaagtgtagttgcttcgccgtcgtgccgtcaatggggtccaggcacagtgcttgctctgccgaggctgagtgccgaggttctttcgttttgttttttagtcaccctcctgcggggagaggtactgtgtttatcaaactggagaaacctaacgggcagctatgacctctagagaatctttgtaaaggcttcgtagtgaatccctggccattcaccttgggagtgaataagggtcttgcaagcccgggctagagagggaatcacggctcatgggtaaagtgtgcgacctctgcagagggtagtgaaactggtatatcagccgtgctcacggttaagagcagccttgggatcctctttgattagagatactccggatacactccaaatgatgactttaatgatgatggttaatgatggtgacttcaattatgttctctagtatttcttctctgaagaggtacttctggggattataacttgggttttatgataaaacctggctcctactaataataaatacctaaccaactaaaagcaactgcttgagcctaaccccacataaagctagtccacttcagccaaacgggacatttgctgagtacgttgatgtgtactcacccttgctttaccacaaaacaccaggttgtccgcattgtaaccactgctcaggagaagacgaagtcgtggaaggagacttccaggagttccaagactacgacgaattctaggtgtgggttggcggcaacccccagtcagctgcctgtgaaggccttatctttactgcgtttcgctagcactttgatttaactgttaagttgatgactatgtggatgtctatgactccgtgatgtaataagttaatacccttttatgttattattcgagcactgtgcgatgatgttcatctatgtaatcgctgtgtacgtgaattctgatcctggcacgtacatagttcgcattcggtttgccttctaaaaccgggtgtgacaacgacgatgccgacgacgacgacgagggcgatggcggcggtgacggtgacggcagcggtaggggcggcggcagcggcagcaagggtggtgacggcggcggcagcaggggcggcagcggcggtggcggcagcagcagaggcagcaccaggggcggcagcaacagggccagtggctagatgccactgaccttttagatattagtatagtatagttagaataatgtagtagtaattactagtgtagagtagtatagtgtagtgtagtagtagtagcagtaatgtaatgtaatgtagtagtagtaatagggaagtatcaactcataaagagttgatttgtaagcatgatatcttccccttaatgaagtaatggtgttggtttctc

SEQ ID NO: 36051 - DNA, 471 bp, Zea Mays
gcacctcctcccacatccaaatcacacacagcagacgcccctccacacggttaccattccccctcctcttcctcgttggacaccattcctcgctgcgcagaactcaccgcgagcgtcttcctccgacaagccttctccccaagctacttgatccaagggttcttgtgcgactgctttccgtgtggtcttccatatgacgaatctccggtcaatccaatcgcgacacgtcacaataaatatattaaatgtatgtcagttgttgcgtattaaactcgttttatgccattctagatacgttagcttcataatgatattatatacacatgaaaatattactttatcgtaacacatgtttcatttagttaattaattatttgtttagtcttcgattatcaaaatggaaatttaataaaaactaagttatagtttaatttatttttataagtatatgttaatgtgattaataacaac

SEQ ID NO: 36052 - DNA, 2137 bp, Zea Mays
aggatagtagtttgaccccctccagtacgtccgcaccgcaaggcctctcgccgtccttggacattctccgtccgtcgcctttgcctggggcagataacaatatctgatatccctgggccttcgccgtccgggcccccctaccttctctcatccgtcctcacacaaagcagaagggggaggagttttaggggaggagggggcggcaggaggagccattattatttcttcttccagcggcaattcctggccaccaccgggcgcgctatattactccgggttcgtggacaagcatgcagaggggcgtgtccttccctggcggaatggcgaaggagtgcccgcccgccgagctctggctcccggacgagttcctggacgacgacttcttctccgaggaggagaaggcggcggtcgcggccaagagcgagagcgacgaggaggaagggatggacggcctctcgcgccgcgcggccgggctcgtcgtcgggggtggaggggacggttcccctgcaaaggttgcttacctttttttttttctctctctctctctcccgttgtggtgctgccgtgtttggaagtttccgggttcgaatctcgctcagccctgatcgtttccacctctgtcgcgtgggggcaggcgcaagtgttagccggctcgccgcagtcgattctgtgcggcctgcatgcttccggggaggacagccccaacggcgcggcgtcgcaggtcagctcgccgccgtcgtcgccgctggagaagaccccggccgaccactgggacctgctcaaagaggcggccggccaggtggcccgcatgcgcacaactagcggcatcctggtggcaacgaacgcgggcgcacatcaaagacaccccgtcccgccgctggcgcagaagctctctgcgccggccgaggctccgaaggccgcgggtgccaacctccctcaggctcagccgaagaactcgatggaacatcgccggattcagattgctctttaatgcgctgaagcagcagcagctcctgaagcacatgcgggagcgggagctcgccgtcgctacggcggcggcgtggggcacgagcgttgccgggtctcatcgtgccgccgggtaccgtgcgccggcgccccatgtcctgagctcgtccgcgtggcccaccctccagaagcagcagcagcagcagcagcaaagggcggcgtccccggcgggcatgcgcgccgtcttcgtcgcccctcctggcgccaagcgcgagtgcgccggcaccggcgtgttcatcccccgccaggccggcgcccccgcggagcccaagaaaaggccagcagcgtgcgcccctgtccttctcccggcgcgcgtcgtgcaggcgctcaacctcaacgtcgaggacctcggggcccgtcccatctacccgggcggcttcgtcctcgaccacgatgcactggtgagccggagcaacgctctgctggcgagccgcgcgtcccagcagctccatggcgcttcgtcgcgcgaggtgaatctcccccaggaatggacgtactgagggcgccgattcgccaccgcaccgctgcaagatgactcgacgatcactccagattaacggggggtgtcaaaaaaaattactattgctattggtagcaataggtattataggtgttgttaggctagaagtaggaggcagcggtggtgtggcattacgcgccagcgttaggtgttcttttgtgcgggggtgatatattggttattttgggactgacggacgggttggtgatgagcaagagcgaaatcaatcatccgtggctctcgcaggtccgttgggggcggaggggagaaacagcaataataataataagtgggtgcttttgggggaggggagagaggggggtttggaactaatcctatgtttagctggttctggtactacgatggtttcccaagggaaaatcatcaagcattcagcagtctgtgaaagagatgtctcgtcactgtaagcaaataataataataataacaggagctccatatttccttctcttttttttttgttgttgtcccttttggtttgcagaaacgcacgcaccaggctctctcttgatccttttcttgccgttgcttcaagggtaaggaatcggcgtctttagggctgcggcttac

SEQ ID NO: 36053 - DNA, 990 bp, Zea Mays
acagagcgccacgaggcgagcagtcgagtgttccctagagtccccgttcctccgccgccgcctgcaaccgcttcacgtgccctgatccatcgcaggtcccctttctgaccccaaatggagccgaagaagtcctctgctcagcaccagccccacgccatggaacccaagaagtcctctccacgcggcgccggggccgtcgccgccaccgccactgaagccgagtccccgttgagcagcttgttctacccgccggcgcccgcggcaaatgggaaagatcaggagttgtacagcattatttacaaagggcagagcgggagcgcacaagctggcgcgacagatggtaaaccgcaatgggctccttccaaaagtcataccgcgtacgcaaaggacggtaaacattcaccaccttatgatacgtcatgttttgggtcatctgtgcattatggtggtcgagattatttctacggcagctctacaaccaagaaagcgacagaatcctccactgactacaaaggggacaagaaagatccagtcgcagattctcatggcgactggtggcaaggctcattttattactaagagaacctggtggcctctccttggagaacaagaaggagggcagtgaagctcggtttccttgattgctagcagtattatcttgtgtcatagtggacccgctttcgtccagcggtggtgccaatatttagaagcatcacctggcctgggcagatgtagtgtgcgtcttatagtctctgctttagatgtgcaatgtaacgaagctttagcacagtatgaactagaccgcataaaagaatccatgtccattccgccagtaatacgagcgggttggtatctgactccttagagtcaaaagtctgtacaattgtatcgtcgctccaaagcaaaaaaaaaacaataataatgtgctggagaagcggcgatgacttcacattgtacacctttaccagctggaatttgacagaagtttgg

SEQ ID NO: 36054 - DNA, 993 bp, Zea Mays
acagagcgccacgaggcgagcagtcgagtgttccctagagtccccgttcctccgccgccgcctgcaaccgcttcacgtgccctgatccatcgcaggtcccctttctgaccccaaatggagccgaagaagtcctctgctcagcaccagccccacgccatggaacccaagaagtcctctccacgcggcgccggggccgtcgccgccaccgccactgaagccgagtccccgttgagcagcttgttctacccgccggcgcccgcggcaaatgggaaagatcaggagttgtacagcattatttacaaagggcagagcgggagcgcacaagctggcgcgacaggtaatggtaaaccgcaatgggctccttccaaaagtcataccgcgtacgcaaaggacggtaaacattcaccaccttatgatacgtcatgttttgggtcatctgtgcattatggtggtcgagattatttctacggcagctctacaaccaagaaagcgacagaatcctccactgactacaaaggggacaagaaagatccagtcgcagattctcatggcgactggtggcaaggctcattttattactaagagaacctggtggcctctccttggagaacaagaaggagggcagtgaagctcggtttccttgattgctagcagtattatcttgtgtcatagtggacccgctttcgtccagcggtggtgccaatatttagaagcatcacctggcctgggcagatgtagtgtgcgtcttatagtctctgctttagatgtgcaatgtaacgaagctttagcacagtatgaactagaccgcataaaagaatccatgtccattccgccagtaatacgagcgggttggtatctgactccttagagtcaaaagtctgtacaattgtatcgtcgctccaaagcaaaaaaaaaacaataataatgtgctggagaagcggcgatgacttcacattgtacacctttaccagctggaatttgacagaagtttgg

SEQ ID NO: 36055 - DNA, 1027 bp, Zea Mays
acagagcgccacgaggcgagcagtcgagtgttccctagagtccccgttcctccgccgccgcctgcaaccgcttcacgtgccctgatccatcgcaggtcccctttctgaccccaaatggagccgaagaagtcctctgctcagcaccagccccacgccatggaacccaagaagtcctctccacgcggcgccggggccgtcgccgccaccgccactgaagccgagtccccgttgagcagcttgttctacccgccggcgcccgcggcaaatgggaaagatcaggagttgtacagcattatttacaaagggcagagcgggagcgcacaagctggcgcgacaggtaatggtaaaccgcaatgggctccttccaaaagtcataccgcgtacgcaaaggacggtaaacattcaccaccttatgatacgtcatgttttgggtcatctgtgcattatggtggtcgagattatttctacggcagctctacaaccaagaaagcgacagaatcctccactgactacaaaggggacaagaaagatccagtcgcagattctcatggcgactggtggcaaggctcattttattactaagagaacctggtggcctctccttggagaacaaggtaaccgggcagcactaaagtgcaaaagaaatcaaggaaaaactctacggttctactcatcccaagttaaggctctttgccgttgttcgatgtcttctttcactctagaggcaacttgcactgtcgttttgaaaacgccgttgaagattcttctgttccgttctttccagatgttccaaatagtgtaaatcactaccccattgaatctacctttacatcgttttcatatagtgtgggcaaataattaattaccgctatttcagtattattttggctgattattagttacaccttttcagtatgcttatatgggctagcgttgttgtcacataaacccagttagagtgagaagccaatcaaggaaaacacacctgactattgagccactgatgtggggtttcattatatcgggg

SEQ ID NO: 36056 - DNA, 499 bp, Zea Mays
aacttgagtcatcatccatggtgctgtgagctagcgagccactaacctgtaatgactgagctgagttatcttctgcagcactattctggctgcccgatccacccccggatcaggcgcttggtgtccgaggcggattgctccaactgattctgcgcggcggattgctacaaaattgggaagagttgagggagccgttggagcatggaaaaaacacgaattcttcctaacatcactttttcgagtatttctagcagcgtcgttggagttgctcttaggggctgtttggttggaccgaacaatatgggctcgcctcgctcagcaagaaacagaacaagaacaggatagacgggaaagactgtcaaggcacagatccgggacacggctagccaggaaaggtaccgcgggaacatcgctgttatgatggtcagtaacaagtcggacctgaacggctgaaccaccttaggtcggataaacgtcgagaaggcgttccacagcacac

SEQ ID NO: 36057 - DNA, 1741 bp, Zea Mays
gtttcggcgtcgttattagctcgttttttctcttggcacgcgtgctcgacagactgactccatctgaccgggacacgtatagccgtgccagttgccgtccgttgcccaaactgtatccagccctctcggtctcggatagacagcgacggagaggagagcggcgggcggagagaagtggaggaagaagacgaggatggccacctatttcacgctcaacaccggggctcgcatcccctcggtagggctcggcacctacaaggccggacccggcgtcgtcgccgacgcgatcaccgccgccgtcaaggtcctagcctcaccatcgagcactttctgctccgagctttacatccgcgcgtgtgctgttccgtttgttttgacctgtgcccttgcttgagcccgggccttattcatcctgccttcttgcttgcttgcttgtaaactgccatggcaggccgggtaccggcacatcgactgcgcgccgctatacaagaacgagaaggaggtagctagccgccgcaatccacgttccaccctgcaattaagtatcttcgattcacatttgcgatggcagttcggttatagttgcgaccactaacgtgttcccagatcggcgttgctctgaacaagctctttgatgacggcgtcgtcaagcgagaagaccttttcatcacctcaaagatatggtactaccatggatactgtgttactgctctcgtgtccatcagtctcgtaacaacctgagcgtcaagctacacaggtgcagcgatctcgcacctgaagacgtgccgttggcgatcgacatcaccctgaatgatctgcagctagattatcttgacctgtacctggtaacctgaatacgtacactgcaagaggccaagagccaacagaccccctttctttgctactactaataaacctccgggaccttcgtagatacactggcccttccagataaagagaggcagcgagctcagtccagagaacttcgtccacctcgacatgcccaagacctggcaggcaatggagaggctgtacggctcaggcaaggctcgcgcggtaggcgtcagcaatttctcgaccaggaagctggccgatctgcttgccgtagcccgtgtcactccagccgttgatcaggtggagtgtcaccccggctggcagcaggcgaggctcagagcgttctgctgctccagcggggttcatttctctgcgtacgcgccgctaggcaggatgaaagccgtcgccagtgacccggtggtcgcatccgtagccgagagcttggggaaaactccggcacaggttgctctgcgatggggtatccagcagggccagagcgtgcttcccaaaagcgccaatgagtcgaggttgaaggagaacattgacctgtttggttggtccattcctgatgagctgtgcgccaagttttctgaaattgaacaggtacctctccagttcttgcagcgatggataatcatgcgtggcggtgaactcatcaaccaagtgaaggtcttgtggtccgatatggatgaagaactggcaacttaggaagatactgaagctctgcgcgctaaattccctggcgcaccagtttgggggcaagctggcttttaaggtcagggcaatgtcagcagctccaaggagaaggcatcaatggaggctcaatcggatgcgttgaagaagtcgacaactgaagaaccgaacgcgaagatggcacaagcgcgggaacgacgtccaagtatcaaat

SEQ ID NO: 36058 - DNA, 2833 bp, Zea Mays
gtttcggcgtcgttattagctcgttttttctcttggcacgcgtgctcgacagactgactccatctgaccgggacacgtatagccgtgccagttgccgtccgttgcccaaactgtatccagccctctcggtctcggatagacagcgacggagaggagagcggcgggcggagagaagtggaggaagaagacgaggatggccacctatttcacgctcaacaccggggctcgcatcccctcggtagggctcggcacctacaaggccggacccggcgtcgtcgccgacgcgatcaccgccgccgtcaaggccgggtaccggcacatcgactgcgcgccgctatacaagaacgagaaggaggtagctagccgccgcaatccacgttccaccctgcaattaaatcggcgttgctctgaacaagctctttgatgacggcgtcgtcaagcgagaagaccttttcatcacctcaaagatatggtgcagcgatctcgcacctgaagacgtgccgttggcgatcgacatcaccctgaatgatctgcagctagattatcttgacctgtacctgatacactggcccttccagataaagagaggcagcgagctcagtccagagaacttcgtccacctcgacatgcccaagacctggcaggcaatggagaggctgtacggctcaggcaaggctcgcgcggtaggcgtcagcaatttctcgaccaggaagctggccgatctgcttgccgtagcccgtgtcactccagccgttgatcaggtggagtgtcaccccggctggcagcaggcgaggctcagagcgttctgctgctccagcggggttcatttctctgcgtacgcgccgctaggcaggatgaaagccgtcgccagtgacccggtggtcgcatccgtagccgagagcttggggaaaactccggcacaggttgctctgcgatggggtatccagcagggccagagcgtgcttcccaaaagcgccaatgagtcgaggttgaaggagaacattgacctgtttggttggtccattcctgatgagctgtgcgccaagttttctgaaattgaacaggttaagcaaatcagaaatgacgcgtttgtgcacccccagagtatttacaaaacaatcgacgaactctgggatggtgagatctaaaatgaagatcattttcggtacgaaatcaatctgtaaccagagttgaaatttacgccaaaaaagtagggatatatgcttttgtcttccaaggggggaaaaggcacatgtttatcttaagcactactggcaacaggcatgtggtgtgggttgcattttcggcagggctgagtgacgtcagcatattgttgcattgcagcagatccaatgaaggggcccttgagtaaagcatagaacgaacaattttcatctgttgttgtcgtatgctcgtttcatcgatgactttgtatgtagcattaagtgtagttcttaaataaccgagaagtcatatcctggcctagccaaagcttccattaattcaggattcagcacatagccgatcataaagctagctttgagagctctttgttccggaaacgttacgaaacgatgagcaagcatcgacatttgccggcctttagatagcctcaggcggcgtgcatctgcgctcgcagaagctgatgaggatgtccgcacaccggaagacgggtggttcgtcgatgccgccggtgggggcatggttgtgatggtcatcaagctccaaaatcaatatagaaaatggtttaaagtcatttacctttcaatctctccctttttggttgatgtcaacacataaacaaagcaaatatcatattatgaaaattgtaactagtttgcaatttgctcaagtattcataagatactaagtacaaagcagttctaagtgaatatgagtgtttttgacatgattaacattttggaacacatttgcaccagttgcattcgattttgcaaacttttgataaaatcttttcaaactcattttcttttggccgaaagtatagaaatggaattttcacaagcatttctaagttttgaagaattcttccccttgcttttgttttggccaaataaatgctctccatgaacaaattctcaccttttagtttgaaaacatttttctcctcttagctgtcaagagggttttcttaaatgaaacagtaccaatttggaagactaaaaagttttaaaaaacaaggtggtggtacagtccttttgctttggcggtgcggttcttttgctttggcctagtaattttcccctttggcattgagcaccaaaaacgaagaaattgagaggcctttctcaacatggatatggattttaagaacttgagtttgagcaagggtgtttggtaccaaatgaatggtagtggaagcagtccctttgctcagcaacaaaggaaggatacggcagggcgacgaggtcgttgaggatgtgatcggcaagtgcatatcgctaaagagtgaggaggatctgactccaccaacaagggttgtgggaggatgttgggtccaatatgatggacatgagggatcggatattgtgcaacctggtggcctgagcgtgaagagtagcgacgtggtcagcgtcgagttcagaggtgagggggcccttagcagtgggcggatgagcctcatgaacgactggaggatgcccgaggatgaggtgctgcgtggtggccatccgggcggtcagagcagcggcgctcatggcatgctctgactccaggacgagtgtcgcgacgcgcttgtggtcgcgagaagcagaaacagccgcctggatggtggcgatggccgtaaccagcgccgaggaagccggcagggaag

SEQ ID NO: 36059 - DNA, 2780 bp, Zea Mays
gtttcggcgtcgttattagctcgttttttctcttggcacgcgtgctcgacagactgactccatctgaccgggacacgtatagccgtgccagttgccgtccgttgcccaaactgtatccagccctctcggtctcggatagacagcgacggagaggagagcggcgggcggagagaagtggaggaagaagacgaggatggccacctatttcacgctcaacaccggggctcgcatcccctcggtagggctcggcacctacaaggccggacccggcgtcgtcgccgacgcgatcaccgccgccgtcaaggccgggtaccggcacatcgactgcgcgccgctatacaagaacgagaaggagctctttgatgacggcgtcgtcaagcgagaagaccttttcatcacctcaaagatatgctacacaggtgcagcgatctcgcacctgaagacgtgccgttggcgatcgacatcaccctgaatgatctgcagctagattatcttgacctgtacctgatacactggcccttccagataaagagaggcagcgagctcagtccagagaacttcgtccacctcgacatgcccaagacctggcaggcaatggagaggctgtacggctcaggcaaggctcgcgcggtaggcgtcagcaatttctcgaccaggaagctggccgatctgcttgccgtagcccgtgtcactccagccgttgatcaggtggagtgtcaccccggctggcagcaggcgaggctcagagcgttctgctgctccagcggggttcatttctctgcgtacgcgccgctaggcaggatgaaagccgtcgccagtgacccggtggtcgcatccgtagccgagagcttggggaaaactccggcacaggttgctctgcgatggggtatccagcagggccagagcgtgcttcccaaaagcgccaatgagtcgaggttgaaggagaacattgacctgtttggttggtccattcctgatgagctgtgcgccaagttttctgaaattgaacaggttaagcaaatcagaaatgacgcgtttgtgcacccccagagtatttacaaaacaatcgacgaactctgggatggtgagatctaaaatgaagatcattttcggtacgaaatcaatctgtaaccagagttgaaatttacgccaaaaaagtagggatatatgcttttgtcttccaaggggggaaaaggcacatgtttatcttaagcactactggcaacaggcatgtggtgtgggttgcattttcggcagggctgagtgacgtcagcatattgttgcattgcagcagatccaatgaaggggcccttgagtaaagcatagaacgaacaattttcatctgttgttgtcgtatgctcgtttcatcgatgactttgtatgtagcattaagtgtagttcttaaataaccgagaagtcatatcctggcctagccaaagcttccattaattcaggattcagcacatagccgatcataaagctagctttgagagctctttgttccggaaacgttacgaaacgatgagcaagcatcgacatttgccggcctttagatagcctcaggcggcgtgcatctgcgctcgcagaagctgatgaggatgtccgcacaccggaagacgggtggttcgtcgatgccgccggtgggggcatggttgtgatggtcatcaagctccaaaatcaatatagaaaatggtttaaagtcatttacctttcaatctctccctttttggttgatgtcaacacataaacaaagcaaatatcatattatgaaaattgtaactagtttgcaatttgctcaagtattcataagatactaagtacaaagcagttctaagtgaatatgagtgtttttgacatgattaacattttggaacacatttgcaccagttgcattcgattttgcaaacttttgataaaatcttttcaaactcattttcttttggccgaaagtatagaaatggaattttcacaagcatttctaagttttgaagaattcttccccttgcttttgttttggccaaataaatgctctccatgaacaaattctcaccttttagtttgaaaacatttttctcctcttagctgtcaagagggttttcttaaatgaaacagtaccaatttggaagactaaaaagttttaaaaaacaaggtggtggtacagtccttttgctttggcggtgcggttcttttgctttggcctagtaattttcccctttggcattgagcaccaaaaacgaagaaattgagaggcctttctcaacatggatatggattttaagaacttgagtttgagcaagggtgtttggtaccaaatgaatggtagtggaagcagtccctttgctcagcaacaaaggaaggatacggcagggcgacgaggtcgttgaggatgtgatcggcaagtgcatatcgctaaagagtgaggaggatctgactccaccaacaagggttgtgggaggatgttgggtccaatatgatggacatgagggatcggatattgtgcaacctggtggcctgagcgtgaagagtagcgacgtggtcagcgtcgagttcagaggtgagggggcccttagcagtgggcggatgagcctcatgaacgactggaggatgcccgaggatgaggtgctgcgtggtggccatccgggcggtcagagcagcggcgctcatggcatgctctgactccaggacgagtgtcgcgacgcgcttgtggtcgcgagaagcagaaacagccgcctggatggtggcgatggccgtaaccagcgccgaggaagccggcagggaag

SEQ ID NO: 36060 - DNA, 2680 bp, Zea Mays
gtttcggcgtcgttattagctcgttttttctcttggcacgcgtgctcgacagactgactccatctgaccgggacacgtatagccgtgccagttgccgtccgttgcccaaactgtatccagccctctcggtctcggatagacagcgacggagaggagagcggcgggcggagagaagtggaggaagaagacgaggatggccacctatttcacgctcaacaccggggctcgcatcccctcggtagggctcggcacctacaaggccggacccggcgtcgtcgccgacgcgatcaccgccgccgtcaaggccgggtaccggcacatcgactgcgcgccgctatacaagaacgagaaggagatcggcgttgctctgaacaagctctttgatgacggcgtcgtcaagcgagaagaccttttcatcacctcaaagatatggtgcagcgatctcgcacctgaagacgtgccgttggcgatcgacatcaccctgaatgatctgcagctagattatcttgacctgtacctgatacactggcccttccagataaagagaggcagcgagctcagtccagagaacttcgtccacctcgacatgcccaagacctggcaggcaatggagaggctgtacggctcaggcaaggctcgcgcggtaggcgtcagcaatttctcgaccaggaagctggccgatctgcttgccgtagcccgtgtcactccagccgttgatcaggtggagtgtcaccccggctggcagcaggcgaggctcagagcgttctgctgctccagcggggttcatttctctgcgtacgcgccgctaggcaggatgaaagccgtcgccagtgacccggtggtcgcatccgtagccgagagcttggggaaaactccggcacaggttgctctgcgatggggtatccagcagggccagagcgtgcttcccaaaagcgccaatgagtcgaggttgaaggagaacattgacctgtttggttggtccattcctgatgagctgtgcgccaagttttctgaaattgaacaggttaagcaaatcagaaatgacgcgtttgtgcacccccagagtatttacaaaacaatcgacgaactctgggatggtgagatctaaaatgaagatcattttcggtagcatgtggtgtgggttgcattttcggcagggctgagtgacgtcagcatattgttgcattgcagcagatccaatgaaggggcccttgagtaaagcatagaacgaacaattttcatctgttgttgtcgtatgctcgtttcatcgatgactttgtatgtagcattaagtgtagttcttaaataaccgagaagtcatatcctggcctagccaaagcttccattaattcaggattcagcacatagccgatcataaagctagctttgagagctctttgttccggaaacgttacgaaacgatgagcaagcatcgacatttgccggcctttagatagcctcaggcggcgtgcatctgcgctcgcagaagctgatgaggatgtccgcacaccggaagacgggtggttcgtcgatgccgccggtgggggcatggttgtgatggtcatcaagctccaaaatcaatatagaaaatggtttaaagtcatttacctttcaatctctccctttttggttgatgtcaacacataaacaaagcaaatatcatattatgaaaattgtaactagtttgcaatttgctcaagtattcataagatactaagtacaaagcagttctaagtgaatatgagtgtttttgacatgattaacattttggaacacatttgcaccagttgcattcgattttgcaaacttttgataaaatcttttcaaactcattttcttttggccgaaagtatagaaatggaattttcacaagcatttctaagttttgaagaattcttccccttgcttttgttttggccaaataaatgctctccatgaacaaattctcaccttttagtttgaaaacatttttctcctcttagctgtcaagagggttttcttaaatgaaacagtaccaatttggaagactaaaaagttttaaaaaacaaggtggtggtacagtccttttgctttggcggtgcggttcttttgctttggcctagtaattttcccctttggcattgagcaccaaaaacgaagaaattgagaggcctttctcaacatggatatggattttaagaacttgagtttgagcaagggtgtttggtaccaaatgaatggtagtggaagcagtccctttgctcagcaacaaaggaaggatacggcagggcgacgaggtcgttgaggatgtgatcggcaagtgcatatcgctaaagagtgaggaggatctgactccaccaacaagggttgtgggaggatgttgggtccaatatgatggacatgagggatcggatattgtgcaacctggtggcctgagcgtgaagagtagcgacgtggtcagcgtcgagttcagaggtgagggggcccttagcagtgggcggatgagcctcatgaacgactggaggatgcccgaggatgaggtgctgcgtggtggccatccgggcggtcagagcagcggcgctcatggcatgctctgactccaggacgagtgtcgcgacgcgcttgtggtcgcgagaagcagaaacagccgcctggatggtggcgatggccgtaaccagcgccgaggaagccggcagggaag

SEQ ID NO: 36061 - DNA, 2677 bp, Zea Mays
gtttcggcgtcgttattagctcgttttttctcttggcacgcgtgctcgacagactgactccatctgaccgggacacgtatagccgtgccagttgccgtccgttgcccaaactgtatccagccctctcggtctcggatagacagcgacggagaggagagcggcgggcggagagaagtggaggaagaagacgaggatggccacctatttcacgctcaacaccggggctcgcatcccctcggtagggctcggcacctacaaggccggacccggcgtcgtcgccgacgcgatcaccgccgccgtcaaggccgggtaccggcacatcgactgcgcgccgctatacaagaacgagaaggagatcggcgttgctctgaacaagctctttgatgacggcgtcgtcaagcgagaagaccttttcatcacctcaaagatatggtgcagcgatctcgcacctgaagacgtgccgttggcgatcgacatcaccctgaatgatctgcagctagattatcttgacctgtacctgatacactggcccttccagataaagagaggcagcgagctcagtccagagaacttcgtccacctcgacatgcccaagacctggcaggcaatggagaggctgtacggctcaggcaaggctcgcgcggtaggcgtcagcaatttctcgaccaggaagctggccgatctgcttgccgtagcccgtgtcactccagccgttgatcaggtggagtgtcaccccggctggcagcaggcgaggctcagagcgttctgctgctccagcggggttcatttctctgcgtacgcgccgctaggcaggatgaaagccgtcgccagtgacccggtggtcgcatccgtagccgagagcttggggaaaactccggcacaggttgctctgcgatggggtatccagcagggccagagcgtgcttcccaaaagcgccaatgagtcgaggttgaaggagaacattgacctgtttggttggtccattcctgatgagctgtgcgccaagttttctgaaattgaacaggttaagcaaatcagaaatgacgcgtttgtgcacccccagagtatttacaaaacaatcgacgaactctgggatggtgagatctaaaatgaagatcattttcggcatgtggtgtgggttgcattttcggcagggctgagtgacgtcagcatattgttgcattgcagcagatccaatgaaggggcccttgagtaaagcatagaacgaacaattttcatctgttgttgtcgtatgctcgtttcatcgatgactttgtatgtagcattaagtgtagttcttaaataaccgagaagtcatatcctggcctagccaaagcttccattaattcaggattcagcacatagccgatcataaagctagctttgagagctctttgttccggaaacgttacgaaacgatgagcaagcatcgacatttgccggcctttagatagcctcaggcggcgtgcatctgcgctcgcagaagctgatgaggatgtccgcacaccggaagacgggtggttcgtcgatgccgccggtgggggcatggttgtgatggtcatcaagctccaaaatcaatatagaaaatggtttaaagtcatttacctttcaatctctccctttttggttgatgtcaacacataaacaaagcaaatatcatattatgaaaattgtaactagtttgcaatttgctcaagtattcataagatactaagtacaaagcagttctaagtgaatatgagtgtttttgacatgattaacattttggaacacatttgcaccagttgcattcgattttgcaaacttttgataaaatcttttcaaactcattttcttttggccgaaagtatagaaatggaattttcacaagcatttctaagttttgaagaattcttccccttgcttttgttttggccaaataaatgctctccatgaacaaattctcaccttttagtttgaaaacatttttctcctcttagctgtcaagagggttttcttaaatgaaacagtaccaatttggaagactaaaaagttttaaaaaacaaggtggtggtacagtccttttgctttggcggtgcggttcttttgctttggcctagtaattttcccctttggcattgagcaccaaaaacgaagaaattgagaggcctttctcaacatggatatggattttaagaacttgagtttgagcaagggtgtttggtaccaaatgaatggtagtggaagcagtccctttgctcagcaacaaaggaaggatacggcagggcgacgaggtcgttgaggatgtgatcggcaagtgcatatcgctaaagagtgaggaggatctgactccaccaacaagggttgtgggaggatgttgggtccaatatgatggacatgagggatcggatattgtgcaacctggtggcctgagcgtgaagagtagcgacgtggtcagcgtcgagttcagaggtgagggggcccttagcagtgggcggatgagcctcatgaacgactggaggatgcccgaggatgaggtgctgcgtggtggccatccgggcggtcagagcagcggcgctcatggcatgctctgactccaggacgagtgtcgcgacgcgcttgtggtcgcgagaagcagaaacagccgcctggatggtggcgatggccgtaaccagcgccgaggaagccggcagggaag

SEQ ID NO: 36062 - DNA, 1129 bp, Zea Mays
aaagcctcatatcatttttggactgtccagattggtttggcgctgaagaagctatttgaagagggtgtagtgaagcgagaagatctgtttatcacctctaagctatggaatgatcatcatgctcctgaagatgtgcctgaggcactaaatgacagcctgaatgatttgcagcttgagtacctggatctttatcttatccattggccatttagagtcaagaagggaacaaataccagccctgaaaattttgttacacctgacttccctgctacttggggggcaatggaaaagttatatgatgctggcaaagctcgcgctattggtcaaactaagctccatagcttttgtcagtcaactggtgttcatctaactgcttactcaccactaggttcacctggtacaacttggatgaatggtaatgtccttaaagaaccaataatcatctcaatagctgagaaactcgggaaaacttctgcacaagtggctctgcgctggaacattcagatgggtcacagtgttcttccaaagagcacgaatgaagaaaggataaagcaaaaccttgatgtttatgattggtcaattccagatgacttgcttgcaaagttctctgagattaagcaggctaggctacttagaggcaacttcattgttaatccagagagcgtttacaagacccatgaggagctctgggatggtgaactttaagaaggacgccgttgtccctcctgactcctgagcagggagcaagcagcgttccattagggctcgtcagatcatttcacctccaaagttgctcttttgaaatgaaggttcagtgctcggaagctctggtgccatcctgtatcacgaactattgagaaatttgtcggtgattttactttgtgctacgggatgtgctgctgcagtctgtcctagtgtcagttgatttttctggtaaaactgtgaccaaataagttaattcgccaggcatcattactattggaatttcatcgttttatctcctcactatttttttatgctccatgtattctctatgatgagaccctgttgagtagttcactcatatagtcacacaaaacactgttttacattatccacagagtaagctgctgaacgtgctaagtgctaa

SEQ ID NO: 36063 - DNA, 1190 bp, Zea Mays
gcagcatttacccctcttaggaaagtgttgcctgcaatattgtctcgactcatattgcataacaattggagcagtgaaagcctcatatcatttttggactgtccagattggtttggcgctgaagaagctatttgaagagggtgtagtgaagcgagaagatctgtttatcacctctaagctatggaatgatcatcatgctcctgaagatgtgcctgaggcactaaatgacagcctgaatgatttgcagcttgagtacctggatctttatcttatccattggccatttagagtcaagaagggaacaaataccagccctgaaaattttgttacacctgacttccctgctacttggggggcaatggaaaagttatatgatgctggcaaagctcgcgctattggtcaaactaagctccatagcttttgtcagtcaactgcttactcaccactaggttcacctggtacaacttggatgaatggtaatgtccttaaagaaccaataatcatctcaatagctgagaaactcgggaaaacttctgcacaagtggctctgcgctggaacattcagatgggtcacagtgttcttccaaagagcacgaatgaagaaaggataaagcaaaaccttgatgtttatgattggtcaattccagatgacttgcttgcaaagttctctgagattaagcaggctaggctacttagaggcaacttcattgttaatccagagagcgtttacaagacccatgaggagctctgggatggtgaactttaagaaggacgccgttgtccctcctgactcctgagcagggagcaagcagcgttccattagggctcgtcagatcatttcacctccaaagttgctcttttgaaatgaaggttcagtgctcggaagctctggtgccatcctgtatcacgaactattgagaaatttgtcggtgattttactttgtgctacgggatgtgctgctgcagtctgtcctagtgtcagttgatttttctggtaaaactgtgaccaaataagttaattcgccaggcatcattactattggaatttcatcgttttatctcctcactatttttttatgctccatgtattctctatgatgagaccctgttgagtagttcactcatatagtcacacaaaacactgttttacattatccacagagtaagctgctgaacgtgctaagtgctaa

SEQ ID NO: 36064 - DNA, 1869 bp, Zea Mays
gcagcatttacccctcttaggaaagtgttgcctgcaatattgtctcgactcatattgcataacaattggagcagtgaaagcctcatatcatttttggactgtccagattggtttggcgctgaagaagctatttgaagagggtgtagtgaagcgagaagatctgtttatcacctctaagctatggaatgatcatcatgctcctgaagatgtgcctgaggcactaaatgacagcctgaatgatttgcagcttgagtacctggatctttatcttatccattggccatttagagtcaagaagggaacaaataccagccctgaaaattttgttacacctgacttccctgctacttggggggcaatggaaaagttatatgatgctggcaaagctcgcgctattggtgtgagtaacttctcctcaaagaaattgggtgacttgcttgctgtagctcgtgtacctccagctgttgatcaggtggaatgtcatcctggttggcagcaaactaagctccatagcttttgtcagtcaactgcttactcaccactaggttcacctggtacaacttggatgaatggtaatgtccttaaagaaccaataatcatctcaatagctgagaaactcgggaaaacttctgcacaagtggctctgcgctggaacattcagatgggtcacagtgttcttccaaagagcacgaatgaagaaaggataaagcaaaaccttgatgtttatgattggtcaattccagatgacttgcttgcaaagttctctgagattaagcaggtatctgtgtcctgagtacccttcacaatactttaatgaggataaagttgcttgatatttgttgattaataattgaactttataggataaaatacatttcaaaactttaccgtgttatgtgctcttcagaaattcatatgatttattgtgataaacaaatcacttaaagcattctaaattgctaggattgagtagcatttgcacttttttttagcttccttggagcttggagcaccactggtgctgtgacaggaatctagtaaaggtgtctacttatttttcaaagaaataaacacagctgcaatttttgttataaacatatcattacacatttaagtcgagttatgtttcagcgagctgcgctgtcccctgcccttagacacccacacgcagtagttgaaaatttggcctggtgctgtggtcacagttctctggcagcctatgatgtttttagaataataagataagattatcaaccccatgaccggattgccccttattctttttcataaccacgctcatccttgatctatggtgctctatgtacaaactccatgagaactagtattgcatcacacctattatctgtaacccccggccccagtggcgaaaccagactataatagaagcctgggcaccacatgcaaatcagcatgatgccactttctatctctcctttcgcaacgcatccagctcgatcccgatactgctgcacagcaacagaagcgaggggcacgccgtggtctagaggagcgtcaagtcctcgctgtgctgctcttggtgctctccaccatcttcgttttctctgtcttgtactcgtcacactacagctaaccaagcaccgtcagataagagttcaaacatctcgttgccgtcagcaaacactttagcagcgggatgtaccatcacgcagggcaagcagtgccttgccaacagcggagcccccgggcacatgcctaggctggctggaccgtggctccgccgctgcccggcccccttgtttatggctcgccaattctttcttgaaatgctgccacaagatttacttatgcttcatgccttgattactgaacctttccctctgagattct

SEQ ID NO: 36065 - DNA, 948 bp, Zea Mays
tagtcccatagatgcaaccaagtagctgaaatttggtagaagcggcaaagatgggttatgcagttgaaaaccaagccataaatgaacagatgcattgtatagccaatttctacacctaacagagatgaaagaaactccattcatcaagctgaatgaaatggaacatgatgtacaaaataatgaaatagttggaatgaactacacatttgccttcctagttcctatagttaacaatgattaatcttcaagctgatgactacaagagaaaaatggtgaagtgttgatcagtagttcttgtgaatgtacgtacatactgcaaaatggggacatcctagtaatggtcaatcaactcatagcctcactgctggcaatttgcaggaatgctggttgggtaccaatgtttaaggtaaacacatgttttcatttctatttcctcaaattcacagactgcatcgataaacaaggtatcttgcaaaaaaaagtatatgtggcactatttgttatgaataagatgtccacactccatagggttgtccatatccaaccacacggcaggtagttcaacgcagacaacaaagcaagtaatcaggcaaaataatcaagctacatgcagatacggagcagatcacaatcccatgaccaccacactatgatcctacatgcagatacgggaacagaggtcaaaatgttcacgaccagagcaaacagtctgggacggtaccagaaggctgtgtagttggtgaacccgggcgcggaggccatggcgcagatggacgcggcggcgaagacgaactggcccgcccgcagcgccaggccgcccgacgtcccggggcgtcccgccacttccgtcatctagcccggcagcaggtcctctagccgcttcctctcaaacgacgccgccttgttgtgctggggcattcggtgctggggcctcgcaggaggatttgg

SEQ ID NO: 36066 - DNA, 1519 bp, Zea Mays
caggtctcggtagtaaaccacgcaagagaaaataaaatgacagagagttgtatgttgtagacgggcgagtgcgacgagcggagaacgtaatgccagcgctacaccgctgacgtgtccgccccggctccgggtgaaggtcaaaaggggcaaagggcggggggaaaccgtgggccctatatagcgggccttctcgctggagctaggagaaatcgccaagccaagccaagccagaagcggcagcctcgcgcagcggtctggtctctctggtgggtgcccctcttcgccggtggccggaaagggtagtggagtgggaccgctcaaggagaggccggcgtccccaagtctcacttccgccgtccgcttcccccctgggatcgagggaggaaggaaaggaggtgcttcacaatgaaggccctcattcttgtcgggggtttcggaacccgccttcggcctttgactctgagcttcccgaaacccctcgtggattttgcaaacaagcccatgattctgcaccagatcgaagctttgaaagaagttggggtcacagaggtggttttggctatcaactaccgcccagaggtaatgattaatttcttgaaggactttgaggataagcttggcatcacaattacatgctcccaagagactgagcccttaggaaccgctggccctcttgctctagcaagggacaagcttgcggatggatctggccagccattctttgtcctcaacagtgatgtcataagcgaatacccatttgctgaactcatcaaatttcacaagtgtcatggtggtgaggcaacaattatggtcactaaggtggatgaaccatcaaaatacggtgttgtggttatggaggaggcaactggcagggtggaaaggtttgttgagaagccaaaaatatttgtgggtaacaagatcaatgctgggatttacttactgaacccatctgtccttgaccgcattgagctgaggccaacatcaattgagaaagaggtcttccctcaaattgcagctgatcaacagctctatgcaatggtccttccaggtttttggatggatgttggtcagcctagggactacattactggcttgcgtctttatctagactcgattaggaagaaatcagctgccaagctagctactggagcacatgttgttggcaatgtgctggtgcatgagagcgccaagattggagaaggttgtctgattggtcctgatgtcgccattggacctgggtgtgttgtggaggacggcgtgaggctttcccgctgcactgtcatgcgcggcgtgcgtatcaagaagcatgcttgcatctcaaacagcattatcggttggcactcaactgttggtcaatgggcacggatagagaatatgactatcctgggggaggatgttcatgtgtgtgatgaggtgtacagcaatggcggtgttgttctcccacataaagagatcaagtcaagcattctgaagcctgagatcgtcatgctagtggtgagcaactgagtatagagctagg

SEQ ID NO: 36067 - DNA, 1978 bp, Zea Mays
caggtctcggtagtaaaccacgcaagagaaaataaaatgacagagagttgtatgttgtagacgggcgagtgcgacgagcggagaacgtaatgccagcgctacaccgctgacgtgtccgccccggctccgggtgaaggtcaaaaggggcaaagggcggggggaaaccgtgggccctatatagcgggccttctcgctggagctaggagaaatcgccaagccaagccaagccagaagcggcagcctcgcgcagcggtctggtctctctggtgggtgcccctcttcgccggtggccggaaagggtagtggagtgggaccgctcaaggagaggccggcgtccccaagtctcacttccgccgtccgcttcccccctgttggtcccgattttgtttagccttcctaggcgcgtgagatcaaaaatccatcggttccggttgccgccatagggttcggcactcggggcgcgcggggggagctttatttgtaccgaactaattcgaaggggatcgagggaggaaggaaaggaggtgcttcacaatgaaggccctcattcttgtcgggggtttcggaacccgccttcggcctttgactctgagcttcccgaaacccctcgtggattttgcaaacaagcccatgattctgcaccagatcgaagctttgaaagaagttggggtcacagaggtggttttggctatcaactaccgcccagaggtaatgattaatttcttgaaggactttgaggataagcttggcatcacaattacatgctcccaagagactgagcccttaggaaccgctggccctcttgctctagcaagggacaagcttgcggatggatctggccagccattctttgtcctcaacagtgatgtcataagcgaatacccatttgctgaactcatcaaatttcacaagtgtcatggtggtgaggcaacaattatggtcactaaggtggatgaaccatcaaaatacggtgttgtggttatggaggaggcaactggcagggtggaaaggtttgttgagaagccaaaaatatttgtgggtaacaagatcaatgctgggatttacttactgaacccatctgtccttgaccgcattgagctgaggccaacatcaattgagaaagaggtcttccctcaaattgcagctgatcaacagctctatgcaatggtccttccaggtttttggatggatgttggtcagcctagggactacattactggcttgcgtctttatctagactcgattaggaagaaatcagctgccaagctagctactggagcacatgttgttggcaatgtgctggtgcatgagagcgccaagattggagaaggttgtctgattggtcctgatgtcgccattggacctgggtgtgttgtggaggacggcgtgaggctttcccgctgcactgtcatgcgcggcgtgcgtatcaagaagcatgcttgcatctcaaacagcattatcggttggcactcaactgttggtcaatgggcacggatagagaatatgactatcctgggggaggatgttcatgtgtgtgatgaggtgtacagcaatggcggtgttgttctcccacataaagagatcaagtcaagcattctgaagcctgagatcgtcatgtgagctctccagttttagctacagtacattcttaacttctttgacgaagggaggattgcagatccccttttataaacgatattgcttggtatcttcgatctaatgcaaacagcttcatacttggtctcttgttaaactattgacaatgtatcttgttttttgttgaaaagtttagtacttgagtgtcaatcatacgtattcgcttgctaaaaactattgacaatgtatcttgttctttgttgaaaagtttagtacttgagtgtcaatcatatttcagagtcattgtgatatactgagcttggaggttttggaccattgatctgcagaagttcaatacaataggaagaataagttaaaaaaa

SEQ ID NO: 36068 - DNA, 1365 bp, Zea Mays
caatgagctgtccatcgatgtgcacatcgatcagggccaaagtctttcagagcggtattggatatacattgttctgggctccagtcggtctcagctcaaacagtggtttccgaagtatttcttgctgggctactgggttcgttgttcttgtccatgtccttttccatggcgactttgcctgcctgcctgccctttttatactccctcatctctcgagcgtccttggccacactacttctcacgatcctagctagccacctccctcgattcacaagtcacagggacaacggctggttagcttctgagatttctcaaaaccactctactaccaactagtgctctagcctctttcaagctaagttgtacccatggaaggcatcatcccgttcatcttcaaggtcatagcgcagtacaaagaagaaggacaggctgcctccttcggtggcatggcctccgacggttctgtcgaatcctccccgccggtgtcgtcgtcgtacgtgctcctgcctagtgactccgaccggcgccaccgcgacgagaggaacgacgacggccggccggtctgcccgacgtcgtccgtggactccggggccgtcaccacctgcaccgcgagaccgtctccgctccggtgctcgtcgacgctgcgccggcgagcctaggatggtgaattttgcaggttgggagtatgggcgccctgtcacaaacgcgccgtcgtccatcagcacccgcgtgtacccaggcttcatgtttaacagcccaatggtgctggtgacgaaggcggaggcgacacgcccgtgcacctaaagctgcagcaacgatggcgtccaggtcagatggtttgtttgcctgcctatctgtttgtctttaggaaaaactgataactgatgatgagcgagttcttactcgtcagactgatccagatcagagaggcaatccagtccttttttccccttccccaccaataattgtgaatatgcatatgaatcttgagacaatagtccacgatatatatccaccttcgtgcatccaacgtatgtttggcacttggctaaaaggtttaaattctagagttaagagcctgatttgagttagggcatgtgctctctgttgggctatatggttaagtcataatgatttggtttttgataatgcacaagtttccactcccttgcaggttacctttagaggaacacattggacaaggttctggacgaggacatgcctcaagtaaaatggggctgtcgtgtgcttgaaacaacaatggtgaagatattttcaaataatggatggtctttttatcatagattgagagcatagattgagagcttaaatttatgaaaccttttgtagaatgtgatattttcg

SEQ ID NO: 36069 - DNA, 3204 bp, Zea Mays
atgggccaaagttatgtgactgctgggaagcacgaggtgataacattgatgctttcatgctttcctgccccatgtgagaaagttcaggacctattactaaagatagaatattatacctctcaggagactccagaggcttttccacttcctagaggcgtcgcaatagtgcgggcagatgctggatgggctcactgtgttgcaataacagatgaaggtgatgtttatacatggggttggaaagagtgtgttccaactggaagggttattggagaccaatcttcagttggaaccaaggagaaggatgaaagacaaatggcaatggccactgaccaagatataacaaaggcaactccattacagtgagccccaggtcgcaggtgtctaggacaagcagcggggcagcatctggtccttctgaaagcagaggcactgatgatagcacaaagcgacgaaggttgtcttcagcaaaacatggccctgagagctcgacatccagtgacgaaagtctttccgcacccccttgtgttgtgacatttaatacaggagtgaaaatagtgtctgtagctgctggtggtcgtcatacattagcactgtcagatttaggtcaggtatggggttggggatatggaggagaagggcaactaggtctgggctctagaatccgaactgtttcttctccccatcctgtaccgtgcattgaatcagcactatacagcaaggatcgcccatcagctatgaaaggtaacaaggctgctgaaggacatgtcagtaaagtcttgggaaattgtgtgagggccattgcttgtggaggtcgtcacagtgctgcagtaacaggtcacttatatattttttagtttgtttctgccagtaattaccatgttcatgtagagacatcgctgtcactctggatctcaaggtagttcgaaaagttagctctatggaaaacaagggatttcaaatcaacgttttatgtcagctctgtaacagtataacatagtctttgtacaaacactgactttccaagctagtaaacatatgcttaccattttgcaagatcgcaataaatgcaagagcccagacataaaagtgacataatcctggcaatattttattctttgtaagagaatcatatcttcagaatggttatcacttgttttgttactatacaagaggatatatagttctggaatttagtctgaagatctcagttgctacttgctactaaaggggctttctcagcttaaaccacaataatattttcaaaccacctgcaactgcaaccttttagctatcagattgtagcgaggtttagtttcatttaaagctgaagtttttccaatagatatgccattttgttcaaatttctcttatttaacgctgaagtcctgcttgcagattcaggagctcttcttacatttgggtgggggctgtatggacagtgtggacaagggaatacagatgatgttttaagtccaacgtgtgtatcgtctatcctgggatccaagatgcaagacgttgctgcgggtctgtggcacactgtatgtacatccgtagatggtgatgtttattcctttggaggaaaccagtttgggcagcttggcactggttctgatcaggctgagactgttccaaaattggtagatgctaccagcctagagaataagaatgccagatctgtttcttgtggagctcgccatagtgctattataacaggtaactttaagttgttctaatgtttgtttgtagggatctcaattgtatcatcttgtacgcccatttgcctttcttacaagaccacactactaatacatgctcatgcagggtacgagttctaatcttcgcttacatgcatcttgctattagctttgttatatatacgcgtgccttgctgcaaatggacctaatgttacctcctctttttttattgctacctcatccttggatgctctcgtttgaatcgagaacaaaaggttctgtgctaatcagtgactgaacttaccattgggtaacccaggagtattttttttatttcattaagttattcttgccgtgctgagccaccaggccttgcctcggtttatttcttccctagactccactcatacaaaggtctatggcttttttctcagagctacacatcattatattaagaagaaaaataaggtgtccaaaatagaccaataccaaaaggaatgccaccttcccgtggccaaaatcgagaaatacataaaggtatccataagaccaaaatatcgagaacaaactaccaaagacgacaaatcctagtcctgggatagtggcagtagggagagacactgctggctcttctagccacattcacatttggagtaagcctctctaagacacatccatccattcctgtgatttcaaagcggccaaaacccaagaataattagggagttaagcccctttgcagtaatgctttgcacctgatcattggccttgatctgtttttttttcctggccgagctgagccggtagaagttcacaagggggcagcagccatttacacgtacatactgatcacttaggcctactggaagtagaccaggggcagaactaaggcggtgaacaaaaatgtatctagagaaatcgaaaggggtaactatatcctcaggaagtcttctcatctgacaaaggttacacaactattgcagatgaaggcgaggtattctgctggggatggaacaagtacggccagcttggccttggcgactcaatggacaggaacgtgccttgcagtgttcctgtggacgcttaccaccccctaaacgtgtcctgtggctggtggcacaccttggtgctcgcggactcgcctacttgaaacctgacaaagaaattaccttagattgacaattttgttaggaactcgtaggctcgtgcagatgcggtgatgctgcatttcatcgtgtacatacatggcagtgcatgcagatatgtgtattcattctttggcggtgcactcttcaacctgtgcaacgtagacaaagcttgtatcgcaccgcgtatacagttgagtaggattgcctcgacaaattgtgcatttcctccgttgctgctaatgtacaaaattccacaagctagacagggcaaccgatgcgttcctcgttgcagaagacagatctccaaaataattaatgtttgtgtatcgtgatggttgcgattccgatattgtttggccgg

SEQ ID NO: 36070 - DNA, 3261 bp, Zea Mays
atgggccaaagttatgtgactgctgggaagcacgaggtgataacattgatgctttcatgctttcctgccccatgtgagaaagttcaggacctattactaaagatagaatattatacctctcaggagactccagaggcttttccacttcctagaggcgtcgcaatagtgcgggcagatgctggatgggctcactgtgttgcaataacagatgaaggtgatgtttatacatggggttggaaagagtgtgttccaactggaagggttattggagaccaatcttcagttggaaccaaggagaaggatgaaagacaaatggcaatggccactgaccaagtgagccccaggtcgcaggtgtctaggacaagcagcggggcagcatctggtccttctgaaagcagaggcactgatgatagcacaaagcgacgaaggttgtcttcagcaaaacatggccctgagagctcgacatccagtgacgaaagtctttccgcacccccttgtgttgtgacatttaatacaggagtgaaaatagtgtctgtagctgctggtggtcgtcatacattagcactgtcaggtaatctgcatttgtcattatgacactgacattttccctgtatggatatttactgactaaaatatgtttcttcgaagcttcagatttaggtcaggtatggggttggggatatggaggagaagggcaactaggtctgggctctagaatccgaactgtttcttctccccatcctgtaccgtgcattgaatcagcactatacagcaaggatcgcccatcagctatgaaaggtaacaaggctgctgaaggacatgtcagtaaagtcttgggaaattgtgtgagggccattgcttgtggaggtcgtcacagtgctgcagtaacaggtcacttatatattttttagtttgtttctgccagtaattaccatgttcatgtagagacatcgctgtcactctggatctcaaggtagttcgaaaagttagctctatggaaaacaagggatttcaaatcaacgttttatgtcagctctgtaacagtataacatagtctttgtacaaacactgactttccaagctagtaaacatatgcttaccattttgcaagatcgcaataaatgcaagagcccagacataaaagtgacataatcctggcaatattttattctttgtaagagaatcatatcttcagaatggttatcacttgttttgttactatacaagaggatatatagttctggaatttagtctgaagatctcagttgctacttgctactaaaggggctttctcagcttaaaccacaataatattttcaaaccacctgcaactgcaaccttttagctatcagattgtagcgaggtttagtttcatttaaagctgaagtttttccaatagatatgccattttgttcaaatttctcttatttaacgctgaagtcctgcttgcagattcaggagctcttcttacatttgggtgggggctgtatggacagtgtggacaagggaatacagatgatgttttaagtccaacgtgtgtatcgtctatcctgggatccaagatgcaagacgttgctgcgggtctgtggcacactgtatgtacatccgtagatggtgatgtttattcctttggaggaaaccagtttgggcagcttggcactggttctgatcaggctgagactgttccaaaattggtagatgctaccagcctagagaataagaatgccagatctgtttcttgtggagctcgccatagtgctattataacaggtaactttaagttgttctaatgtttgtttgtagggatctcaattgtatcatcttgtacgcccatttgcctttcttacaagaccacactactaatacatgctcatgcagggtacgagttctaatcttcgcttacatgcatcttgctattagctttgttatatatacgcgtgccttgctgcaaatggacctaatgttacctcctctttttttattgctacctcatccttggatgctctcgtttgaatcgagaacaaaaggttctgtgctaatcagtgactgaacttaccattgggtaacccaggagtattttttttatttcattaagttattcttgccgtgctgagccaccaggccttgcctcggtttatttcttccctagactccactcatacaaaggtctatggcttttttctcagagctacacatcattatattaagaagaaaaataaggtgtccaaaatagaccaataccaaaaggaatgccaccttcccgtggccaaaatcgagaaatacataaaggtatccataagaccaaaatatcgagaacaaactaccaaagacgacaaatcctagtcctgggatagtggcagtagggagagacactgctggctcttctagccacattcacatttggagtaagcctctctaagacacatccatccattcctgtgatttcaaagcggccaaaacccaagaataattagggagttaagcccctttgcagtaatgctttgcacctgatcattggccttgatctgtttttttttcctggccgagctgagccggtagaagttcacaagggggcagcagccatttacacgtacatactgatcacttaggcctactggaagtagaccaggggcagaactaaggcggtgaacaaaaatgtatctagagaaatcgaaaggggtaactatatcctcaggaagtcttctcatctgacaaaggttacacaactattgcagatgaaggcgaggtattctgctggggatggaacaagtacggccagcttggccttggcgactcaatggacaggaacgtgccttgcagtgttcctgtggacgcttaccaccccctaaacgtgtcctgtggctggtggcacaccttggtgctcgcggactcgcctacttgaaacctgacaaagaaattaccttagattgacaattttgttaggaactcgtaggctcgtgcagatgcggtgatgctgcatttcatcgtgtacatacatggcagtgcatgcagatatgtgtattcattctttggcggtgcactcttcaacctgtgcaacgtagacaaagcttgtatcgcaccgcgtatacagttgagtaggattgcctcgacaaattgtgcatttcctccgttgctgctaatgtacaaaattccacaagctagacagggcaaccgatgcgttcctcgttgcagaagacagatctccaaaataattaatgtttgtgtatcgtgatggttgcgattccgatattgtttggccgg

SEQ ID NO: 36071 - DNA, 3181 bp, Zea Mays
atgggccaaagttatgtgactgctgggaagcacgaggtgataacattgatgctttcatgctttcctgccccatgtgagaaagttcaggacctattactaaagatagaatattatacctctcaggagactccagaggcttttccacttcctagaggcgtcgcaatagtgcgggcagatgctggatgggctcactgtgttgcaataacagatgaaggtgatgtttatacatggggttggaaagagtgtgttccaactggaagggttattggagaccaatcttcagttggaaccaaggagaaggatgaaagacaaatggcaatggccactgaccaaggtgtgagccccaggtcgcaggtgtctaggacaagcagcggggcagcatctggtccttctgaaagcagaggcactgatgatagcacaaagcgacgaaggttgtcttcagcaaaacatggccctgagagctcgacatccagtgacgaaagtctttccgcacccccttgtgttgtgacatttaatacaggagtgaaaatagtgtctgtagctgctggtggtcgtcatacattagcactgtcagatttaggtcaggtatggggttggggatatggaggagaagggcaactaggtctgggctctagaatccgaactgtttcttctccccatcctgtaccgtgcattgaatcagcactatacagcaaggatcgcccatcagctatgaaaggtaacaaggctgctgaaggacatgtcagtaaagtcttgggaaattgtgtgagggccattgcttgtggaggtcgtcacagtgctgcagtaacaggtcacttatatattttttagtttgtttctgccagtaattaccatgttcatgtagagacatcgctgtcactctggatctcaaggtagttcgaaaagttagctctatggaaaacaagggatttcaaatcaacgttttatgtcagctctgtaacagtataacatagtctttgtacaaacactgactttccaagctagtaaacatatgcttaccattttgcaagatcgcaataaatgcaagagcccagacataaaagtgacataatcctggcaatattttattctttgtaagagaatcatatcttcagaatggttatcacttgttttgttactatacaagaggatatatagttctggaatttagtctgaagatctcagttgctacttgctactaaaggggctttctcagcttaaaccacaataatattttcaaaccacctgcaactgcaaccttttagctatcagattgtagcgaggtttagtttcatttaaagctgaagtttttccaatagatatgccattttgttcaaatttctcttatttaacgctgaagtcctgcttgcagattcaggagctcttcttacatttgggtgggggctgtatggacagtgtggacaagggaatacagatgatgttttaagtccaacgtgtgtatcgtctatcctgggatccaagatgcaagacgttgctgcgggtctgtggcacactgtatgtacatccgtagatggtgatgtttattcctttggaggaaaccagtttgggcagcttggcactggttctgatcaggctgagactgttccaaaattggtagatgctaccagcctagagaataagaatgccagatctgtttcttgtggagctcgccatagtgctattataacaggtaactttaagttgttctaatgtttgtttgtagggatctcaattgtatcatcttgtacgcccatttgcctttcttacaagaccacactactaatacatgctcatgcagggtacgagttctaatcttcgcttacatgcatcttgctattagctttgttatatatacgcgtgccttgctgcaaatggacctaatgttacctcctctttttttattgctacctcatccttggatgctctcgtttgaatcgagaacaaaaggttctgtgctaatcagtgactgaacttaccattgggtaacccaggagtattttttttatttcattaagttattcttgccgtgctgagccaccaggccttgcctcggtttatttcttccctagactccactcatacaaaggtctatggcttttttctcagagctacacatcattatattaagaagaaaaataaggtgtccaaaatagaccaataccaaaaggaatgccaccttcccgtggccaaaatcgagaaatacataaaggtatccataagaccaaaatatcgagaacaaactaccaaagacgacaaatcctagtcctgggatagtggcagtagggagagacactgctggctcttctagccacattcacatttggagtaagcctctctaagacacatccatccattcctgtgatttcaaagcggccaaaacccaagaataattagggagttaagcccctttgcagtaatgctttgcacctgatcattggccttgatctgtttttttttcctggccgagctgagccggtagaagttcacaagggggcagcagccatttacacgtacatactgatcacttaggcctactggaagtagaccaggggcagaactaaggcggtgaacaaaaatgtatctagagaaatcgaaaggggtaactatatcctcaggaagtcttctcatctgacaaaggttacacaactattgcagatgaaggcgaggtattctgctggggatggaacaagtacggccagcttggccttggcgactcaatggacaggaacgtgccttgcagtgttcctgtggacgcttaccaccccctaaacgtgtcctgtggctggtggcacaccttggtgctcgcggactcgcctacttgaaacctgacaaagaaattaccttagattgacaattttgttaggaactcgtaggctcgtgcagatgcggtgatgctgcatttcatcgtgtacatacatggcagtgcatgcagatatgtgtattcattctttggcggtgcactcttcaacctgtgcaacgtagacaaagcttgtatcgcaccgcgtatacagttgagtaggattgcctcgacaaattgtgcatttcctccgttgctgctaatgtacaaaattccacaagctagacagggcaaccgatgcgttcctcgttgcagaagacagatctccaaaataattaatgtttgtgtatcgtgatggttgcgattccgatattgtttggccgg

SEQ ID NO: 36072 - DNA, 1494 bp, Zea Mays
ttggggttctgctgatgacatgggccaaagttatgtgactgctgggaagcacgaggagactccagaggcttttccacttcctagaggcgtcgcaatagtgcgggcagatgctggatgggctcactgtgttgcaataacagatgaaggtgatgtttatacatggggttggaaagagtgtgttccaactggaagggttattggagaccaatcttcagttggaaccaaggagaaggatgaaagacaaatggcaatggccactgaccaaggtgtgagccccaggtcgcaggtgtctaggacaagcagcggggcagcatctggtccttctgaaagcagaggcactgatgatagcacaaagcgacgaaggttgtcttcagcaaaacatggccctgagagctcgacatccagtgacgaaagtctttccgcacccccttgtgttgtgacatttaatacaggagtgaaaatagtgtctgtagctgctggtggtcgtcatacattagcactgtcagatttaggtcaggtatggggttggggatatggaggagaagggcaactaggtctgggctctagaatccgaactgtttcttctccccatcctgtaccgtgcattgaatcagcactatacagcaaggatcgcccatcagctatgaaagattcaggagctcttcttacatttgggtgggggctgtatggacagtgtggacaagggaatacagatgatgttttaagtccaacgtgtgtatcgtctatcctgggatccaagatgcaagacgttgctgcgggtctgtggcacactgtatgtacatccgtagatggtgatgtttattcctttggaggaaaccagtttgggcagcttggcactggttctgatcaggctgagactgttccaaaattggtagatgctaccagcctagagaataagaatgccagatctgtttcttgtggagctcgccatagtgctattataacagatgaaggcgaggtattctgctggggatggaacaagtacggccagcttggccttggcgactcaatggacaggaacgtgccttgcagtgttcctgtggacgcttaccaccccctaaacgtgtcctgtggctggtggcacaccttggtgctcgcggactcgcctacttgaaacctgacaaagaaattaccttagattgacaattttgttaggaactcgtaggctcgtgcagatgcggtgatgctgcatttcatcgtgtacatacatggcagtgcatgcagatatgtgtattcattctttggcggtgcactcttcaacctgtgcaacgtagacaaagcttgtatcgcaccgcgtatacagttgagtaggattgcctcgacaaattgtgcatttcctccgttgctgctaatgtacaaaattccacaagctagacagggcaaccgatgcgttcctcgttgcagaagacagatctccaaaataattaatgtttgtgtatcgtgatggttgcgattccgatattgtttggccgg

SEQ ID NO: 36073 - DNA, 2588 bp, Zea Mays
gaaaactcctcacttggggttctgctgatgacatgggccaaagttatgtgactgctgggaagcacgaggagactccagaggcttttccacttcctagaggcgtcgcaatagtgcgggcagatgctggatgggctcactgtgttgcaataacagatgaaggtgatgtttatacatggggttggaaagagtgtgttccaactggaagggttattggagaccaatcttcagttggaaccaaggagaaggatgaaagacaaatggcaatggccactgaccaagatataacaaaggcaactccattacagtgagccccaggtcgcaggtgtctaggacaagcagcggggcagcatctggtccttctgaaagcagaggcactgatgatagcacaaagcgacgaaggttgtcttcagcaaaacatggccctgagagctcgacatccagtgacgaaagtctttccgcacccccttgtgttgtgacatttaatacaggagtgaaaatagtgtctgtagctgctggtggtcgtcatacattagcactgtcagatttaggtcaggtatggggttggggatatggaggagaagggcaactaggtctgggctctagaatccgaactgtttcttctccccatcctgtaccgtgcattgaatcagcactatacagcaaggatcgcccatcagctatgaaaggtaacaaggctgctgaaggacatgtcagtaaagtcttgggaaattgtgtgagggccattgcttgtggaggtcgtcacagtgctgcagtaacagattcaggagctcttcttacatttgggtgggggctgtatggacagtgtggacaagggaatacagatgatgttttaagtccaacgtgtgtatcgtctatcctgggatccaagatgcaagacgttgctgcgggtctgtggcacactgtatgtacatccgtagatggtgatgtttattcctttggaggaaaccagtttgggcagcttggcactggttctgatcaggctgagactgttccaaaattggtagatgctaccagcctagagaataagaatgccagatctgtttcttgtggagctcgccatagtgctattataacaggtaactttaagttgttctaatgtttgtttgtagggatctcaattgtatcatcttgtacgcccatttgcctttcttacaagaccacactactaatacatgctcatgcagggtacgagttctaatcttcgcttacatgcatcttgctattagctttgttatatatacgcgtgccttgctgcaaatggacctaatgttacctcctctttttttattgctacctcatccttggatgctctcgtttgaatcgagaacaaaaggttctgtgctaatcagtgactgaacttaccattgggtaacccaggagtattttttttatttcattaagttattcttgccgtgctgagccaccaggccttgcctcggtttatttcttccctagactccactcatacaaaggtctatggcttttttctcagagctacacatcattatattaagaagaaaaataaggtgtccaaaatagaccaataccaaaaggaatgccaccttcccgtggccaaaatcgagaaatacataaaggtatccataagaccaaaatatcgagaacaaactaccaaagacgacaaatcctagtcctgggatagtggcagtagggagagacactgctggctcttctagccacattcacatttggagtaagcctctctaagacacatccatccattcctgtgatttcaaagcggccaaaacccaagaataattagggagttaagcccctttgcagtaatgctttgcacctgatcattggccttgatctgtttttttttcctggccgagctgagccggtagaagttcacaagggggcagcagccatttacacgtacatactgatcacttaggcctactggaagtagaccaggggcagaactaaggcggtgaacaaaaatgtatctagagaaatcgaaaggggtaactatatcctcaggaagtcttctcatctgacaaaggttacacaactattgcagatgaaggcgaggtattctgctggggatggaacaagtacggccagcttggccttggcgactcaatggacaggaacgtgccttgcagtgttcctgtggacgcttaccaccccctaaacgtgtcctgtggctggtggcacaccttggtgctcgcggactcgcctacttgaaacctgacaaagaaattaccttagattgacaattttgttaggaactcgtaggctcgtgcagatgcggtgatgctgcatttcatcgtgtacatacatggcagtgcatgcagatatgtgtattcattctttggcggtgcactcttcaacctgtgcaacgtagacaaagcttgtatcgcaccgcgtatacagttgagtaggattgcctcgacaaattgtgcatttcctccgttgctgctaatgtacaaaattccacaagctagacagggcaaccgatgcgttcctcgttgcagaagacagatctccaaaataattaatgtttgtgtatcgtgatggttgcgattccgatattgtttggccgg

SEQ ID NO: 36074 - DNA, 2185 bp, Zea Mays
ggaaaactcctcacttggggttctgctgatgacatgggccaaagttatgtgactgctgggaagcacgaggagactccagaggcttttccacttcctagaggcgtcgcaatagtgcgggcagatgctggatgggctcactgtgttgcaataacagatgaaggtgatgtttatacatggggttggaaagagtgtgttccaactggaagggttattggagaccaatcttcagttggaaccaaggagaaggatgaaagacaaatggcaatggccactgaccaagatataacaaaggcaactccattacagtgagccccaggtcgcaggtgtctaggacaagcagcggggcagcatctggtccttctgaaagcagaggcactgatgatagcacaaagcgacgaaggttgtcttcagcaaaacatggccctgagagctcgacatccagtgacgaaagtctttccgcacccccttgtgttgtgacatttaatacaggagtgaaaatagtgtctgtagctgctggtggtcgtcatacattagcactgtcagatttaggtcaggtatggggttggggatatggaggagaagggcaactaggtctgggctctagaatccgaactgtttcttctccccatcctgtaccgtgcattgaatcagcactatacagcaaggatcgcccatcagctatgaaaggtaacaaggctgctgaaggacatgtcagtaaagtcttgggaaattgtgtgagggccattgcttgtggaggtcgtcacagtgctgcagtaacaggtcacttatatattttttagtttgtttctgccagtaattaccatgttcatgtagagacatcgctgtcactctggatctcaaggtagttcgaaaagttagctctatggaaaacaagggatttcaaatcaacgttttatgtcagctctgtaacagtataacatagtctttgtacaaacactgactttccaagctagtaaacatatgcttaccattttgcaagatcgcaataaatgcaagagcccagacataaaagtgacataatcctggcaatattttattctttgtaagagaatcatatcttcagaatggttatcacttgttttgttactatacaagaggatatatagttctggaatttagtctgaagatctcagttgctacttgctactaaaggggctttctcagcttaaaccacaataatattttcaaaccacctgcaactgcaaccttttagctatcagattgtagcgaggtttagtttcatttaaagctgaagtttttccaatagatatgccattttgttcaaatttctcttatttaacgctgaagtcctgcttgcagattcaggagctcttcttacatttgggtgggggctgtatggacagtgtggacaagggaatacagatgatgttttaagtccaacgtgtgtatcgtctatcctgggatccaagatgcaagacgttgctgcgggtctgtggcacactgtatgtacatccgtagatggtgatgtttattcctttggaggaaaccagtttgggcagcttggcactggttctgatcaggctgagactgttccaaaattggtagatgctaccagcctagagaataagaatgccagatctgtttcttgtggagctcgccatagtgctattataacagatgaaggcgaggtattctgctggggatggaacaagtacggccagcttggccttggcgactcaatggacaggaacgtgccttgcagtgttcctgtggacgcttaccaccccctaaacgtgtcctgtggctggtggcacaccttggtgctcgcggactcgcctacttgaaacctgacaaagaaattaccttagattgacaattttgttaggaactcgtaggctcgtgcagatgcggtgatgctgcatttcatcgtgtacatacatggcagtgcatgcagatatgtgtattcattctttggcggtgcactcttcaacctgtgcaacgtagacaaagcttgtatcgcaccgcgtatacagttgagtaggattgcctcgacaaattgtgcatttcctccgttgctgctaatgtacaaaattccacaagctagacagggcaaccgatgcgttcctcgttgcagaagacagatctccaaaataattaatgtttgtgtatcgtgatggttgcgattccgatattgtttggccgg

SEQ ID NO: 36075 - DNA, 1599 bp, Zea Mays
tggaaaactcctcacttggggttctgctgatgacatgggccaaagttatgtgactgctgggaagcacgaggagactccagaggcttttccacttcctagaggcgtcgcaatagtgcgggcagatgctggatgggctcactgtgttgcaataacagatgaaggtgatgtttatacatggggttggaaagagtgtgttccaactggaagggttattggagaccaatcttcagttggaaccaaggagaaggatgaaagacaaatggcaatggccactgaccaagtgagccccaggtcgcaggtgtctaggacaagcagcggggcagcatctggtccttctgaaagcagaggcactgatgatagcacaaagcgacgaaggttgtcttcagcaaaacatggccctgagagctcgacatccagtgacgaaagtctttccgcacccccttgtgttgtgacatttaatacaggagtgaaaatagtgtctgtagctgctggtggtcgtcatacattagcactgtcagatttaggtcaggtatggggttggggatatggaggagaagggcaactaggtctgggctctagaatccgaactgtttcttctccccatcctgtaccgtgcattgaatcagcactatacagcaaggatcgcccatcagctatgaaaggtaacaaggctgctgaaggacatgtcagtaaagtcttgggaaattgtgtgagggccattgcttgtggaggtcgtcacagtgctgcagtaacagattcaggagctcttcttacatttgggtgggggctgtatggacagtgtggacaagggaatacagatgatgttttaagtccaacgtgtgtatcgtctatcctgggatccaagatgcaagacgttgctgcgggtctgtggcacactgtatgtacatccgtagatggtgatgtttattcctttggaggaaaccagtttgggcagcttggcactggttctgatcaggctgagactgttccaaaattggtagatgctaccagcctagagaataagaatgccagatctgtttcttgtggagctcgccatagtgctattataacagatgaaggcgaggtattctgctggggatggaacaagtacggccagcttggccttggcgactcaatggacaggaacgtgccttgcagtgttcctgtggacgcttaccaccccctaaacgtgtcctgtggctggtggcacaccttggtgctcgcggactcgcctacttgaaacctgacaaagaaattaccttagattgacaattttgttaggaactcgtaggctcgtgcagatgcggtgatgctgcatttcatcgtgtacatacatggcagtgcatgcagatatgtgtattcattctttggcggtgcactcttcaacctgtgcaacgtagacaaagcttgtatcgcaccgcgtatacagttgagtaggattgcctcgacaaattgtgcatttcctccgttgctgctaatgtacaaaattccacaagctagacagggcaaccgatgcgttcctcgttgcagaagacagatctccaaaataattaatgtttgtgtatcgtgatggttgcgattccgatattgtttggccgg

SEQ ID NO: 36076 - DNA, 2497 bp, Zea Mays
tggaaaactcctcacttggggttctgctgatgacatgggccaaagttatgtgactgctgggaagcacgaggagactccagaggcttttccacttcctagaggcgtcgcaatagtgcgggcagatgctggatgggctcactgtgttgcaataacagatgaaggtgatgtttatacatggggttggaaagagtgtgttccaactggaagggttattggagaccaatcttcagttggaaccaaggagaaggatgaaagacaaatggcaatggccactgaccaagatataacaaaggcaactccattacagtgagccccaggtcgcaggtgtctaggacaagcagcggggcagcatctggtccttctgaaagcagaggcactgatgatagcacaaagcgacgaaggttgtcttcagcaaaacatggccctgagagctcgacatccagtgacgaaagtctttccgcacccccttgtgttgtgacatttaatacaggagtgaaaatagtgtctgtagctgctggtggtcgtcatacattagcactgtcagatttaggtcaggtatggggttggggatatggaggagaagggcaactaggtctgggctctagaatccgaactgtttcttctccccatcctgtaccgtgcattgaatcagcactatacagcaaggatcgcccatcagctatgaaagattcaggagctcttcttacatttgggtgggggctgtatggacagtgtggacaagggaatacagatgatgttttaagtccaacgtgtgtatcgtctatcctgggatccaagatgcaagacgttgctgcgggtctgtggcacactgtatgtacatccgtagatggtgatgtttattcctttggaggaaaccagtttgggcagcttggcactggttctgatcaggctgagactgttccaaaattggtagatgctaccagcctagagaataagaatgccagatctgtttcttgtggagctcgccatagtgctattataacaggtaactttaagttgttctaatgtttgtttgtagggatctcaattgtatcatcttgtacgcccatttgcctttcttacaagaccacactactaatacatgctcatgcagggtacgagttctaatcttcgcttacatgcatcttgctattagctttgttatatatacgcgtgccttgctgcaaatggacctaatgttacctcctctttttttattgctacctcatccttggatgctctcgtttgaatcgagaacaaaaggttctgtgctaatcagtgactgaacttaccattgggtaacccaggagtattttttttatttcattaagttattcttgccgtgctgagccaccaggccttgcctcggtttatttcttccctagactccactcatacaaaggtctatggcttttttctcagagctacacatcattatattaagaagaaaaataaggtgtccaaaatagaccaataccaaaaggaatgccaccttcccgtggccaaaatcgagaaatacataaaggtatccataagaccaaaatatcgagaacaaactaccaaagacgacaaatcctagtcctgggatagtggcagtagggagagacactgctggctcttctagccacattcacatttggagtaagcctctctaagacacatccatccattcctgtgatttcaaagcggccaaaacccaagaataattagggagttaagcccctttgcagtaatgctttgcacctgatcattggccttgatctgtttttttttcctggccgagctgagccggtagaagttcacaagggggcagcagccatttacacgtacatactgatcacttaggcctactggaagtagaccaggggcagaactaaggcggtgaacaaaaatgtatctagagaaatcgaaaggggtaactatatcctcaggaagtcttctcatctgacaaaggttacacaactattgcagatgaaggcgaggtattctgctggggatggaacaagtacggccagcttggccttggcgactcaatggacaggaacgtgccttgcagtgttcctgtggacgcttaccaccccctaaacgtgtcctgtggctggtggcacaccttggtgctcgcggactcgcctacttgaaacctgacaaagaaattaccttagattgacaattttgttaggaactcgtaggctcgtgcagatgcggtgatgctgcatttcatcgtgtacatacatggcagtgcatgcagatatgtgtattcattctttggcggtgcactcttcaacctgtgcaacgtagacaaagcttgtatcgcaccgcgtatacagttgagtaggattgcctcgacaaattgtgcatttcctccgttgctgctaatgtacaaaattccacaagctagacagggcaaccgatgcgttcctcgttgcagaagacagatctccaaaataattaatgtttgtgtatcgtgatggttgcgattccgatattgtttggccgg

SEQ ID NO: 36077 - DNA, 1602 bp, Zea Mays
tggaaaactcctcacttggggttctgctgatgacatgggccaaagttatgtgactgctgggaagcacgaggagactccagaggcttttccacttcctagaggcgtcgcaatagtgcgggcagatgctggatgggctcactgtgttgcaataacagatgaaggtgatgtttatacatggggttggaaagagtgtgttccaactggaagggttattggagaccaatcttcagttggaaccaaggagaaggatgaaagacaaatggcaatggccactgaccaaggtgtgagccccaggtcgcaggtgtctaggacaagcagcggggcagcatctggtccttctgaaagcagaggcactgatgatagcacaaagcgacgaaggttgtcttcagcaaaacatggccctgagagctcgacatccagtgacgaaagtctttccgcacccccttgtgttgtgacatttaatacaggagtgaaaatagtgtctgtagctgctggtggtcgtcatacattagcactgtcagatttaggtcaggtatggggttggggatatggaggagaagggcaactaggtctgggctctagaatccgaactgtttcttctccccatcctgtaccgtgcattgaatcagcactatacagcaaggatcgcccatcagctatgaaaggtaacaaggctgctgaaggacatgtcagtaaagtcttgggaaattgtgtgagggccattgcttgtggaggtcgtcacagtgctgcagtaacagattcaggagctcttcttacatttgggtgggggctgtatggacagtgtggacaagggaatacagatgatgttttaagtccaacgtgtgtatcgtctatcctgggatccaagatgcaagacgttgctgcgggtctgtggcacactgtatgtacatccgtagatggtgatgtttattcctttggaggaaaccagtttgggcagcttggcactggttctgatcaggctgagactgttccaaaattggtagatgctaccagcctagagaataagaatgccagatctgtttcttgtggagctcgccatagtgctattataacagatgaaggcgaggtattctgctggggatggaacaagtacggccagcttggccttggcgactcaatggacaggaacgtgccttgcagtgttcctgtggacgcttaccaccccctaaacgtgtcctgtggctggtggcacaccttggtgctcgcggactcgcctacttgaaacctgacaaagaaattaccttagattgacaattttgttaggaactcgtaggctcgtgcagatgcggtgatgctgcatttcatcgtgtacatacatggcagtgcatgcagatatgtgtattcattctttggcggtgcactcttcaacctgtgcaacgtagacaaagcttgtatcgcaccgcgtatacagttgagtaggattgcctcgacaaattgtgcatttcctccgttgctgctaatgtacaaaattccacaagctagacagggcaaccgatgcgttcctcgttgcagaagacagatctccaaaataattaatgtttgtgtatcgtgatggttgcgattccgatattgtttggccgg

SEQ ID NO: 36078 - DNA, 2004 bp, Zea Mays
aagcccccaaacctcgcggctctcagcctcacgcttggaaaagcaattgcccgccgctgccccattccgacgcaatcaacaccaacgccttgcttgcttgctccgctgccctctaccatctgcggtccggccgacagtgatcgaaatcggtggattcggagaggccaaggctcctggaggagatgaacggcagcggcggaggaggagagggagggggaggggcggttgttcctcttgaattgaatcggtgcttaaagttaaagctgagctcagagaggagaggtttccttagtgtgattttgctttaggtgtaacgttcgattaggaatggagtagggatttgattatgagtggacagtggtttcaatgctgaagagtctggaaaactcctcacttggggttctgctgatgacatgggccaaagttatgtgactgctgggaagcacgaggagactccagaggcttttccacttcctagaggcgtcgcaatagtgcgggcagatgctggatgggctcactgtgttgcaataacagatgaaggtgatgtttatacatggggttggaaagagtgtgttccaactggaagggttattggagaccaatcttcagttggaaccaaggagaaggatgaaagacaaatggcaatggccactgaccaagatataacaaaggcaactccattacagtgagccccaggtcgcaggtgtctaggacaagcagcggggcagcatctggtccttctgaaagcagaggcactgatgatagcacaaagcgacgaaggttgtcttcagcaaaacatggccctgagagctcgacatccagtgacgaaagtctttccgcacccccttgtgttgtgacatttaatacaggagtgaaaatagtgtctgtagctgctggtggtcgtcatacattagcactgtcagatttaggtcaggtatggggttggggatatggaggagaagggcaactaggtctgggctctagaatccgaactgtttcttctccccatcctgtaccgtgcattgaatcagcactatacagcaaggatcgcccatcagctatgaaaggtaacaaggctgctgaaggacatgtcagtaaagtcttgggaaattgtgtgagggccattgcttgtggaggtcgtcacagtgctgcagtaacagattcaggagctcttcttacatttgggtgggggctgtatggacagtgtggacaagggaatacagatgatgttttaagtccaacgtgtgtatcgtctatcctgggatccaagatgcaagacgttgctgcgggtctgtggcacactgtatgtacatccgtagatggtgatgtttattcctttggaggaaaccagtttgggcagcttggcactggttctgatcaggctgagactgttccaaaattggtagatgctaccagcctagagaataagaatgccagatctgtttcttgtggagctcgccatagtgctattataacagatgaaggcgaggtattctgctggggatggaacaagtacggccagcttggccttggcgactcaatggacaggaacgtgccttgcagtgttcctgtggacgcttaccaccccctaaacgtgtcctgtggctggtggcacaccttggtgctcgcggactcgcctacttgaaacctgacaaagaaattaccttagattgacaattttgttaggaactcgtaggctcgtgcagatgcggtgatgctgcatttcatcgtgtacatacatggcagtgcatgcagatatgtgtattcattctttggcggtgcactcttcaacctgtgcaacgtagacaaagcttgtatcgcaccgcgtatacagttgagtaggattgcctcgacaaattgtgcatttcctccgttgctgctaatgtacaaaattccacaagctagacagggcaaccgatgcgttcctcgttgcagaagacagatctccaaaataattaatgtttgtgtatcgtgatggttgcgattccgatattgtttggccgg

SEQ ID NO: 36079 - DNA, 1908 bp, Zea Mays
atgggccaaagttatgtgactgctgggaagcacgaggtgataacattgatgctttcatgctttcctgccccatgtgagaaagttcaggacctattactaaagatagaatattatacctctcaggagactccagaggcttttccacttcctagaggcgtcgcaatagtgcgggcagatgctggatgggctcactgtgttgcaataacagatgaaggtgatgtttatacatggggttggaaagagtgtgttccaactggaagggttattggagaccaatcttcagttggaaccaaggagaaggatgaaagacaaatggcaatggccactgaccaaggtgtgagccccaggtcgcaggtgtctaggacaagcagcggggcagcatctggtccttctgaaagcagaggcactgatgatagcacaaagcgacgaaggttgtcttcagcaaaacatggccctgagagctcgacatccagtgacgaaagtctttccgcacccccttgtgttgtgacatttaatacaggagtgaaaatagtgtctgtagctgctggtggtcgtcatacattagcactgtcagatttaggtcaggtatggggttggggatatggaggagaagggcaactaggtctgggctctagaatccgaactgtttcttctccccatcctgtaccgtgcattgaatcagcactatacagcaaggatcgcccatcagctatgaaagattcaggagctcttcttacatttgggtgggggctgtatggacagtgtggacaagggaatacagatgatgttttaagtccaacgtgtgtatcgtctatcctgggatccaagatgcaagacgttgctgcgggtctgtggcacactgtatgtacatccgtagatggtgatgtttattcctttggaggaaaccagtttgggcagcttggcactggttctgatcaggctgagactgttccaaaattggtagatgctaccagcctagagaataagaatgccagatctgtttcttgtggagctcgccatagtgctattataacaggtaactttaagttgttctaatgtttgtttgtagggatctcaattgtatcatcttgtacgcccatttgcctttcttacaagaccacactactaatacatgctcatgcagggtacgagttctaatcttcgcttacatgcatcttgctattagctttgttatatatacgcgtgccttgctgcaaatggacctaatgttacctcctctttttttattgctacctcatccttggatgctctcgtttgaatcgagaacaaaaggttctgtgctaatcagtgactgaacttaccattgggtaacccaggagtattttttttatttcattaagttattcttgccgtgctgagccaccaggccttgcctcggtttatttcttccctagactccactcatacaaaggtctatggcttttttctcagagctacacatcattatattaagaagaaaaataaggtgtccaaaatagaccaataccaaaaggaatgccaccttcccgtggccaaaatcgagaaatacataaaggtatccataagaccaaaatatcgagaacaaactaccaaagacgacaaatcctagtcctgggatagtggcagtagggagagacactgctggctcttctagccacattcacatttggagtaagcctctctaagacacatccatccattcctgtgatttcaaagcggccaaaacccaagaataattagggagttaagcccctttgcagtaatgctttgcacctgatcattggccttgatctgtttttttttcctggccgagctgagccggtagaagttcacaagggggcagcagccatttacacgtacatactgatcacttaggcctactggaagtagaccaggggcagaactaag

SEQ ID NO: 36080 - DNA, 1764 bp, Zea Mays
atgggccaaagttatgtgactgctgggaagcacgaggtgataacattgatgctttcatgctttcctgccccatgtgagaaagttcaggacctattactaaagatagaatattatacctctcaggagactccagaggcttttccacttcctagaggcgtcgcaatagtgcgggcagatgctggatgggctcactgtgttgcaataacagatgaaggtgatgtttatacatggggttggaaagagtgtgttccaactggaagggttattggagaccaatcttcagttggaaccaaggagaaggatgaaagacaaatggcaatggccactgaccaaggtgtgagccccaggtcgcaggtgtctaggacaagcagcggggcagcatctggtccttctgaaagcagaggcactgatgatagcacaaagcgacgaaggttgtcttcagcaaaacatggccctgagagctcgacatccagtgacgaaagtctttccgcacccccttgtgttgtgacatttaatacaggagtgaaaatagtgtctgtagctgctggtggtcgtcatacattagcactgtcagattcaggagctcttcttacatttgggtgggggctgtatggacagtgtggacaagggaatacagatgatgttttaagtccaacgtgtgtatcgtctatcctgggatccaagatgcaagacgttgctgcgggtctgtggcacactgtatgtacatccgtagatggtgatgtttattcctttggaggaaaccagtttgggcagcttggcactggttctgatcaggctgagactgttccaaaattggtagatgctaccagcctagagaataagaatgccagatctgtttcttgtggagctcgccatagtgctattataacaggtaactttaagttgttctaatgtttgtttgtagggatctcaattgtatcatcttgtacgcccatttgcctttcttacaagaccacactactaatacatgctcatgcagggtacgagttctaatcttcgcttacatgcatcttgctattagctttgttatatatacgcgtgccttgctgcaaatggacctaatgttacctcctctttttttattgctacctcatccttggatgctctcgtttgaatcgagaacaaaaggttctgtgctaatcagtgactgaacttaccattgggtaacccaggagtattttttttatttcattaagttattcttgccgtgctgagccaccaggccttgcctcggtttatttcttccctagactccactcatacaaaggtctatggcttttttctcagagctacacatcattatattaagaagaaaaataaggtgtccaaaatagaccaataccaaaaggaatgccaccttcccgtggccaaaatcgagaaatacataaaggtatccataagaccaaaatatcgagaacaaactaccaaagacgacaaatcctagtcctgggatagtggcagtagggagagacactgctggctcttctagccacattcacatttggagtaagcctctctaagacacatccatccattcctgtgatttcaaagcggccaaaacccaagaataattagggagttaagcccctttgcagtaatgctttgcacctgatcattggccttgatctgtttttttttcctggccgagctgagccggtagaagttcacaagggggcagcagccatttacacgtacatactgatcacttaggcctactggaagtagaccaggggcagaactaag

SEQ ID NO: 36081 - DNA, 1836 bp, Zea Mays
aaactcctcacttggggttctgctgatgacatgggccaaagttatgtgactgctgggaagcacgaggagactccagaggcttttccacttcctagaggcgtcgcaatagtgcgggcagatgctggatgggctcactgtgttgcaataacagatgaaggtgatgtttatacatggggttggaaagagtgtgttccaactggaagggttattggagaccaatcttcagttggaaccaaggagaaggatgaaagacaaatggcaatggccactgaccaaggtgtgagccccaggtcgcaggtgtctaggacaagcagcggggcagcatctggtccttctgaaagcagaggcactgatgatagcacaaagcgacgaaggttgtcttcagcaaaacatggccctgagagctcgacatccagtgacgaaagtctttccgcacccccttgtgttgtgacatttaatacaggagtgaaaatagtgtctgtagctgctggtggtcgtcatacattagcactgtcagatttaggtcaggtatggggttggggatatggaggagaagggcaactaggtctgggctctagaatccgaactgtttcttctccccatcctgtaccgtgcattgaatcagcactatacagcaaggatcgcccatcagctatgaaaggtaacaaggctgctgaaggacatgtcagtaaagtcttgggaaattgtgtgagggccattgcttgtggaggtcgtcacagtgctgcagtaacagattcaggagctcttcttacatttgggtgggggctgtatggacagtgtggacaagggaatacagatgatgttttaagtccaacgtgtgtatcgtctatcctgggatccaagatgcaagacgttgctgcgggtctgtggcacactgtatgtacatccgtagatggtgatgtttattcctttggaggaaaccagtttgggcagcttggcactggttctgatcaggctgagactgttccaaaattggtagatgctaccagcctagagaataagaatgccagatctgtttcttgtggagctcgccatagtgctattataacagggtacgagttctaatcttcgcttacatgcatcttgctattagctttgttatatatacgcgtgccttgctgcaaatggacctaatgttacctcctctttttttattgctacctcatccttggatgctctcgtttgaatcgagaacaaaaggttctgtgctaatcagtgactgaacttaccattgggtaacccaggagtattttttttatttcattaagttattcttgccgtgctgagccaccaggccttgcctcggtttatttcttccctagactccactcatacaaaggtctatggcttttttctcagagctacacatcattatattaagaagaaaaataaggtgtccaaaatagaccaataccaaaaggaatgccaccttcccgtggccaaaatcgagaaatacataaaggtatccataagaccaaaatatcgagaacaaactaccaaagacgacaaatcctagtcctgggatagtggcagtagggagagacactgctggctcttctagccacattcacatttggagtaagcctctctaagacacatccatccattcctgtgatttcaaagcggccaaaacccaagaataattagggagttaagcccctttgcagtaatgctttgcacctgatcattggccttgatctgtttttttttcctggccgagctgagccggtagaagttcacaagggggcagcagccatttacacgtacatactgatcacttaggcctactggaagtagaccaggggcagaactaag

SEQ ID NO: 36082 - DNA, 1938 bp, Zea Mays
cacatgcggacctgccattagtgtgtaccactaggttcaaaatatagggcagtgccatcaagtttcttggaacaaagcgccaccatgacaagtggttggttgccacggaaaattatgatatcaagggttgttttgcaatgacagaactaggccatggaagcaatgtgcgaggaatagaaacaatagcaacttatgattcagaaacaagagagttcatcataaatactccatgtgaatcagctcagaagtactggattggtggagctgccaatcatgcaacacatacaatagtcttttgtcaacttcatataaatgggagaaatgaaggagttcatgcttttgtagctcaaattagggatgaagatggaactgtgttgcctaatatccatatagctgactgtggccataagattggactgaatggcgttgataatgggcggatttggtttcagaatatacgtgttcctcgtgagaacttgcttaatttggttgctgatgttttgccagatgggcgatatgttagcatgatagataatccagatcagaggtttgcagctttcctatctccgcttacacttggtcgagtaaacattgcagttaactcagtctacatttcaaaggtcagcctagcaattgctgtgagatacagtttgtcaaggagagccttttcaattgcaccagatgcccctgaaatgttgttgcttgactatcccagtcaccagcgacgccttctaccacttctagcaaaagtatgtctgatgagcagtgctggcaattttatgaaaaatatgtatgtaaagagaactcctgaaatgagcaaagacatacacatttactctagtgctctgaaggcgacactaacttggcagaatatgattacgattcaggagtgtcgcgaggcctgtggaggtcaaggtctaaagactgagaaccgcataggaattttcaaatctgaatttgatgtccagtccacatttgagggtgataacaatgtgctaatgcagcaggtaagcaaagcgctttatgctgaatttttgggtgcacaaaagaagcagcagccattcaagggattgggtttggaacacttaaatggctcgagccctgttattcctgataagctgacaagtagcatattaaggagctccaagttccagatggacctgttctgcttaagggagagagatttactgaagcagtttgtagaggaggtttctctccatcttgcacaaggcgaaagcagagaaaaggctttgatgctgagttatcaagttgctgaagacttggctagagcgtttactgagcgtacgatcctccaaatatttttggaggatgagatgaatgttccttctggttccctaaaggaggtactgggcttgctgagatctctatatgtcatggtgaacatagatgaatccacatcttttctaagatacgggcatttatcacgtgacaatgtagcccttgtgcggaaagaagtcctgaaactgtgcagtgaactcaggccccatgcgcttgctgttgttagttctttcggaatccctgatgccttccttagtccacttgcttttgactggattgaggcaaatgcactgtcaaccgggagccactgatctcaggtttccacatacgagccaggttatcctgtgaaagtactgaatattgatggcggggcatagataccgtataactacaggagcacttgttgtctcggaacaaattgttgtgaatcctgttttgtataatagttttcttgaatataagcgaacgtagcctaacaggccaaagtccatgtaatggggtttacaacagtaataacttgcagagtgatgtaagcgagttgttgagcagtaaataaaatactcttgtcccaaaatatagttctttttaacccattttttcctgtccatattatagatacattataagatacatgtaaac

SEQ ID NO: 36083 - DNA, 2632 bp, Zea Mays
aaaaaaactgttctcccctatcctcaaagaaacgtgtgccgagatgcaacctcacgctgactcggcgcatatactctgtatcattggcgcgatttctcggtttcttctgacacccgacttggattgtctcgttcgtcttcgtcatcgtcactcaacaactcgtctcatcgcgccgcatcgtttacctcaaggttgttttgttgcttccttgtcccgctctcaccagcaatcccgtcgatcacccagacctccacggcactgctccgtctcctccgttccgttccgaaccgcaagctcccaacccttccgcgatggacctcacctcgccgtcgcccgcggcgcgccgcgccgccgccatcgcgcgccacctcgccgcggccgccgcccccatcccggcgagcagccccctggaaccttcctgctgcctcagctacgtcccgccggagtccacggagcggccggcggcgtttgcgccggccgacctcaggcttctgctggacgggcacgacctgcccacgcgggactggctcttccgcgccatggaggagagcccccttttccgcagccggagttcgcggacgggatccagggtgttcgtggcgccggacttcaacgacggcaaggaagggcagcgggaggccaccatgcggcggatcgcgtacctgaatcggcgcggcgtgttccgcgggtggctcaccgaggacggcgctgccgccgagctccgcaaactagcgctcctcgactgcatcgccatctatgaccactctctcgccatcaagattggcgtccacttcttcctctggggcagtgccatcaagtttcttggaacaaagcgccaccatgacaagtggttggttgccacggaaaattatgatatcaagggttgttttgcaatgacagaactaggccatggaagcaatgtgcgaggaatagaaacaatagcaacttatgattcagaaacaagagagttcatcataaatactccatgtgaatcagctcagaagtactggattggtggagctgccaatcatgcaacacatacaatagtcttttgtcaacttcatataaatgggagaaatgaaggagttcatgcttttgtagctcaaattagggatgaagatggaactgtgttgcctaatatccatatagctgactgtggccataagattggactgaatggcgttgataatgggcggatttgatgggcgatatgttagcatgatagataatccagatcagaggtttgcagctttcctatctccgcttacacttggtcgagtaaacattgcagttaactcagtctacatttcaaaggtcagcctagcaattgctgtgagatacagtttgtcaaggagagccttttcaattgcaccagatgcccctgaaatgttgttgcttgactatcccagtcaccagcgacgccttctaccacttctagcaaaagtatgtctgatgagcagtgctggcaattttatgaaaaatatgtatgtaaagagaactcctgaaatgagcaaagacatacacatttactctagtgctctgaaggcgacactaacttggcagaatatgattacgattcaggagtgtcgcgaggcctgtggaggtcaaggtctaaagactgagaaccgcataggaattttcaaatctgaatttgatgtccagtccacatttgagggtgataacaatgtgctaatgcagcaggtaagcaaagcgctttatgctgaatttttgggtgcacaaaagaagcagcagccattcaagggattgggtttggaacacttaaatggctcgagccctgttattcctgataagctgacaagtagcatattaaggagctccaagttccagatggacctgttctgcttaagggagagagatttactgaagcagtttgtagaggaggtttctctccatcttgcacaaggcgaaagcagagaaaaggctttgatgctgagttatcaagttgctgaagacttggctagagcgtttactgagcgtacgatcctccaaatatttttggaggatgagatgaatgttccttctggttccctaaaggaggtactgggcttgctgagatctctatatgtcatggtgaacatagatgaatccacatcttttctaagatacgggcatttatcacgtgacaatgtagcccttgtgcggaaagaagtcctgaaactgtgcagtgaactcaggccccatgcgcttgctgttgttagttctttcggaatccctgatgccttccttagtccacttgcttttgactggattgaggcaaatgcactgtcaaccgggagccactgatctcaggtttccacatacgagccaggttatcctgtgaaagtactgaatattgatggcggggcatagataccgtataactacaggagcacttgttgtctcggaacaaattgttgtgaatcctgttttgtataatagttttcttgaatataagcgaacgtagcctaacaggccaaagtccatgtaatggggtttacaacagtaataacttgcagagtgatgtaagcgagttgttgagcagtaaataaaatactcttgtcccaaaatatagttctttttaacccattttttcctgtccatattatagatacattataagatacatgtaaac

SEQ ID NO: 36084 - DNA, 2702 bp, Zea Mays
atcacctcaagaggagtggagaaaacccatgaacgaccaaaggcttcaactgacaagctttgtcaaaccgttcttccataaaaaaaaactgttctcccctatcctcaaagaaacgtgtgccgagatgcaacctcacgctgactcggcgcatatactctgtatcattggcgcgatttctcggtttcttctgacacccgacttggattgtctcgttcgtcttcgtcatcgtcactcaacaactcgtctcatcgcgccgcatcgtttacctcaaggttgttttgttgcttccttgtcccgctctcaccagcaatcccgtcgatcacccagacctccacggcactgctccgtctcctccgttccgttccgaaccgcaagctcccaacccttccgcgatggacctcacctcgccgtcgcccgcggcgcgccgcgccgccgccatcgcgcgccacctcgccgcggccgccgcccccatcccggcgagcagccccctggaaccttcctgctgcctcagctacgtcccgccggagtccacggagcggccggcggcgtttgcgccggccgacctcaggcttctgctggacgggcacgacctgcccacgcgggactggctcttccgcgccatggaggagagcccccttttccgcagccggagttcgcggacgggatccagggtgttcgtggcgccggacttcaacgacggcaaggaagggcagcgggaggccaccatgcggcggatcgcgtacctgaatcggcgcggcgtgttccgcgggtggctcaccgaggacggcgctgccgccgagctccgcaaactagcgctcctcgactgcatcgccatctatgaccactctctcgccatcaagattggcgtccacttcttcctctggggcagtgccatcaagtttcttggaacaaagcgccaccatgacaagtggttggttgccacggaaaattatgatatcaagggttgttttgcaatgacagaactaggccatggaagcaatgtgcgaggaatagaaacaatagcaacttatgattcagaaacaagagagttcatcataaatactccatgtgaatcagctcagaagtactggattggtggagctgccaatctcaaattagggatgaagatggaactgtgttgcctaatatccatatagctgactgtggccataagattggactgaatggcgttgataatgggcggatttggtttcagaatatacgtgttcctcgtgagaacttgcttaatttggttgctgatgttttgccagatgggcgatatgttagcatgatagataatccagatcagaggtttgcagctttcctatctccgcttacacttggtcgagtaaacattgcagttaactcagtctacatttcaaaggtcagcctagcaattgctgtgagatacagtttgtcaaggagagccttttcaattgcaccagatgcccctgaaatgttgttgcttgactatcccagtcaccagcgacgccttctaccacttctagcaaaagtatgtctgatgagcagtgctggcaattttatgaaaaatatgtatgtaaagagaactcctgaaatgagcaaagacatacacatttactctagtgctctgaaggcgacactaacttggcagaatatgattacgattcaggagtgtcgcgaggcctgtggaggtcaaggtctaaagactgagaaccgcataggaattttcaaatctgaatttgatgtccagtccacatttgagggtgataacaatgtgctaatgcagcaggtaagcaaagcgctttatgctgaatttttgggtgcacaaaagaagcagcagccattcaagggattgggtttggaacacttaaatggctcgagccctgttattcctgataagctgacaagtagcatattaaggagctccaagttccagatggacctgttctgcttaagggagagagatttactgaagcagtttgtagaggaggtttctctccatcttgcacaaggcgaaagcagagaaaaggctttgatgctgagttatcaagttgctgaagacttggctagagcgtttactgagcgtacgatcctccaaatatttttggaggatgagatgaatgttccttctggttccctaaaggaggtactgggcttgctgagatctctatatgtcatggtgaacatagatgaatccacatcttttctaagatacgggcatttatcacgtgacaatgtagcccttgtgcggaaagaagtcctgaaactgtgcagtgaactcaggccccatgcgcttgctgttgttagttctttcggaatccctgatgccttccttagtccacttgcttttgactggattgaggcaaatgcactgtcaaccgggagccactgatctcaggtttccacatacgagccaggttatcctgtgaaagtactgaatattgatggcggggcatagataccgtataactacaggagcacttgttgtctcggaacaaattgttgtgaatcctgttttgtataatagttttcttgaatataagcgaacgtagcctaacaggccaaagtccatgtaatggggtttacaacagtaataacttgcagagtgatgtaagcgagttgttgagcagtaaataaaatactcttgtcccaaaatatagttctttttaacccattttttcctgtccatattatagatacattataagatacatgtaaac

SEQ ID NO: 36085 - DNA, 2335 bp, Zea Mays
cccgcctagttcatgtgctcatgcacccgcacatcattataaataccagttttgctgtttacccgttccaacttcgcctggcccgagaggccgagatcaatactagacctcgactcgagtctcgagtcacgtttccgccgttatctgcatcaacggggtcaggcgactgaacagtacaggcccttggccgccgccgccgccgccgccgtactccaggtgcccaggtcttcgtccgaccctttgccagcgacgagcacccaccacaccaggatttcatcatggttgattctgttcatgacaatattgtgctgaacaagtgtatcaaggacatccttgcactaatcaaaccagtagaggatgatagaagcaagcggttatccacaattcaggagctggaaaattgtatccattctcttgcatctctgtcaggtgctgctgtcaaaccgtttgggtcttttgtatcagatctttactcaaaatcaggtgacttagatttgtcagttcagtttgggaatggttcaaaccacccaataaacaagaaaaagaagcagaatgccttgagagatgttaggaaagctttactaagtcgaggtgttactggatacatgcagatgcagttcatcccacatgcaagagttccagtccttcaatatgtgagcaagcaatttggcatctcctgtgatatatcaattggcaactttgctggtcgaattaagtccaaaatcttctactgggtcaatactgtagatgagcggtttggtgatatggttttgctgatcaaggaatgggcaaaagcacaaaacattaacgatccaaagagcgggaccctcaactcttattcgctttgcctacttgtcctctatcattttcagacatctgagccaccaattctaccacctctgaatgagatttatgaagggaatattgcaggagatgttacagaagcagcactttttgatgagcaacatcttgatgaggtttgtgctgcaaatatagaaagatttagactccagaacaagggccgaagaaatgaaacttcaacttgtcgtctacttgggactttttttcagaagataatgtcatatctacttactcgggccagattgagcgaatccagaacaacccaagttggatgaggaaatcttaccatttatttgttgaagatcctgtagagagacctgataatgccgctagagcagttagtatgaaaggccttgacctcattgctattgcattcaatgatgcttgtcacaagtttaagtctctggaacatatcgatcggaatgaattattggcactgttgtgtacccctgttgttcgcttgaaacttggtgtgagagtcagagagaactcttacccaaaatctccaaggaataatgtgcatagcaggattagaggacagatgtggcgtgatcgaggccaagcacccagcgcgagagggtttactggaaccagatcagtccatgaaaatccactagcgaacactacagcacatgaaacagcagtgcaataccacaaccatgtgcagccgacaacagttcggcaaacagccatccgcaatcaagtaacaaatactgcagtgcatcagaccgcgccttaccagaaccatactgctcgacaggtgtatcctacttggtcccagacagctgaaccctaccagaatcataatcagcaggtatacgctactgggtttcaaacagggccataccaaagccataatcaagtccatgcttatagagcagggttgccacctggaggaatatatgagatccacaatcaacaggtgtataatgcagggttccaaaccgacggtccgcaccagaatcagcagcggcgaaagggatacccatcaaaccatcagaataacaggctttctgcgacggcagcgaggtacgagcccgttcgtggacagtttaacaacggatcgacatgggactcaaggtcccaagcaccgggcagtgcagctctgcgaaggtagccgtcagcatctcaggaggatagtagtaacaggcaaatcggctggattttgactgctgggcagctcttccttgtgtaaaaaattctagcacttctttactggtggacaactcttccttatgtaaaaattgctgttagcagtcggttcgtagtatgtgtcaattaattttttttaaggtgtgattgggtttatttatcgtgtctcagaaattcatcgcccttctccgtatgctcacgtatcatgtaaataaagtacaatagctggtccatgacacgcagaaatattcatcatgtaaaaagctgcctcacgccatatatgagcttttaagattttttaggaatcaattgttttttctct

SEQ ID NO: 36086 - DNA, 2437 bp, Zea Mays
cccgcctagttcatgtgctcatgcacccgcacatcattataaataccagttttgctgtttacccgttccaacttcgcctggcccgagaggccgagatcaatactagacctcgactcgagtctcgagtcacgtttccgccgttatctgcatcaacggggtcaggcgactgaacagtacaggcccttggccgccgccgccgccgccgccgtactccaggtgcccaggtcttcgtccgaccctttgccagcgacgagcacccaccacaccaggatttcatcatggttgattctgttcatgacaatattgtgctgaacaagtgtatcaaggacatccttgcactaatcaaaccagtagaggatgatagaagcaagcggttatccacaattcaggagctggaaaattgtatccattctcttgcatctctgtcaggtgctgctgtcaaaccgtttgggtcttttgtatcagatctttactcaaaatcaggtgacttagatttgtcagttcagtttgggaatggttcaaaccacccaataaacaagaaaaagaagcagaatgccttgagagatgttaggaaagctttactaagtcgagatgcagttcatcccacatgcaagagttccagtccttcaatatgtgagcaagcaatttggcatctcctgtgatatatcaattggcaactttgctggtcgaattaagtccaaaatcttctactgggtcaatactgtagatgagcggtttggtgatatggttttgctgatcaaggaatgggcaaaagcacaaaacattaacgatccaaagagcgggaccctcaactcttattcgctttgcctacttgtcctctatcattttcagacatctgagccaccaattctaccacctctgaatgagatttatgaagggaatattgcaggagatgttacagaagcagcactttttgatgagcaacatcttgatgaggtttgtgctgcaaatatagaaagatttagactccagaacaagggccgaagaaatgaaacttcaacttgtcgtctacttgggactttttttcagaagtttgctcatatcaatgccttaacagataatgtcatatctacttactcgggccagattgagcgaatccagaacaacccaagttggatgaggaaatcttaccatttatttgtaggaatgcctatgcatttggtagttgttgcttatcttaattttagcctatgtattttacaacttacatcccatctctttgccatcttttgttcaggttgaagatcctgtagagagacctgataatgccgctagagcagttagtatgaaaggccttgacctcattgctattgcattcaatgatgcttgtcacaagtttaagtctctggaacatatcgatcggaatgaattattggcactgttgtgtacccctgttgttcgcttgaaacttggtgtgagagtcagagagaactcttacccaaaatctccaaggaataatgtgcatagcaggattagaggacagatgtggcgtgatcgaggccaagcacccagcgcgagagggtttactggaaccagatcagtccatgaaaatccactagcgaacactacagcacatgaaacagcagtgcaataccacaaccatgtgcagccgacaacagttcggcaaacagccatccgcaatcaagtaacaaatactgcagtgcatcagaccgcgccttaccagaaccatactgctcgacaggtgtatcctacttggtcccagacagctgaaccctaccagaatcataatcagcaggtatacgctactgggtttcaaacagggccataccaaagccataatcaagtccatgcttatagagcagggttgccacctggaggaatatatgagatccacaatcaacaggtgtataatgcagggttccaaaccgacggtccgcaccagaatcagcagcggcgaaagggatacccatcaaaccatcagaataacaggctttctgcgacggcagcgaggtacgagcccgttcgtggacagtttaacaacggatcgacatgggactcaaggtcccaagcaccgggcagtgcagctctgcgaaggtagccgtcagcatctcaggaggatagtagtaacaggcaaatcggctggattttgactgctgggcagctcttccttgtgtaaaaaattctagcacttctttactggtggacaactcttccttatgtaaaaattgctgttagcagtcggttcgtagtatgtgtcaattaattttttttaaggtgtgattgggtttatttatcgtgtctcagaaattcatcgcccttctccgtatgctcacgtatcatgtaaataaagtacaatagctggtccatgacacgcagaaatattcatcatgtaaaaagctgcctcacgccatatatgagcttttaagattttttaggaatcaattgttttttctct

SEQ ID NO: 36087 - DNA, 2290 bp, Zea Mays
cccgcctagttcatgtgctcatgcacccgcacatcattataaataccagttttgctgtttacccgttccaacttcgcctggcccgagaggccgagatcaatactagacctcgactcgagtctcgagtcacgtttccgccgttatctgcatcaacggggtcaggcgactgaacagtacaggcccttggccgccgccgccgccgccgccgtactccaggtgcccaggtcttcgtccgaccctttgccagcgacgagcacccaccacaccaggatttcatcatggttgattctgttcatgacaatattgtgctgaacaagtgtatcaaggacatccttgcactaatcaaaccagtagaggatgatagaagcaagcggttatccacaattcaggagctggaaaattgtatccattctcttgcatctctgtcaggtgctgctgtcaaaccgtttgggtcttttgtatcagatctttactcaaaatcaggtgacttagatttgtcagttcagtttgggaatggttcaaaccacccaataaacaagaaaaagaagcagaatgccttgagagatgttaggaaagctttactaagtcgaggtgttactggatacatgcagatgcagttcatcccacatgcaagagttccagtccttcaatatgtgagcaagcaatttggcatctcctgtgatatatcaattggcaactttgctggtcgaattaagtccaaaatcttctactgggtcaatactgtagatgagcggtttggtgatatggttttgctgatcaaggaatgggcaaaagcacaaaacattaacgatccaaagagcgggaccctcaactcttattcgctttgcctacttgtcctctatcattttcagaagcagcactttttgatgagcaacatcttgatgaggtttgtgctgcaaatatagaaagatttagactccagaacaagggccgaagaaatgaaacttcaacttgtcgtctacttgggactttttttcagaagtttgctcatatcaatgccttaacagataatgtcatatctacttactcgggccagattgagcgaatccagaacaacccaagttggatgaggaaatcttaccatttatttgttgaagatcctgtagagagacctgataatgccgctagagcagttagtatgaaaggccttgacctcattgctattgcattcaatgatgcttgtcacaagtttaagtctctggaacatatcgatcggaatgaattattggcactgttgtgtacccctgttgttcgcttgaaacttggtgtgagagtcagagagaactcttacccaaaatctccaaggaataatgtgcatagcaggattagaggacagatgtggcgtgatcgaggccaagcacccagcgcgagagggtttactggaaccagatcagtccatgaaaatccactagcgaacactacagcacatgaaacagcagtgcaataccacaaccatgtgcagccgacaacagttcggcaaacagccatccgcaatcaagtaacaaatactgcagtgcatcagaccgcgccttaccagaaccatactgctcgacaggtgtatcctacttggtcccagacagctgaaccctaccagaatcataatcagcaggtatacgctactgggtttcaaacagggccataccaaagccataatcaagtccatgcttatagagcagggttgccacctggaggaatatatgagatccacaatcaacaggtgtataatgcagggttccaaaccgacggtccgcaccagaatcagcagcggcgaaagggatacccatcaaaccatcagaataacaggctttctgcgacggcagcgaggtacgagcccgttcgtggacagtttaacaacggatcgacatgggactcaaggtcccaagcaccgggcagtgcagctctgcgaaggtagccgtcagcatctcaggaggatagtagtaacaggcaaatcggctggattttgactgctgggcagctcttccttgtgtaaaaaattctagcacttctttactggtggacaactcttccttatgtaaaaattgctgttagcagtcggttcgtagtatgtgtcaattaattttttttaaggtgtgattgggtttatttatcgtgtctcagaaattcatcgcccttctccgtatgctcacgtatcatgtaaataaagtacaatagctggtccatgacacgcagaaatattcatcatgtaaaaagctgcctcacgccatatatgagcttttaagattttttaggaatcaattgttttttctct

SEQ ID NO: 36088 - DNA, 2252 bp, Zea Mays
cccgcctagttcatgtgctcatgcacccgcacatcattataaataccagttttgctgtttacccgttccaacttcgcctggcccgagaggccgagatcaatactagacctcgactcgagtctcgagtcacgtttccgccgttatctgcatcaacggggtcaggcgactgaacagtacaggcccttggccgccgccgccgccgccgccgtactccaggtgcccaggtcttcgtccgaccctttgccagcgacgagcacccaccacaccaggatttcatcatggttgattctgttcatgacaatattgtgctgaacaagtgtatcaaggacatccttgcactaatcaaaccagtagaggatgatagaagcaagcggttatccacaattcaggagctggaaaattgtatccattctcttgcatctctgtcaggtgctgctgtcaaaccgtttgggtcttttgtatcagatctttactcaaaatcaggtgacttagatttgtcagttcagtttgggaatggttcaaaccacccaataaacaagaaaaagaagcagaatgccttgagagatgttaggaaagctttactaagtcgaggtgttactggatacatgcagatgcagttcatcccacatgcaagagttccagtccttcaatatgtgagcaagcaatttggcatctcctgtgatatatcaattggcaactttgctggtcgaattaagtccaaaatcttctactgggtcaatactgtagatgagcggtttggtgatatggttttgctgatcaaggaatgggcaaaagcacaaaacattaacgatccaaagagcgggaccctcaactcttattcgctttgcctacttgtcctctatcattttcagacatctgagccaccaattctaccacctctgaatgagatttatgaagggaatattgcaggagatgttacagaagcagcactttttgatgagcaacatcttgatgaggtttgtgctgcaaatatagaaagatttagactccagaacaagggccgaagaaatgaaacttcaacttgtcgtctacttgggactttttttcagaagtttgctcatatcaatgccttaacagataatgtcatatctacttactcgggccagattgagcgaatccagaacaacccaagttggatgaggaaatcttaccatttatttgttgaagatcctgtagagagacctgataatgccgctagagcagttagtatgaaaggccttgacctcattgctattgcattcaatgatgcttgtcacaagtttaagtctctggaacatatcgatcggaatgaattattggcactgttgtgtacccctgttgttcgcttgaaacttggtgtgagagtcagagagaactcttacccaaaatctccaaggaataatgtgcatagcaggattagaggacagatgtggcgtgatcgaggccaagcacccagcgcgagagggtttactggaaccagatcagtccatgaaaatccactagcgaacactacagcacatgaaacagcagtgcaataccacaaccatgtgcagccgacaacagttcggcaaacagccatccgcaatcaagtaacaaatactgcagtgcatcagaccgcgccttaccagaaccatactgctcgacaggtgtatcctacttggtcccagacagctgaaccctaccagaatcataatcagcaggtgtataatgcagggttccaaaccgacggtccgcaccagaatcagcagcggcgaaagggatacccatcaaaccatcagaataacaggctttctgcgacggcagcgaggtacgagcccgttcgtggacagtttaacaacggatcgacatgggactcaaggtcccaagcaccgggcagtgcagctctgcgaaggtagccgtcagcatctcaggaggatagtagtaacaggcaaatcggctggattttgactgctgggcagctcttccttgtgtaaaaaattctagcacttctttactggtggacaactcttccttatgtaaaaattgctgttagcagtcggttcgtagtatgtgtcaattaattttttttaaggtgtgattgggtttatttatcgtgtctcagaaattcatcgcccttctccgtatgctcacgtatcatgtaaataaagtacaatagctggtccatgacacgcagaaatattcatcatgtaaaaagctgcctcacgccatatatgagcttttaagattttttaggaatcaattgttttttctct

SEQ ID NO: 36089 - DNA, 4566 bp, Zea Mays
gttaccatcaacctcctcatgggcccacgcaccttgcccacctggtaggccatggacaccacgtgtccaccgcgccgagcaagagagcaacacgcgtccagatcctgccgggacggacgggcccgatgcgccggaccaggaccacgtcgcaacaactgtacctgtccaggcgctgcccgttacggcgacggacacctgcccctctgcccctgcccgcctcgcttccttcctcttcttccctctatctgtattgccccgaaaccttcgtgcccgtttcgcctcgcgcctgcgttgctctgctatttccatttccattgcacccatttccggggtcgcctgcgttgcttcgcgtgggagcgtgattcgtttaggcctctcgccaatttcggagggcgacggcgacgtgctttcggcgggcgggcagagaaaatctagagtcttgggtttgccagacgcgcctttgtgggagacagacacttgctctcgcctccaatggccgagatctgctgcgaggaagccaagtcgacgccggcaaccgccgtggctgcggcttcagtctccgccacggccgcagcggccgcagccgtggcagtggcctcctcggcgttagagaggaggcgacgcaggctggagatgaggaggttccgcgtcgcgagcgatcccgaggagctggtcgcggaggacgtccgcgctgccaagcggcagaggctggcgcgcacgctgtccggctcctgccccgacgcgggctcggactccgacaggccggccctgcccaggtacggggtcacctccgtctgcggccgacggcgcgagatggaggacacggtctccatcaggccggacttcctgcccggcaccagcaagcacaacttcttcggcgtcttcgacggccacggctgctcccacgtagcgacgatgtgccaggacaacatgcacgaggttgtcgcggacgagcacacgaaggctgcctctggcgaggagacggcgtggaagggcgtgatggagaggagcttctcgcgattggatgagcaggccgccagctgggcgaccagccgcagccgcgacgagcctgcctgcaggtgcgagcagcagatgcccttgcgctgcgatcacgtggggtccaccgccgtggtcgccgtcgttagccccagccacgtagtcgtcgccaacgccggcgactcgcgcgccgtcctctcccgcggcggcgtccccgttccgctctccgtcgaccacaagcctgaccgacctgacgagctggctcgcatcgaggcggcgggtggccgcgtcatttactgggatggtgcccgtgttctcggcgtcctcgccatgtctcgagccataggggataggtacctaaagccgtttgtgtcgtcggagccggaggtaacggtgacggagcgcaccgacgacgacgagtgtctgatcctggccagcgacggcctgtgggacgtcgtgaccaacgagatggcgtgcgaggtcgtccgggcgtgcttccgtagcaacggtccgccggcgccggccgctcgcccgaacggcgtggccctcccggcagccggcgcgggcgccgaggacggatcggcggttgtcaagggtgtgggcaaggaggactccgacaaggcgtgctccgacgcggccatgctgctggcaaagctggcgctggcccggcggagcgccgacaatgttagcgtggtcgtcgtggatctccgccggggcatatgattctcggagcgaagcagagcagggcaaaatcatatgctccatgcttgaaactagctcttctgaaatccacgctaatttctcccccattttgaccatccttctattttgatgtagtattagtagtagatcctgatcagatgaatataatagacgcttttcttctctcagacgaggaattaaagccagtcaggcagtatcaaggaacaagaacagcgaattgttggatcatggcctggccacatacgcacaacgtagtgcagatcgttagccccaactttttggccgttgcttaacttgctaggactgctcgttgcgtccttcgactaaactagattaacggggcgatggatcaccacgcaggaagcttgaaaaggagcttacttctggagaactgatcctgctcatacagctaggttggcgattcctttgcgaccattataaaagatccaaattccatatgaaccactggaatttctaccgttcgtcccatgccattgtccaagatttttcgtcccgtttaaaccactgccgtctcttttcgtggtaacggacgttaacagcagcgaggaaggtccgttttgcccttggcgacttgagtcaagtccttgttgttcaggccgccgccgctcccagttctcccgtgaggctcttctctcgttcgtgtccccctgttctccccgccgaaccctagattcacagcaccaaggatgggttaagcgaggatggggaatcatggtggaggaccagggtccggattggcgggcgacatggcaccgatgaggtccgacgactggccttcatggcttccagatgggatggacccaaaaacaagcttcaatttagaattcaggatattcgctacaaaatcacgtttcccatggtttttgcacactgagcttgtagattctgacattatgaattacaaagatctgcttgatgaaatcatgaggaagtacccttgttcttacggggaggtggtgaaaatgtattattactgtgctgagtccaagtccaacattgaggtttgctgtgatgaagacctagttaatatgtttcagaaaaatgcatccactaagacatgtcatatttccattgctcactatgaccctagtactgaaccaccagccataccactatgggatgtaacatatgctaaggcagtggaaatcccttgcacatcatcaatgccagctccaactcaatctttagatgaaccaagccaacaaccagaggatgatgacaagtacctgcaaaaccctgaaccagaaaatgaatatgttggtgtcgatgaagaaggcatgtacattgacttaggaccacaggttcagggaaatgcagaccaagaggatgagtatattcctgagactgactctaacttggattctaactttgaatctgatggttctgatgatgagatggtggaggataatgttccaccccacacagccgaagcagtgtatgacaaagctgacccacctatggaagtaggaagcatatatccaaacatgaatgcatttagattggctttagctactcatacaatcaagaatgagtttgaaattgacattgagaagagtgaaccagggaggtacagggcttactgctgtgggagaattgagggttgtaagtggaggattcatgcttcaactatgggagacaataagacagtgaaggtgaagaagaacccacatctgcatgagtgccatagtacaaggagaaaaggtcaggtgaagggtgcaaccaaacattgggttgctgatacagtgagagattggttagtggacaatccaaggttgactccaaaggcccttcaacagaggataaaagatgagttcaaggtatgggtgcactacaagagggtttaccatggtaaagaactagctatgactcaattatatggtgactggagggagagttttgacaacctatataggttcaagaagcaaatagaagaatcttgccctggtagtttagttgttattgatcatcacaccatcaataagaagattaagttcaacaggctattttttgccatgaaaccttgcattgatggtttccttcaaggatgtagaccctatttagctattgatagtacatttctaactggaaagtttaggggtcagctatgtgtggcttgtgcatctactgagacaagcattgtacctgtgtcagcaccaagaatggttttccctgatcttggcctcacacctccagttacaaagaagagaaagagctcatccactacatcaatggctgccaagaagaagaagagctcagccatgtctgttaggttggtgcaatacttgtttgtacagcagtctgttattactcctaaccttcactcatgcatattattcttgctacaagatctggacaaggctccaaccagccagaccctatgcctttgtctatcatgatgccatcaatggaggttgcagacaaggaagagaatcaagaaacaaaaaaagaggtggcaggacatgggaagaaaaataagagagagccagaagtcatcggatctcctgcaatgggaactagaagcaaagccagttgcagtggcagtcctgccatgggaactagaagcaaaagaaagctcaatgtctaattggaactaggtagtcttttgtactattttttgggtctacttgactagaattgtgttaatgtagtgctgtggtctgtatgaccaaaactgtggcattctatgaccaaaactgtgatgctatggtctggatggccaaaacattgatgtatggtctgtataaccacttgtgttttcaatttgcattactttgccatacatctggacactgtttatgccatacatgtggatactgtttatgtcat

SEQ ID NO: 36090 - DNA, 2074 bp, Zea Mays
cctcgcttccttcctcttcttccctctatctgtattgccccgaaaccttcgtgcccgtttcgcctcgcgcctgcgttgctctgctatttccatttccattgcacccatttccggggtcgcctgcgttgcttcgcgtgggagcgtgattcgtttaggcctctcgccaatttcggagggcgacggcgacgtgctttcggcgggcgggcagagaaaatctagagtcttgggtttgccagacgcgcctttgtgggagacagacacttgctctcgcctccaatggccgagatctgctgcgaggaagccaagtcgacgccggcaaccgccgtggctgcggcttcagtctccgccacggccgcagcggccgcagccgtggcagtggcctcctcggcgttagagaggaggcgacgcaggctggagatgaggaggttccgcgtcgcgagcgatcccgaggagctggtcgcggaggacgtccgcgctgccaagcggcagaggctggcgcgcacgctgtccggctcctgccccgacgcgggctcggactccgacaggccggccctgcccaggtacggggtcacctccgtctgcggccgacggcgcgagatggaggacacggtctccatcaggccggacttcctgcccggcaccagcaagcacaacttcttcggcgtcttcgacggccacggctgctcccactttcgcgctactactgtaggtagcgacgatgtgccaggacaacatgcacgaggttgtcgcggacgagcacacgaaggctgcctctggcgaggagacggcgtggaagggcgtgatggagaggagcttctcgcgattggatgagcaggccgccagctgggcgaccagccgcagccgcgacgagcctgcctgcaggtgcgagcagcagatgcccttgcgctgcgatcacgtggggtccaccgccgtggtcgccgtcgttagccccagccacgtagtcgtcgccaacgccggcgactcgcgcgccgtcctctcccgcggcggcgtccccgttccgctctccgtcgaccacaagcctgaccgacctgacgagctggctcgcatcgaggcggcgggtggccgcgtcatttactgggatggtgcccgtgttctcggcgtcctcgccatgtctcgagccataggggataggtacctaaagccgtttgtgtcgtcggagccggaggtaacggtgacggagcgcaccgacgacgacgagtgtctgatcctggccagcgacggcctgtgggacgtcgtgaccaacgagatggcgtgcgaggtcgtccgggcgtgcttccgtagcaacggtccgccggcgccggccgctcgcccgaacggcgtggccctcccggcagccggcgcgggcgccgaggacggatcggcggttgtcaagggtgtgggcaaggaggactccgacaaggcgtgctccgacgcggccatgctgctggcaaagctggcgctggcccggcggagcgccgacaatgttagcgtggtcgtcgtggatctccgccggggcatatgattctcggagcgaagcagagcagggcaaaatcatatgctccatgcttgaaactagctcttctgaaatccacgctaatttctcccccattttgaccatccttctattttgatgtagtattagtagtagatcctgatcagatgaatataatagacgcttttcttctctcagacgaggaattaaagccagtcaggcagtatcaaggaacaagaacagcgaattgttggatcatggcctggccacatacgcacaacgtagtgcagatcgttagccccaactttttggccgttgcttaacttgctaggactgctcgttgcgtccttcgactaaactagattaacggggcgatggatcaccacgcaggaagcttgaaaaggagcttacttctggagaactgatcctgctcatacagctaggttggcgattcctttgcgaccattataaaagatccaaattccatatgaaccactggaatttctaccgttcgtcccatgccattgtccaagatttttcgtcccgtttaaaccactgccgtctcttttcgtggtaacggac

SEQ ID NO: 36091 - DNA, 753 bp, Zea Mays
aatcttatcctcttctcattctcctttctccctcttgtgtcttccaccaggaacaagccgccgccgcacgcctccgcttgctcccacccgcgcccgccggtgcacccgccccggccccgcccgtcgcggctgcccccaccccgcccgcccctaccaccggcgcggccgcctccggccccggccccaaacgctgcacccaacagccccagccgtcccactcccagggtccatctcagtcgccgtcgcagaccacgcagcaggcgtcaccccagcagcagcaggtggcggcggtggcagcggcataggcacaagcacagacccaggcggcatgggtacgaagccccgagatggagatggcgctgcaggacgccatgcgggtctgcaatccggacgtcaatacgcccttccagtccatcgaggacgctgtcaacaggtgagggttcagcgtggaggtttgtcgaggtctgctgctcgtagctcccgtcgctccactcaagatccagcaaaagtggagcaactgcgcgaagaacttaggcgaaatcctcttcgctagtggaggtatcgaccatcactcgtcactgtaacccgatggtgatcgacgaccatgagcttccatgttattgtgttctgatacttgagaattttattatgagtatgatgatgagatgtgtcttattatgattatggatgagacttttgtgatgtaattgatgagactatggatttaaatattgttatgtgattgtgtgtgag

SEQ ID NO: 36092 - DNA, 1375 bp, Zea Mays
atttatgttatccccacgtgacggccggccctcgaccccacggcgcccgctccctcgtactcgttctcgtcaacccgccgcagggacatgaaagacgacgacgacgacggcggcgctggctctggcgcgcgcggccgcgtgctcgagtcggagcacggcctccccacgcgagggccggcccacgatcccacggcgcccgtccccttgtcctcatcctcgtcaacccaacgcagggaccggccggcccacgaccccacggcgcccgccccctcgtcctcatcctcgtcaatccgccgcagggacatgaaagacgacgacgacggcggcgctggctctggcgcgtgcggccgcgtgctcgagtgggagcacggcctccccacggcggaggagctgacgccggtctcgcacccgctcatccctccggcgctcgctgccgcgttcggcattgacgtcccgcgcaccgccttcccctcatccgccttcgactcccctgccctcgcgcgcaagccccccaatactcgcctgtccttgggctgctacggcgaggacgatgatgagaaggaggaagaggggaagagcgaggtcgccgcctacacaaccggcgcgtgcggaggcgggaagagcgaggacgccgcatccgcatccggcgcgtgcagaggcgggagggctgagaagaaggcgaggatagcgtggacgccggagctgcacaaccggttcgtcgcggcggtggagcacctcggcgacaagggcgccgtgcccaaggccatcgtgcgcctgatgaacgtcgagggcctcacccgcgaaaacgtcgccagccacctccagaagtaccgcatctacctcaagcaacaagcgcgcagccccgcagggccgcagcctcctccggcatacagtccctccgactccaggccccaacaaccctctgacacctccacccggagcacctgcgacatcgagaagctggaacgcgacaaagaagctagaaaagacaaatgatagctttagcattaaagcttacccgaagcacctcgtgacatctaaagcggatgacaagaaaactgaggaggagggttcaagtgacgtgttcgacaagccttcaagaagaaaagacacaagacagcaacgccgtcaacaacctcgatatatctgtgtataggatttgagaacttaaatgtagttccgtacgaagttgttcgtcgcgttgcctatgcatggggacgacctttttactgttcccaggtgcactcacacttggatcgctcagcatttgaagttgtaaagaatacgtactttcgaaccacattcaaacattacgaaggtatctttgtaaagagaacgggaaaaaaatatgtgaatcaggtagcagttagctttc

SEQ ID NO: 36093 - DNA, 182 bp, Zea Mays
ctttgtgtgggcacctgagtttcttttgcgatttagcagatactccctccgtttctttttagttgtcgctggatagttcaattttgcactatccagcgacaactaaaaagaaacggagggagtatccaacatgagtgtacccctatatggtgtgcatcacattgctgaagttgatagtggag

SEQ ID NO: 36094 - DNA, 3297 bp, Zea Mays
cgcctgtggcctttcggcgccgtcccgagcacccgcggacccgcctcccgcccgtgtgagatcgcacgccgcagagcgtgcgtggacaagaccccctcggctgcgcgggcctgggtgtcgacattcctgccccgcagtcccgcacccggtgaccggtggtgttgatacaaaagcccggggtccggccacctctgcgcctctcgcaaacactggttcacgtccgtccacctctctacgcctttcctcttatcctcccgtctcgcgccgtcgcgcgtctcgggtctctcttctctctctcggctctcgcctccctcccggtccgggtcgcacgcaggtcgcagccagcagtgcatttttatgcgccgcgctggtggttttggggcgcggagtccatatccatggtcatggacgctggcctgcacgagccgtgcgcgctgctgccgggatccaagcgcgacagccacatgctagtctacccccaaatcgccgccgccgctaatgggttcacggcgcaggagctcgagtcgctgctgttcctgtcgtctgatgggattactttggctgcgggcagtggcggtggcggcggcggcggaagctatctgaatgtcgcgcctaccactgtggtcccgcccgccccgaccaaccgcgcgtcgccgccgagggatgtgtccgccgcgccgccctcggtggggcagccggatgattcggaggcgttctcggacatcgtcctgggctacatcaaccgcatgctcatggccgaggacatcgacgataagttcgagcactacccggagcaccccgcggtgctcgccgccgagaagcccttcctcgagatcctcgccgagcggccctcgagctccggtggcagcgcggtggagagcccgggcggcagcagtgtggggaactcttgctacagcgcgcgctcttgcacctgcgccaccgccacggcggcgtccgacgcctttggcgccgtgctgacgccggcgctcgacttcccgtcggccgcgttcctgcagccaccacagctgtaccaggatctaagccctgagggcagcgtggtggatgcaggcggcgcgtggccgtacgactcgacggaattctaccagctgcacagcaacccgtcgtcgttcgcgtcatccaacggcagctgtgctacaatatcagacggctttgagtcgttgctgagctcgcctggtgtcatgccagatgttggcttcaccgattttgccgtgcaaagccagcaggctatgcagttctgccgtgggttcgaagaagcaagcaagtttctgcctgacgagagtttgcagaggtcaaggcagagaaggccgatgttcaggcagaaattcacagaggaaagaagcatttctatggtgatgacttggatgcagaggaagggaggcgcagtaaacattcagcacccgctatcgacactgatcaccttgtgcgggagatgatggacaaggtcttgttgtgcaatggcgagacatgttcaaaaggcgtcaaggaactccgtgaagccctgcagcatgacgtggcaaagaattcacacggggttcatggaaaagggtccggacatggcaagggccgtggcaagaaacagccgaagaaggaggtggttgacttggagactctcctcgtccactgtgctcagtctgtggccaccgatgatcgacgtggtgcaactgagctcctgaagcagatcagacagcatgcatcgcccaatggcgacggtgaccagcgtttggcgcactgcttcgccaacggccttgaggcgaggcttgctggcaatggaagtcagatttacaagtctcttataatgacgaggtttccctgcaccgatgtgctgaaagcctaccagctttacttggcagcttgcccattcaagaagatctcccatttctttgccaatcaaaccattatgaatgctgtggagaaggcgaagaaagtccacatcgtggactatggtatatactacggctttcagtggccgtgcctcattcaacggctctctaccaggcctggtggccctccgagactccggatcacggcaatcgacacgccgcaccctggttttcgcccagcagagcgcatagaggagaccggaaggtatctaaaagattatgctgagaccttcaatgtgcccttcgagttccgagccattccatctaggttcgaggcggttcagatagaggatctccacattgccaaggacgagctgctgatcgtgaacagcatgttcaaattcaagacactgatggacgagagcgtggtggctgagagtccaaggaacatggtcttgagcacaatcaggaagatgaacccacatctgttcattcatgggatcatcaatggctcctacaacgcacccttctttgcgtctcgcttccgggaggccttataccactactccgccatctttgacatgctggagacgaacatcccgagggacaacgagcagaggctgctcatcgagtcagcactgttcggtcgagaggcaatcaacgtaatctcctgcgagggcctggaaaggatggagaggcccgagacatacaagcagtggcaggtgaggtatcagagagctgggttcaggcagctcccgatcaaccaggacatcatgaagcgtgctcgcgagaaggtcaggtgctaccacaaggacttcctcatcgacgaagacaacaggtggttactgcaagggtggaaaggacgcatcgtgctggcgctctcaacgtggaagccagaccacagatcgagcactgcactgtagatggaggcctgttcgtatctttggatgcttgggctggttgttcctgggctgcaacatatagctaggctaggcttgtgctattcgaactactaaagcatgttttgcactgtctcatataatagtgatgccatcaagggtccctgcatgttaggttatggttcagttttggacaggaacagttagtgcattctttgatgggacaggctaggtatgttagttagtagttacgcggtagaccctagggttgtttcatgcatggatcagtcttatggattcttgtattatatttgttccccccattaaccagtgctgtcaaagttttgggcttctttggtaggtagtagtagtaggtactacaaactttgttgcacctccatgaggtacagatactggccagtgccgactgccgagataggcaagcaagtgataccatcgtgtcccgatcatgtttccagtcctccgagcgagaaggtgagcagagctagctaactgattctgtaagttgcttgtattggtgaaacacaacacaaacg

SEQ ID NO: 36095 - DNA, 966 bp, Zea Mays
gtcagccatcttcgttagttacatagagccgcgccgccgcaagagaggagagagcgcctccaacgccacctggaggagaggacagcgcgccagggagggggaggaggaagaagaacatggggaagggcgtcctggaggtgcacctcgtcgacgccaaggggctctccggcaacgatttcttagggaagctggacccctacgtgatcatgcagtaccggagccaggagcgcaagagcagcgtcgcccgaggtcagcgctagcgcttcttgtgttccttcttatcaggcggcagggttcggggtcggggcgtgcaccaaggaaggaacccgtgctggaacgaggtgttcaagttccagatcaactcggccgcggccaacgtgcagcacaagctcatcctccggatcatggaccacgacaacttctccagcgacgacttcctcggcgaggcgacgatcgacgtgacggacatcgtcagcctgggcgccgagcgcggcacgtaccacctcaacgcggccaagcacaacgtggtcctcgccgacaagacgtaccacggcgagatcaaggtcgccatcaccttcacctccacccagacccaggttcaggaagatggaggagcaattggaggatggaggcacagtagctttaatcagtgaaagtgataggcgtcgtggactctctcaagttctttggttgcttggtggtgtttcgggttggatgtagtttttgtttatgtccacgagcaatctgtgcctaacatttctagggttcaattcaatgattcaatccaaccatatctcgttggaaatcatgtctgtactgaagaccggtcaaacccgttgatcgactccctaagcttcttgattctgtgtcagaaatggttctagttaatttcagtggggaacagggtggagaataggtatatagttaattcccaagggactctaaatctaagatattaccatttgg

SEQ ID NO: 36096 - DNA, 1288 bp, Zea Mays
cgcaacgcatctttgcatggacgagaaagggtcgatgaggtggactgggattaaaggcgtgcgttcgctctgctttcgcgatggcgggtcttgcgagaccgtttcagagctttgacttggacagcgccaggccgccagccaactagccaaggcagcgggagtgaggcgaggcggcgataaatacgcgcgcccgcgcgcgctcccggtcagccatcttcgttagttacatagagccgcgccgccgcaagagaggagagagcgcctccaacgccacctggaggagaggacagcgcgccagggagggggaggaggaagaagaacatggggaagggcgtcctggaggtgcacctcgtcgacgccaaggggctctccggcaacgatttcttaggtgcgtcagtgcgtgggtcggtctcccactctctcccccttgcgcgcgcgtgaactgcgttcgcgttggggcgtgtgttcttggttgttcgtccggtgtcctgtcctgacgttgagctgcgcatcgtgttgtcgccgctgctactgcagggaagctggacccctacgtgatcatgcagtaccggagccaggagcgcaagagcagcgtcgcccgagaccaaggaaggaacccgtgctggaacgaggtgttcaagttccagatcaactcggccgcggccaacgtgcagcacaagctcatcctccggatcatggaccacgacaacttctccagcgacgacttcctcggcgaggcgacgtgagtgcctacctgcccgaatgagatctgcgatcgacgtgacggacatcgtcagcctgggcgccgagcgcggcacgtaccacctcaacgcggccaagcacaacgtggtcctcgccgacaagacgtaccacggcgagatcaaggtcgccatcaccttcacctccacccagacccaggttcaggaagatggaggagcaattggaggatggaggcacagtagctttaatcagtgaaagtgataggcgtcgtggactctctcaagttctttggttgcttggtggtgtttcgggttggatgtagtttttgtttatgtccacgagcaatctgtgcctaacatttctagggttcaattcaatgattcaatccaaccatatctcgttggaaatcatgtctgtactgaagaccggtcaaacccgttgatcgactccctaagcttcttgattctgtgtcagaaatggttctagttaatttcagtggggaacagggtggagaataggtatatagttaattcccaagggactctaaatctaagatattaccatttgg

SEQ ID NO: 36097 - DNA, 2299 bp, Zea Mays
cactgaccttctcacgggcgagaggactaacctccctcccttcgcgccatctcccgcggtgctgcctcctctggcgccgattcgccgctgggagccccaattctataacccctctgttcgatctgggatccgctagattcgttggggcggtgatgagggcgatggcggaggtgatgcaggaggggtgcgtggagaatcggcagccactggcggcttcgagctcgtccgtgtcggatggcagcagctgtggcggcggagagcgggcggggacgtcgccgccggtgtcaagctccgggaattgcatctccgttctgagacgaacaagtggaccgataagaagaactaagggtggctggacactgaaagaggatgaaacactgcggaaggcagttgaagctttcaagggtagaaattggaaaaaaatagctgaattttttcaggacagaactgaggttcaatgtttgcatcgttggcagaaggttcttaatccggaacttatcaaaggcccttggactcaagaggaagatgaaaaaatcattgaccttgtgcgcaagtatggaccaacaaaatggtctatcatcgcaaaatcattgcctggccgcataggcaagcaatgccgagagaggtggcataatcacctgaatccagaaataaggaaagatgcttggactcctgaggaggaaagggcccttattgatgctcatcaagtgtttgggaataaatgggcagaaatagcaaaagttcttccgggaaggactgataattccataaagaatcattggaacagttctttgaaaaagaagttagaagcctatagtaacagcagtgttctttcagtttcaaagctgtttgttcatgatgatttcaaggataaaatgaagcccgtggctactgatggtcatcttgatctgaaccaaatgccaagcattggttccaaagattcctctggaagagcttatcattccattgtgagcccactttcacaggcatacaatttggactcaagctgcctctctctttctataccaaccatgcagcctctaacttcacatgaaatgtcatcactaattgatggttctgctgttactttggtggtacaatgtctggaaagtgactctgtccgtgacaaggaccaagaaattgactctgttcaagagaagggtgttgaggttagctcaacacctgatcctgttggggttgaattagaatctgcaccagccaaaagaggtgcagaattatcttcaaagaacgagttgcattctacccttggtcctctttgttatcagattttaaacatggaagatgtgatcccaatcagtaccccactctgttctgaacataatggtgcacatcaaacatcacaacaatgcatgtcacccaatggttatacttctctctctccaacgattggaaaagtatcaagtcagctaactgttgattcaattttgagaatggctgctgatagctttccatgtactccttcaatactaaggaaaagaaaacgtaataaagcaacacctggttcaggtaatgagttgaagacgggtggagtaaacaatgatagcttttacactcctaatggaactaatgggaaggacactactccacggtcatttaaaactgctgcatccttctcatcgctgggttctgttgatgggctattgacttctgtaaggagttttgattcttcaccaccctatcagaaaaggtcaaaaagaatggctatcatcaaatcagttgagaaacagctagatttttcagcagatggactggatacttctggttctgagattatgaactctccttgtcataattcccaaggcgtagattctaacaggatgtagcgcatacaagtgatttgaatgtaatttaattccataatgtgcaggaattaatggcaatcttatgaaaccggacaggactttatggaatcccttccgaactaaccagcctcatgcaaatgtcgtggttcaagctaaatccaaatcaatcaccttcagcggagataaagagcttcctgcaatggaaatgacgtacggaacacaggccaacagtttaccctgtcatctcatgtaatgagagtgtacaaaatactgtctaaattgaaagcacattccatagaagattacattgtttcctacatattgtgaacttacagctaggagttgagattgtagaagcccacagatgtgtacaaaaaaaagggaaaaaaaagcaaagtcaatttcctgtccttccggtctataaattaatatatgaaacatatataatctgcagaacgtaaaacagtaagaaactg

SEQ ID NO: 36098 - DNA, 2373 bp, Zea Mays
gttcctccgcgctcatcactgaccttctcacgggcgagaggtttttttttgaaagcatcgtctccggtctccctcttcaacttccccgaaacgaaagcttacttttttatactaacttctagggtttcaggactaacctccctcccttcgcgccatctcccgcggtgctgcctcctctggcgccgattcgccgctgggagccccaattctataacccctctgttcgatctgggatccgctagattcgttggggcggtgatgagggcgatggcggaggtgatgcaggaggggtgcgtggagaatcggcagccactggcggcttcgagctcgtccgtgtcggatggcagcagctgtggcggcggagagcgggcggggacgtcgccgccggtgtcaagctccgggaattgcatctccgttctgagacgaacaagtggaccgataagaagaactaagggtggctggacactgaaagaggatgaaacactgcggaaggcagttgaagctttcaagggtagaaattggaaaaaaatactgaattttttcaggacagaactgaggttcaatgtttgcatcgttggcagaaggttcttaatccggaacttatcaaaggcccttggactcaagaggaagatgaaaaaatcattgaccttgtgcgcaagtatggaccaacaaaatggtctatcatcgcaaaatcattgcctggccgcataggcaagcaatgccgagagaggtggcataatcacctgaatccagaaataaggaaagatgcttggactcctgaggaggaaagggcccttattgatgctcatcaagtgtttgggaataaatgggcagaaatagcaaaagttcttccgggaaggactgataattccataaagaatcattggaacagttctttgaaaaagaagttagaagcctatagtaacagcagtgttctttcagtttcaaagctgtttgttcatgatgatttcaaggataaaatgaagcccgtggctactgatggtcatcttgatctgaaccaaatgccaagcattggttccaaagattcctctggaagagcttatcattccattgtgagcccactttcacaggcatacaatttggactcaagctgcctctctctttctataccaaccatgcagcctctaacttcacatgaaatgtcatcactaattgatggttctgctgttactttggtggtacaatgtctggaaagtgactctgtccgtgacaaggaccaagaaattgactctgttcaagagaagggtgttgaggttagctcaacacctgatcctgttggggttgaattagaatctgcaccagccaaaagaggtgcagaattatcttcaaagaacgagttgcattctacccttggtcctctttgttatcagattttaaacatggaagatgtgatcccaatcagtaccccactctgttctgaacataatggtgcacatcaaacatcacaacaatgcatgtcacccaatggttatacttctctctctccaacgattggaaaagtatcaagtcagctaactgttgattcaattttgagaatggctgctgatagctttccatgtactccttcaatactaaggaaaagaaaacgtaataaagcaacacctggttcaggtaatgagttgaagacgggtggagtaaacaatgatagcttttacactcctaatggaactaatgggaaggacactactccacggtcatttaaaactgctgcatccttctcatcgctgggttctgttgatgggctattgacttctgtaaggagttttgattcttcaccaccctatcagaaaaggtcaaaaagaatggctatcatcaaatcagttgagaaacagctagatttttcagcagatggactggatacttctggttctgagattatgaactctccttgtcataattcccaaggcgtagattctaacaggatgtagcgcatacaagtgatttgaatgtaatttaattccataatgtgcaggactttatggaatcccttccgaactaaccagcctcatgcaaatgtcgtggttcaagctaaatccaaatcaatcaccttcagcggagataaagagcttcctgcaatggaaatgacgtacggaacacaggccaacagtttaccctgtcatctcatgtaatgagagtgtacaaaatactgtctaaattgaaagcacattccatagaagattacattgtttcctacatattgtgaacttacagctaggagttgagattgtagaagcccacagatgtgtacaaaaaaaagggaaaaaaaagcaaagtcaatttcctgtccttccggtctataaattaatatatgaaacatatataatctgcagaacgtaaaacagtaagaaactg

SEQ ID NO: 36099 - DNA, 2575 bp, Zea Mays
agaggtttgaaacgagaccttatgctaaaaagcatgttcaatgtttgaaagtagatgcgctgcgatttcgctcgcctgcgtcgtgatgggggacgaacacggacacggcgctgaatgcgatggatgaggtgccctaactgccctttgctgctgtccgctctgactcagtgactcctgcggtcctgccgcccgcaaacaactagtcagacccggaaggaggcacgcgagctccgatggcggcgagcacggccgcggttgttcgtcgtctctgcgtggccgcggaggtgcggtctgctctggctgtgctcgcccgcgggacgaagtccggcgacgcagcgctggacgtggccgcgtgcaccgcgctggtccacgtctgttgtcagagcggcgacgttgcggagagagatgggtttcgccttgtttgcggagatgaggagagacggagtcgagccaaacctctacacctacaactgcttgatcggtgaatggtgcaggacaggggagttcaagagcgcccgactcctattcgacgaaatgcccgtgaagggtgtcgtgcataatgttgtcagctacaacatcttaattgcaggcctgtgcaggcacagcaagctgaaagatgccgtccagctgtttgaagcaatgagaagggagggtatccgtccaagcattgtgacgttcaatcttctaattgatggctatggcaaggctgggaagatggctaatgccttacatttcttcaatcagatgaaggcggcagggctgccacctagtgtggtgacatacaacgagcttatatgtggattctgtcgtgttagagatatagcccgtgcagtcagggctttcttagacatgaaggagcgcggtttggcacccacaaaagtgacgtacaccatactcattgctgcatttgctaaggaaaatgaaatggacagggcattcatgatgctttcagagatggagaaggctgggttggaagtggatgtgcagagttatggtgttctcttgcatgcgctctgcatggaagggaagatgatgcatgccaggaaactgtttcagtcgatggatctgaaaggtgtcaaaccaaacagtgtgttatatgacatgatgatctacggatatggacgggaagggagctcatataaggctttgagattgatcatggaaatgaggaagaatggtttgattccgaatgttgctagctattgcctaacgatccgtcttctctgcaatgaagggaagtgccaggaagctgaggctttgattgatgacatggagcatgctggtttgcaaacaagtgagactatctgcagaatactactcgatgctaaggcaagattgcatggttctactgatgattcttttacttaaaatagtcaggcacattgtttctgttatctgccagggtataggttactatagttatcttgtggaagtggcaaggtggtaggaaaagaaagattgatagagaggttaaagatctactgaatcctgtcttgtaccaacattttggtgttttattgaacttccccgcacaatgagcatggttggttggtccctatttgcacgctatgaaagatgaaactccatgtgctgagtcattttcctgtgtatccatctgcaaagcgtatggatgcaaaggcgaaagtggtctgcaaacaagtgaattcatctgcagaatatcattgaatgaggcagactggatgattctctatttctctcaatgaaccttttgcttgaagtagtctggcccattgcttttgttatctgataagtcatatgttgctatatctatcatggattcatgacagtgggaaaatgatatgcaaaacactgctacgtatggaaggtctactgcaacatgccttgtagaaacatttcagtggattactgtagttctttgcaataggctagagtggttggatgattggatcctatttgcatagaggtgaaagatgaagaccccacgtgcggagacaatttcttgccagacattgtaggtcctgctgagggactgtttgctttgcacccaggcagaactgcctggcgtgagcgctgctccgagacgtgtctgctgtctgggaggctgcgaagtgcgaagcacacatacacgccccttggatgtcctgcgacctgcatgctccacccccttccagaaaggagagacgactctgccaaacctatcagctgtcattctgccccctctcgctatgtatttgctgcacccgtgggtagtggtgtgccgaatctaatgctccatccaagcttctgagtttcacaatcccctaggactcaactccctcgttagttctcaacttctcatcgcacgagccgtcggcggcggccagaggcgctgacttgtagtagcagtatcgcccatggaggatgaggacagggcacgagtgaccatggaggaagtagacaatggagcccgccgtcttcatggatggagtctccaccggggatgccatcgtcgccgagacgatcttcgacgaggccgccatctcttccgtcgaggaggctgccaacttagaggaggctgccaacgttaggaccggaaaataagctcgaggctcgc

SEQ ID NO: 36100 - DNA, 1269 bp, Zea Mays
caacgatctgcgacagacaccgcctgctctgcgtcccctcgacctcatccaagcgttcgttccgtgtggaacgcaggcccacccttcctctaagcccccaccccctcgacgacacgcgctccgtgtgaaacagagcagcgcaccgcaagcccccgtcgttgttttcccttttgacttcaccgagtctgctccttgcctccttaattgtcgcgcatgatcatgttttctcgtccgaaggcgtgatttttcgaggtcgatgatcgtggatttgcctccggaggcgtcgatttggtccccagggacctgtctagggacaggcgtattacagtctgtcatgatcaagcaaatcctcgaccagcttccccagaagatggccaaggcccacgagaaggagctggccagcgcgagctcgtcgctgcctagcccgacatcctacgatcatctattcacccctctaggtgctctcaataccagatgccaaagagtccggcttcatctctgaatttatcggtagttcaagctggcgtgtaggtcccatccttcttgaaaggataaaagttgtttcttttgggaaaaaaaactatagcggcgtttggaggtaaaaaacataattttattgttacatgtggcatggttcatgcacatggatttacgggatttacctctgccccgccccctggtttggtagttttctttgagctttgtatgagcacagttgtgattttgacaccatagaaccttcaatatctacatatttgtaagaatttgcagtcagtcagctacaaatctacgcttactcaccgccttacaggctggacaatagatatagaggatattacttggaacatggatacatagagcatatcactaaggatgtcctatggttttttcaaggctttgaggttgcagtccttcgtcagatagacttggagcttctcgcacagcgagagctctgcaacatgctggtagattttagagaggccagagaagcttcatgtcacttctagacgaatgacgggatgagcaacagagggatctatattttgcctctgttttctttttaggctcagataaatacacttggggtcagaaacattgatagggggatagaagataaagatcaaggataaatatagcttgctgctattattcctattgtacttagctccatagttccacatttgtacctatttttttatccatgttaattggcaggtgtggaccatgcgtgtactattataatattgtatctcacataatcattaatcg

SEQ ID NO: 36101 - DNA, 742 bp, Zea Mays
gtcgatagcaccctagaagcagcagcggcaggcacacacacacgacttggcggccggagcaaatctaaaagctgccactggaaacgaacggccagggcttactcgtggacgtggacggtcgtttccgttcccagctgctgctgctacctgctactgcttgaggtctgtttgggtcactcactgaactaaacttattagtcacctagaccagttcaatgagttgattgtgtctctcagtagtccaatacatcctaacagcatgtgactgatgaacttcagttagactaccaacaagtttaactagaagaaggttgcagcatctaactgcacaaaaaagacagtatctccttcgcacaaacaagctggaggcagaattagttttatatatatgtatcagcaacatgattaaggagcaccctggcgtgcaaaagctccagaaatgatggaggtctgaaggaataatctccagtgtcgcttttatgaggctggtggccggccgcctgcctgcccccactggtcccgtgtggatctagccagatccatgtaatgtaaactccctgcactcctgtaaaaacaaaatcgtcgtgaacattgctgttatccagcagtacaaaaaaaagagagagagagagaaaatggcaagataaaaataataagaggaagctggactcatccagcttgatgtgagatctccctggtcctggaaaagcaacttgtttctttccccgaaagcagaggcctg

SEQ ID NO: 36102 - DNA, 992 bp, Zea Mays
cgtgacccgatcccatgtatatccctttcctctttttttcccctcccatatcgaagaatagagagtataatcagtatatcccaatcatgctgcataagaaactaatgtcgatagcaccctagaagcagcagcggcaggcacacacacacgacttggcggccggagcaaatctaaaagctgccactggaaacgaacggccaggcgtcgcgcgcacagtcgcgtccatgaaggaggagaaaaaggagattcacagcagcatctcccatttaatttcagggcgcacgcagcggtgcggtactgcggtgccatcgtgcttgcttttcttctccaatccgtgtcattcagggcttactcgtggacgtggacggtcgtttccgttcccagctgctgctgctacctgctactgcttgaggtctgtttgggtcactcactgaactaaacttattagtcacctagaccagttcaatgagttgattgtgtctctcagtagtccaatacatcctaacagcatgtgactgatgaacttcagttagactaccaacaagtttaactagaagaaggttgcagcatctaactgcacaaaaaagacagtatctccttcgcacaaacaagctggaggcagaattagttttatatatatgtatcagcaacatgattaaggagcaccctggcgtgcaaaagctccagaaatgatggaggtctgaaggaataatctccagtgtcgcttttatgaggctggtggccggccgcctgcctgcccccactggtcccgtgtggatctagccagatccatgtaatgtaaactccctgcactcctgtaaaaacaaaatcgtcgtgaacattgctgttatccagcagtacaaaaaaaagagagagagagagaaaatggcaagataaaaataataagaggaagctggactcatccagcttgatgtgagatctccctggtcctggaaaagcaacttgtttctttccccgaaagcagaggcctg

SEQ ID NO: 36103 - DNA, 917 bp, Zea Mays
cgtgacccgatcccatgtatatccctttcctctttttttcccctcccatatcgaagaatagagagtataatcagtatatcccaatcatgctgcataagaaactaatgtcgatagcaccctagaagcagcagcggcaggcacacacacacgacttggcggccggagcaaatctaaaagctgccactggaaacgaacggccagggcgcacgcagcggtgcggtactgcggtgccatcgtgcttgcttttcttctccaatccgtgtcattcagggcttactcgtggacgtggacggtcgtttccgttcccagctgctgctgctacctgctactgcttgaggtctgtttgggtcactcactgaactaaacttattagtcacctagaccagttcaatgagttgattgtgtctctcagtagtccaatacatcctaacagcatgtgactgatgaacttcagttagactaccaacaagtttaactagaagaaggttgcagcatctaactgcacaaaaaagacagtatctccttcgcacaaacaagctggaggcagaattagttttatatatatgtatcagcaacatgattaaggagcaccctggcgtgcaaaagctccagaaatgatggaggtctgaaggaataatctccagtgtcgcttttatgaggctggtggccggccgcctgcctgcccccactggtcccgtgtggatctagccagatccatgtaatgtaaactccctgcactcctgtaaaaacaaaatcgtcgtgaacattgctgttatccagcagtacaaaaaaaagagagagagagagaaaatggcaagataaaaataataagaggaagctggactcatccagcttgatgtgagatctccctggtcctggaaaagcaacttgtttctttccccgaaagcagaggcctg

SEQ ID NO: 36104 - DNA, 2508 bp, Zea Mays
accacgtccacaccacgataaaaacccacgcgctgcctcctcccttcctcaacttcaactatcattgcaaaagcaaagcacgcaatccaatttccctccatttctctagatctcgagttgctctgctacttcttttagattccttctttcgttcgggagagcgattctctagctggtggcaatggcgaagggcgagggtccggcgatcgggatcgatctcggcaccacctactcgtgcgtcggcgtgtggcagcacgaccgggtggagatcatcgccaacgaccagggcaaccgcaccacgccgtcctatgtcgccttcaccgacaccgagcggctcatcggcgacgccgccaagaaccaggtggccatgaaccccaccaacaccgtcttcgatgccaagcggttgatcggcaggaggttctctgacccgtcagtgcagagtgacatgaagctatggccgttcaaggtcatccctggccctggtgacaagcctatgattgtagtctcctacaagggtgaggagaagcagttcgctgctgaagagatctcctccatggtgctcatcaagatgaaggagattgctgaagcctacctcggctctactatcaagaatgcagtggtgacagtgccggcctacttcaacgactcgcagaggcaagccaccaaggacgccggtgtcattgcgggcctcaatgtgatgcgtatcatcaacgagcccactgctgctgctattgcctacggtcttgacaagaaggcgagcagctctggcgagaagaacgtgctcatcttcgaccttggtggtggcacgtttgacgtgtcgctcctcaccatcgaggagggcatcttcgaggtgaaggccactgcgggtgacactcaccttggaggcgaggatttcgacaatcgcatggtgaaccacttcgtccaagagttcaagcgcaagcataagaaggacatcagcggcaaccctcgtgcactgcgccggctgcgcacggcgtgcgagcgcgccaagcgcacgctgtcatcgaccgcccagacgaccattgagatcgactccttgttcgagggcatcgacttctactctacaatcaccagggctcgctttgaggagctcaacatggacttgttccgcaagtgcatggaacctgtggagaagtgcctgcgcgacgccaagatggacaagagcagcgtgcacgacgtcgtgctcgtcggtggctccacccgcattcccaaggtgcagcagctgctgcaggatttcttcaacggcaaagaactctgcaagagcatcaaccccgacgaggctgtggcgtacggcgcggctgtacaggccgccatcctcagtggcgagggcaacgagaaggtcttctcgacgtactccgacaatcagccgggcgtcctgatacaggtgtacgagggtgagcgcgcgaggaccaaggacaacaacctcctcggcaagttcgagctctcgggcatccctcctgctccccgcggcgtgccccagatcaccgtcaccttcgacatcgacgccaatggcatcctcaacgtctctgctgaggacaagaccaccggccagaagaacaagatcacgatcactaacgacaagggccggcttagcaaggaggagattgagaagatggtgcaggaggctgagaagtacaaggccgaggacgaggaggtcaagaagaaggtggacgctaagaacacgctcgagaactatgcctataacatgaggaacaccatcaaggatgacaagatcgcctccaagctctcggcagatgacaagaaaaagatcgaggacgccgtcgatagcgccaccagctggctggacagcaaccagctagctgaggtggacgagttcgaagacaagatgaaggagctcgagggcatctgcaaccccatcatcgccaagatgtaccaaggcgctggcgcgggcatgggcgatgcggctggcatggacgaggatgccccgtctggtgggagcggtgctggtcccaagatcgaagaggtcgattaaattggttagcatcgggcggtttgttttggtgtggtctgaagtactcctgaactctgaaggttgtctgtgagatggggtggtgtccacagtctgtgggctgtggtcgaacttcttaataaatataagttttagttcctaatttgttttcagctacataagactttcttatatacaacccatcaagacaggcagaagccacaaaagacctgaccagaaaggccaacaaaagacaaacaactatcccaacaagttttcacggcttcagcatcttttatgtcaaccagaaatccgcctgtcaagaggacaccaccccaaggccctcccgaaagcttcacttgccgtctttcggattaacctgcttcctagcaccaccattctttgcaccttctttttctccatcagagatgatgagccttcgtcgttaatgcgagggagtggtgggcagcggagagatgcaggggcaagtgcgcggggaggaaggcgacgacatgaagggg

SEQ ID NO: 36105 - DNA, 1133 bp, Zea Mays
ctttggcgaggcaagacactaggcggcgaggttggtctgcggctcttattggcaccgctaagctctaacatagtcatgcgtacagccagttgtgctgttgggattggtctacctgtatactccactttcagagctatagagaagaaggatgaacaagagaaagagcggatgcttttgtattgggcagcatatggatcttttagcattgctgaagtgtttgcagataagcttctttcaagtgttcctctctattatcatgtgaagtttgctatccttgtgtggctccagttcccttcaaacagtggatcaaagcatgtatacaaaagatacctgcgcccatttttcctgaaacatcaagcaaaaattgataggtttctgaatattctgtcaaaggaacttacgaagtttgtgagcagccatgaagatgaaattcgttttatagaaaatatggctatcagaggggctacaacagcaaaccacatcgtaaatggcctcgaccaacctgaagaaacacaagcggttaatacaattgaaggtccaaatacaactgtgacagaagaagctggtgtgtcgggaactgaaacttaagcaaaactttctatctctgctcatgatcccagacgctgcttcaaaattgttgttgaggtcacccagcttgtttggattgtgaatactactgttcctgaaaggctagatctagaggcaatgttttagctttaactagatattcatatagcaagtaaaatcggtgttggacaaatttattacagtgtaaaaatgacccggtgtggaatgcagttcccagcaatgttgtcatttttcacgtgggaataatttgaagtctgcgatgaagaatctttctaaagcatgaattcgtgttggttagcaattagcatgctttagaatataaacttgtgcgtgcttgatcttgtagatcaatggtgcatcataattcattcaaatttggtgacttcgttcttcattatagcttgtgaagaatgatttaatgatagatcaacttattctgtcttaaaaaaacaaaaaagtggcttctttcctcattagtttgtgaagaatgatataatgacaggccaacttattctatttctaaaccgaaacaaaaaaaaagtgag

SEQ ID NO: 36106 - DNA, 1897 bp, Zea Mays
ggagagtggagacagacacagacatttaaatcgtggacagttcggggaccgggccgcaaataaccatcctccctagctttcccgttccagccgtcgcgttgagttgctgccgcctcccccggtccccccacctcccgccccggcgcccctctctctctctctcttctgccgcacagagcccaaatcgcggcggatccctcgctctccagggagccgctgcggcgccgggttttgtacaccgacttgtttgcctacctccagctcctcctcggcgacccatggctctcctcgcccccgccatctccggcgaggttggtctgcggctcttattggcaccgctaagctctaacatagtcatgcgtacagccagcattcttcgaaactggtataacaaggagtaacgaggatctctataaaacaatttggtttcatgcccggaagatcaaccatttgtgctgttgggattggtctacctgtatactccactttcagagctatagagaagaaggatgaacaagagaaagagcggatgcttttgtattgggcagcatatggatcttttagcattgctgaagtgtttgcagataagcttctttcaagtgttcctctctattatcatgtgaagtttgctatccttgtgtggctccagttcccttcaaacagtgtaagtttcccttgccccttccatcccccgtctaaatttcatatactgttcaactttaccattttaccactgtgatatggtttttgctcaaatgcacgatattagtggcacttgttctttgaattcaccattttctacttcatgaggtttgttgctgcgacccataacctatttctagatcttgtagtgggagtttgtcatgaactttccatcagctttatatatgttttcctttctattgcttatgaagtactgcatactcttggctttcttttaaacatcatatccatgttttcttgtgataagactcatactgccttttggacaaaaaatgtgtaactattatattgcttgctgtatctttgatgattgtttggatcgaattcgtgtcctttaatttcagggatcaaagcatgtatacaaaagatacctgcgcccatttttcctgaaacatcaagcaaaaattgataggtttctgaatattctgtcaaaggaacttacgaagtttgtgagcagccatgaagatgaaattcgttttatagaaaatatggctatcagaggggctacaacagcaaaccacatcgtaaatggcctcgaccaacctgaagaaacacaagcggttaatacaattgaaggtccaaatacaactgtgacagaagaagctggtgtgtcgggaactgaaacttaagcaaaactttctatctctgctcatgatcccagacgctgcttcaaaattgttgttgaggtcacccagcttgtttggattgtgaatactactgttcctgaaaggctagatctagaggcaatgttttagctttaactagatattcatatagcaagtaaaatcggtgttggacaaatttattacagtgtaaaaatgacccggtgtggaatgcagttcccagcaatgttgtcatttttcacgtgggaataatttgaagtctgcgatgaagaatctttctaaagcatgaattcgtgttggttagcaattagcatgctttagaatataaacttgtgcgtgcttgatcttgtagatcaatggtgcatcataattcattcaaatttggtgacttcgttcttcattatagcttgtgaagaatgatttaatgatagatcaacttattctgtcttaaaaaaacaaaaaagtggcttctttcctcattagtttgtgaagaatgatataatgacaggccaacttattctatttctaaaccgaaacaaaaaaaaagtgag

SEQ ID NO: 36107 - DNA, 1846 bp, Zea Mays
cttggagatgctcttatacatcatttgctggagagtggagacagacacagacatttaaatcgtggacagttcggggaccgggccgcaaataaccatcctccctagctttcccgttccagccgtcgcgttgagttgctgccgcctcccccggtccccccacctcccgccccggcgcccctctctctctctctcttctgccgcacagagcccaaatcgcggcggatccctcgctctccagggagccgctgcggcgccgggttttgtacaccgacttgtttgcctacctccagctcctcctcggcgacccatggctctcctcgcccccgccatctccggcgaggttggtctgcggctcttattggcaccgctaagctctaacatagtcatgcgtacagccagttgtgctgttgggattggtctacctgtatactccactttcagagctatagagaagaaggatgaacaagagaaagagcggatgcttttgtattgggcagcatatggatcttttagcattgctgaagtgtttgcagataagcttctttcaagtgttcctctctattatcatgtgaagtttgctatccttgtgtggctccagttcccttcaaacagtgtaagtttcccttgccccttccatcccccgtctaaatttcatatactgttcaactttaccattttaccactgtgatatggtttttgctcaaatgcacgatattagtggcacttgttctttgaattcaccattttctacttcatgaggtttgttgctgcgacccataacctatttctagatcttgtagtgggagtttgtcatgaactttccatcagctttatatatgttttcctttctattgcttatgaagtactgcatactcttggctttcttttaaacatcatatccatgttttcttgtgataagactcatactgccttttggacaaaaaatgtgtaactattatattgcttgctgtatctttgatgattgtttggatcgaattcgtgtcctttaatttcagggatcaaagcatgtatacaaaagatacctgcgcccatttttcctgaaacatcaagcaaaaattgataggtttctgaatattctgtcaaaggaacttacgaagtttgtgagcagccatgaagatgaaattcgttttatagaaaatatggctatcagaggggctacaacagcaaaccacatcgtaaatggcctcgaccaacctgaagaaacacaagcggttaatacaattgaaggtccaaatacaactgtgacagaagaagctggtgtgtcgggaactgaaacttaagcaaaactttctatctctgctcatgatcccagacgctgcttcaaaattgttgttgaggtcacccagcttgtttggattgtgaatactactgttcctgaaaggctagatctagaggcaatgttttagctttaactagatattcatatagcaagtaaaatcggtgttggacaaatttattacagtgtaaaaatgacccggtgtggaatgcagttcccagcaatgttgtcatttttcacgtgggaataatttgaagtctgcgatgaagaatctttctaaagcatgaattcgtgttggttagcaattagcatgctttagaatataaacttgtgcgtgcttgatcttgtagatcaatggtgcatcataattcattcaaatttggtgacttcgttcttcattatagcttgtgaagaatgatttaatgatagatcaacttattctgtcttaaaaaaacaaaaaagtggcttctttcctcattagtttgtgaagaatgatataatgacaggccaacttattctatttctaaaccgaaacaaaaaaaaagtgag

SEQ ID NO: 36108 - DNA, 799 bp, Zea Mays
caccaatttctcaaaaaccgttgagataaaaaatattccgaaccggggcgcatccccttgtgctagctacccccacgacctcgagttctagaagccgtctgctccgccatctgctcgtcctcgatgatgacttcaggctccgcttagactttcaatcttgggcgacagagcacagaggcgccatcgtcagcggcagaagatgccctcttatcgatagtagggaggcaggctcaggttaaccaaaaacttgcgcaagcactcagatattctctgtctttaatgagtgatgcagctaagaaacttcaagatactgcctctttgtgctacacagatgaagatgttgtcgacggtttcaagctgactcaagtggctcgttccttggacgagttagctgaaacgttagaagttactgcaattgactgtcaggtctcgatgatggatccaacaactatattagaagctggctatggtagcgaagatagtgcggtgtgggaggacgtattccgtgaccgagaaataatgaatcagccattggaagcggagacactagctgagcactgtgctaagtgggggctgaattacaatgagatcagggatagatctgtgtaacatcttctagtgtagtgcttttgtaacactagctatgcttttgtaaggtgaacttgatcagtgtaacaccgacagtgcttatgtaacactggctatgctattgtaatgtgtaagaactatgttgttatgttgcaaccgacatggaacttggctgttatcttttatgaaatggaatgaaatggtatggaac

SEQ ID NO: 36109 - DNA, 1023 bp, Zea Mays
gtcgtttcggctctagtgacgcgatgcatccgaactaaccgaccatcttctctcccttcaggcttctacaactggccgccactgcgctacaccacgcgcctaatgtcgccaccgctgcgctctaggtctatcctcaccgcccaccgctgccgtagcagcaagcgccaccacctccgcgtactatgtctggatctccgagcccacctccatcgaggagcgccgccgcctcgtgctccaacggcttcacctccgacccgtcgcctcccccgcctcgcggctggcctctgcctcctgctccagcggcattcagcgccgccggtatgggcgatattcgtcgctctggtggaccgcgcgacggcagtggcggagagcaacttaactaggaagtacttcgccacggcggtgatggacttgcagcaacggttcacgtcggagttcgttgctggcatctcgcgagatgcccccgacccatcatccatttcacgcgccagcaagaaaagctttcaaccatacatcttctggtcatctgttctgcactttaaacagaagatgtcccgtcctggataactttgggaagccagccatcatagccccagacatcataaacccatggtggttgctccttgaagaagctgtgaagagtgctggcaacaagcttggcaagttagagatattcccagcctctactgacgcttgctacttctggcagattagattaccagcatttggtttttcatctatggcgaacaccccgatactgctccatgagaccatgaccataacgtggtttgtgtcattggttttggtttggccttctgatgccattaaggtatatctgttagacaactattcctagtaggctatcagcagatatagaaactcatcccaggatatcaatcctgtggttcactgcccgattacccagatcatgtttctataaactgggtactctgtggctatatattgtaacacgtttgttcatcttaatcaagccgtgtattctccaattcctatacgtcttca

SEQ ID NO: 36110 - DNA, 1584 bp, Zea Mays
aattttcaggtgtagcctattcacccctcctctaggctactttcaagatgttaataattcatatttaatttcagctcattatctaactaccaactaccgatttgccattagataattaatttttaccactaatagatgcaatcagatcccaattgttcccagaagcggccatagtagttatttgttcaccaaactaattgcaaacgtcatcctaggcaatcataacgtgttcattctacgcaatcataacgtggtcaatacgcataggagtagcgtagcaaattatggagatactcccagcttcagtcaaaccttcggtgatgcagtaagaccttcacggtagcatataacgcaaccgtgttggaaacttgtactagtgcttttgtaatgctgcttttgaaccaagctcgtgcaacgatagatagccagacaaatggaatccagaatcacgtggtcaaacggtaccaaatcccaactggtatagggtccccaggtcagccttagtcagcattacatcgttcacggttctgtgtcaaagcagagcggttgtaagcgtagcgtgacacgccgctgagggaaaacacgaaaaaggccatatacaataggaaactgcaagatacgtgtgccgtgcttgtgtcgtgcacttttgctgcaaatgtaaaggttagaaggtacatgaagccattccattgatcaggttagcggtcgtaagagaacaaagaattaccccaccattgctccagcagaaaatataaaaacagaagtccaaataaaataccaatgtaatatcgtaatttcattccgagacatgccaaccaccaaagctcatatagaaacaaaggaagcgaacaactgcattccaaacctgaagtcgttttagattttctagattcataagtgtgtgtgtctatcaatctatctatctatctacacacgcatacatctgcatgcttgcgcatctgtgcgtgtagacgtggtgtacatatctaaatacatagctttgctatgcacttaaaaaaaggtcaaaacaacttacaattcaggatggaggaaatattttttgaaagcagcacatcatcttttttgcgaaaaaagaaactttagaaaaaaaacataaatatggtatccaaaagtcacctaagttttgtccatgtaaaactttctgaagtttgactaggttttagaacatattagcaacatttgtatctccaaataagctcatttttaaaatacagtcaatgactaatctaattatacttaaaaataacaatccctttatatatttggtccaataaaaaatattgattcctcaagaagtgataatgatacctttgtgagagtggggatagcttttatatcaacaatttgtctagtcaagtggtaaactcaagctcagtgaaaaccaagcttgaccgtgagacttattataagatataaagacaaatctcaagcaatatttgccatacaaaacaagttgacgtacttgttttatttcttgaaagaatcagaaattcaagaggaaaagaaaaacaccaccaaaccaaaagtgccatggcaaaaaatatcattgccaacttgcacgag

SEQ ID NO: 36111 - DNA, 3548 bp, Zea Mays
cgtgggcctggtgtacttggtgcagggggggctgggctggtgggccagaattctaccggtacgcagcacatgtggaggggcacgatttgaggggactcggatctcggagaggccagatgacacgaaaccgcgacgcgactgcacgagccgcacgtggggcctgctcgttactcgttagcgaccaaaatttgccatgtccaataattaatcaagcgaaagttaaacaaaaaaatatcataattttggcaagccaaatatgaggtcaccgagtctgttagcaaatcaaataacagctaaaatcatggcacaataatatatatagaaaagccaaaacaacattaggaatttaggagtattttatttgcaacaggagtatgggtgtgcatgacagagtttggtcaacaaatgagacacgtgcgccgtatactttgcacgaagctaagcgaacgtcaccaatacatcgagacctacacgtctccgagcatcgatttattacaaatcgaagggccatctgtcgtacggtatcatttgattcaatctgactgccggttcaagccggtaagaaaaatgtggcacggttctggtcttgccaatttcaagatggaaggcgtacggtgtggccacagtggcccgctgcgtcgagatccccgtagctttcattcgcccttcggggcaaagagccattcccgtgctcatcggacaagagcgtgcggtccaatcaaagtccggttgagcaacagggaacggagcgtgaagaccggttgagcaacaggaagcgtggccgcgcggtacagcgtggagaaggatagacggggactcctccgactcgacgtttgtacctgcacaagaattttccagcgttccgcgcccgtcggcatacagcgacggtgatgggatttaggaaggaaaatcgtacgatgagtgcaggacctaatccggcgatgcgaataacgtgaattgcgtggttattccacattgttgaagacgaagttcgtagtcctagcacacagaagaaaatcggggctactgttaattgataacgaagacgagggaaaaaacaaacgaattggggcgtttatccatgataatggagaatcgttggttggtgagggctgccgactgttcgtgtggaagtcaaagaaaattttgtaaagtatacctgatcttggaccgctgcagtgagataaactaattcaggacgccacgttaacagcacgcgattaatatgtttaaagttgctaatagatgtgtaagtacaatcaaccctaattgagggttttagtgattaatgacaaaacaaactaagattctaacaagtttgctcctagtatatacacagtatttctacagacaggagaagcacagatcttacgagcataaaagtataaagcacaacggatttaaaattccacatcaaatggcgtgcttcaagtgttaagtgaaagacgcctagagggggggtgaatagggcgaaactgaaatttgcaaatataaacacaactacaagccggggttagcgttagtaataaagaaacgagtccgcgagagagagcgcaaaacaaatcccaagcgaataagcaagtcagacacggagatttgttttaccgaggttcggttcttgcaaacctactccccgttgaggaggccacaaaggccgggtctctttcaacccttccctctctcaaacgatccacggatcgagtgagctttcttttctcaatcacttggaacacaaagttcccacaaggaccaccacaagtttggtgtctcttgcctcaattacaagtgagtttgattgcaaagagaggatcaagaaagaagaaaacaatccaagcgcaagagctcgaaagaacacaatgcaaatcactctctctaatcactatggcgttgtgtggagtttggagaggatttgatctctttggtgtgtctagaattgaatgctagagctcttgtagtagttgggaagtaggaaacttggatgcaatgaatggtggggtggttggggtatttatagccccatccaccaaatgtggccgttgggaggctgtctgttcgatggcgcaccggacagtccggtgcacaccggacagtccggtgccccctgccacgtcatcactgccgttggattctgaccgttggagcttctgacttgtgggcccgcctgggtgtccggtgcacaccggacaggtactgtttgctgtccggtgtgccagtatgggcgcgcctgacttctgcgcgcgcagagcgcgcattaattgcgcggcagagatccgttggcgcggagatagccgttgctccggagtcgcaccggacagtccggtgcacaccggacagtctgaattatagtggactagccgttggagtttcccgaagctggcgagttcctgaggccgacctcccttggcgcaccggacactgtccggtgtacaccggacagtccggtgaattatagccgagtcgcccttggaaattcccgaaggtgacgagtttgagtctgagtccccctggtgcaccggacatgtccggtggcgcaccggacagtccggtgcgccagaccaggggtgccttcggttgcccctttgctcctttgttgaatccaaaacttggtctttttattggctgagtgtgaaccttttacacctgtataatctatacacttgggcaaactagttagtccaattatttatgttgggcaatttaaccaccaaaattaattagggactaggtgtaagcctaattccctttcaatctccccctttttggtgattgatgccaacacaaaccaaagcaaatatagaagtgcataattgaactagtttgcataatgtaagagtaaaggttgcttggaattgagccaatgtaaatgcttacaagatatgcatggattgtttctttcttatatatcattttggaccacgcttgcaccacatgttttgtttttgcaaactcttttgtaaatctttttcaaagttcttttgcaaatagtcaaaggtaaatgaataagagtttgcaaagcattttcaagatttgaaattttctccccctgtttcaaatgcttttcctttgactaaacaaaactccccctaaaagagatcctcctcttagtgttcaagagggttttgatatatcatttttgaaatactactttctcccccttttgaacacaataggataccaattgataaatactcttggaaaacactaagtttttgaaattggtggtggtgcggtccttttgctttgggctcatttctccccctttttggcatgaatcgccaaaaacggaatcattagagccttcgaagtaatttcttcccctttggtcataagtaaatgagttaagattataccaaagacgaagtccggtccttttgctttgggcttttactctctcccccaaagacaaggtcctttttttggagcgatggcgaaggatgagttacggagtggaagcctttgtcttcgccgaagactccaattctctttcaatatacctatgacttggtttgaaatagacttgaaaacacattagtcatagcatataaaag

SEQ ID NO: 36112 - DNA, 1767 bp, Zea Mays
ctccctgcctggcatgcgcatgcgcccgatcgcgccatgtctccctctcctcccgcgcctctatttctaccgccccgccggcgctacccgccgcccgcgctctccatccatccccgtcccccgcgatcgccgagctctacctcctccagcacacgtcccgcggcagcatccgtcagagaagctagctagcgcttcgatccccgatccgtgtcgtagacgacagcggggccccccggcggccggttgtttctcgcagctcggccggcggcggccatggacgacgacgcctcctcgtctccggcggcttcgtacatcagactgcatctgatcgagaagtgcatctgctacaagctgaacaaggaggagtgcatggagacgttggagaagcacgccaagatcatgcccgtcgtcacgtccaccgtgtggaaggagctagagaaggagaacagggagttcttcgagacgtacaagaaggatcggggaggaggaggaggaggccccaggaacctgcaggaagcggcggctgctggtcaccatcctcctccgcgtctccaagtccaacagagctgctgctcacaagagccggcgctggagcagaagaagcacccaccatctgatggagtacaggaacataatcgcgtcgtcgtggagaaggagaagaggaagcaggacccaccatcggcgtcggcgtcggctgatggacaggaacagcgcgtcgtggagaagaaggagaagaggaaggacccgccgtctgatggacaggaacggcgcgtcatggcgaaggagaacagccggaaggatccttccgcttcttccaagagatcagaacaaggacaacgactagagctctcgctcgctcgatcagccgtgccgctcctgtggctacgatcgaatgtggtcgatgcaggagatctcaggacgatcgaagattctcgatctacaggcgccgccgtaccgcgagcagggggagggagcgacggacggtgttgcgctgcatgcgtgtgggccctgcacacgtggcggccgggcgaatattcacccggcttagcgtgtttgaaggacacgacacgactggtggaggtggtggtggttactgtcagaagaaagaggccgttcttgtcccggtggtcggtctcgcgtctcgacgtacgtacgtgctctgctctggcgatccgtcgaacagacaggacggccgggcgccggggccaaggccaacaaagcacgcgagatttcttcctcccccaggcccagccaccctccttttggcgccgggcgcttctgagcaggacgtctacggtggctggcaaattcccaggcgtgcgcgtgacgtcttgtttggtcggagcagcctgcaacagcgcacgcagtacacagccggtccaagaggctcggccgggctcactcctgtcatgttgacatgtagctaggcacgtgcacacgtacttgtgaccgctacacaggccggtatgcatgccactcgctgtacgcgtccacaagaatcgagcccggcttttgtgcttcgggagtttggaaccaagtcgagtgtcgggcacgggggctggtagagctgacgtgctcgcatcgttgtctgctgctggccaccggccgtgctctggctgcgtggtctactctactgctcttccgtcgttttggccgtgctttccccccgggctgtacgcgtacgtcgttttcagctacccgccgccgatcgagccatgtttcaggcacgctactccaagcaagcaagctagctactgacggcacggg

SEQ ID NO: 36113 - DNA, 1788 bp, Zea Mays
cccacgccgccctccctccctgcctggcatgcgcatgcgcccgatcgcgccatgtctccctctcctcccgcgcctctatttctaccgccccgccggcgctacccgccgcccgcgctctccatccatccccgtcccccgcgatcgccgagctctacctcctccagcacacgtcccgcggcagcatccgtcagagaagctagctagcgcttcgatccccgatccgtgtcgtagacgacagcggggccccccggcggccggttgtttctcgcagctcggccggcggcggccatggacgacgacgcctcctcgtctccggcggcttcgtacatcagactggtgcagcatctgatcgagaagtgcatctgctacaagctgaacaaggaggagtgcatggagacgttggagaagcacgccaagatcatgcccgtcgtcacgtccaccgtgtggaaggagctagagaaggagaacagggagttcttcgagacgtacaagaaggatcggggaggaggaggaggaggccccaggaacctgcaggaagcggcggctgctggtcaccatcctcctccgcgtctccaagtccaacagagctgctgctcacaagagccggcgctggagcagaagaagcacccaccatctgatggagtacaggaacataatcgcgtcgtcgtggagaaggagaagaggaagcaggacccaccatcggcgtcggcgtcggctgatggacaggaacagcgcgtcgtggagaagaaggagaagaggaaggacccgccgtctgatggacaggaacggcgcgtcatggcgaaggagaacagccggaaggatccttccgcttcttccaagagatcagaacaaggacaacgactagagctctcgctcgctcgatcagccgtgccgctcctgtggctacgatcgaatgtggtcgatgcaggagatctcaggacgatcgaagattctcgatctacaggcgccgccgtaccgcgagcagggggagggagcgacggacggtgttgcgctgcatgcgtgtgggccctgcacacgtggcggccgggcgaatattcacccggcttagcgtgtttgaaggacacgacacgactggtggaggtggtggtggttactgtcagaagaaagaggccgttcttgtcccggtggtcggtctcgcgtctcgacgtacgtacgtgctctgctctggcgatccgtcgaacagacaggacggccgggcgccggggccaaggccaacaaagcacgcgagatttcttcctcccccaggcccagccaccctccttttggcgccgggcgcttctgagcaggacgtctacggtggctggcaaattcccaggcgtgcgcgtgacgtcttgtttggtcggagcagcctgcaacagcgcacgcagtacacagccggtccaagaggctcggccgggctcactcctgtcatgttgacatgtagctaggcacgtgcacacgtacttgtgaccgctacacaggccggtatgcatgccactcgctgtacgcgtccacaagaatcgagcccggcttttgtgcttcgggagtttggaaccaagtcgagtgtcgggcacgggggctggtagagctgacgtgctcgcatcgttgtctgctgctggccaccggccgtgctctggctgcgtggtctactctactgctcttccgtcgttttggccgtgctttccccccgggctgtacgcgtacgtcgttttcagctacccgccgccgatcgagccatgtttcaggcacgctactccaagcaagcaagctagctactgacggcacggg

SEQ ID NO: 36114 - DNA, 2346 bp, Zea Mays
cggagggccaatttgcaaggaacgaagaaaaatgcaaccttgcgctgttccgctcgtttattcttcatccctgtccaccttcccacacacccaccaggccaccaccaggtcaccaaccacgcacgcgcctccgcctgcccgctctcccgccatgaagcagctccacaagtcttcccctacccacgcgccatcgccggcgcacgcaccggctcccaaggccgccaagacggcgcgcccaggtccgcgctcctggatcggctacgtcctccgcgagcagcgcctcctcttcgtcctgctcggtgcgctcatcgcctccaccttcttcctcctccggccctacctctcgctctccccgtcttcccacctccccgacgcccgcccgctcttctccttcgccacccgctccggtgttcccgccggcttccgcccgccgcagcgccgcgtcgtcgtaacaggcggggcagggttcgtcggcagccacctcgtcgaccggcttctggagcagggggacagcgtgatcgtggtcgacaacttcttcaccggcaggaaggagaacgtcgcgcaccacctccggaaccccaggttcgagctgctccgccacgatgtagtcgagccaatcctcctcgaggtggaccggatctaccacctcgcgtgccccgcgtcgcctgtgcactacaagtacaacccaatcaagacgatcgacaaatgtcatgggaactttgaatatgttgggtctggcgaagcgaattggtgcaaggtttttgttgactagcacaagtgaagtttatggtgatccgcttgagcatccacagaaggagtcatactgggggcacgttaatcctataggtgttaggagctgttacgatgaggggaagagaacagcagagactttaactatggactatcatcgtggtggtggtgttgaggtgcgtattgcccgtattttcaatacatatggtcctcgtatgtgcctcgacgatggtcgtgtggtcagcaattttgttgcacaggcactgcgaaggcaaccgatgacagtctatggtgacggaaaacaaactcgaagtttccaatatgttgctgatctggttgctggactgatggctctaatggagagtgatcatattggtcctttcaacttgggaaacccaggagagtttaccatgttggagctagcacaggttgtgaaggaaacaattgacccaatggcaaccattgaattcaaacccaacacagctgatgatccccatatgagaaagccagatatcaccaaggctaagcaactgctacattgggagccaaaggtctctctcaaagaaggccttccgctaatggttcaagatttccgtcaaaggatctcggatgagtaatcaaagcaattcttttttccccgaatgtgccatgcacgtgtttgtaatcagagcaatcgtatgatactggtcaccggtttgattctgaacgatgctgcaactacagtcaggagctcttcaccaactggaggcctggagccctgtagtacgatgtactgtgtacacaacagactgtagaatcacgcaggccccatttggagtgtggggattccatagtatttctacgacatagtactatttctgtgaaatagctgaaaagttcatgggttcgtgttggtttttttatatatatcttggtgaggcagaacagaagcaatcaattgttttttttgtgcatgtgtgaaattcctgaattgtgggtggtgagagataggatacaatgatgtatttcaggagcttttgtaacacttgaacattcatcatgtgaaaaatgtaactgaatgtgttggccagctcactgttgtcgttgcacattcaactggcaatccacaacttcattccccttcctcaaaatgtttgacagataaagtgaaaattggcattgtcttatatacagtacctgagcaattttcttggatacacctgccatcagaagctgactttcaagacatcgaagcttgcaacatagtaggtgtttctgcaaattccgtagccttctacgtacttgagatgcacaatgaaactaagcgctctgttcgagctgacgttcccacccatttctgttacgtcagcaactctgacaaaggcaaagccggtggcttcactgtgggtaccgcctcgtccctccgacaagcgcgatgtgggactcctgatcgtcgcggcggccggcggacgccgaagaacctgagggaccaaggaaatggcacctctatttcccgaggctgtcggctgcgccatcgccggcaaacgaggccttcacggctacccctccatttccatagtctggttgccctgccttttgcacctgggacacatcacc

SEQ ID NO: 36115 - DNA, 2280 bp, Zea Mays
cggagggccaatttgcaaggaacgaagaaaaatgcaaccttgcgctgttccgctcgtttattcttcatccctgtccaccttcccacacacccaccaggccaccaccaggtcaccaaccacgcacgcgcctccgcctgcccgctctcccgccatgaagcagctccacaagtcttcccctacccacgcgccatcgccggcgcacgcaccggctcccaaggccgccaagacggcgcgcccaggtccgcgctcctggatcggctacgtcctccgcgagcagcgcctcctcttcgtcctgctcggtgcgctcatcgcctccaccttcttcctcctccggccctacctctcgctctccccgtcttcccacctccccgacgcccgcccgctcttctccttcgccacccgctccggtgttcccgccggcttccgcccgccgcagcgccgcgtcgtcgtaacaggcggggcagggttcgtcggcagccacctcgtcgaccggcttctggagcagggggacagcgtgatcgtggtcgacaacttcttcaccggcaggaaggagaacgtcgcgcaccacctccggaaccccaggttcgagctgctccgccacgatgtagtcgagccaatcctcctcgaggtggaccggatctaccacctcgcgtgccccgcgtcgcctgtgcactacaagtacaacccaatcaagacgatcaagacaaatgtcatgggaactttgaatatgttgggtctggcgaagcgaattggtgcaaggtttttgttgactagcacaagtgaagtttatggtgatccgcttgagcatccacagaaggagtcatactgggggcacgttaatcctataggtgttaggagctgttacgatgaggggaagagaacagcagagactttaactatggactatcatcgtggtggtggtgttgaggtgcgtattgcccgtattttcaatacatatggtcctcgtatgtgcctcgacgatggtcgtgtggtcagcaattttgttgcacaggcactgcgaaggcaaccgatgacagtctatggtgacggaaaacaaactcgaagtttccaatatgttgctgatctggttgctggactgatggctctaatggagagtgatcatattggtcctttcaacttgggaaacccaggagagtttaccatgttggagctagcacaggttgtgaaggaaacaattgacccaatggcaaccattgaattcaaacccaacacagctgatgatccccatatgagaaagccagatatcaccaaggctaagcaactgctacattgggagccaaaggtctctctcaaagaaggccttccgctaatggttcaagatttccgtcaaaggatctcggatgagtaatcaaagcaattcttttttccccgaatgtgccatgcacgtgtttgtaatcagagcaatcgtatgatactggtcaccggtttgattctgaacgatgctgcaactacagtcaggagctcttcaccaactggaggcctggagccctgtagtacgatgtactgtgtacacaacagactgtagaatcacgcaggccccatttggagtgtggggattccatagtatttctacgacatagtactatttctgtgaaatagctgaaaagttcatgggttcgtgttggtttttttatatatatcttggtgagataggatacaatgatgtatttcaggagcttttgtaacacttgaacattcatcatgtgaaaaatgtaactgaatgtgttggccagctcactgttgtcgttgcacattcaactggcaatccacaacttcattccccttcctcaaaatgtttgacagataaagtgaaaattggcattgtcttatatacagtacctgagcaattttcttggatacacctgccatcagaagctgactttcaagacatcgaagcttgcaacatagtaggtgtttctgcaaattccgtagccttctacgtacttgagatgcacaatgaaactaagcgctctgttcgagctgacgttcccacccatttctgttacgtcagcaactctgacaaaggcaaagccggtggcttcactgtgggtaccgcctcgtccctccgacaagcgcgatgtgggactcctgatcgtcgcggcggccggcggacgccgaagaacctgagggaccaaggaaatggcacctctatttcccgaggctgtcggctgcgccatcgccggcaaacgaggccttcacggctacccctccatttccatagtctggttgccctgccttttgcacctgggacacatcacc

SEQ ID NO: 36116 - DNA, 2821 bp, Zea Mays
cggagggccaatttgcaaggaacgaagaaaaatgcaaccttgcgctgttccgctcgtttattcttcatccctgtccaccttcccacacacccaccaggccaccaccaggtcaccaaccacgcacgcgcctccgcctgcccgctctcccgccatgaagcagctccacaagtcttcccctacccacgcgccatcgccggcgcacgcaccggctcccaaggccgccaagacggcgcgcccaggtccgcgctcctggatcggctacgtcctccgcgagcagcgcctcctcttcgtcctgctcggtgcgctcatcgcctccaccttcttcctcctccggccctacctctcgctctccccgtcttcccacctccccgacgcccgcccgctcttctccttcgccacccgctccggtgttcccgccggcttccgcccgccgcagcgccgcgtcgtcgtaacaggcggggcagggttcgtcggcagccacctcgtcgaccggcttctggagcagggggacagcgtgatcgtggtcgacaacttcttcaccggcaggaaggagaacgtcgcgcaccacctccggaaccccaggttcgagctgctccgccacgatgtagtcgagccaatcctcctcgaggtggaccggatctaccacctcgcgtgccccgcgtcgcctgtgcactacaagtacaacccaatcaagacgatcatatccttcacgactggatctcgccggttgattttgcttacattgaaagcgactcgttctgatcccatcgtcttcttctcttttttgtatttctggtggcgggtggcgggtggcgggtggcggggcgggtgggttagtgtcagataggaatggaggaaaattggggatccgtagggaagaataatgttttgttaaatgcgatcactcagactgcatcatctgtatgttctcaaactggatttctttctttcttaaagcagccaaaaagttaaaacgattatggctagagatccgtttagataaacatcatttgcttgctctggttttattgaacaacgttagagatcagttgatgctttgctcaagattcttgaaataattacctctcagtatatgagttcagttatttgcacatgcacgaatatgaggggaaggatgtcgccattttttgcagcatgtgtccattcagtatccatatagatggtgtgtttcttttgtctcgaatttggacttcttaacactttgtacaagacaaatgtcatgggaactttgaatatgttgggtctggcgaagcgaattggtgcaaggtttttgttgactagcacaagtgaagtttatggtgatccgcttgagcatccacagaaggagtcatactgggggcacgttaatcctataggtgttaggagctgttacgatgaggggaagagaacagcagagactttaactatggactatcatcgtggtggtggtgttgaggtgcgtattgcccgtattttcaatacatatggtcctcgtatgtgcctcgacgatggtcgtgtggtcagcaattttgttgcacaggcactgcgaaggcaaccgatgacagtctatggtgacggaaaacaaactcgaagtttccaatatgttgctgatctggttgctggactgatggctctaatggagagtgatcatattggtcctttcaacttgggaaacccaggagagtttaccatgttggagctagcacagctgatgatccccatatgagaaagccagatatcaccaaggctaagcaactgctacattgggagccaaaggtctctctcaaagaaggccttccgctaatggttcaagatttccgtcaaaggatctcggatgagtaatcaaagcaattcttttttccccgaatgtgccatgcacgtgtttgtaatcagagcaatcgtatgatactggtcaccggtttgattctgaacgatgctgcaactacagtcaggagctcttcaccaactggaggcctggagccctgtagtacgatgtactgtgtacacaacagactgtagaatcacgcaggccccatttggagtgtggggattccatagtatttctacgacatagtactatttctgtgaaatagctgaaaagttcatgggttcgtgttggtttttttatatatatcttggtgaggcagaacagaagcaatcaattgttttttttgtgcatgtgtgaaattcctgaattgtgggtggtgagagataggatacaatgatgtatttcaggagcttttgtaacacttgaacattcatcatgtgaaaaatgtaactgaatgtgttggccagctcactgttgtcgttgcacattcaactggcaatccacaacttcattccccttcctcaaaatgtttgacagataaagtgaaaattggcattgtcttatatacagtacctgagcaattttcttggatacacctgccatcagaagctgactttcaagacatcgaagcttgcaacatagtaggtgtttctgcaaattccgtagccttctacgtacttgagatgcacaatgaaactaagcgctctgttcgagctgacgttcccacccatttctgttacgtcagcaactctgacaaaggcaaagccggtggcttcactgtgggtaccgcctcgtccctccgacaagcgcgatgtgggactcctgatcgtcgcggcggccggcggacgccgaagaacctgagggaccaaggaaatggcacctctatttcccgaggctgtcggctgcgccatcgccggcaaacgaggccttcacggctacccctccatttccatagtctggttgccctgccttttgcacctgggacacatcacc

SEQ ID NO: 36117 - DNA, 1566 bp, Zea Mays
ctaaaagcaacctttcacctacctgtacccgcgggtaaccgatttctgtgttccatgggcattataaatgttatctgaagtgaaggtacctgtgtcatgttgagttcactggttgtaaagccattccgaagggcatagccatggatcgccaaagcgaggatgttaactacgaagaggagtttgtcgtgaatccccggggcaacaagctgttcgtttgcagctggacaccacagcaggatcgccagccaaaagctctgatcttcatctgtcacgaaaaaaaaacaacaagcataccggtcactactatcgctctcgatttatcttctgcaggaattgcagcggagtgcagcatatcgatgaggggtaagaaagaacgccgccatcctctaaaaaactgctgatttgattactatggttggatgagaaagatgaatgaaacatagtatactaaacactgagaagctgcacaaatatccagacacggcggctcgattggtgcgggcaggatatggcgtttacgggatagatcacgagggacacggcagatcatctgggagcaggtgctacgtgccaaacttcggcaacatcgtcgcggattgctccagtcatttcacaagcatctgcgagaaaccacagaacagagggaagaggaggttcctgtacggcatctccatgggcggaagcgtggcccttctcctccaccggaaggcaccgggctactgggacggcgccatcttgctcgctccgatgtgcaagatctctgatgacatgaggcctcacccgatcgtggtcagcgctctgacgatggtttgtgctgttgcgcctggttggaaggtcatacccacacctgatatcattgacaaagtctgcaaagatccagagatgagaaaagaggttcgttccaatccgtatatatacagaggaaagctccccctgaaaacttgccatgagctcctgatggtcagccttgatatcgagaagaacttggatcaggtgacgatgccgttcctggtcctgcacggcggggatgacgtcgtgaccgacccttcagtcagcaagctgctattcgagaaggcaccgagcaaggacaaaaccttcaagctgtaccccgggatgtggcatgcgctgacagccgaactccctgacgacgttgagcgtgtgtatgcggacattatcacttggctagaggaaagagcggtcatttgtgcagctagcgtttctagtgccacaccacgtgtctgaactcagaaagatgttaaatatgccatggcagatacgtatacggtgtggtattcaaacccatgtacgagggcaagcatgacaatatgttagatttagattcaacggtatgtcgtatttaacagttaagcccttccaccaccacctcgtatagctttataaataaaactcataataaaccacaattgtatctacggttatcggttagatctaaatctacggatcaagaggtttgcttacacctaatgactgcttgtattttagtcgttagaaccctccatgtgcaataatataaatatgaaagcttaaatacgacagacatacaaa

SEQ ID NO: 36118 - DNA, 2054 bp, Zea Mays
gaaaactctacttaattaagctaataatgtcatacatatatatccacagtaacatgctactcgctgtaacagtacatcggatgaataaatatacggtcaacaaggtaaaatggttctttaaaaaatatatctgaatcctgagtgcatcgcattttcttttctcaccaaacacgtggatcgagtcaccttcccgttggattgctggaagaagatcaacaggaagggaaacgatagtcagtagtgctgcctgatctggaccaactgactagttcagttcacccgttcgcggacattctgcacgcagtacgcacgccgttttcccaagcagctgccgaggtttactttagccggttgcagtgttttaagcaccttgtttgaaaggggccagtgcttccatgagcacacaagatatacaaaaccgtggccttcagttggctcgctccggattaaacaatcccttaggccttgttcgtttatgtcggattgcacccggaatcattccacctaatcaaagtttatataaattagagaaacaatccggttaggaatcgttccgacacaccaatccggcagaaacgaacaaggccttaaacaaaaggacttggagttggggattctcagggttccttagctctaaaagcaacctttcacctacctgtacccgcgggtaaccgatttctgtgttccatgggcattataaatgttatctgaagtgaaggtacctgtgtcatgttgagttcactggttgtaaagccattccgaagggcatagccatggatcgccaaagcgaggatgttaactacgaagaggagtttgtcgtgaatccccggggcaacaagctgttcgtttgcagctggacaccacagcaggatcgccagccaaaagctctgatcttcatctgtcacggaattgcagcggagtgcagcatatcgatgagggacacggcggctcgattggtgcgggcaggatatggcgtttacgggatagatcacgagggacacggcagatcatctgggagcaggtgctacgtgccaaacttcggcaacatcgtcgcggattgctccagtcatttcacaagcatctgcgagaaaccacagaacagagggaagaggaggttcctgtacggcatctccatgggcggaagcgtggcccttctcctccaccggaaggcaccgggctactgggacggcgccatcttgctcgctccgatgtgcaaggtctggggacagagcaagatcgagatgatctctgatgacatgaggcctcacccgatcgtggtcagcgctctgacgatggtttgtgctgttgcgcctggttggaaggtcatacccacacctgatatcattgacaaagtctgcaaagatccagagatgagaaaagaggttcgttccaatccgtatatatacagaggaaagctccccctgaaaacttgccatgagctcctgatggtcagccttgatatcgagaagaacttggatcaggtgacgatgccgttcctggtcctgcacggcggggatgacgtcgtgaccgacccttcagtcagcaagctgctattcgagaaggcaccgagcaaggacaaaaccttcaagctgtaccccgggatgtggcatgcgctgacagccgaactccctgacgacgttgagcgtgtgtatgcggacattatcacttggctagaggaaagagcggtcatttgtgcagctagcgtttctagtgccacaccacgtgtctgaactcagaaagatgttaaatatgccatggcagatacgtatacggtgtggtattcaaacccatgtacgagggcaagcatgacaatatgttagatttagattcaacggtatgtcgtatttaacagttaagcccttccaccaccacctcgtatagctttataaataaaactcataataaaccacaattgtatctacggttatcggttagatctaaatctacggatcaagaggtttgcttacacctaatgactgcttgtattttagtcgttagaaccctccatgtgcaataatataaatatgaaagcttaaatacgacagacatacaaa

SEQ ID NO: 36119 - DNA, 2121 bp, Zea Mays
gaaaactctacttaattaagctaataatgtcatacatatatatccacagtaacatgctactcgctgtaacagtacatcggatgaataaatatacggtcaacaaggtaaaatggttctttaaaaaatatatctgaatcctgagtgcatcgcattttcttttctcaccaaacacgtggatcgagtcaccttcccgttggattgctggaagaagatcaacaggaagggaaacgatagtcagtagtgctgcctgatctggaccaactgactagttcagttcacccgttcgcggacattctgcacgcagtacgcacgccgttttcccaagcagctgccgaggtttactttagccggttgcagtgttttaagcaccttgtttgaaaggggccagtgcttccatgagcacacaagatatacaaaaccgtggccttcagttggctcgctccggattaaacaatcccttaggccttgttcgtttatgtcggattgcacccggaatcattccacctaatcaaagtttatataaattagagaaacaatccggttaggaatcgttccgacacaccaatccggcagaaacgaacaaggccttaaacaaaaggacttggagttggggattctcagggttccttagctctaaaagcaacctttcacctacctgtacccgcgggtaaccgatttctgtgttccatgggcattataaatgttatctgaagtgaaggtacctgtgtcatgttgagttcactggttgtaaagccattccgaagggcatagccatggatcgccaaagcgaggatgttaactacgaagaggagtttgtcgtgaatccccggggcaacaagctgttcgtttgcagctggacaccacagcaggatcgccagccaaaagctctgatcttcatctgtcacggaattgcagcggagtgcagcatatcgatgagggctgcacaaatatccagacacggcggctcgattggtgcgggcaggatatggcgtttacgggatagatcacgagggacacggcagatcatctgggagcaggtgctacgtgccaaacttcggcaacatcgtcgcggattgctccagtcatttcacaagcatctgcggtacgaaacggacatccaaaacataagatacagatatactgaaccatgacgacacacacacacggcacctggtttcagagaaaccacagaacagagggaagaggaggttcctgtacggcatctccatgggcggaagcgtggcccttctcctccaccggaaggcaccgggctactgggacggcgccatcttgctcgctccgatgtgcaagatctctgatgacatgaggcctcacccgatcgtggtcagcgctctgacgatggtttgtgctgttgcgcctggttggaaggtcatacccacacctgatatcattgacaaagtctgcaaagatccagagatgagaaaagaggttcgttccaatccgtatatatacagaggaaagctccccctgaaaacttgccatgagctcctgatggtcagccttgatatcgagaagaacttggatcaggtgacgatgccgttcctggtcctgcacggcggggatgacgtcgtgaccgacccttcagtcagcaagctgctattcgagaaggcaccgagcaaggacaaaaccttcaagctgtaccccgggatgtggcatgcgctgacagccgaactccctgacgacgttgagcgtgtgtatgcggacattatcacttggctagaggaaagagcggtcatttgtgcagctagcgtttctagtgccacaccacgtgtctgaactcagaaagatgttaaatatgccatggcagatacgtatacggtgtggtattcaaacccatgtacgagggcaagcatgacaatatgttagatttagattcaacggtatgtcgtatttaacagttaagcccttccaccaccacctcgtatagctttataaataaaactcataataaaccacaattgtatctacggttatcggttagatctaaatctacggatcaagaggtttgcttacacctaatgactgcttgtattttagtcgttagaaccctccatgtgcaataatataaatatgaaagcttaaatacgacagacatacaaa

SEQ ID NO: 36120 - DNA, 6494 bp, Zea Mays
gcttcctcttgcccccccaccccaccccaccgccaccacccacccctcgcccgcaggtgggcccagcctccatcctcctcctctgagagcgagccggcggcggcgagcggcattgcgggttatctggtggagcgggacatggcggggtacggggaccggcgatcgccgccgctggagggcatcaccgtcgacggggccagcagggcccaatcgcccggggcgggtgcgggggcgggggcggggaggctgccgccgccgccaggaggcttcgcgcgcgggctcatgaagcagccgtcgcggctggcgtccggggtgcggcagttcgcttcgcgtgtgtcgatgaaggtgcccgagggcgtggccgggatgcggccgggacggatgacgcggatgcagtctagcgcgcagatggggctccgtggcttgcgcttcctcgacaagacctccggcggcaaggagggatggaaggccgtcgagcgccgcttcgacgacatggccaagggcagcggacgactccagaaggagagcttcggcaagtgcatcggcatgggggactccaaggagtttgccggcgagctgttcgtggcgctggcgcggaggcggagcctggagccggaggatggcatcaccaaagagcagctcaaggagttctgggaggagatgaccgaccagaacttcgactcgcggctgcgcattttctttgacatgtgcgacaagaacggcgatgggatgctcacggaagatgaggtcaaagaggttattatactgagcgcgtcagcgaacaagctagccaagctgaagggtcacgccgcgacctacgcgtccctgatcatggaagagctcgacccggacgaccgcggctacattgagatttggcaactggagacgttgctccggggcatggtgagcgcgcaggctcccgagaagctgaagcggacgacgtcgagcctggcgcggacgatgatcccgtcgcggtaccggaacccgctgaagcggcacctgtccaagacggtggacttcatccacgagaactggaagcggatatggctcgtgacgctgtggctggtcgtcaacgtcgccctgttcgtgtacaagttcgagcagtacaagcgccgaaccgcgttccaggtgatgggctactgcgtctgcgtcgccaagggtgccgctgagatcctcaagctcaacatggctctcatcctgctgcccgtctgccggaatacgctgacgacgctcaggtccaccgcgctcagccatgtcatacccttcgatgacaacatcaacttccacaaggtcatcgcgctgtccatcgcgatcgccacagcgatccacacgctcgcacacgtgacctgcgacttcccaaggctgatcagctgcccgacggacaagttcatggccaccttggggtccaacttccactacaagcagccgacttacctgggcttgctggagagcacacccggggttaccggaatcctcatgatcatcataatgtccttctccttcacgctggcaacacattccttcaggcggagtgtggtgaagctgccatcgccgctacaccaccttgccggtttcaatgccttctggtacgctcaccacctgctggtccttgcgtatgtcctgctggtggtgcactcctacttcatattcctcaccagggagtggtacaagaagacgacatggatgtacctgattgtccctgtcctcttctatgcctgtgaaagagtcatcaggaaatttcgtgagaacaactaccatgcgggaattgtgagggcagcaatttatccgggagatgtgctctctattcacatgaagaagccacagggtttcaagtacaagagtgggatgtatctgtttgttaaatgcccagaagtctcgcccttcgagtggcaccccttctctataacttcggcaccaggcgatgactacttgagtgtgcatatccgtacgctgggtgactggacatccgaactgcggatgctttttgggaaggcttgccaggcacaagtaacttccaagaaggctacccttacaagacttgaaactacagttgtggcagacgcccagacagaggacactaggtttcccaaggtctacatagacgggccatacggtgcaccagcacaaaattacaggaaatatgacattcttctgcttattggccttggaataggagcaactcctttcatcagcatactgaaggatatgttgaacaacctaaaatccaacgaagaggtggaaagcatccacggctctgagataggcagcttcaagaacaatggtccaggaagggcttacttctactgggtcaccagagagcaaggatctttcgaatggttcaaaggagtcatgaatgaggttgcagggagcgatcacagcaatgttatagagatgcacaattacctgaccagcgtgtatgaagaaggtgacgcaaggtcagctctgattgccatggtacagtcacttcagcgtgctaaaaacggcgtggatatcgtctccggcagcaagattcgaacacattttgcaagaccaaactggaggaaggtattctgtgatttggccagcgcacacaagaactctcgcataggagttttctattgtggatctccgacgctcacaaaacaactgaaggatctttcgaaagaattcagccagacaaccacaacccggttccatttccacaaagagaacttctgagacgtgtacccgaagatccgatggactggaaacataattgtatagggaaaaaatacgatagcattggcatagcagatttagttttacaagttttgatgtatgcggggttgtacaaaatatgtgtagaaagctagatgtcaccatcatacatagattctgaaatgcttgcagctatatatattgcattgcataagtgaaaccacttgcttcctaggataaccgagttctagatctcctgctttgaacacgcaaattttctcttttcagtctttctgcccgagctgtcattgcattgcgaataagggtgctattctgtttcctagaagattcttgtgtatcatcttgcactggcacaagtgccacagaacctggtgtgtcttcagcgccctgagaatttccaggtgcattcctgttctttggaggcctgcctctttttttaggctgcttatcagcagataaagatgtatcttttcgaggcctgcccctcttcctaggttgattactagcctgcaagccgtccactctaactatcgccatcttattgtttgtatcatttccctgggatagtgtaactatatgtgatgttttctccatactgtcatccactgtagcatatattttccttggtctacccacctttggtttggagtcagaaactgatcccttaagtttgcacttgtcgataacaagtgttttaagtggaacagttatgtccaatggcagtagaactttctcaagttcacgccattcaagatcttcctggtctccatcatcataaatgacggtgtaccagttgctttcaatgtcatacttggccactttcccgacgaaatatgtgtctccaaaaagcttacgcactttcctcccttctaaccattcaccaaaacgaggatcaacatgagattctgcgtcattttttactgcagattgagaaccagttgtgcaatcaaaaggaaaatctggaacgccattgataatgatggcaggctctttaggaactttgattatagatgtagtttctgactcttgcttgccatcagccccctccatggttttctatatggaaaatatggaagaatcaggaaacagattcatatatgctaacactaagaaagagttcaatcaagagttaacagtacaagcagcaatgaaccaagtaatccatggttcacaaactattatattgtgcaggatatagatgactgatgactctgaagttaatggaaaacactacttattggaaaacacctaggaagaactgatacaacatgggactttcttacaccaatggtgggtttcaacatggacactggtacataccagtgaaatacatgcataattgtgttagaaaatgaaaattacagtggatcctaaacctcaaaactaacactggtactttctgtcaagcaacaatataaaaattgtactaggatataacttagcaaccaacacgtcaagcttgaactggtggtttccaattggacttctggttaatgaatcaacttccacagaatcaaatacaaattctaaacataataatgatcatgacatcggctttaattttgctattatagtttcagattcaaactaaattgagactaattactaggcattccaggaaaaaggatgtgagaagtagcaggtatgtgaaagctgatctgctttactatcccaacttctaaccttaactcactactcagataatcattagaattcagctttgtaagtctgctcgagaaatgagtacatgaaatttctgattggatcagacacaaaataggttaaaaattcagtggaataatctaaagatgcccacattgaacacacaagtacatggtgggttgaacatgctcttctatgcattctccaatcaaacaaataagctatttaatacaaataatgagttagataaaattccatcattttctctgtaggcttatgtcaatcaaacaagtaaatatgacacaacaggattcaggaactgtgctaccaaaacacgataccagtccagcagttgcccatggtctgatgacaagcacccactgcaaccagcattcttaatgatgataccattttacagtccacatccctcaccaaaatgtagcgctgtttcagaagaaactgactggacaagctattacactagtacaactggtaactgtagaaatcaggtccatgacagctcagtggctcagtgctatagatctaaaagagtcagagcttagagtgaccactgtgaacagatcacttcagatcttaagttcagtttgaatctttagttgaactgacagagacaatgtcatgtcaatataataccaagcttcaacatcatctctgcccacaggtaggttaaggtgtagtaaacaacaatccattaaataaatattgaaatatgaagatcctgaattctatggtacatacatatgaacatcgtacacccgggcattgtgcccccaatcaccaagaaattatactgccattcgtgccccccaaacaagaaggggggacctggcagcggtagagcctaccgtttgtaaccggaaggtcccaggttcgagccacaacctcttcgtattatgttgtgggtaagcttggcgcttaaagatacccttccccagacccacaaaaccccgcaaagtgcgggaagcctacaacactaggtacacacccttttttttattcgtgctccccccccccccccccccccccccaaacaaacatggaaaaaacccgaaaggatttgattggcttatcaatcccatcaatggagtccactaatagttgctcaagtcacagcaaataaaaactcaatctcattggagcaatccactcaagcaaactagggtttccttaccagcaaggtaaggaaacaattaaaatccagttcagaaaaatctcaagcagaagtcagtgcagcagatgggaggaactgagaagaaaatgtcaggagataaacgatcccttcacggtagttgaaggaaggagaaatctatcctctactcgtcattcccctgatgcccacattgaacatgcaagtacatggtgggttgaacatgctcttctgtgcattctccaatcaaacaaataagctatttaatacaaataatgagttagataaaattccatcattttctctgtaggcttatgtcaaacaaacaagtaaatatgacacaacaggattcaggaactgtgctaccaaaacacaataccagtccagcagttgcccatggtctgatgacaagcacccactgcaaccagcattcttaatgatgataccattttacagtccacatccctcaccgaaatgtagcgctgtttcaaaagaaactgactggacaagctattacactagtacaactggtaactgtaaaaatcaggtccatgacagctcagtggctcagtgctatagatctaaaagagtcagagcttagagtgaccactgtgaacagatcacttcaaagcttaagttcagtttgaatctttagttgaactgacagagacaatgtcatgtcaatataataccaagcttcaacatcatctctgcccacaggtaggttaaggtgtagtaaacaacaatccattaaataaatattgaaatatgaggatcctgaattctatggtacatacatatgaacatcgtacacccgagcattgtgcccccaatcaccaagaaattatactgccattcgtgcccccaaacaagaagggcggacctggcagcggtaaagcctagcgtttgtaaccggaaggtcccaggttcgagccacaacctcttcatattatgtgggtaagcttgg

SEQ ID NO: 36121 - DNA, 390 bp, Zea Mays
cgagaagatgtgcttcgtgcagctcatcatgcccgccgacagctcgcgcctcgccgtcacttacctcggcgagctcggcctactccagttcaaggacagatttcaaggtcacacctatcgcttcctagggacatctgaaatggatccagattctgaacctgattccaaccgaacacgtcatgatgatttcaatttcagcgaagtttttgtgtatcaaatgatacattccattgaatttgtacttggtgtggtttcaaatactgcatcttatcttcgcctttgggctctgaggtttgcctcttgtgtattgtgatgttatgctggttgttgcatgtttttaactttccccgtttcaactcctcacttctgtgtattaattgttggtttgag

SEQ ID NO: 36122 - DNA, 317 bp, Zea Mays
ctctgtcgccgctccctgctacctcggcgcccctggtcttctcgcccggatctgcgtacatccagtctcgagtcgtgatctctctcccggccccgctcgcgcgtgtcacgctctgcgctatgtttttttgtcagagaaaagctgtaggagaaatccccacaacacgaaaaatattttattacgataagagagaaacaatgtacaaaccgagcattacactggacaagaatttagaggagaaacataagaaagatggggagggagtgagtgggtttataaagagacaagccactgagaaacagacgaattgagatccg

SEQ ID NO: 36123 - DNA, 860 bp, Zea Mays
cacgaggacaaaggcttggagatgatccaaggctaatctttctcctttgtgtgttaactacctgggtagataagtagcagcaggagtaagctgtaagatactgtcacgcttgcatagtgtgcaacccgccctgatgtgatgagatgacatagcaagtcgttgaaagaagaaaccagctcacctatacaggactccgactcgctgcgcgaccaagatgccttaacgtctcctcctctccgttgcttgcccggcccttcatctcatgctccgacggagttgtgggagtgggatgccatcctctgtaatcaagtttaagctgtaagcagtgcaggaaagcagtcaggccagtcaaggctgccgcggcgaccagagctgcgagatgaggaacaatcttttatgagattcaacgcctgctgatgttaccgttgggctcggacgtcgatcgctgatcccggataatgatgatcgccccgtgttgtccacttgatcagcgatgctttgttttcagtacgggaaaagcgtagacgaagcacgtggcaaccgtatgatcgagaccaaagtggaacggcaattgcacaaaaggctccgacgacgctctcgtcgcctccggccacgtggaatgtctagcaagacgttcagatgactggtctgttgctgctccgacaaggggagctgtggatcgaaactggagcaaattgatttggttgcatcgatcgtgaataatcgctatacgaagaaacctgggacccggtctgtttactgatctgaatatttgtatttgtatacaacttgtccgcctccaagactgcttttgcaactaaatgaagatctgatacaaagttttttttatagaaaaaact

SEQ ID NO: 36124 - DNA, 1414 bp, Zea Mays
ctcgtcttgcagctgcgacagctgggactccagctccgatagcttcgtcgtcggtggcctccttttctgatgatttcattgcacacaaggacaaattaatgccgacaagatcagtgatggtcatattagtactgtactcctcctcaagctccgtttgaataaacgcgggtgatttgatttatacaggagcattctttttccagaaaaagacgctgctgagcttaaccagtgcaggggtcatgagaaatgctgttgttatgttcactttctagttcatctccagtatccaaaaaaaacatataacatatagcactcctagttctaaattatataagatattttaacttttgtacatgcattgattttattatatatttagttatagtgtatttctaaatacataattaaagttatatatctaaaaaatactaaaaacagtcttatgatttaggatgtatttaaatatcggcaataacaaatgccatggctgattacttttctgtacgagaaaatgactagcatgatgggatgttataagtttataacagaactatcagagtgtttaaagcgcaaccgccaaatgaaccttcccattttgagggtgtttttcaagaccacgatgagtgccgccgatagagagaataaaccaacggtgtcaattagggtccctggtcccggtcccaaaccaagagtttgcgtcagttctatcagatgcgcctgttttgccgttggttgcagcgacactggtggtagcagaactggtaccgctatcttaatccaccagtttggtagcaacgcgaggaccagcttcaattatttcagagatttgctagccattcaatatctctggaccatttgatttgggcacttagccagcacctaatacttgtctgtttcagtctaactgacagtttgctccatcatgagagacggagagcgagacccaaccgctcccaagtcctaaccgagcgctaataacatgaaccatgagaaacgatatacaaaatcgacgcatttaagagcagttaacagtcttcaaaggcttgtgatgaacttaattgaacggtgctcctgatatgataacaccgacgtactaccagacagaaacactaatggagtgtttgtttaaggaatgatgtagtccatcatcttctcactcctcacttttttgtttggtttgtggaatggagtgagttaatctatcaccacttcattcatcatacttagttgtttagtactaatatgtggaatggagtcatccaccaaatttgagaaatagactcatgatgcaccacttcattttggatagagtgattcaatcaaaccaaacacctcataaagtttgtcttatatatatcttctgcctggcgaaattactgtatgtaacagcattccgaaatggagcaacagcagg

SEQ ID NO: 36125 - DNA, 180 bp, Zea Mays
taggaatcaatcgaacttccgtttctttaacgaaaagaagtatcaaattcgaattcttgatgactaaacactttcggatgcaaccattggtaacctaccacaaccctgtcgcactcagacgaattgttcctccatgtaccaccttgtataatacagctatgagcacgtttcatttaattt

SEQ ID NO: 36126 - DNA, 979 bp, Zea Mays
actttccgagaatcacttctatcagctggtgccggaatcacactggttgattcagtgtggcagctcggtacgctcagcatcaacatggactaaagcgtgtgatgataatagattttgatgttcaccatggcaatgggacgtcagattcattttatgatgatccagatatcttcttcttgtcaactcaccagcttggaagctaccctggtactggtaagatcaatgaagtcggacagggtgatggtgaaggcacgacactcaaccttcctctgcccggtggcgcaggtgactacgcaatgagatgtgcatttgatgaggtcattgctccatcggcccatcgattcaagcctgatataatccttgtatcagctggatacgacgcacacgcgctggaccctctggctggccttcagttcacaacaggcacgttctacatgctggcatccagcatcaagcaggtgaccaaggaactctgtggtggccgctgtgtcttcttcctggaaggcgggtacaacctgcagtcgctctccagctccgttgccgacacgttccgtgcattccttgatgagcccagcctcgcagcacagtttgatgatccagcgatacttttcgaagagccgactcggaagatcaaggaagcaatcgagaaggccaagagcatccactcactctaggctgtcagctaattttccccccaatccccagaaatcccggaggggtagccctaaattgggaaaaggtgctgtcagcagtgtgcactgcagaactgcaagatcttgtggcaattggcattttgcaggtaggtagtgcatagtttgaacttggaaggcatggtcattttaatttagccaattctcaccagaaaatggaattaccgttctctcaatactagctgtatatattgaccaaaagttatgtgctacattattaattttaaaactatgctaaagattctaatagctaataagcaggtcaaaag

SEQ ID NO: 36127 - DNA, 1086 bp, Zea Mays
tttagataccaccatttgaagtcgtttcatttttttctgtagactttccgagaatcacttctatcagctggtgccggaatcacactggttgattcagtggccaccaggacatcatgctgttcctcaaggtcccatgggtttttgtgtctttgggaacattgcagtggcagctcggtacgctcagcatcaacatggactaaagcgtgtgatgataatagattttgatgttcaccatggcaatgggacgtcagattcattttatgatgatccagatatcttcttcttgtcaactcaccagcttggaagctaccctggtactggtaagatcaatgaagtcggacagggtgatggtgaaggcacgacactcaaccttcctctgcccggtggcgcaggtgactacgcaatgagatgtgcatttgatgaggtcattgctccatcggcccatcgattcaagcctgatataatccttgtatcagctggatacgacgcacacgcgctggaccctctggctggccttcagttcacaacaggcacgttctacatgctggcatccagcatcaagcaggtgaccaaggaactctgtggtggccgctgtgtcttcttcctggaaggcgggtacaacctgcagtcgctctccagctccgttgccgacacgttccgtgcattccttgatgagcccagcctcgcagcacagtttgatgatccagcgatacttttcgaagagccgactcggaagatcaaggaagcaatcgagaaggccaagagcatccactcactctaggctgtcagctaattttccccccaatccccagaaatcccggaggggtagccctaaattgggaaaaggtgctgtcagcagtgtgcactgcagaactgcaagatcttgtggcaattggcattttgcaggtaggtagtgcatagtttgaacttggaaggcatggtcattttaatttagccaattctcaccagaaaatggaattaccgttctctcaatactagctgtatatattgaccaaaagttatgtgctacattattaattttaaaactatgctaaagattctaatagctaataagcaggtcaaaag

SEQ ID NO: 36128 - DNA, 3934 bp, Zea Mays
cctagctctagcggtaacctcataagcagcataatctgtactagtcaggttcatcaaccttctaagcactctactgaaacctttcattttagctctagggtccaagaagaagtaagagtctcaacaagcttagcctttttgtcagtgaagtattcaacaggcttagactcttactacaacaggaatacaagattagggttagggttacataatcaaagaggttagggttagggttaccaaataagccggagcaccgggatctccgcaggcggcgtcgaccggtcgaccgtcgacgaacaaccggtccgaccacccgattcctcgacgagtttgaatccggagcaccgtagcagccgacggcgtatgagctcgagggagacgacgagatagacgaggatgatgttgtgccgtgtgccagtgccggccagtggccaccagttggtgtagatgacaccggagggggagaagaagataggagagtgaggagagggagaccagagctagggttacggataggagttacccggttccacaaacacgcaaatccgttgaggtcttgaggatggggcgggggagaggatctccgacgatagatctaagcggaggcgaagacgagagagaggagaggtagaccggagcggagagaggacagatctgagcggaggcggagggaccgagggaggagttcgcggcttcgcgatgcgagaggaagagttgtccacggacaaacgaggcgtttagggtttagtttagcgcacgggtgcgactttgggatatgggggcatatggcgcttggctggctgggcctagcacctgcgccgtgccactgccgtgctagcccagttaaccgtgttgggactgggtcgatactatgggccgagctggtggcccagacacgcccaggcacgacactgtgtacggaccgggctcgacactacatggaccgggccgagccgtgctttttagtggcgtgcacggttcggcccaccgtgttagtgccatataactagggatgaaaacggtttcggaatttttcggtattccagaaactgatttcgaaatttttcgatcggattcatcagtaacagtatttttcgaaaacagaatcggttttcagaattttctatcagaatcggtgtggtgttttaccgattgtttccttcggttatcggtttttgtcggaaattaccggatttgtgtctcggaattttccgaaattgtgtctcggatttttttttggaaatttccagcatgtgatttttcgtatcgcctgtacgtctttagacaaggattacttattttgtattttttggacgccttaatctttttttgggatagatggtgttggaaggcaattcagattaacgatttggtcttttctacacactaggttttagggttttcctgtgaggttgtgaaaaactctttatgtgaggaaaaaaatattttataagtaagtatgccatgtcagctagatcgagtggatattgtgaattgtgaactttgagtctgtgaacttgtgatctttatgaacttgttatattgtgaacttgtgatctttgtaaactttttatattataaatttgtgatccttgtgaacttgttatattgtgaaaacttgttatatcatgaattgtgaacttgtggtctttgtgatcttttgtcaactttgttgaattatgaagtttaatatgtttaccaatcgtattttagatttcgactgttatcggtgtattttctgcaataaacttttgtttccgatgtttctgaaatactgatatcgtttccgtttttggagttaccgttttcgattttattttcgataaaaaatataaaaacggtaacggttttagtgtttaccgaccgtttccatccctacatatgaccatctataccaccaatggcaaaaatctcctatccatctctcattccctcccacgcggccacacgccgacacccaatgccgcccactacagccccggccgctgccgcggcgctcccatcaccttctcaccgcaggctccccgccgcgaaatccgtctggctgaaccccaacctcccctcttctcaccccctccaccagcgccacaagtccgccgccgagctccaacaacggcagcacgatgaccgtacgatcgacgtcccggccctcgtcaccgcgctctcggccgcgcggacggctcccgacctggcagccgtgctcgccacgcaccgacccgtctccgcgcgcctcctcggtgcgctcctctcccgcctccccgacccccgccgcggcgtcgcgctgctcgacctcctcgcgccggacctccccgcccccacgctcctcatcccatataacctactgctccgctctgcttgccgcgctggcgagctccgcctcgcctccggcctcctcctcgagatgcgggagaggggcgtgacccccgacgcgttctcgtactccaccctcctcgccgcgctcacccgtgcgggccacctcgaccacgcgctcaccttcctgccgctcatggaggatgacgccgtggctccggacctgatcctcttctccaacctcattcacctcgccctccgcggtggcgacgcgcccaaggcgctggcgctgttctcccggctgcgtgccgcggggatcaggcccgacctcaaggcatacaacgcggccgtcgccgcctactgcaagtccgaccttctccgcgacgccaagcggatgctgctccacgacatgccggccgacggcgtcgcgcccgacgcggagacatactcccccatcctcgcggcgctggcgcgaagggggcggcacctcgcggccgtgtcgctgttctcgcacatgcgcgccgtggcgcgcgtcaagccggacatctcggtgttcaacatcatcctcaacgcgtacgggcagctggacctcgcgcgcgaggcggaccggctgttctggtccatgcgccgggcaggcgtgccgccaagcgtggtgacctacaacaccatgctccgtgtgtacggcgatgcagggctgttcggcgaggcagttcacctgtttgacctcatgcgcagcacttcagatggcaacggtggcgctggtagcagcgtcaaaccgaatgtggtgacgtacaacaccatgattaccatctacggcaagtcgctggaggacgagaaagctggaaggttggtgcaggagatgcaggccattggcgtccagcctgatgccatcacttactccactatcttgtccatatgggtgaaggccgggaagctcgaccgcgctgccaggctgtttgagaagctgagggaagctggcacggagatcgacccagtgctgtaccagacaatggtagtggcctatgagcgtgccgggcttgtctcacaggccaagcgtttgttgcgcgatctgaaagacccggagggcatccccaaggagacagccattaaaatcttggccagtgccggtcgtctggaagaggccgcatggctgttccgtcgtgcggtcaacaccggtgagatcaaggactcatcggtgcacagagcaatgatggacttgtacgcgaagaaccggaggcaccgtaatgtgatcgaggtgttcgatgaaatgaggaagttgggccagttgccagactcagagatcattgccaccgcgatgaatgcttatggcaagctgaaggagttcgacaaggccgcggcgctgtaccaggcaatgagggaggcaggttgtgtgttctcagaccgggtgcactttcagatgattagcctccttggcgctcagaaggacttcaaggcgctcgaagtgctggttggcgagctaagccatgacccaagcatcgacaagagggagctttatcttgtggctgcaggcgtttatgagagagcgtacaagtttgataaggcatcccagattataagccagataagaagctccaacgaattcgatgtccagaaactcagataa

SEQ ID NO: 36129 - DNA, 1955 bp, Zea Mays
gcccatcttatatttatcacggtacatatgatttcacggaaaatggtgagctcaatggcagctgtgacaaaaatctgaaaagcagcattcataaagaatatccgaaaggtcataggatacagccattccctgaaagtggtgatcttgatgaagctgatgagtttcgacatgttggatcattaaatacagatgttcaacattctactgctcttaaagctgaggaagatgccgagacaaatattgatcttgctctctctgattttcaccgagaatatgaggtatttgaattgagaattatccaccgcaagaacaggactggatttgaagaaaacaaagatttccccatcgtcttaaattcggttgttgctggaaggtattatatcactgaatatctaggctcagctgcattcagcaaggttgtgcaagcacatgatcttcgtacaggaatggatgtttgccttaaaataattaaaaatgataaggacttcttcgaccagagcttggatgagataaaacttctgaagttcgtgaacaaatatgatccactagatgaacaccatgtgttgcgcctctatgactacttttaccatcaggaacacctttttattgtcactgaactactgcgagcaaatctatacgagtttcagaaatataatcaagaatctggtggtgaggtgtattttactttgcctaggatacaggttatagctcggcaatgtttggaggccttggtttacttgcaccgtctgaggatcattcattgtgacctaaagccagaaaatattcttatcaagagctacagtagatgtgaaattaaagtcattgatctgggaagtagttgcttcttgacagacaacttatgtctctatgtccaatcacgctcttatcgagctcctgaggtcattctaggcctaccttatgatcagaggattgatatttggtctcttggttgcatcctttctgaattgtatactggtgaagtaagtatgttttatttaattgaaatgcttggtggcttgtaggattgaaactggtctttagtattattttgacaaaactttgaggcctcttttcttgtatgaatgcaataccaacgtataactccaaccagaattagaaattaatcttttttattaatgttgtaagcacatgcgagctggagagttgtagaatgggtgttttgggtgcttcttttccttggaactatatcttctttcctttacatataacaggtattatttcctaacgagcctgtgtccgtaatgcttgctcaaatgattgggataaccggcccaattgacatggaaatgctagaattgggacaggagacacagaagtatttcactgatgattatgacctttttaccgagaatgaggagacagatcagctagagtatttgatcccggagaaatcctccttgcgacaacacatacaatgtcctgattcagagtttgtcgattttctgtcttatctactgcaaattaaccccaggaaaagacctacagctgacgaagcactacagcatccatggctttctttctcgtactaatgagaagccatccggtgctttcttcacatataaagccctccttttctgggtgcaggattcttctttttttgtgtcttcagggtaattcttgcgtttcctttttctgggtccaggattctttttttttgtcttcagggtaattcttggtgtgaagtgtgaacccctgccctggagtgattcatgagtgtatgtaaatatcagaaaattttccgcggagtaactgtacagttgtaagcccactcttgtactcctgatcatgaatgataacatgggaatttcaaaatagtgtccaacgtttcatattgttggttctattgttgatgtgtccggtatcatttatagtatcacttatggtgtgtctggttagatgtacaaggaggatggaagggagcagccagttcttat

SEQ ID NO: 36130 - DNA, 2314 bp, Zea Mays
ctgagttgccttgtgaaagccaaatctctgttgcgattttgttgatttgtagtttaatgaatggagaggaaaatgttatactagacgctagtaacatttttttttgtaatatttacagttcctcaatacagttgccattttatgattattatgtttctcatggattatccctggaaattctaaggaggcagagtttgtctatgctggtgaagtggtaaatgatgttctgtgttttagaacctaacttcggttaaacaattggtatgtactatcagggccttaaaaacacgcatttcaaatatgatggccttgtttttaacatatttacaatgtagccaggtccaactgactatttggccaagcgtattaaaataatgttagcccatcttatatttatcacggtacatatgatttcacggaaaatggtgagctcaatggcagctgtgacaaaaatctgaaaagcagcattcataaagaatatccgaaaggtcataggatacagccattccctgaaagtggtgatcttgatgaagctgatgagtttcgacatgttggatcattaaatacagatgttcaacattctactgctcttaaagctgaggaagatgccgagacaaatattgatcttgctctctctgattttcaccgagaatatgaggactggatttgaagaaaacaaagatttccccatcgtcttaaattcggttgttgctggaaggtattatatcactgaatatctaggctcagctgcattcagcaaggttgtgcaagcacatgatcttcgtacaggaatggatgtttgccttaaaataattaaaaatgataaggacttcttcgaccagagcttggatgagataaaacttctgaagttcgtgaacaaatatgatccactagatgaacaccatgtgttgcgcctctatgactacttttaccatcaggtatatgcctcgtaagagagacttctggttaagtgtactccctttgattcaagttgtttggatcctaacttcctaggaaggcatctgaaaggatataatccaggtgactaggtcttgagcaatattgcaattatcttaaaaaggatcaactgtagtattctaccagtgtacttgaattgcttcatgcatgtacggtggcagattttagttggatttttcaattctcatggccttgcatggtgctgacagcaagcaaatattgacaggaacacctttttattgtcactgaactactgcgagcaaatctatacgagtttcagaaatataatcaagaatctggtggtgaggtgtattttactttgcctaggatacaggttatagctcggcaatgtttggaggccttggtttacttgcaccgtctgaggatcattcattgtgacctaaagccagaaaatattcttatcaagagctacagtagatgtgaaattaaagtcattgatctgggaagtagttgcttcttgacagacaacttatgtctctatgtccaatcacgctcttatcgagctcctgaggtcattctaggcctaccttatgatcagaggattgatatttggtctcttggttgcatcctttctgaattgtatactggtgaagtattatttcctaacgagcctgtgtccgtaatgcttgctcaaatgattgggataaccggcccaattgacatggaaatgctagaattgggacaggagacacagaagtatttcactgatgattatgacctttttaccgagaatgaggagacagatcagctagagtatttgatcccggagaaatcctccttgcgacaacacatacaatgtcctgattcagagtttgtcgattttctgtcttatctactgcaaattaaccccaggaaaagacctacagctgacgaagcactacagcatccatggctttctttctcgtactaatgagaagccatccggtgctttcttcacatataaagccctccttttctgggtgcaggattcttctttttttgtgtcttcagggtaattcttgcgtttcctttttctgggtccaggattctttttttttgtcttcagggtaattcttggtgtgaagtgtgaacccctgccctggagtgattcatgagtgtatgtaaatatcagaaaattttccgcggagtaactgtacagttgtaagcccactcttgtactcctgatcatgaatgataacatgggaatttcaaaatagtgtccaacgtttcatattgttggttctattgttgatgtgtccggtatcatttatagtatcacttatggtgtgtctggttagatgtacaaggaggatggaagggagcagccagttcttat

SEQ ID NO: 36131 - DNA, 2937 bp, Zea Mays
gtgcgcctctgcaatcctctgtctctctttcctctgacttcgctgcctcctcgtccgtctcgcccggtcctctcactcgaagactctcgcttcgcttccaagttcaccccaatggcgacgcaaccgcttacatcaccgcgcgcttgagcgagagaccgatagcccccaccaaccgcgcgccttcgcggagcatggcggcgccggggctggacaaggtcatggcgttcctcaccgaccacggcttcgccggcgcggcctccgcgcttcgtgacgacgtccttgaacgcaccgccgccggggacgaaagccacgacgccgcattagatccccacctcccgccgctccggatgcccgcctccgccggcggtgccggtgccggtgccggtgccggcgctggcgctggcacgccgacgcccgcgagccccggttccagctccggttcggcgtcctcatcagctttcgtaagcttgcgctccacaccctcagggctgttgaatccgtatggactatggtcgccgcggcattcgcagtcggacgcgtcttcatcggagatggagtttggtacagcgcgccagtacgacaccaccgacctcttcttccaagaggattggctctacgacgatcacctcttccctagcaagctggacgatgaggatgacgaaggcaaagaggaggacaaatttgtactggatgctcacgatggttcggagcaggttgaaataggcaagcttggtgcaggccataaccaccgtcacgaacacatcggtggtgaccgatgcgagggttgtgctgaggtgtacatatgctcatcgccactctgtggttgttgtggagggggactcaagaatgatgggcttgatgtggccaggagctcaagctccactgtgtatgggagatacaagatcatggatgaccagacagagatattggatgattgtgcgcaggatgcgtttcagttgaagcagagtagagatattatgtttgaatgcggtatgacgagggatcctggacgaggatatgatgattcagggctgagtgttgtggagaaggagcttcaaatactcagttcatttgatactgttgtgaatcacggtacatatgatttcacggaaaatggtgagctcaatggcagctgtgacaaaaatctgaaaagcagcattcataaagaatatccgaaaggtcataggatacagccattccctgaaagtggtgatcttgatgaagctgatgagtttcgacatgttggatcattaaatacagatgttcaacattctactgctcttaaagctgaggaagatgccgagacaaatattgatcttgctctctctgattttcaccgagaatatgaggtatttgaattgagaattatccaccgcaagaacaggactggatttgaagaaaacaaagatttccccatcgtcttaaattcggttgttgctggaaggtattatatcactgaatatctaggctcagctgcattcagcaaggttgtgcaagcacatgatcttcgtacaggaatggatgtttgccttaaaataattaaaaatgataaggacttcttcgaccagagcttggatgagataaaacttctgaagttcgtgaacaaatatgatccactagatgaacaccatgtgttgcgcctctatgactacttttaccatcaggtgactaggtcttgagcaatattgcaattatcttaaaaaggatcaactgtagtattctaccagtgtacttgaattgcttcatgcatgtacggtggcagattttagttggatttttcaattctcatggccttgcatggtgctgacagcaagcaaatattgacaggaacacctttttattgtcactgaactactgcgagcaaatctatacgagtttcagaaatataatcaagaatctggtggtgaggtgtattttactttgcctaggatacaggttatagctcggcaatgtttggaggccttggtttacttgcaccgtctgaggatcattcattgtgacctaaagccagaaaatattcttatcaagagctacagtagatgtgaaattaaagtcattgatctgggaagtagttgcttcttgacagacaacttatgtctctatgtccaatcacgctcttatcgagctcctgaggtcattctaggcctaccttatgatcagaggattgatatttggtctcttggttgcatcctttctgaattgtatactggtgaagtattatttcctaacgagcctgtgtccgtaatgcttgctcaaatgattgggataaccggcccaattgacatggaaatgctagaattgggacaggagacacagaagtatttcactgatgattatgacctttttaccgagaatgaggagacagatcagctagagtatttgatcccggagaaatcctccttgcgacaacacatacaatgtcctgattcagagtttgtcgattttctgtcttatctactgcaaattaaccccaggaaaagacctacagctgacgaagcactacagcatccatggctttctttctcgtactaatgagaagccatccggtgctttcttcacatataaagccctccttttctgggtgcaggattcttctttttttgtgtcttcagggtaattcttgcgtttcctttttctgggtccaggattctttttttttgtcttcagggtaattcttggtgtgaagtgtgaacccctgccctggagtgattcatgagtgtatgtaaatatcagaaaattttccgcggagtaactgtacagttgtaagcccactcttgtactcctgatcatgaatgataacatgggaatttcaaaatagtgtccaacgtttcatattgttggttctattgttgatgtgtccggtatcatttatagtatcacttatggtgtgtctggttagatgtacaaggaggatggaagggagcagccagttcttat

SEQ ID NO: 36132 - DNA, 3137 bp, Zea Mays
gtgcgcctctgcaatcctctgtctctctttcctctgacttcgctgcctcctcgtccgtctcgcccggtcctctcactcgaagactctcgcttcgcttccaagttcaccccaatggcgacgcaaccgcttacatcaccgcgcgcttgagcgagagaccgatagcccccaccaaccgcgcgccttcgcggagcatggcggcgccggggctggacaaggtcatggcgttcctcaccgaccacggcttcgccggcgcggcctccgcgcttcgtgacgacgtccttgaacgcaccgccgccggggacgaaagccacgacgccgcattagatccccacctcccgccgctccggatgcccgcctccgccggcggtgccggtgccggtgccggtgccggcgctggcgctggcacgccgacgcccgcgagccccggttccagctccggttcggcgtcctcatcagctttcgtaagcttgcgctccacaccctcagggctgttgaatccgtatggactatggtcgccgcggcattcgcagtcggacgcgtcttcatcggagatggagtttggtacagcgcgccagtacgacaccaccgacctcttcttccaagaggattggctctacgacgatcacctcttccctagcaagctggacgatgaggatgacgaaggcaaagaggaggacaaatttgtactggatgctcacgatggttcggagcaggttgaaataggcaagcttggtgcaggccataaccaccgtcacgaacacatcggtggtgaccgatgcgagggttgtgctgaggtgtacatatgctcatcgccactctgtggttgttgtggagggggactcaagaatgatgggcttgatgtggccaggagctcaagctccactgtgtatgggagatacaagatcatggatgaccagacagagatattggatgattgtgcgcaggatgcgtttcagttgaagcagagtagagatattatgtttgaatgcggtatgacgagggatcctggacgaggatatgatgattcagggctgagtgttgtggagaaggagcttcaaatactcagttcatttgatactgttgtgaatcacggtacatatgatttcacggaaaatggtgagctcaatggcagctgtgacaaaaatctgaaaagcagcattcataaagaatatccgaaaggtcataggatacagccattccctgaaagtggtgatcttgatgaagctgatgagtttcgacatgttggatcattaaatacagatgttcaacattctactgctcttaaagctgaggaagatgccgagacaaatattgatcttgctctctctgattttcaccgagaatatgaggcatgtaatgcaggactggatttgaagaaaacaaagatttccccatcgtcttaaattcggttgttgctggaaggtattatatcactgaatatctaggctcagctgcattcagcaaggttgtgcaagcacatgatcttcgtacaggaatggatgtttgccttaaaataattaaaaatgataaggacttcttcgaccagagcttggatgagataaaacttctgaagttcgtgaacaaatatgatccactagatgaacaccatgtgttgcgcctctatgactacttttaccatcaggaacacctttttattgtcactgaactactgcgagcaaatctatacgagtttcagaaatataatcaagaatctggtggtgaggtgtattttactttgcctaggatacaggtatgttctgtgtccttcactgagatgttctccctgggaccatgactgctacttataatgatatcatacttgtatataatgagcatttgcaattcaccctgtagtcagcccctagacaaaagttttctaacctgctacacatttaaacagtcgtttaaccattgagctgtaaatgagcaaacttatttgatatcctgaaatggtagccttcgcaaaattgattcagaaagttacaaagttctagcaatttgaaactttgcctttgttgtaggttatagctcggcaatgtttggaggccttggtttacttgcaccgtctgaggatcattcattgtgacctaaagccagaaaatattcttatcaagagctacagtagatgtgaaattaaagtcattgatctgggaagtagttgcttcttgacagacaacttatgtctctatgtccaatcacgctcttatcgagctcctgaggtcattctaggcctaccttatgatcagaggattgatatttggtctcttggttgcatcctttctgaattgtatactggtgaagtattatttcctaacgagcctgtgtccgtaatgcttgctcaaatgattgggataaccggcccaattgacatggaaatgctagaattgggacaggagacacagaagtatttcactgatgattatgacctttttaccgagaatgaggagacagatcagctagagtatttgatcccggagaaatcctccttgcgacaacacatacaatgtcctgattcagagtttgtcgattttctgtcttatctactgcaaattaaccccaggaaaagacctacagctgacgaagcactacagcatccatggctttctttctcgtactaatgagaagccatccggtgctttcttcacatataaaggttactttgtctcctgacatggagccctcataaacttattgaaaaatatcgattttcttggtgtttctcttaattaacgctaatcattactcttttccttctgttgtagaatagccctccttttctgggtgcaggattcttctttttttgtgtcttcagggtaattcttgcgtttcctttttctgggtccaggattctttttttttgtcttcagggtaattcttggtgtgaagtgtgaacccctgccctggagtgattcatgagtgtatgtaaatatcagaaaattttccgcggagtaactgtacagttgtaagcccactcttgtactcctgatcatgaatgataacatgggaatttcaaaatagtgtccaacgtttcatattgttggttctattgttgatgtgtccggtatcatttatagtatcacttatggtgtgtctggttagatgtacaaggaggatggaagggagcagccagttcttat

SEQ ID NO: 36133 - DNA, 2881 bp, Zea Mays
gtgcgcctctgcaatcctctgtctctctttcctctgacttcgctgcctcctcgtccgtctcgcccggtcctctcactcgaagactctcgcttcgcttccaagttcaccccaatggcgacgcaaccgcttacatcaccgcgcgcttgagcgagagaccgatagcccccaccaaccgcgcgccttcgcggagcatggcggcgccggggctggacaaggtcatggcgttcctcaccgaccacggcttcgccggcgcggcctccgcgcttcgtgacgacgtccttgaacgcaccgccgccggggacgaaagccacgacgccgcattagatccccacctcccgccgctccggatgcccgcctccgccggcggtgccggtgccggtgccggtgccggcgctggcgctggcacgccgacgcccgcgagccccggttccagctccggttcggcgtcctcatcagctttcgtaagcttgcgctccacaccctcagggctgttgaatccgtatggactatggtcgccgcggcattcgcagtcggacgcgtcttcatcggagatggagtttggtacagcgcgccagtacgacaccaccgacctcttcttccaagaggattggctctacgacgatcacctcttccctagcaagctggacgatgaggatgacgaaggcaaagaggaggacaaatttgtactggatgctcacgatggttcggagcaggttgaaataggcaagcttggtgcaggccataaccaccgtcacgaacacatcggtggtgaccgatgcgagggttgtgctgaggtgtacatatgctcatcgccactctgtggttgttgtggagggggactcaagaatgatgggcttgatgtggccaggagctcaagctccactgtgtatgggagatacaagatcatggatgaccagacagagatattggatgattgtgcgcaggatgcgtttcagttgaagcagagtagagatattatgtttgaatgcggtatgacgagggatcctggacgaggatatgatgattcagggctgagtgttgtggagaaggagcttcaaatactcagttcatttgatactgttgtgaatcacggtacatatgatttcacggaaaatggtgagctcaatggcagctgtgacaaaaatctgaaaagcagcattcataaagaatatccgaaaggtcataggatacagccattccctgaaagtggtgatcttgatgaagctgatgagtttcgacatgttggatcattaaatacagatgttcaacattctactgctcttaaagctgaggaagatgccgagacaaatattgatcttgctctctctgattttcaccgagaatatgaggtatttgaattgagaattatccaccgcaagaacaggactggatttgaagaaaacaaagatttccccatcgtcttaaattcggttgttgctggaaggtattatatcactgaatatctaggctcagctgcattcagcaaggttgtgcaagcacatgatcttcgtacaggaatggatgtttgccttaaaataattaaaaatgataaggacttcttcgaccagagcttggatgagataaaacttctgaagttcgtgaacaaatatgatccactagatgaacaccatgtgttgcgcctctatgactacttttaccatcaggaacacctttttattgtcactgaactactgcgagcaaatctatacgagtttcagaaatataatcaagaatctggtggtgaggtgtattttactttgcctaggatacagctcggcaatgtttggaggccttggtttacttgcaccgtctgaggatcattcattgtgacctaaagccagaaaatattcttatcaagagctacagtagatgtgaaattaaagtcattgatctgggaagtagttgcttcttgacagacaacttatgtctctatgtccaatcacgctcttatcgagctcctgaggtcattctaggcctaccttatgatcagaggattgatatttggtctcttggttgcatcctttctgaattgtatactggtgaagtattatttcctaacgagcctgtgtccgtaatgcttgctcaaatgattgggataaccggcccaattgacatggaaatgctagaattgggacaggagacacagaagtatttcactgatgattatgacctttttaccgagaatgaggagacagatcagctagagtatttgatcccggagaaatcctccttgcgacaacacatacaatgtcctgattcagagtttgtcgattttctgtcttatctactgcaaattaaccccaggaaaagacctacagctgacgaagcactacagcatccatggctttctttctcgtactaatgagaagccatccggtgctttcttcacatataaaggttactttgtctcctgacatggagccctcataaacttattgaaaaatatcgattttcttggtgtttctcttaattaacgctaatcattactcttttccttctgttgtagaatagccctccttttctgggtgcaggattcttctttttttgtgtcttcagggtaattcttgcgtttcctttttctgggtccaggattctttttttttgtcttcagggtaattcttggtgtgaagtgtgaacccctgccctggagtgattcatgagtgtatgtaaatatcagaaaattttccgcggagtaactgtacagttgtaagcccactcttgtactcctgatcatgaatgataacatgggaatttcaaaatagtgtccaacgtttcatattgttggttctattgttgatgtgtccggtatcatttatagtatcacttatggtgtgtctggttagatgtacaaggaggatggaagggagcagccagttcttat

SEQ ID NO: 36134 - DNA, 2827 bp, Zea Mays
ctgaaacgcaactgcggcaacctttttatgcggacgcgcgacagctgcgatccgtgcgcctctgcaatcctctgtctctctttcctctgacttcgctgcctcctcgtccgtctcgcccggtcctctcactcgaagactctcgcttcgcttccaagttcaccccaatggcgacgcaaccgcttacatcaccgcgcgcttgagcgagagaccgatagcccccaccaaccgcgcgccttcgcggagcatggcggcgccggggctggacaaggtcatggcgttcctcaccgaccacggcttcgccggcgcggcctccgcgcttcgtgacgacgtccttgaacgcaccgccgccggggacgaaagccacgacgccgcattagatccccacctcccgccgctccggatgcccgcctccgccggcggtgccggtgccggtgccggtgccggcgctggcgctggcacgccgacgcccgcgagccccggttccagctccggttcggcgtcctcatcagctttcgtaagcttgcgctccacaccctcagggctgttgaatccgtatggactatggtcgccgcggcattcgcagtcggacgcgtcttcatcggagatggagtttggtacagcgcgccagtacgacaccaccgacctcttcttccaagaggattggctctacgacgatcacctcttccctagcaagctggacgatgaggatgacgaaggcaaagaggaggacaaatttgtactggatgctcacgatggttcggagcaggttgaaataggcaagcttggtgcaggccataaccaccgtcacgaacacatcggtggtgaccgatgcgagggttgtgctgaggtgtacatatgctcatcgccactctgtggttgttgtggagggggactcaagaatgatgggcttgatgtggccaggagctcaagctccactgtgtatgggagatacaagatcatggatgaccagacagagatattggatgattgtgcgcaggatgcgtttcagttgaagcagagtagagatattatgtttgaatgcggtatgacgagggatcctggacgaggatatgatgattcagggctgagtgttgtggagaaggagcttcaaatactcagttcatttgatactgttgtgaatcacggtacatatgatttcacggaaaatggtgagctcaatggcagctgtgacaaaaatctgaaaagcagcattcataaagaatatccgaaaggtcataggatacagccattccctgaaagtggtgatcttgatgaagctgatgagtttcgacatgttggatcattaaatacagatgttcaacattctactgctcttaaagctgaggaagatgccgagacaaatattgatcttgctctctctgattttcaccgagaatatgaggtatttgaattgagaattatccaccgcaagaacaggactggatttgaagaaaacaaagatttccccatcgtcttaaattcggttgttgctggaaggtattatatcactgaatatctaggctcagctgcattcagcaaggttgtgcaagcacatgatcttcgtacaggaatggatgtttgccttaaaataattaaaaatgataaggacttcttcgaccagagcttggatgagataaaacttctgaagttcgtgaacaaatatgatccactagatgaacaccatgtgttgcgcctctatgactacttttaccatcaggaacacctttttattgtcactgaactactgcgagcaaatctatacgagtttcagaaatataatcaagaatctggtggtgaggtgtattttactttgcctaggatacaggttatagctcggcaatgtttggaggccttggtttacttgcaccgtctgaggatcattcattgtgacctaaagccagaaaatattcttatcaagagctacagtagatgtgaaattaaagtcattgatctgggaagtagttgcttcttgacagacaacttatgtctctatgtccaatcacgctcttatcgagctcctgaggtcattctaggcctaccttatgatcagaggattgatatttggtctcttggttgcatcctttctgaattgtatactggtgaagtattatttcctaacgagcctgtgtccgtaatgcttgctcaaatgattgggataaccggcccaattgacatggaaatgctagaattgggacaggagacacagaagtatttcactgatgattatgacctttttaccgagaatgaggagacagatcagctagagtatttgatcccggagaaatcctccttgcgacaacacatacaatgtcctgattcagagtttgtcgattttctgtcttatctactgcaaattaaccccaggaaaagacctacagctgacgaagcactacagcatccatggctttctttctcgtactaatgagaagccatccggtgctttcttcacatataaagccctccttttctgggtgcaggattcttctttttttgtgtcttcagggtaattcttgcgtttcctttttctgggtccaggattctttttttttgtcttcagggtaattcttggtgtgaagtgtgaacccctgccctggagtgattcatgagtgtatgtaaatatcagaaaattttccgcggagtaactgtacagttgtaagcccactcttgtactcctgatcatgaatgataacatgggaatttcaaaatagtgtccaacgtttcatattgttggttctattgttgatgtgtccggtatcatttatagtatcacttatggtgtgtctggttagatgtacaaggaggatggaagggagcagccagttcttat

SEQ ID NO: 36135 - DNA, 2826 bp, Zea Mays
ctacactcgccaaccgcctcgaaggccgaagggactgaaacgcaactgcggcaacctttttatgcggacgcgcgacagctgcgatccgtgcgcctctgcaatcctctgtctctctttcctctgacttcgctgcctcctcgtccgtctcgcccggtcctctcactcgaagactctcgcttcgcttccaagttcaccccaatggcgacgcaaccgcttacatcaccgcgcgcttgagcgagagaccgatagcccccaccaaccgcgcgccttcgcggagcatggcggcgccggggctggacaaggtcatggcgttcctcaccgaccacggcttcgccggcgcggcctccgcgcttcgtgacgacgtccttgaacgcaccgccgccggggacgaaagccacgacgccgcattagatccccacctcccgccgctccggatgcccgcctccgccggcggtgccggtgccggtgccggtgccggcgctggcgctggcacgccgacgcccgcgagccccggttccagctccggttcggcgtcctcatcagctttcgtaagcttgcgctccacaccctcagggctgttgaatccgtatggactatggtcgccgcggcattcgcagtcggacgcgtcttcatcggagatggagtttggtacagcgcgccagtacgacaccaccgacctcttcttccaagaggattggctctacgacgatcacctcttccctagcaagctggacgatgaggatgacgaaggcaaagaggaggacaaatttgtactggatgctcacgatggttcggagcaggttgaaataggcaagcttggtgcaggccataaccaccgtcacgaacacatcggtggtgaccgatgcgagggttgtgctgaggtgtacatatgctcatcgccactctgtggttgttgtggagggggactcaagaatgatgggcttgatgtggccaggagctcaagctccactgtgtatgggagatacaagatcatggatgaccagacagagatattggatgattgtgcgcaggatgcgtttcagttgaagcagagtagagatattatgtttgaatgcggtatgacgagggatcctggacgaggatatgatgattcagggctgagtgttgtggagaaggagcttcaaatactcagttcatttgatactgttgtgaatcacggtacatatgatttcacggaaaatggtgagctcaatggcagctgtgacaaaaatctgaaaagcagcattcataaagaatatccgaaaggtcataggatacagccattccctgaaagtggtgatcttgatgaagctgatgagtttcgacatgttggatcattaaatacagatgttcaacattctactgctcttaaagctgaggaagatgccgagacaaatattgatcttgctctctctgattttcaccgagaatatgaggactggatttgaagaaaacaaagatttccccatcgtcttaaattcggttgttgctggaaggtattatatcactgaatatctaggctcagctgcattcagcaaggttgtgcaagcacatgatcttcgtacaggaatggatgtttgccttaaaataattaaaaatgataaggacttcttcgaccagagcttggatgagataaaacttctgaagttcgtgaacaaatatgatccactagatgaacaccatgtgttgcgcctctatgactacttttaccatcaggaacacctttttattgtcactgaactactgcgagcaaatctatacgagtttcagaaatataatcaagaatctggtggtgaggtgtattttactttgcctaggatacaggttatagctcggcaatgtttggaggccttggtttacttgcaccgtctgaggatcattcattgtgacctaaagccagaaaatattcttatcaagagctacagtagatgtgaaattaaagtcattgatctgggaagtagttgcttcttgacagacaacttatgtctctatgtccaatcacgctcttatcgagctcctgaggtcattctaggcctaccttatgatcagaggattgatatttggtctcttggttgcatcctttctgaattgtatactggtgaagtattatttcctaacgagcctgtgtccgtaatgcttgctcaaatgattgggataaccggcccaattgacatggaaatgctagaattgggacaggagacacagaagtatttcactgatgattatgacctttttaccgagaatgaggagacagatcagctagagtatttgatcccggagaaatcctccttgcgacaacacatacaatgtcctgattcagagtttgtcgattttctgtcttatctactgcaaattaaccccaggaaaagacctacagctgacgaagcactacagcatccatggctttctttctcgtactaatgagaagccatccggtgctttcttcacatataaagccctccttttctgggtgcaggattcttctttttttgtgtcttcagggtaattcttgcgtttcctttttctgggtccaggattctttttttttgtcttcagggtaattcttggtgtgaagtgtgaacccctgccctggagtgattcatgagtgtatgtaaatatcagaaaattttccgcggagtaactgtacagttgtaagcccactcttgtactcctgatcatgaatgataacatgggaatttcaaaatagtgtccaacgtttcatattgttggttctattgttgatgtgtccggtatcatttatagtatcacttatggtgtgtctggttagatgtacaaggaggatggaagggagcagccagttcttat

SEQ ID NO: 36136 - DNA, 1158 bp, Zea Mays
ctcccttatgtcgcatattcgctttggcgaagatgtataggaggaattgggttttggatcttgacatgtcaactgacaatctagtggattttagtttaagtcaacacgatttttcagttctttctcccagtcccagctattgattttagattccagacgagtctagacgaacaacagatggttctcgaatgttttcatgtcaggatgaaaagtgcttacgtacttgatgaatcgatcatgaccctgctccggcaactttaccgtgctgaacggcgacaagatacctactaactgttatcggtgagttgaagaggatccttgttcagactactggcttggagcctgagaggcagaggctcttcttccgtgggaaggagaagagtgacagagagttcctgcacacggcaggtgttaaggatggagcaaagctgcttctgctcgagaagcctgcccctgccaacatagagcagaaggttgagcctgtgattatggatgaaagcatgatgaaggcatgtgcggctgttgctcgtgttagagttgaagttgataagctgtctgctaaggtgtgtgacttggagaagaatgtactaggagggagaaaggttgaggataaagaatttgttgtcttgacggagctgcttatgatgcagctgctgaaactcgatggcattgaagctgaaggagaagcaagggcacagaggaaggctgaggtgcgccgagttcagtcccttgtggagaccttggataagctgaaagcaagaaatgcaaaccccttcagcgatcataataaggctgtttcagtaacaacgcagtgggagacgtttgagaacggcatgggcagcttgagtgctccacctccccgtgtttcttcaacgcaagctaacactgactgggagcagttcgactaggctcagatgaagctgttgatgtatcatgaaatctgtgagatcggtatggacattcctttccgaggcagcgaggtgttgtgtatatgcaccacgtttgataacttttggcgtcccaagtgcctgtgattctgtgaatgttaccagatcgtgccactgccatactaccatgtgaattgcatcgctcattgagggtcatatttcaatatgctcctgccagtgccattcgcgtgctatttattggtgattcaca

SEQ ID NO: 36137 - DNA, 1342 bp, Zea Mays
ggcggacacggcgagtcagcacagcaacagcgcacagcagcacacggtatccgtcccgggccggagccaactccccaagccagtccagtccttccgtccacccatccatcgtccccgcctgcacctcgcgagcatccaaagctgtacttgcggcaagttctcgcaaaatcctactcccaccgccgactcgtacctccgctcccctcctccccaacccttccacgcttgcttctccgggagggaaggcacacgggaggtcgccccgccacccatcgcaaaagccacgcgccaccaaactcttttttccctcacccagtcgctttcgcgttcagcgcgagctgagccagccagtgggtcggtcgctggaggcggagccataaaggcgtcagcgacggcagcatgatgagcggcagatcgggcgggagggacgccgagggcgagtgggaggttcggcccggcgggatgctggtgcagcgcagggacggtgaggcggccggccccgtcatcaggatcagggtctcccacggcgccaacttccgcgaggtcgtcgtgccggcgcaggctaccttcggtgagttgaagaggatccttgttcagactactggcttggagcctgagaggcagaggctcttcttccgtgggaaggagaagagtgacagagagttcctgcacacggcaggtgttaaggatggagcaaagctgcttctgctcgagaagcctgcccctgccaacatagagcagaaggttgagcctgtgattatggatgaaagcatgatgaaggcatgtgcggctgttgctcgtgttagagttgaagttgataagctgtctgctaagctgctgaaactcgatggcattgaagctgaaggagaagcaagggcacagaggaaggctgaggtgcgccgagttcagtcccttgtggagaccttggataagctgaaagcaagaaatgcaaaccccttcagcgatcataataaggctgtttcagtaacaacgcagtgggagacgtttgagaacggcatgggcagcttgagtgctccacctccccgtgtttcttcaacgcaagctaacactgactgggagcagttcgactaggctcagatgaagctgttgatgtatcatgaaatctgtgagatcggtatggacattcctttccgaggcagcgaggtgttgtgtatatgcaccacgtttgataacttttggcgtcccaagtgcctgtgattctgtgaatgttaccagatcgtgccactgccatactaccatgtgaattgcatcgctcattgagggtcatatttcaatatgctcctgccagtgccattcgcgtgctatttattggtgattcaca

SEQ ID NO: 36138 - DNA, 915 bp, Zea Mays
gtcctatccacggcggacacggcgagtcagcacagcaacagcgcacagcagcacacggtgagttgaagaggatccttgttcagactactggcttggagcctgagaggcagaggctcttcttccgtgggaaggagaagagtgacagagagttcctgcacacggcaggtgttaaggatggagcaaagctgcttctgctcgagaagcctgcccctgccaacatagagcagaaggttgagcctgtgattatggatgaaagcatgatgaaggcatgtgcggctgttgctcgtgttagagttgaagttgataagctgtctgctaaggtgtgtgacttggagaagaatgtactaggagggagaaaggttgaggataaagaatttgttgtcttgacggagctgcttatgatgcagctgctgaaactcgatggcattgaagctgaaggagaagcaagggcacagaggaaggctgaggtgcgccgagttcagtcccttgtggagaccttggataagctgaaagcaagaaatgcaaaccccttcagcgatcataataaggctgtttcagtaacaacgcagtgggagacgtttgagaacggcatgggcagcttgagtgctccacctccccgtgtttcttcaacgcaagctaacactgactgggagcagttcgactaggctcagatgaagctgttgatgtatcatgaaatctgtgagatcggtatggacattcctttccgaggcagcgaggtgttgtgtatatgcaccacgtttgataacttttggcgtcccaagtgcctgtgattctgtgaatgttaccagatcgtgccactgccatactaccatgtgaattgcatcgctcattgagggtcatatttcaatatgctcctgccagtgccattcgcgtgctatttattggtgattcaca

SEQ ID NO: 36139 - DNA, 1805 bp, Zea Mays
ctctagtggagtgtgtaaaataggggacacggaattgtagatgacactgtttcacactgttttcggagaaaagtttggaataggggatgggaccttagtgttcgttttgaaacaaatgcagttatgataggcatgtcgagtgctatttgggcagccagcaaaagtattatggatctaaacacatgtcaaaacttagcaatcattgcaggtgaatgaagacttactttttctgattcggaagacccatcaatttgaagtatcattctctgcagttcaggatccctgagagcgtcttggatccctttcagttccgctgtgaaggatataaagttcaggtaaaaacactcacaaagaaagctccactcagactactttggcaaacagctttggcattcatgaattcagcactagcatacttctatcagcccaagtgacaacagtaacctcaacatcttaaagggtgattaaagtgaatttttggaaggcagcagataaacaacttcacacatgatgcatgagggatcagttcttatttaaacataaaaagtctaaggtatatcgatatcaattatcaatataagtttccaaatattgctgcactaagtcatatccattgaggttttccctatatgttaataaaccacaagtgaagatgtacatcttagttataagatggatgtttataagacagtagttgcagtggactgtaagcaatgtgccaatgtcacaggggcattctaaatgatgatatataccttttctaaagtaactaacctatatgacagctctgttaacgcaatatgaagtgcctagaaatgtaatcaagcttgatgccttggtgctaagctaggccttacacccatacctaaggaccttagtctattgttgtcaacaagccagcttaggtcctcaacttcaagagcttttgtagggcacgctgtatttggagattctgcagtgcatgtggtgtgcagtgctgccgaaaaacagggagattacagttaaacaatttataggcattcataaacacataattaagcaacaagagcattttgtattacacttgaggtaatcattttacattaccttgatttaagaaactaagaaagaatattagctccactgtatacagttcgaggtagttgtagcctagtggatggttacttctttaaacaaaatgttcaacaacaaagttttttcagtcccatgcaagttggggtaggctagagttgaaaatcaatagaagccataaatcaaggttcatgcacgtgggtggatagctattttccattcgctcctattgaaagctaaatctttgggtatattccatcctttcaagtctcattttactgtctcttccgatgttaacttcagcatttccttgcatctcttcccattactatcgcgtcttaggaattaggatcccaccacgcactagtctctagaggtcttcattagatatgaccaaaccatcctaatcagcgttggacattttttttttcaattggtgctacccctagcctatcatgtatatcatcgtcctagacttggttccttctcgtatggccacaaatccaaatccaacacaacatatgcatttctgtagtacttgtctgctaaacatatgtgaacgtaagccaggcattaacggattaaccctacagttagcaagagtaaataagtccctaataagaacatttgtaccttttttaggaactaacaaagttgatatcttcacccaaggaaactaccaaagtatgtaacgattagggacaaacatatgcaaacaacagtcgcaatttacg

SEQ ID NO: 36140 - DNA, 1529 bp, Zea Mays
agaaaccgccattcggatagcacgggcgcacctgccgaccggcgaaacccagccgcatactcgcgcccattctcgccgcgcacgatgctccgtctccccaccctcaccgcccttaaaccctcaacccccgccatcagcttgaaccgtgtcggctgcagccatggccgccgccgccgcaagctcatctttgtctcatccgctcctccgccgtcttcttcgtcttcacggcctccgaagccgacgtcgaacccggaaccaccaaagcccacacatgaggcccgcaaccggaacccggatggatccaccgaggcagggttccccacaaccaagccccggaagccacgccgtgggcgccgcagcgagtcggcggccgtggaggacttcgtccgcaaccgccttgagcaggtctttgcctccatccaggagcgcaaccccgacgtcctcgagggcaaaggcgacatcctgaagccgaaggccgatgtggagcgattaccagacgacgagggagagggagaaggaggagaacagaagcccgtggtggaagaggaggacccgagctggccgctggatgccgatgtcggatgggggatccgggcctcagagtacttcgacaagcactcgatcagaaatgtcacagtggacggggtggagatcgattgggaaggggacgtcgacgaggggtgggtcaaggaaatcaattgcttggagtgggagagcttcgcattccaccccagccccttagtcgtcctagtcttcgagcggtacaacagggctgctgacaattggaagtttcttcaagaattggaaaaggctgctaaggtgtactggaatgctaaagatcgcttacctcctcggacagtcaaagttgatataaatattgagagggatttggcatatgcacttcaagcaagagaatgtccacaattattgttccttaggggaaacaagatcttatatagagaaaaagagataaggactgcagatgagctggttcaaatgattgcccatttctactacaatgcaaagaggccatcttgcgttaatcctgaggccgttgcttctttctagttcttgtatagaattgttgacatagtgttttcatcctcaaccggtgtgttggtgctagtttttgactggaagaagaagctcccttattcaatcattttccaggacatggtgctcggatagtttggaattgatatgactaaacgaaaaccaagaaaaacatctcaatgctggttgggaaagtgtgaactaaatcatgtatcattctgattagtagtgtagtgtaacaaaatacaactttcaggggagagtgcttagatcatttttatcggttagctatattagatgatttcaaagttgactgcaaactttgtcatggagcaaaacttatttcggttccctcttatagtgagaggaaaatatattttggtgtaggttgaacgcgtactcttgtggtgttttaactcttttcccgtgctagaaactgggactacattcggatgaagaactggttaattcgtgtc

SEQ ID NO: 36141 - DNA, 1525 bp, Zea Mays
agaaaccgccattcggatagcacgggcgcacctgccgaccggcgaaacccagccgcatactcgcgcccattctcgccgcgcacgatgctccgtctccccaccctcaccgcccttaaaccctcaacccccgccatcagcttgaaccgtgtcggctgcagccatggccgccgccgccgcaagctcatctttgtctcatccgctcctccgccgtcttcttcgtcttcacggcctccgaagccgacgtcgaacccggaaccaccaaagcccacacatgaggcccgcaaccggaacccggatggatccaccgaggcagggttccccacaaccaagccccggaagccacgccgtgggcgccgcagcgagtcggcggccgtggaggacttcgtccgcaaccgccttgagcaggtctttgcctccatccaggagcgcaaccccgacgtcctcgagggcaaaggcgacatcctgaagccgaaggccgatgtggagcgattaccagacgacgagggagagggagaaggaggagaacagaagcccgtggtggaagaggaggacccgagctggccgctggatgccgatgtcggatgggggatccgggcctcagagtacttcgacaagcactcgatcagaaatgtcacagtggacggggtggagatcgattgggaaggggacgtcgacgaggggtgggtcaaggaaatcaattgcttggagtgggagagcttcgcattccaccccagccccttagtcgtcctagtcttcgagcggtacaacagggctgctgacaattggaagtttcttcaagaattggaaaaggctgctaaggtgtactggaatgctaaagatcgcttacctcctcggtcaaagttgatataaatattgagagggatttggcatatgcacttcaagcaagagaatgtccacaattattgttccttaggggaaacaagatcttatatagagaaaaagagataaggactgcagatgagctggttcaaatgattgcccatttctactacaatgcaaagaggccatcttgcgttaatcctgaggccgttgcttctttctagttcttgtatagaattgttgacatagtgttttcatcctcaaccggtgtgttggtgctagtttttgactggaagaagaagctcccttattcaatcattttccaggacatggtgctcggatagtttggaattgatatgactaaacgaaaaccaagaaaaacatctcaatgctggttgggaaagtgtgaactaaatcatgtatcattctgattagtagtgtagtgtaacaaaatacaactttcaggggagagtgcttagatcatttttatcggttagctatattagatgatttcaaagttgactgcaaactttgtcatggagcaaaacttatttcggttccctcttatagtgagaggaaaatatattttggtgtaggttgaacgcgtactcttgtggtgttttaactcttttcccgtgctagaaactgggactacattcggatgaagaactggttaattcgtgtc

SEQ ID NO: 36142 - DNA, 3057 bp, Zea Mays
cgcaaggctgcaactgcggcatgcagatccgcagagcacacacgggcaccgggcgcaccagtgcaccaccgcatacggccgtgcgcttcctttccttcccccgccgccgcagatcttccccgcagtcccggttcccgttcaccacctccgaaccagaggaggaatggccatctactccttcctttctgttcgcaagcgcccagttgttgtcgtcgccgccgtcaccctcttcattgtcgtatcctctctcttcctcctcttcagccccgcaccgacagcgctcccgtttttctcctcctcctcttcccacctctcctctcaagcttcaattgctgccgtctcctctaacgcatttccacctgagaccccaacctctgttgtctccaactgggtcagcagcaacacttctgctgatcgcgtctctgctgacgcatctccgcccgtagtcggaaccgccatcgcgtctgatgcggtcagcaacagcacggctgacccgcctaggccagataccaccgccgctgctggcgacgcgaaggctgatgtgtcccaaccagatcacggcatgccccctgccgccactgaagcgagtggatcggcaggcaacggtgagacagccgcgggagtctcgagcgagagggatgaggaggggcaaggcggcggcggcgccgtggaggagctaccatcgtgggagctgtgcaaggtggggaagggggtggcggccgcggactacatcccctgcctcgacaacgtgaaggcggtcaaggcactcaagtcgctgcggcacatggagcaccgggagaggcactgcccgacagatccgaggccgaggtgcctcgtgccgctgcccgagaggtaccggcgtccggtgccgtggccacgcagccgtgacatgatttggtataataatgttcctcatccaaagttagtggaatacaagaaggaccagaactgggtcaggaagtctggtaactattttgttttccctggaggtgggactcaattcaaaaatggcgtggcttcatacattaaattcattgaacagattttaccaaacattcaatggggaatccatacaagaactgtccttgatgttggatgtggtgtggccagctttggtggatatttgcttgataggaatgtcattaccatgtctgttgcacccaaagatgagcatgaagctcagatacagtttgcactggagcgtgggattccagcatttttggcagtgattggaacacaaaagcttcctttccctgataattcatttgatgtcatccactgtgcaaggtgtagggtccactggtatgctgatggtggaaaaccattgttggagctcaatagagtactcaggcctggagggtattacatttggtctgcaacacctgtctatcgcaaaaacccaagagatatagatgattggaatgcggtggtagctctgaccaaatcgatctgctggaggacagtggtaaggtctcgagatatcaataagatcggagttgttatataccaaaagccgacatcaaattcatgctcccttgagagaaaaaataatgaaccacctctgtgctctgagagtgatggatcacgtttcccttggtataaacctctcgatagttgcctctttcctgcagttccgagttcaggtgaagggaatagttgggccgtctcgtggcctgaaagacttaatattaagcactcggctacatctaacaattcttccattcagtttcctcaagaaaaaattgattctgatacaagttattggaaggaccttgtttcagaaatatatctcaacgaatttgcagttaattggtctagtgttcgcaatgttatggacatgaatgcgggttttggagggtaagcaaaaactggtttgagatctttatgcaaaattaatttagactagttgattgtatcagctgttacaacaacataccttttgaaatgtctaactttcacttcttctgcctggatcttgtttgacacttaattcagatgtgtcagacagtcactcaatcagaatcactaatttgtaaatatactgacactatggttttcacttttttctggcatagtttttttttctggttgaagggattaatatgcagattttttcaacagttgactttgcaatccttggcttcaacttatctattgttaaacggggtacactgtacatagttgttgtttagaagctgtcagtcagctttacatagtcctggattgtgagctgaggtacccatacctcattaaaatcaagtatttaactttattcagaggacatatgatgtgcttgcatgattcttagggtttatatttgatactacacttagtttcagcttttatttacacagattcttcttttcctaaattagtcataatttatgtcctccatctgtggtactccctctgccccaaattaaaatttgttttagattattaatggattcatacaacacttgatgtatgtgctttatatatgtgtctaaattcatcatcacctatttgaatatagacattgaaacctagagctaaaacgaatagtattttgggactcagggagtaactggtaagacattgatcatgactgtttccttaaatcagatttgcagcatcaattatcaatcgaccgttgtgggttatgaatgttgtacctgttgatcagccagatacattgcacatcattttcaacagaggtctgattggggtatatcatgactggtgtgaatcttttaacacatacccacgaacttatgatcttattcacatgagttatctcttagggccccttacgaaaaggtgccacatcattgaagttgcagctgaaattgacagaatacttagacctggtagatggtttgtgctgcaagacactatagacatgataagaaagatggaccctgttctcaggtctttgcattacaagactacaattgtcaaacatcaatttcttcttgccaccaagggtttctggcgccctggcagtataggttcttagtcatgatgattccggcttccacccaaaatgaggagtaagttgaggcgcttagtgatgac

SEQ ID NO: 36143 - DNA, 2942 bp, Zea Mays
ccgcagagcacacacgggcaccgggcgcaccagtgcaccaccgcatacggccgtgcgcttcctttccttcccccgccgccgcagatcttccccgcagtcccggttcccgttcaccacctccgaaccagaggaggaatggccatctactccttcctttctgttcgcaagcgcccagttgttgtcgtcgccgccgtcaccctcttcattgtcgtatcctctctcttcctcctcttcagccccgcaccgacagcgctcccgtttttctcctcctcctcttcccacctctcctctcaagcttcaattgctgccgtctcctctaacgcatttccacctgagaccccaacctctgttgtctccaactgggtcagcagcaacacttctgctgatcgcgtctctgctgacgcatctccgcccgtagtcggaaccgccatcgcgtctgatgcggtcagcaacagcacggctgacccgcctaggccagataccaccgccgctgctggcgacgcgaaggctgatgtgtcccaaccagatcacggcatgccccctgccgccactgaagcgagtggatcggcaggcaacggtgagacagccgcgggagtctcgagcgagagggatgaggaggggcaaggcggcggcggcgccgtggaggagctaccatcgtgggagctgtgcaaggtggggaagggggtggcggccgcggactacatcccctgcctcgacaacgtgaaggcggtcaaggcactcaagtcgctgcggcacatggagcaccgggagaggcactgcccgacagatccgaggccgaggtgcctcgtgccgctgcccgagaggtaccggcgtccggtgccgtggccacgcagccgtgacatgatttggtataataatgttcctcatccaaagttagtggaatacaagaaggaccagaactgggtcaggaagtctggtaactattttgttttccctggaggtgggactcaattcaaaaatggcgtggcttcatacattaaattcattgaacagattttaccaaacattcaatggggaatccatacaagaactgtccttgatgttggatgtggtgtggccagctttggtggatatttgcttgataggaatgtcattaccatgtctgttgcacccaaagatgagcatgaagctcagatacagtttgcactggagcgtgggattccagcatttttggcagtgattggaacacaaaagcttcctttccctgataattcatttgatgtcatccactgtgcaaggtgtagggtccactggtatgctgatggtggaaaaccattgttggagctcaatagagtactcaggcctggagggtattacatttggtctgcaacacctgtctatcgcaaaaacccaagagatatagatgattggaatgcggtggtagctctgaccaaatcgatctgctggaggacagtggtataaacctctcgatagttgcctctttcctgcagttccgagttcaggtgaagggaatagttgggccgtctcgtggcctgaaagacttaatattaagcactcggctacatctaacaattcttccattcagtttcctcaagaaaaaattgattctgatacaagttattggaaggaccttgtttcagaaatatatctcaacgaatttgcagttaattggtctagtgttcgcaatgttatggacatgaatgcgggttttggagggtaagcaaaaactggtttgagatctttatgcaaaattaatttagactagttgattgtatcagctgttacaacaacataccttttgaaatgtctaactttcacttcttctgcctggatcttgtttgacacttaattcagatgtgtcagacagtcactcaatcagaatcactaatttgtaaatatactgacactatggttttcacttttttctggcatagtttttttttctggttgaagggattaatatgcagattttttcaacagttgactttgcaatccttggcttcaacttatctattgttaaacggggtacactgtacatagttgttgtttagaagctgtcagtcagctttacatagtcctggattgtgagctgaggtacccatacctcattaaaatcaagtatttaactttattcagaggacatatgatgtgcttgcatgattcttagggtttatatttgatactacacttagtttcagcttttatttacacagattcttcttttcctaaattagtcataatttatgtcctccatctgtggtactccctctgccccaaattaaaatttgttttagattattaatggattcatacaacacttgatgtatgtgctttatatatgtgtctaaattcatcatcacctatttgaatatagacattgaaacctagagctaaaacgaatagtattttgggactcagggagtaactggtaagacattgatcatgactgtttccttaaatcagatttgcagcatcaattatcaatcgaccgttgtgggttatgaatgttgtacctgttgatcagccagatacattgcacatcattttcaacagaggtctgattggggtatatcatgactggtgtgaatcttttaacacatacccacgaacttatgatcttattcacatgagttatctcttagggccccttacgaaaaggtgccacatcattgaagttgcagctgaaattgacagaatacttagacctggtagatggtttgtgctgcaagacactatagacatgataagaaagatggaccctgttctcaggtctttgcattacaagactacaattgtcaaacatcaatttcttcttgccaccaagggtttctggcgccctggcagtataggttcttagtcatgatgattccggcttccacccaaaatggctggaggaatgtgtgtagctatattggtgccaaccggtgaggagagggcatcaattaccattttaccagaac

SEQ ID NO: 36144 - DNA, 3005 bp, Zea Mays
ctgcggcatgcagatccgcagagcacacacgggcaccgggcgcaccagtgcaccaccgcatacggccgtgcgcttcctttccttcccccgccgccgcagatcttccccgcagtcccggttcccgttcaccacctccgaaccagaggaggaatggccatctactccttcctttctgttcgcaagcgcccagttgttgtcgtcgccgccgtcaccctcttcattgtcgtatcctctctcttcctcctcttcagccccgcaccgacagcgctcccgtttttctcctcctcctcttcccacctctcctctcaagcttcaattgctgccgtctcctctaacgcatttccacctgagaccccaacctctgttgtctccaactgggtcagcagcaacacttctgctgatcgcgtctctgctgacgcatctccgcccgtagtcggaaccgccatcgcgtctgatgcggtcagcaacagcacggctgacccgcctaggccagataccaccgccgctgctggcgacgcgaaggctgatgtgtcccaaccagatcacggcatgccccctgccgccactgaagcgagtggatcggcaggcaacggtgagacagccgcgggagtctcgagcgagagggatgaggaggggcaaggcggcggcggcgccgtggaggagctaccatcgtgggagctgtgcaaggtggggaagggggtggcggccgcggactacatcccctgcctcgacaacgtgaaggcggtcaaggcactcaagtcgctgcggcacatggagcaccgggagaggcactgcccgacagatccgaggccgaggtgcctcgtgccgctgcccgagaggtaccggcgtccggtgccgtggccacgcagccgtgacatgatttggtataataatgttcctcatccaaagttagtggaatacaagaaggaccagaactgggtcaggaagtctggtaactattttgttttccctggaggtgggactcaattcaaaaatggcgtggcttcatacattaaattcattgaacagattttaccaaacattcaatggggaatccatacaagaactgtccttgatgttggatgtggtgtggccagctttggtggatatttgcttgataggaatgtcattaccatgtctgttgcacccaaagatgagcatgaagctcagatacagtttgcactggagcgtgggattccagcatttttggcagtgattggaacacaaaagcttcctttccctgataattcatttgatgtcatccactgtgcaaggtgtagggtccactggtggaaaaccattgttggagctcaatagagtactcaggcctggagggtattacatttggtctgcaacacctgtctatcgcaaaaacccaagagatatagatgattggaatgcggtggtagctctgaccaaatcgatctgctggaggacagtggtaaggtctcgagatatcaataagatcggagttgttatataccaaaagccgacatcaaattcatgctcccttgagagaaaaaataatgaaccacctctgtgctctgagagtgatggatcacgtttcccttggtataaacctctcgatagttgcctctttcctgcagttccgagttcaggtgaagggaatagttgggccgtctcgtggcctgaaagacttaatattaagcactcggctacatctaacaattcttccattcagtttcctcaagaaaaaattgattctgatacaagttattggaaggaccttgtttcagaaatatatctcaacgaatttgcagttaattggtctagtgttcgcaatgttatggacatgaatgcgggttttggagggtaagcaaaaactggtttgagatctttatgcaaaattaatttagactagttgattgtatcagctgttacaacaacataccttttgaaatgtctaactttcacttcttctgcctggatcttgtttgacacttaattcagatgtgtcagacagtcactcaatcagaatcactaatttgtaaatatactgacactatggttttcacttttttctggcatagtttttttttctggttgaagggattaatatgcagattttttcaacagttgactttgcaatccttggcttcaacttatctattgttaaacggggtacactgtacatagttgttgtttagaagctgtcagtcagctttacatagtcctggattgtgagctgaggtacccatacctcattaaaatcaagtatttaactttattcagaggacatatgatgtgcttgcatgattcttagggtttatatttgatactacacttagtttcagcttttatttacacagattcttcttttcctaaattagtcataatttatgtcctccatctgtggtactccctctgccccaaattaaaatttgttttagattattaatggattcatacaacacttgatgtatgtgctttatatatgtgtctaaattcatcatcacctatttgaatatagacattgaaacctagagctaaaacgaatagtattttgggactcagggagtaactggtaagacattgatcatgactgtttccttaaatcagatttgcagcatcaattatcaatcgaccgttgtgggttatgaatgttgtacctgttgatcagccagatacattgcacatcattttcaacagaggtctgattggggtatatcatgactggtgtgaatcttttaacacatacccacgaacttatgatcttattcacatgagttatctcttagggccccttacgaaaaggtgccacatcattgaagttgcagctgaaattgacagaatacttagacctggtagatggtttgtgctgcaagacactatagacatgataagaaagatggaccctgttctcaggtctttgcattacaagactacaattgtcaaacatcaatttcttcttgccaccaagggtttctggcgccctggcagtataggttcttagtcatgatgattccggcttccacccaaaatgg

SEQ ID NO: 36145 - DNA, 2347 bp, Zea Mays
ctgcggcatgcagatccgcagagcacacacgggcaccgggcgcaccagtgcaccaccgcatacggccgtgcgcttcctttccttcccccgccgccgcagatcttccccgcagtcccggttcccgttcaccacctccgaaccagaggaggaatggccatctactccttcctttctgttcgcaagcgcccagttgttgtcgtcgccgccgtcaccctcttcattgtcgtatcctctctcttcctcctcttcagccccgcaccgacagcgctcccgtttttctcctcctcctcttcccacctctcctctcaagcttcaattgctgccgtctcctctaacgcatttccacctgagaccccaacctctgttgtctccaactgggtcagcagcaacacttctgctgatcgcgtctctgctgacgcatctccgcccgtagtcggaaccgccatcgcgtctgatgcggtcagcaacagcacggctgacccgcctaggccagataccaccgccgctgctggcgacgcgaaggctgatgtgtcccaaccagatcacggcatgccccctgccgccactgaagcgagtggatcggcaggcaacggtgagacagccgcgggagtctcgagcgagagggatgaggaggggcaaggcggcggcggcgccgtggaggagctaccatcgtgggagctgtgcaaggtggggaagggggtggcggccgcggactacatcccctgcctcgacaacgtgaaggcggtcaaggcactcaagtcgctgcggcacatggagcaccgggagaggcactgcccgacagatccgaggccgaggtgcctcgtgccgctgcccgagaggtaccggcgtccggtgccgtggccacgcagccgtgacatgatttggtataataatgttcctcatccaaagttagtggaatacaagaaggaccagaactgggtcaggaagtctggtaactattttgttttccctggaggtgggactcaattcaaaaatggcgtggcttcatacattaaattcattgaacagattttaccaaacattcaatggggaatccatacaagaactgtccttgatgttggatgtggtgtggccagctttggtggatatttgcttgataggaatgtcattaccatgtctgttgcacccaaagatgagcatgaagctcagatacagtttgcactggagcgtgggattccagcatttttggcagtgattggaacacaaaagcttcctttccctgataattcatttgatgtcatccactgtgcaaggtgtagggtccactggtggaaaaccattgttggagctcaatagagtactcaggcctggagggtattacatttggtctgcaacacctgtctatcgcaaaaacccaagagatatagatgattggaatgcggtggtagctctgaccaaatcgatctgctggaggacagtggtaaggtctcgagatatcaataagatcggagttgttatataccaaaagccgacatcaaattcatgctcccttgagagaaaaaataatgaaccacctctgtgctctgagagtgatggatcacgtttcccttggtataaacctctcgatagttgcctctttcctgcagttccgagttcaggtgaagggaatagttgggccgtctcgtggcctgaaagacttaatattaagcactcggctacatctaacaattcttccattcagtttcctcaagaaaaaattgattctgatacaagttattggaaggaccttgtttcagaaatatatctcaacgaatttgcagttaattggtctagtgttcgcaatgttatggacatgaatgcgggttttggaggatttgcagcatcaattatcaatcgaccgttgtgggttatgaatgttgtacctgttgatcagccagatacattgcacatcattttcaacagaggtctgattggggtatatcatgactggtgtgaatcttttaacacatacccacgaacttatgatcttattcacatgagttatctcttagggccccttacgaaaaggtgccacatcattgaagttgcagctgaaattgacagaatacttagacctggtagatggtttgtgctgcaagacactatagacatgataagaaagatggaccctgttctcaggtctttgcattacaagactacaattgtcaaacatcaatttcttcttgccaccaagggtttctggcgccctggcagtataggttcttagtcatgatgattccggcttccacccaaaatgtgaatttgtacgaggtggatcgcaagatcgagaaccgacgacggtaaacgcacaaacgacacgagtttagacaagtccgaggtctcaatg

SEQ ID NO: 36146 - DNA, 2696 bp, Zea Mays
cgggcaccgggcgcaccagtgcaccaccgcatacggccgtgcgcttcctttccttcccccgccgccgcagatcttccccgcagtcccggttcccgttcaccacctccgaaccagaggaggaatggccatctactccttcctttctgttcgcaagcgcccagttgttgtcgtcgccgccgtcaccctcttcattgtcgtatcctctctcttcctcctcttcagccccgcaccgacagcgctcccgtttttctcctcctcctcttcccacctctcctctcaagcttcaattgctgccgtctcctctaacgcatttccacctgagaccccaacctctgttgtctccaactgggtcagcagcaacacttctgctgatcgcgtctctgctgacgcatctccgcccgtagtcggaaccgccatcgcgtctgatgcggtcagcaacagcacggctgacccgcctaggccagataccaccgccgctgctggcgacgcgaaggctgatgtgtcccaaccagatcacggcatgccccctgccgccactgaagcgagtggatcggcaggcaacggtgagacagccgcgggagtctcgagcgagagggatgaggaggggcaaggcggcggcggcgccgtggaggagctaccatcgtgggagctgtgcaaggtggggaagggggtggcggccgcggactacatcccctgcctcgacaacgtgaaggcggtcaaggcactcaagtcgctgcggcacatggagcaccgggagaggcactgcccgacagatccgaggccgaggtgcctcgtgccgctgcccgagaggtaccggcgtccggtgccgtggccacgcagccgtgacatgatttggtataataatgttcctcatccaaagttagtggaatacaagaaggaccagaactgggtcaggaagtctggtaactattttgttttccctggaggtgggactcaattcaaaaatggcgtggcttcatacattaaattcattgaacagctttggtggatatttgcttgataggaatgtcattaccatgtctgttgcacccaaagatgagcatgaagctcagatacagtttgcactggagcgtgggattccagcatttttggcagtgattggaacacaaaagcttcctttccctgataattcatttgatgtcatccactgtgcaaggtgtagggtccactggtatgctgatggtggaaaaccattgttggagctcaatagagtactcaggcctggagggtattacatttggtctgcaacacctgtctatcgcaaaaacccaagagatatagatgattggaatgcggtggtagctctgaccaaatcgatctgctggaggacagtggtaaggtctcgagatatcaataagatcggagttgttatataccaaaagccgacatcaaattcatgctcccttgagagaaaaaataatgaaccacctctgtgctctgagagtgatggatcacgtttcccttggtataaacctctcgatagttgcctctttcctgcagttccgagttcaggtgaagggaatagttgggccgtctcgtggcctgaaagacttaatattaagcactcggctacatctaacaattcttccattcagtttcctcaagaaaaaattgattctgatacaagttattggaaggaccttgtttcagaaatatatctcaacgaatttgcagttaattggtctagtgttcgcaatgttatggacatgaatgcgggttttggaggatttgcagcatcaattatcaatcgaccgttgtgggttatgaatgttgtacctgttgatcagccagatacattgcacatcattttcaacagaggtctgattggggtatatcatgactggtgtgaatcttttaacacatacccacgaacttatgatcttattcacatgagttatctcttagggccccttacgaaaaggtgccacatcattgaagttgcagctgaaattgacagaatacttagacctggtagatggtttgtgctgcaagacactatagacatgataagaaagatggaccctgttctcaggtctttgcattacaagactacaattgtcaaacatcaatttcttcttgccaccaagggtttctggcgccctggcagtataggttcttagtcatgatgattccggcttccacccaaaatggtattggctccatggactcattgtgttgattcttcttattctttttacgtcgattcttctcatagcatagattagatgcttcattgaagccccatatcaagttgagtttcatgttccaattttcccgctttgttttactattttaaaaatgttttggccttggtcatgcaaatttctgtttgttattgcaaacaggttaaatcaataggttagtgctaaaaattctgttaggcgaattctattttttttcaatatatatttagctataaacttctactgtatgacatcaatattgtccatttagccatgattcttgccttcttgcaaaagaacaagtataacctttgaattatttctttactactcaattttatgcttcctccatcacataatataagggattctgagtttgttcaaagttgaactattctaagttagaccttgtctgtactatccgttataagttgcttttacttttttggtatgtgcattttgctatgtatctagacatactttatctctagg

SEQ ID NO: 36147 - DNA, 2743 bp, Zea Mays
ccgcagagcacacacgggcaccgggcgcaccagtgcaccaccgcatacggccgtgcgcttcctttccttcccccgccgccgcagatcttccccgcagtcccggttcccgttcaccacctccgaaccagaggaggaatggccatctactccttcctttctgttcgcaagcgcccagttgttgtcgtcgccgccgtcaccctcttcattgtcgtatcctctctcttcctcctcttcagccccgcaccgacagcgctcccgtttttctcctcctcctcttcccacctctcctctcaagcttcaattgctgccgtctcctctaacgcatttccacctgagaccccaacctctgttgtctccaactgggtcagcagcaacacttctgctgatcgcgtctctgctgacgcatctccgcccgtagtcggaaccgccatcgcgtctgatgcggtcagcaacagcacggctgacccgcctaggccagataccaccgccgctgctggcgacgcgaaggctgatgtgtcccaaccagatcacggcatgccccctgccgccactgaagcgagtggatcggcaggcaacggtgagacagccgcgggagtctcgagcgagagggatgaggaggggcaaggcggcggcggcgccgtggaggagctaccatcgtgggagctgtgcaaggtggggaagggggtggcggccgcggactacatcccctgcctcgacaacgtgaaggcggtcaaggcactcaagtcgctgcggcacatggagcaccgggagaggcactgcccgacagatccgaggccgaggtgcctcgtgccgctgcccgagaggtaccggcgtccggtgccgtggccacgcagccgtgacatgatttggtataataatgttcctcatccaaagttagtggaatacaagaaggaccagaactgggtcaggaagtctggtaactattttgttttccctggaggtgggactcaattcaaaaatggcgtggcttcatacattaaattcattgaacagattttaccaaacattcaatggggaatccatacaagaactgtccttgatgttggatgtggtgtggccagctttggtggatatttgcttgataggaatgtcattaccatgtctgttgcacccaaagatgagcatgaagctcagatacagtttgcactggagcgtgggattccagcatttttggcagtgattggaacacaaaagcttcctttccctgataattcatttgatgtcatccactgtgcaaggtgtagggtccactggtatgctgatggtggaaaaccattgttggagctcaatagagtactcaggcctggagggtattacatttggtctgcaacacctgtctatcgcaaaaacccaagagatatagatgattggaatgcggtggtagctctgaccaaatcgatctgctggaggacagtggtaaggtctcgagatatcaataagatcggagttgttatataccaaaagccgacatcaaattcatgctcccttgagagaaaaaataatgaaccacctctgtgctctgagagtgatggatcacgtttcccttgttccgagttcaggtgaagggaatagttgggccgtctcgtggcctgaaagacttaatattaagcactcggctacatctaacaattcttccattcagtttcctcaagaaaaaattgattctgatacaagttattggaaggaccttgtttcagaaatatatctcaacgaatttgcagttaattggtctagtgttcgcaatgttatggacatgaatgcgggttttggaggatttgcagcatcaattatcaatcgaccgttgtgggttatgaatgttgtacctgttgatcagccagatacattgcacatcattttcaacagaggtctgattggggtatatcatgactggtgtgaatcttttaacacatacccacgaacttatgatcttattcacatgagttatctcttagggccccttacgaaaaggtgccacatcattgaagttgcagctgaaattgacagaatacttagacctggtagatggtttgtgctgcaagacactatagacatgataagaaagatggaccctgttctcaggtctttgcattacaagactacaattgtcaaacatcaatttcttcttgccaccaagggtttctggcgccctggcagtataggttcttagtcatgatgattccggcttccacccaaaatggtattggctccatggactcattgtgttgattcttcttattctttttacgtcgattcttctcatagcatagattagatgcttcattgaagccccatatcaagttgagtttcatgttccaattttcccgctttgttttactattttaaaaatgttttggccttggtcatgcaaatttctgtttgttattgcaaacaggttaaatcaataggttagtgctaaaaattctgttaggcgaattctattttttttcaatatatatttagctataaacttctactgtatgacatcaatattgtccatttagccatgattcttgccttcttgcaaaagaacaagtataacctttgaattatttctttactactcaattttatgcttcctccatcacataatataagggattctgagtttgttcaaagttgaactattctaagttagaccttgtctgtactatccgttataagttgcttttacttttttggtatgtgcattttgctatgtatctagacatactttatctctagg

SEQ ID NO: 36148 - DNA, 2813 bp, Zea Mays
ccggacccgcaaggctgcaactgcggcatgcagatccgcagagcacacacgggcaccgggcgcaccagtgcaccaccgcatacggccgtgcgcttcctttccttcccccgccgccgcagatcttccccgcagtcccggttcccgttcaccacctccgaaccagaggaggaatggccatctactccttcctttctgttcgcaagcgcccagttgttgtcgtcgccgccgtcaccctcttcattgtcgtatcctctctcttcctcctcttcagccccgcaccgacagcgctcccgtttttctcctcctcctcttcccacctctcctctcaagcttcaattgctgccgtctcctctaacgcatttccacctgagaccccaacctctgttgtctccaactgggtcagcagcaacacttctgctgatcgcgtctctgctgacgcatctccgcccgtagtcggaaccgccatcgcgtctgatgcggtcagcaacagcacggctgacccgcctaggccagataccaccgccgctgctggcgacgcgaaggctgatgtgtcccaaccagatcacggcatgccccctgccgccactgaagcgagtggatcggcaggcaacggtgagacagccgcgggagtctcgagcgagagggatgaggaggggcaaggcggcggcggcgccgtggaggagctaccatcgtgggagctgtgcaaggtggggaagggggtggcggccgcggactacatcccctgcctcgacaacgtgaaggcggtcaaggcactcaagtcgctgcggcacatggagcaccgggagaggcactgcccgacagatccgaggccgaggtgcctcgtgccgctgcccgagaggtaccggcgtccggtgccgtggccacgcagccgtgacatgatttggtataataatgttcctcatccaaagttagtggaatacaagaaggaccagaactgggtcaggaagtctggtaactattttgttttccctggaggtgggactcaattcaaaaatggcgtggcttcatacattaaattcattgaacagattttaccaaacattcaatggggaatccatacaagaactgtccttgatgttggatgtggtgtggccagctttggtggatatttgcttgataggaatgtcattaccatgtctgttgcacccaaagatgagcatgaagctcagatacagtttgcactggagcgtgggattccagcatttttggcagtgattggaacacaaaagcttcctttccctgataattcatttgatgtcatccactgtgcaaggtgtagggtccactggtatgctgatggtggaaaaccattgttggagctcaatagagtactcaggcctggagggtattacatttggtctgcaacacctgtctatcgcaaaaacccaagagatatagatgattggaatgcggtggtagctctgaccaaatcgatctgctggaggacagtggtaaggtctcgagatatcaataagatcggagttgttatataccaaaagccgacatcaaattcatgctcccttgagagaaaaaataatgaaccacctctgtgctctgagagtgatggatcacgtttcccttggtataaacctctcgatagttgcctctttcctgcagttccgagttcaggtgaagggaatagttgggccgtctcgtggcctgaaagacttaatattaagcactcggctacatctaacaattcttccattcagtttcctcaagaaaaaattgattctgatacaagttattggaaggaccttgtttcagaaatatatctcaacgaatttgcagttaattggtctagtgttcgcaatgttatggacatgaatgcgggttttggaggatttgcagcatcaattatcaatcgaccgttgtgggttatgaatgttgtacctgttgatcagccagatacattgcacatcattttcaacagaggtctgattggggtatatcatgactggtgtgaatcttttaacacatacccacgaacttatgatcttattcacatgagttatctcttagggccccttacgaaaaggtgccacatcattgaagttgcagctgaaattgacagaatacttagacctggtagatggtttgtgctgcaagacactatagacatgataagaaagatggaccctgttctcaggtctttgcattacaagactacaattgtcaaacatcaatttcttcttgccaccaagggtttctggcgccctggcagtataggttcttagtcatgatgattccggcttccacccaaaatggtattggctccatggactcattgtgttgattcttcttattctttttacgtcgattcttctcatagcatagattagatgcttcattgaagccccatatcaagttgagtttcatgttccaattttcccgctttgttttactattttaaaaatgttttggccttggtcatgcaaatttctgtttgttattgcaaacaggttaaatcaataggttagtgctaaaaattctgttaggcgaattctattttttttcaatatatatttagctataaacttctactgtatgacatcaatattgtccatttagccatgattcttgccttcttgcaaaagaacaagtataacctttgaattatttctttactactcaattttatgcttcctccatcacataatataagggattctgagtttgttcaaagttgaactattctaagttagaccttgtctgtactatccgttataagttgcttttacttttttggtatgtgcattttgctatgtatctagacatactttatctctagg

SEQ ID NO: 36149 - DNA, 1482 bp, Zea Mays
ccctattcatttcactttatatgtgctttcaattatattttacagcatccccatgaaacattcctccccaaccatttccatcatccaactccttatacgaactacctcaataaaaaaggaaataaaattctcatcgaagccttttccttaatcgatccctcttctaaaccccgccgcatggtccaatcaaagcctagtcggcggcgacgagcttgctgagccgctcctccgcgagggtgtcgttgtcccgcaagaccctgtgttgttgtcatcaactgagagagaaacaactcgatcgatcgatcaagaagaccggcgaggctctagctccagaccgacaatgccgtacgcagccacaaggacgtcgccgcagcagcacagccgcgtggccagcaacgggagggccgtggcggcgtgcgcaggccacgcgggcgtgccggacgaggtggcgcggcaccacgagcacgcggtggccgcggggcagtgctgctctgtgatggtgcagtccatcgcggcgccggcggacgcggtgtggtcgctggtgcgccgcttcgaccagccgcaggggtacaagcgcttcatcaggagctgccacctggtggacggcgacggcgtcgaggtggggtccgtgcgggagctcctggtcgtgtccgggctgcccgccgagaacagccgcgagcggcttgagatccgggacgacgagcggcgggtgatcagcttccggatcctgggcggcgaccaccgcctcgccaactaccgctccgtgaccaccgtgcacgaggcggcctcagagggcgggccgctcaccatggtcgtcgagtcctatgtggtggacgtgccgccggggaacaccgtcgaggagacgcgcatcttcgtggacaccatcgttcggtgcaacctccaatccctcgaggacacggttatcaggcagcaggcgatggcggcaccggcagcgccgcacaacgaccacaaccacagctgatcgccgccgggcccggccggctggacaccctcgcagtgggggctgccggtttcttcggaggcttcatctgccatttatgatgttttctttcgccgttggtattctatagtttcaccaataagaagaataggtactgtgaactttttaaaggttgaggttgttcgtcttccctttcttaaactctaaaaacgacaataaagtattgtatgatacaccaccaataatattaagaccagtaaagtagtatagttctaatatatatgtgtaagtttgtgtatagatatatatcttttcttttatatatagttctggcatgataggactagctagccaatatatgtgtgcatggctgcatgctcttgagggtttattttttctttttcttggtcaaacatgcagtaccttttatattactgctctgttgtgtatgaatgtttgtgtaagtaaacaagtcttagggagatcattaagtgaaaatatacaagatgagctaaaatttt

SEQ ID NO: 36150 - DNA, 1237 bp, Zea Mays
catcgacgcagccgctgaggacatcgctgagatcgagagaaacaactcgatcgatcgatcaagaagaccggcgaggctctagctccagaccgacaatgccgtacgcagccacaaggacgtcgccgcagcagcacagccgcgtggccagcaacgggagggccgtggcggcgtgcgcaggccacgcgggcgtgccggacgaggtggcgcggcaccacgagcacgcggtggccgcggggcagtgctgctctgtgatggtgcagtccatcgcggcgccggcggacgcggtgtggtcgctggtgcgccgcttcgaccagccgcaggggtacaagcgcttcatcaggagctgccacctggtggacggcgacggcgtcgaggtggggtccgtgcgggagctcctggtcgtgtccgggctgcccgccgagaacagccgcgagcggcttgagatccgggacgacgagcggcgggtgatcagcttccggatcctgggcggcgaccaccgcctcgccaactaccgctccgtgaccaccgtgcacgaggcggcctcagagggcgggccgctcaccatggtcgtcgagtcctatgtggtggacgtgccgccggggaacaccgtcgaggagacgcgcatcttcgtggacaccatcgttcggtgcaacctccaatccctcgaggacacggttatcaggcagcaggcgatggcggcaccggcagcgccgcacaacgaccacaaccacagctgatcgccgccgggcccggccggctggacaccctcgcagtgggggctgccggtttcttcggaggcttcatctgccatttatgatgttttctttcgccgttggtattctatagtttcaccaataagaagaataggtactgtgaactttttaaaggttgaggttgttcgtcttccctttcttaaactctaaaaacgacaataaagtattgtatgatacaccaccaataatattaagaccagtaaagtagtatagttctaatatatatgtgtaagtttgtgtatagatatatatcttttcttttatatatagttctggcatgataggactagctagccaatatatgtgtgcatggctgcatgctcttgagggtttattttttctttttcttggtcaaacatgcagtaccttttatattactgctctgttgtgtatgaatgtttgtgtaagtaaacaagtcttagggagatcattaagtgaaaatatacaagatgagctaaaatttt

SEQ ID NO: 36151 - DNA, 2325 bp, Zea Mays
tcgtcgtgacttgcgagttgcgacaccccaagcccccaacagcattgttggatgctaattctacggttttgtccgtatccacaactcattgcacataaattgtgatttcgcatcattcggtacatcattaactcatctgtgtatatggaggtcacgttggatgtatgtatctaaggcgctcctaggaagacaaaagttttgcatccttaatttcagatgcgctttctgcaagctaactagagactggagatgattgagctgcgctgcgccgcgccatcctcttctctgaattgccctgaagacttaggaggctcacaaatctgaagcttatatagatctgcacaggcttaaggagtgtttgcttcgtagcattagtgattggcatggatgaaaccctgcaagcactcgatgatctgatctcccagttcctgagcctggaccggtccctctggtccagttctgacgatgccgaggccttcttagaagccgtggacgaactgacttccaccatccatggcctcgagagcacctcagcggaccatgcgctccttgagagctttgacctccttctagagcgatgttccgcgaggctcaaggatgagttccagcgtctggtgggcacatccggcttcagcgacgacgaccatggtgaccgcagttccaagagaagccagaatgaagacgccaacgaccacacctttgtagcccagccagtcagaaactttgacatcatcgtcgatgccttgccggagggcgtagtcaccgaggcaaaccgagtcgcgagaaggatgattgctgccggttttggcgatacgtgtgcggagacctacgcctctgcacgccgcagcttcattgacgagagcattgctcgacttggggttgacgctcattgggaagaagaagaattgtgcaataagtcaacaacagcatgggaggagctcgagactcggatcatgcgctggatacctgcaacacgcgttgtgttccacatcttgatcccgagcgagcgtcacctgtgcgactgcatcttcgaaggattcacatcctacgctgaccttgccttcgccaccgcatgcagacctttcctccaacccctgtccttcgctgaagctatcgctgctgctgccggacataggccggagagtctcttccgcatggtcgacatgtacgatgccttaaccgatatccttcctgtccttgacgaagccttggatcacgaggtcgtggctgctcctcgtgaacgtcttggactgtcaatcaagggcatatttgtggctctagaaaagctgatacgcggtgacccgtgcgagtcttcgccgccagatggtggactgcatccgataaccaggtacgtgatgaactacctcatggcagcctgcgtgtctcgccacactctggaggaagtgatgctcgtggagttcggtcgtgctgatgaaacatgtccagtcgaccctgaccgtcccacgtcgtcactggcgatctgctttgcttggatcgtggacgtgctgatagcgaatctcgagtccaaatccaggatctatggtcacgctcctcttggctgtgtcttcctgatcaacaacgggatctacataatcaagaaagtcagtggatgcgagcttaagatcttgctgggcgaggattggaccagggtgatgtctgcgaaggttcaccagtgggtgctggagtaccgccgggctacctggggcagggccgtagcaatacttgagactgacagaagacctggcagtagttcgagtagtgttatgctagagaaactgaaccgcttccatacctttctggaagccatctgccaggtgcagtcacggtgggtactggtggataagcagcaggcagtggatctgagcgttatggttgaggagctggttgctccggtctacagggacacagttgagatgttgaaggcaacagaggatgtaggggtttcgtatgtgcgacctgaggacgtgaagtcacggattcagaggttgttcaaagcaatggccaagtcatagtagagtggctttcctggctgctctatgctctatagacaatctttgtgttgatgtatcttgttctcacatgttcaggctagtagagttttagggttacaggttcttccccttcattgctcttctctttttctctctttggcctgcttcagttttgtagcggtgttgtgtaattctattcttcttaatgaaatgcttgccgaggcattatcaaggcatgttcgtaaaaaaaaaaaaactgactctcctatgcaaggaaaagttcgatactaaactcgctctgtatgtgatcaaacgtctgcgatgactaatagag

SEQ ID NO: 36152 - DNA, 2635 bp, Zea Mays
acaaatccaaagcagttcccacctcatcgccttcctccttccaccgttccctgcccgccaaccaggacgtacacgccggacacacgtcacagccttgaagcctccctcccacacaaccccaagccccaacacaaacacacacacacgatcggtctcgtcgcagcgcagcgccgcgccgcgggtttgatcgtcacgagtggcgacttccttcccctccctctttcgccgatgaccacctcgtcctccgggagcatcgaagcaccggcgaactccagacccggctcgttctcgttcgcgagcacgagcacgagcttcacgaacatgctggggggatctgcggacgcggccggcggggcgtcgaggtacaaggccatgaccccaccgtccctgcccctgtcgccgtcgtccttcttcagtaacatccccgacggcctcaaccccgccgacttcctcgactcgccggcactcctgagctccagtatcttcccctcgccgacgacgaacgcattcgcctcgcagcagttcagctggctggtgacgccaggcgcggagcaaggcggcaaggacgagcagaggcagtcgtacccagacttctcgttccagaccgcgccgacggccgaagatgccgtgcggacgacgaccttccagccaccggttccagcggccccaccggtgagatcagcatccatatatgccatgccatcctctacgtcatcgccctctcgtgggtcctttgctgactttgtccaaaagagaaaactacaccactaaaaaagagagaactactggctggcatagcatcctggactatttgtttcataatagtaaagcacacaaatataaaagaacacttgtggtagtatcatgtcatgatcttataatcctttttttgtctatactataattgtcaaagacataattatactccaccagaacatattactaatatatcctttgcaacacttcaggttgaagaggcgtacagaggtcagcagcagccatgggcctaccagcagcagcaagctgcaggcatggacgccggatccagccaggctgcctacggcgggccgttccaccaggcagcctcgtcggacgccgccgcgatggcgccgcacgtgccggcgagcggcgggtacagccaccaggcgcagcagtcgcagaggcggtcgtcggacgacgggtacaactggcgcaagtacgggcagaagcaggtgaaggggagcgagaacccgcgcagctactacaagtgcaccttcccgagctgccccaccaagaagaaggtggagcggtcgctggacggccagatcaccgagatcgtgtacaagggcacgcacaaccacgccaagccgcagaacacgcgcaggaactccagcagcgcggctgcggcgcagctgctgcagggcggcgacgcgtccgagcactcgttcggcgggatgtcgggcacgcccgccgcgacgcccgagaactcctccgcgtccttcggggatgacgaggtcggcgtgggctcgccgcgggccgggaacgccggcggcgacgagttcgacgaggacgagccggattccaagagatggaggaaagacggcggtgacggcgagggtatctccatggccggcaaccgaacggtgcgtgagccgagggtcgttgtccagaccatgagcgatatcgacatcctcgacgacggctaccggtggaggaagtacgggcagaaggtggtgaagggaaatccaaacccaaggagctactacaagtgcacgacggtcgggtgccccgtgcgcaagcacgtggagcgcgcgtcccacgacctgcgcgccgtgatcaccacgtacgagggcaagcacaaccacgacgtgcccgccgcgcggggcagcgccgcgctctaccggcccgcgccgccgcccgcggacaccgccggccaccactacctcgccgcggcgcggccgggcgtggcctaccagacggggcagcagtacgggttcggtgaccagctgggctcgttcggcctcagcggcgcgccggcgcagagcggcggcggcggcttcgcgttctcttccggcttcgacaacccgatgggctcgtacatgagccagcaccagcagcagcagaggcagaacgacgccatgcacgcgtcgagggccaaggaggagccccgggaggacatgtttttcccgacgtcgttgctgtacactgactgaaggacaaggacggcaggacatggcgtggtgtggtgtccataaactgttcctttggcacacggattgttgttgttgttgttgttgttgtatctaggataggttgaacagatttctttatttgtttggaggcctccatgttggcagtggcagatgcttgccgtgccgcaggggtgtctcccttaacacgtgaaaggggggaaagaaagggatttaggatactagagtctaggacacgtggcaattacacagaaggggtaaagaagttttgttcctcaaagacaaattcacacatgagacttgttgtagtcaggattggacataatttcatgtcacagaacatttgttaagattcaaattgattgttctctggtacattgaggtgcgcgcgctagtgccgcaggagtatgcttgtttgtcaagggtagactagccctgtaggctga

SEQ ID NO: 36153 - DNA, 3923 bp, Zea Mays
gttatttttggtacgtgctgtgagcaacgcgcagccgggttcaaatcatacatcctttccgtcacttgaccctgttacttcccggcggcggagtggagtaccaatttatccaagttttaaacctgtagaggcagaggacttgggaatgctgaaaaatgtgcctgcaaaccgacgggggaattttttgtgcaaacaagattcgacctctgttcaagcagatattgttggcttctcatgagtatgggcttcatgctgatactgcccttattttcaatgatttaaagcacagtagattgaaggcctttatatttgttggccatcaccttggagacgacggttaaaatcttctacattctttgataagtggtgtggcgcttgttcattattctatcgttgcatagtttgatacgatggatgggaggaggacaattttgatgggacgatatgaaattggtaaacagctgggacaaggaacctttgcaaaggtcttttatgctcgtaatcttactactggcctggctgttgccataaagatgattaacaaggacaaggtcatgaaggttgggctcatggagcagataaagagggagatctcaataatgaggttagtgaagcatccaaatattcttcagctttatgaggttatggctagcaagagcaaaatttattttgttctggagtatgctaaaggtggtgagcttttcaacaaaattgctaaggggggaaagctcagtgaggatgctgcgaggaaatatttccagcagttggtcagtgctgttgatttttgccacagtcgaggtgtctatcaccgtgacttgaagcctgaaaaccttctacttgatgagaatgaaaaccttaaagtctcagattttggcctaagtgctctagctgagtccaagaggcaagatggtctcctgcataccacatgtggaactccagcttatgttgctcctgaagtgctgagtagaaaaggttatgatggtgcaaagtctgatgtgtggtcttgtggagtaattctttttgtgcttgtggctggttaccttcctttccatgacacaaatttgatagagatgtacaggaagatttccagagccgagtttagatgccctcgttttttctcaactgagctgaaggatctgctacataaaatccttgttccagatccaagcactagaatttctatctcgaggataaagaggagtgcttggtacagaaaaccggttgaagcacatgcaaagaaaaatgaggcagaaacaagcgagaatacttgtacgggtgaaggtacaacttctgtctcaacagagtgcagtacgtctgagggaaatcaagggccattaagcctcccaaacttgaatgcatttgacatcatctgtctctcaacaggttttaatctttctgggttttttgaggataagtatggtcgcagggaagagagatttactaccagacagcctgtaacaacagtatttacaaagctgaaggagcttgccaaacgcctaaagttgagggtcaagaagaaagaaaatgggaccttgaaattggcagctccgaaggaaggaaagaagggtatgcttgagcttgatgcagagatttttgaggttgctccttctttgctcttagttgagttgaaaaaaaccaatggggacacgctggagtatcaaaagctagtgaaagaggagataaggccggcactgaaggatattgtttgggtttggcaagatgatcaacaccagtgctcacaatcaccagagtctctattatcaccaccggagacacaggatgaattgcgattatcattgcctcagcaagagggtcaagacttcttagaagccccattgccatcactatcgcttgaccagttgaaatcaccaactgccccagagcaagcagagcaactgccacaaccagaacagttgcaaacgccaatcgctccagaggagcaaattaactagctctaacagccagctgatcgtagtacacttgctgtccatgtcctgcagaggaacgtctctcctggagacatacaaaggcatccagatatgtccccatcgaagaaacagttaacaaacaacaatgattcgctgtactggtcaaatgaaaaatatgactactcttgctcttggttggatgaccgggcaatgatttcagctttgcttgatgtggtcatagaagaagactctgcaagtctactccccccggagcgctctcccctcttcctcttgtagctggtgtggaggctgagctgcatccggtctctgttggccataagagcatggatgcagaaatgaaacagccacttgagggatccatgtccctgaacatcgacagcgaaggtgaaccccacattggaaatggatcgatcgtcgtcgagaaccctgcatctgacctggtgaagtcagaatctgaccgaataaaaaccttttaccagacggtcctgtcggctatcatggtgttcgtcacggcagcgctatcaagctacaaggacatgaagcctctttactcgaccacaagccacggcaaagctcacctcagcaacctcctagtcgacgagggcctattcatattcatgaccttcttgtgtgctatggtcctaatgatgtctgagttcgtcgtgcaccagcatggccggcggggccatgtctggtgctgggttcgcaccattctcgttgcagtcaccggtgtgatgctaatcgtggctgacacaatcctcctcatcgtgacgaaccgaagcaacatgttgctgtcagttcttcttgtaccggaggtgttgcttttcggcgtggccgtgagcgttggagcatggatgcaagagagtttacccagctcggagcttggcagcaggtacgattccgccatgaagggaacctttgatatagctacagttggcaccattgtctcgttcacgcttcaggggggcatcgtctttggctacctgaaaaccccagacagtaatcaggtcaagcatgacccgccgctggacctcgctgcgtgctacgccacctcgacgctctccctgaccggaatgacaatgtgtgccatgccgctggcatatctccccaacggcatgctggaggttctcgtcagagtcgtcgagaggcttaggagtgctgtgctggccgctctggcgatgatggcgctggtcgtctcagtggagttcctggatggattcgtcgtggtctccttctttcccgacgccgtcacgattgccctgtactacgtggtgaagctgttctcggcatgtcaaccccgagaggagatctcacagctggacttcaccttccggatcgttgccgccgcggggttcacgctaatgactggactctatgcggcttttacggggacagatcactatggcttcaacctcaagaccgctatgttcatcctgttgcttgcagttgtgtcgagcttgagccgtctggcaatcccacttcacatgcctgaggcgggagtgggaggagtcatcgagttcggcattgttagtatagctctctcttttcccctgctggcgcttctggctgccattccattggtgttcaaggtcttcgtcgaccattacatcaatcgctagtctttgggttgtctggcgcaattcttcctgtggtacagtgccagtaatgaatgatgcgtttttaaactaagggcataaatttaaaaatcttatttttattactgcatttactcagtctaggttgcttgtttggaagagcaacagcaagagactagccagatcctttgtaaggataaatttggctattattagaagaaaaatgtctttaaatttagtagctctctatccgtacagttttactattttatctacagttttactattttatttttagatagcctacttcgatcatcatataaagttctgaatttatggagtaggttgaactagtgtactttttaaaaatctattttag

SEQ ID NO: 36154 - DNA, 5040 bp, Zea Mays
gttgcgaagcaccttgcccctaaacccgtacccgtccacgagccagctcgggtcaggggcatagacgtccactgtagatccctcgcgtcaggggtataaacgtccaatcccccacttaaccgtcaccacgcccacttgcatcgccgttgcggaattgcggagcgcgccgccaaaacaaacgcgtcctgctgccggaatcagaagatcccgaggggttctgatctgagggcccaccatcctctctacacggcacaggaacccaactactactactacaatcgttgccagggagctcaaccgactcgggaccaaaatcggctgctgttgctggctgggacgaaatcggaggcatccgcctttctcgagagatcgagctccgcgccggagcaggcgggccaggcggtgccgctgctgcctgctggtgggtttacaacatagggatggagtcgagatccatccggattcgacattcgaggtcttctgctttgctgttttaaacctgtagaggcagaggacttgggaatgctgaaaaatgtgcctgcaaaccgacgggggaattttttgtgcaaacaagattcgacctctgttcaagcagatattgttggcttctcatgagtatgggcttcatgctgatactgcccttattttcaatgatttaaagcacagtagattgaaggcctttatatttgttggccatcaccttggagacgacggttaaaatcttctacattctttgataagtggtgtggcgcttgttcattattctatcgttgcatagtttgatacgatggatgggaggaggacaattttgatgggacgatatgaaattggtaaacagctgggacaaggaacctttgcaaaggtcttttatgctcgtaatcttactactggcctggctgttgccataaagatgattaacaaggacaaggtcatgaaggttgggctcatggagcagataaagagggagatctcaataatgaggttagtgaagcatccaaatattcttcagctttatgaggttatggctagcaagagcaaaatttattttgttctggagtatgctaaaggtggtgagcttttcaacaaaattgctaaggggggaaagctcagtgaggatgctgcgaggaaatatttccagcagttggtcagtgctgttgatttttgccacagtcgaggtgtctatcaccgtgacttgaagcctgaaaaccttctacttgatgagaatgaaaaccttaaagtctcagattttggcctaagtgctctagctgagtccaagaggcaagatggtctcctgcataccacatgtggaactccagcttatgttgctcctgaagtgctgagtagaaaaggttatgatggtgcaaagtctgatgtgtggtcttgtggagtaattctttttgtgcttgtggctggttaccttcctttccatgacacaaatttgatagagatgtacaggaagatttccagagccgagtttagatgccctcgttttttctcaactgagctgaaggatctgctacataaaatccttgttccagatccaagcactagaatttctatctcgaggataaagaggagtgcttggtacagaaaaccggttgaagcacatgcaaagaaaaatgaggcagaaacaagcgagaatacttgtacgggtgaaggtacaacttctgtctcaacagagtgcagtacgtctgagggaaatcaagggccattaagcctcccaaacttgaatgcatttgacatcatctgtctctcaacaggttttaatctttctgggttttttgaggataagtatggtcgcagggaagagagatttactaccagacagcctgtaacaacagtatttacaaagctgaaggagcttgccaaacgcctaaagttgagggtcaagaagaaagaaaatgggaccttgaaattggcagctccgaaggaaggaaagaagggtatgcttgagcttgatgcagagatttttgaggttgctccttctttgctcttagttgagttgaaaaaaaccaatggggacacgctggagtatcaaaagctagtgaaagaggagataaggccggcactgaaggatattgtttgggtttggcaagatgatcaacaccagtgctcacaatcaccagagtctctattatcaccaccggagacacaggatgaattgcgattatcattgcctcagcaagagggtcaagacttcttagaagccccattgccatcactatcgcttgaccagttgaaatcaccaactgccccagagcaagcagagcaactgccacaaccagaacagttgcaaacgccaatcgctccagaggagcaaattaactagctctaacagccagctggtaattcatatgcccctctcagccatagttcatagttctattccggtttttactctttgttccggcttttctatttcttctggaattgtaaagctgtatgcctgtatgtactgcagaaatgccatgtattccagtttgaaatgatataatacatcatacatccgatgttaaaccaaaattttggaaagaataatattcattgaccagcactattgagttgtatgaatttatgaccgaaaagtcttcatgattggtttcctctactatcacagctgtaagcagatttattgctgtggattttggctgttatgatcgtattctaagttcgtcgcggagatttgtttccctcgcgtagtgctctgtgtgtcttaggtttgagccttgctaattgccatgttgattagatagatagtgtggcaaaaattcttcacgcttcggtttgcttactgcagatgccaaaaaagcaaaggaaaaaggtcccgacaaaaaagaaaggatttgcatgtacaatatcagcagtggagtgttgagttaggctcaactcgtgtcatttactatatttctcctttcaccttgcaatccgaaaatttacaattcctgtaccaaaatgcatctatctgttctgtttttttttttgctttctttggattgctgttatccacgaattaaacaaatgatatgaataagttttcattataaattgccattttttgtttctttatagaaatatgtgtggattgtgaagaaaatgataacaaaaatagttgatacttctttgagggaggtggaaatttcttgaggtattcgtgctttgaaatgattcagtaacctcttttacaaacagatcgtagtacacttgctgtccatgtcctgcagaggaacgtctctcctggagacatacaaaggcatccagatatgtccccatcgaagaaacagttaacaaacaacaatgattcgctgtactggtcaagagcgctctcccctcttcctcttgtagctggtgtggaggctgagctgcatccggtctctgttggccataagagcatggatgcagaaatgaaacagccacttgagggatccatgtccctgaacatcgacagcgaaggtgaaccccacattggaaatggatcgatcgtcgtcgagaaccctgcatctgacctggtgaagtcagaatctgaccgaataaaaaccttttaccagacggtcctgtcggctatcatggtgttcgtcacggcagcgctatcaagctacaaggacatgaagcctctttactcgaccacaagccacggcaaagctcacctcagcaacctcctagtcgacgagggcctattcatattcatgaccttcttgtgtgctatggtcctaatgatgtctgagttcgtcgtgcaccagcatggccggcggggccatgtctggtgctgggttcgcaccattctcgttgcagtcaccggtgtgatgctaatcgtggctgacacaatcctcctcatcgtgacgaaccgaagcaacatgttgctgtcagttcttcttgtaccggaggtgttgcttttcggcgtggccgtgagcgttggagcatggatgcaagagagtttacccagctcggagcttggcagcaggtacgattccgccatgaagggaacctttgatatagctacagttggcaccattgtctcgttcacgcttcaggggggcatcgtctttggctacctgaaaaccccagacagtaatcaggtcaagcatgacccgccgctggacctcgctgcgtgctacgccacctcgacgctctccctgaccggaatgacaatgtgtgccatgccgctggcatatctccccaacggcatgctggaggttctcgtcagagtcgtcgagaggcttaggagtgctgtgctggccgctctggcgatgatggcgctggtcgtctcagtggagttcctggatggattcgtcgtggtctccttctttcccgacgccgtcacgattgccctgtactacgtggtgaagctgttctcggcatgtcaaccccgagaggagatctcacagctggacttcaccttccggatcgttgccgccgcggggttcacgctaatgactggactctatgcggcttttacggggacagatcactatggcttcaacctcaagaccgctatgttcatcctgttgcttgcagttgtgtcgagcttgagccgtctggcaatcccacttcacatgcctgaggcgggagtgggaggagtcatcgagttcggcattgttagtatagctctctcttttcccctgctggcgcttctggctgccattccattggtgttcaaggtcttcgtcgaccattacatcaatcgctagtctttgggttgtctggcgcaattcttcctgtggtacagtgccagtaatgaatgatgcgtttttaaactaagggcataaatttaaaaatcttatttttattactgcatttactcagtctaggttgcttgtttggaagagcaacagcaagagactagccagatcctttgtaaggataaatttggctattattagaagaaaaatgtctttaaatttagtagctctctatccgtacagttttactattttatctacagttttactattttatttttagatagcctacttcgatcatcatataaagttctgaatttatggagtaggttgaactagtgtactttttaaaaatctattttag

SEQ ID NO: 36155 - DNA, 4401 bp, Zea Mays
caacgaccgctgtatcttcgcaccgaccgacgggcccgccggccgtcgatctcctgttgcgaagcaccttgcccctaaacccgtacccgtccacgagccagctcgggtcaggggcatagacgtccactgtagatccctcgcgtcaggggtataaacgtccaatcccccacttaaccgtcaccacgcccacttgcatcgccgttgcggaattgcggagcgcgccgccaaaacaaacgcgtcctgctgccggaatcagaagatcccgaggggttctgatctgagggcccaccatcctctctacacggcacaggaacccaactactactactacaatcgttgccagggagctcaaccgactcgggaccaaaatcggctgctgttgctggctgggacgaaatcggaggcatccgcctttctcgagagatcgagctccgcgccggagcaggcgggccaggcggtgccgctgctgcctgctggtgggtttacaacatagggatggagtcgagatccatccggattcgacattcgaggtcttctgctttgctgttttaaacctgtagaggcagaggacttgggaatgctgaaaaatgtgcctgcaaaccgacgggggaattttttgtgcaaacaagattcgacctctgttcaagcagatattgttggcttctcatgagtatgggcttcatgctgatactgcccttattttcaatgatttaaagcacagtagattgaaggcctttatatttgttggccatcaccttggagacgacggttaaaatcttctacattctttgataagtggtgtggcgcttgttcattattctatcgttgcatagtttgatacgatggatgggaggaggacaattttgatgggacgatatgaaattggtaaacagctgggacaaggaacctttgcaaaggtcttttatgctcgtaatcttactactggcctggctgttgccataaagatgattaacaaggacaaggtcatgaaggttgggctcatggagcagataaagagggagatctcaataatgaggttagtgaagcatccaaatattcttcagctttatgaggttatggctagcaagagcaaaatttattttgttctggagtatgctaaaggtggtgagcttttcaacaaaattgctaaggggggaaagctcagtgaggatgctgcgaggaaatatttccagcagttggtcagtgctgttgatttttgccacagtcgaggtgtctatcaccgtgacttgaagcctgaaaaccttctacttgatgagaatgaaaaccttaaagtctcagattttggcctaagtgctctagctgagtccaagaggcaagatggtctcctgcataccacatgtggaactccagcttatgttgctcctgaagtgctgagtagaaaaggttatgatggtgcaaagtctgatgtgtggtcttgtggagtaattctttttgtgcttgtggctggttaccttcctttccatgacacaaatttgatagagatgtacaggaagatttccagagccgagtttagatgccctcgttttttctcaactgagctgaaggatctgctacataaaatccttgttccagatccaagcactagaatttctatctcgaggataaagaggagtgcttggtacagaaaaccggttgaagcacatgcaaagaaaaatgaggcagaaacaagcgagaatacttgtacgggtgaaggtacaacttctgtctcaacagagtgcagtacgtctgagggaaatcaagggccattaagcctcccaaacttgaatgcatttgacatcatctgtctctcaacaggttttaatctttctgggttttttgaggataagtatggtcgcagggaagagagatttactaccagacagcctgtaacaacagtatttacaaagctgaaggagcttgccaaacgcctaaagttgagggtcaagaagaaagaaaatgggaccttgaaattggcagctccgaaggaaggaaagaagggtatgcttgagcttgatgcagagatttttgaggttgctccttctttgctcttagttgagttgaaaaaaaccaatggggacacgctggagtatcaaaagctagtgaaagaggagataaggccggcactgaaggatattgtttgggtttggcaagatgatcaacaccagtgctcacaatcaccagagtctctattatcaccaccggagacacaggatgaattgcgattatcattgcctcagcaagagggtcaagacttcttagaagccccattgccatcactatcgcttgaccagttgaaatcaccaactgccccagagcaagcagagcaactgccacaaccagaacagttgcaaacgccaatcgctccagaggagcaaattaactagctctaacagccagctgatgccaaaaaagcaaaggaaaaaggtcccgacaaaaaagaaaggatttgcatgtacaatatcagcagtggagtgttgaaggaacgtctctcctggagacatacaaaggcatccagatatgtccccatcgaagaaacagttaacaaacaacaatgattcgctgtactggtcaaatgaaaaatatgactactcttgctcttggttggatgaccgggcaatgatttcagctttgcttgatgtggtcatagaagaagactctgcaagtctactccccccggagcgctctcccctcttcctcttgtagctggtgtggaggctgagctgcatccggtctctgttggccataagagcatggatgcagaaatgaaacagccacttgagggatccatgtccctgaacatcgacagcgaaggtgaaccccacattggaaatggatcgatcgtcgtcgagaaccctgcatctgacctggtgaagtcagaatctgaccgaataaaaaccttttaccagacggtcctgtcggctatcatggtgttcgtcacggcagcgctatcaagctacaaggacatgaagcctctttactcgaccacaagccacggcaaagctcacctcagcaacctcctagtcgacgagggcctattcatattcatgaccttcttgtgtgctatggtcctaatgatgtctgagttcgtcgtgcaccagcatggccggcggggccatgtctggtgctgggttcgcaccattctcgttgcagtcaccggtgtgatgctaatcgtggctgacacaatcctcctcatcgtgacgaaccgaagcaacatgttgctgtcagttcttcttgtaccggaggtgttgcttttcggcgtggccgtgagcgttggagcatggatgcaagagagtttacccagctcggagcttggcagcaggtacgattccgccatgaagggaacctttgatatagctacagttggcaccattgtctcgttcacgcttcaggggggcatcgtctttggctacctgaaaaccccagacagtaatcaggtcaagcatgacccgccgctggacctcgctgcgtgctacgccacctcgacgctctccctgaccggaatgacaatgtgtgccatgccgctggcatatctccccaacggcatgctggaggttctcgtcagagtcgtcgagaggcttaggagtgctgtgctggccgctctggcgatgatggcgctggtcgtctcagtggagttcctggatggattcgtcgtggtctccttctttcccgacgccgtcacgattgccctgtactacgtggtgaagctgttctcggcatgtcaaccccgagaggagatctcacagctggacttcaccttccggatcgttgccgccgcggggttcacgctaatgactggactctatgcggcttttacggggacagatcactatggcttcaacctcaagaccgctatgttcatcctgttgcttgcagttgtgtcgagcttgagccgtctggcaatcccacttcacatgcctgaggcgggagtgggaggagtcatcgagttcggcattgttagtatagctctctcttttcccctgctggcgcttctggctgccattccattggtgttcaaggtcttcgtcgaccattacatcaatcgctagtctttgggttgtctggcgcaattcttcctgtggtacagtgccagtaatgaatgatgcgtttttaaactaagggcataaatttaaaaatcttatttttattactgcatttactcagtctaggttgcttgtttggaagagcaacagcaagagactagccagatcctttgtaaggataaatttggctattattagaagaaaaatgtctttaaatttagtagctctctatccgtacagttttactattttatctacagttttactattttatttttagatagcctacttcgatcatcatataaagttctgaatttatggagtaggttgaactagtgtactttttaaaaatctattttag

SEQ ID NO: 36156 - DNA, 4407 bp, Zea Mays
caacgaccgctgtatcttcgcaccgaccgacgggcccgccggccgtcgatctcctgttgcgaagcaccttgcccctaaacccgtacccgtccacgagccagctcgggtcaggggcatagacgtccactgtagatccctcgcgtcaggggtataaacgtccaatcccccacttaaccgtcaccacgcccacttgcatcgccgttgcggaattgcggagcgcgccgccaaaacaaacgcgtcctgctgccggaatcagaagatcccgaggggttctgatctgagggcccaccatcctctctacacggcacaggaacccaactactactactacaatcgttgccagggagctcaaccgactcgggaccaaaatcggctgctgttgctggctgggacgaaatcggaggcatccgcctttctcgagagatcgagctccgcgccggagcaggcgggccaggcggtgccgctgctgcctgctggtgggtttacaacatagggatggagtcgagatccatccggattcgacattcgaggtcttctgctttgctgttttaaacctgtagaggcagaggacttgggaatgctgaaaaatgtgcctgcaaaccgacgggggaattttttgtgcaaacaagattcgacctctgttcaagcagatattgttggcttctcatgagtatgggcttcatgctgatactgcccttattttcaatgatttaaagcacagtagattgaaggcctttatatttgttggccatcaccttggagacgacggttaaaatcttctacattctttgataagtggtgtggcgcttgttcattattctatcgttgcatagtttgatacgatggatgggaggaggacaattttgatgggacgatatgaaattggtaaacagctgggacaaggaacctttgcaaaggtcttttatgctcgtaatcttactactggcctggctgttgccataaagatgattaacaaggacaaggtcatgaaggttgggctcatggagcagataaagagggagatctcaataatgaggttagtgaagcatccaaatattcttcagctttatgaggttatggctagcaagagcaaaatttattttgttctggagtatgctaaaggtggtgagcttttcaacaaaattgctaaggggggaaagctcagtgaggatgctgcgaggaaatatttccagcagttggtcagtgctgttgatttttgccacagtcgaggtgtctatcaccgtgacttgaagcctgaaaaccttctacttgatgagaatgaaaaccttaaagtctcagattttggcctaagtgctctagctgagtccaagaggcaagatggtctcctgcataccacatgtggaactccagcttatgttgctcctgaagtgctgagtagaaaaggttatgatggtgcaaagtctgatgtgtggtcttgtggagtaattctttttgtgcttgtggctggttaccttcctttccatgacacaaatttgatagagatgtacaggaagatttccagagccgagtttagatgccctcgttttttctcaactgagctgaaggatctgctacataaaatccttgttccagatccaagcactagaatttctatctcgaggataaagaggagtgcttggtacagaaaaccggttgaagcacatgcaaagaaaaatgaggcagaaacaagcgagaatacttgtacgggtgaaggtacaacttctgtctcaacagagtgcagtacgtctgagggaaatcaagggccattaagcctcccaaacttgaatgcatttgacatcatctgtctctcaacaggttttaatctttctgggttttttgaggataagtatggtcgcagggaagagagatttactaccagacagcctgtaacaacagtatttacaaagctgaaggagcttgccaaacgcctaaagttgagggtcaagaagaaagaaaatgggaccttgaaattggcagctccgaaggaaggaaagaagggtatgcttgagcttgatgcagagatttttgaggttgctccttctttgctcttagttgagttgaaaaaaaccaatggggacacgctggagtatcaaaagctagtgaaagaggagataaggccggcactgaaggatattgtttgggtttggcaagatgatcaacaccagtgctcacaatcaccagagtctctattatcaccaccggagacacaggatgaattgcgattatcattgcctcagcaagagggtcaagacttcttagaagccccattgccatcactatcgcttgaccagttgaaatcaccaactgccccagagcaagcagagcaactgccacaaccagaacagttgcaaacgccaatcgctccagaggagcaaattaactagctctaacagccagctgatgccaaaaaagcaaaggaaaaaggtcccgacaaaaaagaaaggatttgcatatcgtagtacacttgctgtccatgtcctgcagaggaacgtctctcctggagacatacaaaggcatccagatatgtccccatcgaagaaacagttaacaaacaacaatgattcgctgtactggtcaaatgaaaaatatgactactcttgctcttggttggatgaccgggcaatgatttcagctttgcttgatgtggtcatagaagaagactctgcaagtctactccccccggagcgctctcccctcttcctcttgtagctggtgtggaggctgagctgcatccggtctctgttggccataagagcatggatgcagaaatgaaacagccacttgagggatccatgtccctgaacatcgacagcgaaggtgaaccccacattggaaatggatcgatcgtcgtcgagaaccctgcatctgacctggtgaagtcagaatctgaccgaataaaaaccttttaccagacggtcctgtcggctatcatggtgttcgtcacggcagcgctatcaagctacaaggacatgaagcctctttactcgaccacaagccacggcaaagctcacctcagcaacctcctagtcgacgagggcctattcatattcatgaccttcttgtgtgctatggtcctaatgatgtctgagttcgtcgtgcaccagcatggccggcggggccatgtctggtgctgggttcgcaccattctcgttgcagtcaccggtgtgatgctaatcgtggctgacacaatcctcctcatcgtgacgaaccgaagcaacatgttgctgtcagttcttcttgtaccggaggtgttgcttttcggcgtggccgtgagcgttggagcatggatgcaagagagtttacccagctcggagcttggcagcaggtacgattccgccatgaagggaacctttgatatagctacagttggcaccattgtctcgttcacgcttcaggggggcatcgtctttggctacctgaaaaccccagacagtaatcaggtcaagcatgacccgccgctggacctcgctgcgtgctacgccacctcgacgctctccctgaccggaatgacaatgtgtgccatgccgctggcatatctccccaacggcatgctggaggttctcgtcagagtcgtcgagaggcttaggagtgctgtgctggccgctctggcgatgatggcgctggtcgtctcagtggagttcctggatggattcgtcgtggtctccttctttcccgacgccgtcacgattgccctgtactacgtggtgaagctgttctcggcatgtcaaccccgagaggagatctcacagctggacttcaccttccggatcgttgccgccgcggggttcacgctaatgactggactctatgcggcttttacggggacagatcactatggcttcaacctcaagaccgctatgttcatcctgttgcttgcagttgtgtcgagcttgagccgtctggcaatcccacttcacatgcctgaggcgggagtgggaggagtcatcgagttcggcattgttagtatagctctctcttttcccctgctggcgcttctggctgccattccattggtgttcaaggtcttcgtcgaccattacatcaatcgctagtctttgggttgtctggcgcaattcttcctgtggtacagtgccagtaatgaatgatgcgtttttaaactaagggcataaatttaaaaatcttatttttattactgcatttactcagtctaggttgcttgtttggaagagcaacagcaagagactagccagatcctttgtaaggataaatttggctattattagaagaaaaatgtctttaaatttagtagctctctatccgtacagttttactattttatctacagttttactattttatttttagatagcctacttcgatcatcatataaagttctgaatttatggagtaggttgaactagtgtactttttaaaaatctattttag

SEQ ID NO: 36157 - DNA, 4449 bp, Zea Mays
caacgaccgctgtatcttcgcaccgaccgacgggcccgccggccgtcgatctcctgttgcgaagcaccttgcccctaaacccgtacccgtccacgagccagctcgggtcaggggcatagacgtccactgtagatccctcgcgtcaggggtataaacgtccaatcccccacttaaccgtcaccacgcccacttgcatcgccgttgcggaattgcggagcgcgccgccaaaacaaacgcgtcctgctgccggaatcagaagatcccgaggggttctgatctgagggcccaccatcctctctacacggcacaggaacccaactactactactacaatcgttgccagggagctcaaccgactcgggaccaaaatcggctgctgttgctggctgggacgaaatcggaggcatccgcctttctcgagagatcgagctccgcgccggagcaggcgggccaggcggtgccgctgctgcctgctggtgggtttacaacatagggatggagtcgagatccatccggattcgacattcgaggtcttctgctttgctgttttaaacctgtagaggcagaggacttgggaatgctgaaaaatgtgcctgcaaaccgacgggggaattttttgtgcaaacaagattcgacctctgttcaagcagatattgttggcttctcatgagtatgggcttcatgctgatactgcccttattttcaatgatttaaagcacagtagattgaaggcctttatatttgttggccatcaccttggagacgacggttaaaatcttctacattctttgataagtggtgtggcgcttgttcattattctatcgttgcatagtttgatacgatggatgggaggaggacaattttgatgggacgatatgaaattggtaaacagctgggacaaggaacctttgcaaaggtcttttatgctcgtaatcttactactggcctggctgttgccataaagatgattaacaaggacaaggtcatgaaggttgggctcatggagcagataaagagggagatctcaataatgaggttagtgaagcatccaaatattcttcagctttatgaggttatggctagcaagagcaaaatttattttgttctggagtatgctaaaggtggtgagcttttcaacaaaattgctaaggggggaaagctcagtgaggatgctgcgaggaaatatttccagcagttggtcagtgctgttgatttttgccacagtcgaggtgtctatcaccgtgacttgaagcctgaaaaccttctacttgatgagaatgaaaaccttaaagtctcagattttggcctaagtgctctagctgagtccaagaggcaagatggtctcctgcataccacatgtggaactccagcttatgttgctcctgaagtgctgagtagaaaaggttatgatggtgcaaagtctgatgtgtggtcttgtggagtaattctttttgtgcttgtggctggttaccttcctttccatgacacaaatttgatagagatgtacaggaagatttccagagccgagtttagatgccctcgttttttctcaactgagctgaaggatctgctacataaaatccttgttccagatccaagcactagaatttctatctcgaggataaagaggagtgcttggtacagaaaaccggttgaagcacatgcaaagaaaaatgaggcagaaacaagcgagaatacttgtacgggtgaaggtacaacttctgtctcaacagagtgcagtacgtctgagggaaatcaagggccattaagcctcccaaacttgaatgcatttgacatcatctgtctctcaacaggttttaatctttctgggttttttgaggataagtatggtcgcagggaagagagatttactaccagacagcctgtaacaacagtatttacaaagctgaaggagcttgccaaacgcctaaagttgagggtcaagaagaaagaaaatgggaccttgaaattggcagctccgaaggaaggaaagaagggtatgcttgagcttgatgcagagatttttgaggttgctccttctttgctcttagttgagttgaaaaaaaccaatggggacacgctggagtatcaaaagctagtgaaagaggagataaggccggcactgaaggatattgtttgggtttggcaagatgatcaacaccagtgctcacaatcaccagagtctctattatcaccaccggagacacaggatgaattgcgattatcattgcctcagcaagagggtcaagacttcttagaagccccattgccatcactatcgcttgaccagttgaaatcaccaactgccccagagcaagcagagcaactgccacaaccagaacagttgcaaacgccaatcgctccagaggagcaaattaactagctctaacagccagctgatgccaaaaaagcaaaggaaaaaggtcccgacaaaaaagaaaggatttgcatgtacaatatcagcagtggagtgttgaaaatatgtgtggattgtgaagaaaatgataacaaaaatagttgatacttctttgagggaggtggaaatttcttgaggtattcgtgctttgaaatgattcagtaacctcttttacaaacagatcgtagtacacttgctgtccatgtcctgcagaggaacgtctctcctggagacatacaaaggcatccagatatgtccccatcgaagaaacagttaacaaacaacaatgattcgctgtactggtcaagagcgctctcccctcttcctcttgtagctggtgtggaggctgagctgcatccggtctctgttggccataagagcatggatgcagaaatgaaacagccacttgagggatccatgtccctgaacatcgacagcgaaggtgaaccccacattggaaatggatcgatcgtcgtcgagaaccctgcatctgacctggtgaagtcagaatctgaccgaataaaaaccttttaccagacggtcctgtcggctatcatggtgttcgtcacggcagcgctatcaagctacaaggacatgaagcctctttactcgaccacaagccacggcaaagctcacctcagcaacctcctagtcgacgagggcctattcatattcatgaccttcttgtgtgctatggtcctaatgatgtctgagttcgtcgtgcaccagcatggccggcggggccatgtctggtgctgggttcgcaccattctcgttgcagtcaccggtgtgatgctaatcgtggctgacacaatcctcctcatcgtgacgaaccgaagcaacatgttgctgtcagttcttcttgtaccggaggtgttgcttttcggcgtggccgtgagcgttggagcatggatgcaagagagtttacccagctcggagcttggcagcaggtacgattccgccatgaagggaacctttgatatagctacagttggcaccattgtctcgttcacgcttcaggggggcatcgtctttggctacctgaaaaccccagacagtaatcaggtcaagcatgacccgccgctggacctcgctgcgtgctacgccacctcgacgctctccctgaccggaatgacaatgtgtgccatgccgctggcatatctccccaacggcatgctggaggttctcgtcagagtcgtcgagaggcttaggagtgctgtgctggccgctctggcgatgatggcgctggtcgtctcagtggagttcctggatggattcgtcgtggtctccttctttcccgacgccgtcacgattgccctgtactacgtggtgaagctgttctcggcatgtcaaccccgagaggagatctcacagctggacttcaccttccggatcgttgccgccgcggggttcacgctaatgactggactctatgcggcttttacggggacagatcactatggcttcaacctcaagaccgctatgttcatcctgttgcttgcagttgtgtcgagcttgagccgtctggcaatcccacttcacatgcctgaggcgggagtgggaggagtcatcgagttcggcattgttagtatagctctctcttttcccctgctggcgcttctggctgccattccattggtgttcaaggtcttcgtcgaccattacatcaatcgctagtctttgggttgtctggcgcaattcttcctgtggtacagtgccagtaatgaatgatgcgtttttaaactaagggcataaatttaaaaatcttatttttattactgcatttactcagtctaggttgcttgtttggaagagcaacagcaagagactagccagatcctttgtaaggataaatttggctattattagaagaaaaatgtctttaaatttagtagctctctatccgtacagttttactattttatctacagttttactattttatttttagatagcctacttcgatcatcatataaagttctgaatttatggagtaggttgaactagtgtactttttaaaaatctattttag

SEQ ID NO: 36158 - DNA, 4310 bp, Zea Mays
ctcccgtcaacgaccgctgtatcttcgcaccgaccgacgggcccgccggccgtcgatctcctgttgcgaagcaccttgcccctaaacccgtacccgtccacgagccagctcgggtcaggggcatagacgtccactgtagatccctcgcgtcaggggtataaacgtccaatcccccacttaaccgtcaccacgcccacttgcatcgccgttgcggaattgcggagcgcgccgccaaaacaaacgcgtcctgctgccggaatcagaagatcccgaggggttctgatctgagggcccaccatcctctctacacggcacaggaacccaactactactactacaatcgttgccagggagctcaaccgactcgggaccaaaatcggctgctgttgctggctgggacgaaatcggaggcatccgcctttctcgagagatcgagctccgcgccggagcaggcgggccaggcggtgccgctgctgcctgctggtgggtttacaacatagggatggagtcgagatccatccggattcgacattcgaggtcttctgctttgctgttttaaacctgtagaggcagaggacttgggaatgctgaaaaatgtgcctgcaaaccgacgggggaattttttgtgcaaacaagattcgacctctgttcaagcagatattgttggcttctcatgagtatgggcttcatgctgatactgcccttattttcaatgatttaaagcacagtagattgaaggcctttatatttgttggccatcaccttggagacgacggttaaaatcttctacattctttgataagtggtgtggcgcttgttcattattctatcgttgcatagtttgatacgatggatgggaggaggacaattttgatgggacgatatgaaattggtaaacagctgggacaaggaacctttgcaaaggtcttttatgctcgtaatcttactactggcctggctgttgccataaagatgattaacaaggacaaggtcatgaaggttgggctcatggagcagataaagagggagatctcaataatgaggttagtgaagcatccaaatattcttcagctttatgaggttatggctagcaagagcaaaatttattttgttctggagtatgctaaaggtggtgagcttttcaacaaaattgctaaggggggaaagctcagtgaggatgctgcgaggaaatatttccagcagttggtcagtgctgttgatttttgccacagtcgaggtgtctatcaccgtgacttgaagcctgaaaaccttctacttgatgagaatgaaaaccttaaagtctcagattttggcctaagtgctctagctgagtccaagaggcaagatggtctcctgcataccacatgtggaactccagcttatgttgctcctgaagtgctgagtagaaaaggttatgatggtgcaaagtctgatgtgtggtcttgtggagtaattctttttgtgcttgtggctggttaccttcctttccatgacacaaatttgatagagatgtacaggaagatttccagagccgagtttagatgccctcgttttttctcaactgagctgaaggatctgctacataaaatccttgttccagatccaagcactagaatttctatctcgaggataaagaggagtgcttggtacagaaaaccggttgaagcacatgcaaagaaaaatgaggcagaaacaagcgagaatacttgtacgggtgaaggtacaacttctgtctcaacagagtgcagtacgtctgagggaaatcaagggccattaagcctcccaaacttgaatgcatttgacatcatctgtctctcaacaggttttaatctttctgggttttttgaggataagtatggtcgcagggaagagagatttactaccagacagcctgtaacaacagtatttacaaagctgaaggagcttgccaaacgcctaaagttgagggtcaagaagaaagaaaatgggaccttgaaattggcagctccgaaggaaggaaagaagggtatgcttgagcttgatgcagagatttttgaggttgctccttctttgctcttagttgagttgaaaaaaaccaatggggacacgctggagtatcaaaagctagtgaaagaggagataaggccggcactgaaggatattgtttgggtttggcaagatgatcaacaccagtgctcacaatcaccagagtctctattatcaccaccggagacacaggatgaattgcgattatcattgcctcagcaagagggtcaagacttcttagaagccccattgccatcactatcgcttgaccagttgaaatcaccaactgccccagagcaagcagagcaactgccacaaccagaacagttgcaaacgccaatcgctccagaggagcaaattaactagctctaacagccagctgatgccaaaaaagcaaaggaaaaaggtcccgacaaaaaagaaaggatttgcatatcgtagtacacttgctgtccatgtcctgcagaggaacgtctctcctggagacatacaaaggcatccagatatgtccccatcgaagaaacagttaacaaacaacaatgattcgctgtactggtcaagagcgctctcccctcttcctcttgtagctggtgtggaggctgagctgcatccggtctctgttggccataagagcatggatgcagaaatgaaacagccacttgagggatccatgtccctgaacatcgacagcgaaggtgaaccccacattggaaatggatcgatcgtcgtcgagaaccctgcatctgacctggtgaagtcagaatctgaccgaataaaaaccttttaccagacggtcctgtcggctatcatggtgttcgtcacggcagcgctatcaagctacaaggacatgaagcctctttactcgaccacaagccacggcaaagctcacctcagcaacctcctagtcgacgagggcctattcatattcatgaccttcttgtgtgctatggtcctaatgatgtctgagttcgtcgtgcaccagcatggccggcggggccatgtctggtgctgggttcgcaccattctcgttgcagtcaccggtgtgatgctaatcgtggctgacacaatcctcctcatcgtgacgaaccgaagcaacatgttgctgtcagttcttcttgtaccggaggtgttgcttttcggcgtggccgtgagcgttggagcatggatgcaagagagtttacccagctcggagcttggcagcaggtacgattccgccatgaagggaacctttgatatagctacagttggcaccattgtctcgttcacgcttcaggggggcatcgtctttggctacctgaaaaccccagacagtaatcaggtcaagcatgacccgccgctggacctcgctgcgtgctacgccacctcgacgctctccctgaccggaatgacaatgtgtgccatgccgctggcatatctccccaacggcatgctggaggttctcgtcagagtcgtcgagaggcttaggagtgctgtgctggccgctctggcgatgatggcgctggtcgtctcagtggagttcctggatggattcgtcgtggtctccttctttcccgacgccgtcacgattgccctgtactacgtggtgaagctgttctcggcatgtcaaccccgagaggagatctcacagctggacttcaccttccggatcgttgccgccgcggggttcacgctaatgactggactctatgcggcttttacggggacagatcactatggcttcaacctcaagaccgctatgttcatcctgttgcttgcagttgtgtcgagcttgagccgtctggcaatcccacttcacatgcctgaggcgggagtgggaggagtcatcgagttcggcattgttagtatagctctctcttttcccctgctggcgcttctggctgccattccattggtgttcaaggtcttcgtcgaccattacatcaatcgctagtctttgggttgtctggcgcaattcttcctgtggtacagtgccagtaatgaatgatgcgtttttaaactaagggcataaatttaaaaatcttatttttattactgcatttactcagtctaggttgcttgtttggaagagcaacagcaagagactagccagatcctttgtaaggataaatttggctattattagaagaaaaatgtctttaaatttagtagctctctatccgtacagttttactattttatctacagttttactattttatttttagatagcctacttcgatcatcatataaagttctgaatttatggagtaggttgaactagtgtactttttaaaaatctattttag

SEQ ID NO: 36159 - DNA, 5216 bp, Zea Mays
ccgatttccgctcccgtcaacgaccgctgtatcttcgcaccgaccgacgggcccgccggccgtcgatctcctgttgcgaagcaccttgcccctaaacccgtacccgtccacgagccagctcgggtcaggggcatagacgtccactgtagatccctcgcgtcaggggtataaacgtccaatcccccacttaaccgtcaccacgcccacttgcatcgccgttgcggaattgcggagcgcgccgccaaaacaaacgcgtcctgctgccggaatcagaagatcccgaggggttctgatctgagggcccaccatcctctctacacggcacaggaacccaactactactactacaatcgttgccagggagctcaaccgactcgggaccaaaatcggctgctgttgctggctgggacgaaatcggaggcatccgcctttctcgagagatcgagctccgcgccggagcaggcgggccaggcggtgccgctgctgcctgctggtgggtttacaacatagggatggagtcgagatccatccggattcgacattcgaggtcttctgctttgctgttttaaacctgtagaggcagaggacttgggaatgctgaaaaatgtgcctgcaaaccgacgggggaattttttgtgcaaacaagattcgacctctgttcaagcagatattgttggcttctcatgagtatgggcttcatgctgatactgcccttattttcaatgatttaaagcacagtagattgaaggcctttatatttgttggccatcaccttggagacgacggttaaaatcttctacattctttgataagtggtgtggcgcttgttcattattctatcgttgcatagtttgatacgatggatgggaggaggacaattttgatgggacgatatgaaattggtaaacagctgggacaaggaacctttgcaaaggtcttttatgctcgtaatcttactactggcctggctgttgccataaagatgattaacaaggacaaggtcatgaaggttgggctcatggagcagataaagagggagatctcaataatgaggttagtgaagcatccaaatattcttcagctttatgaggttatggctagcaagagcaaaatttattttgttctggagtatgctaaaggtggtgagcttttcaacaaaattgctaaggggggaaagctcagtgaggatgctgcgaggaaatatttccagcagttggtcagtgctgttgatttttgccacagtcgaggtgtctatcaccgtgacttgaagcctgaaaaccttctacttgatgagaatgaaaaccttaaagtctcagattttggcctaagtgctctagctgagtccaagaggcaagatggtctcctgcataccacatgtggaactccagcttatgttgctcctgaagtgctgagtagaaaaggttatgatggtgcaaagtctgatgtgtggtcttgtggagtaattctttttgtgcttgtggctggttaccttcctttccatgacacaaatttgatagagatgtacaggaagatttccagagccgagtttagatgccctcgttttttctcaactgagctgaaggatctgctacataaaatccttgttccagatccaagcactagaatttctatctcgaggataaagaggagtgcttggtacagaaaaccggttgaagcacatgcaaagaaaaatgaggcagaaacaagcgagaatacttgtacgggtgaaggtacaacttctgtctcaacagagtgcagtacgtctgagggaaatcaagggccattaagcctcccaaacttgaatgcatttgacatcatctgtctctcaacaggttttaatctttctgggttttttgaggataagtatggtcgcagggaagagagatttactaccagacagcctgtaacaacagtatttacaaagctgaaggagcttgccaaacgcctaaagttgagggtcaagaagaaagaaaatgggaccttgaaattggcagctccgaaggaaggaaagaagggtatgcttgagcttgatgcagagatttttgaggttgctccttctttgctcttagttgagttgaaaaaaaccaatggggacacgctggagtatcaaaagctagtgaaagaggagataaggccggcactgaaggatattgtttgggtttggcaagatgatcaacaccagtgctcacaatcaccagagtctctattatcaccaccggagacacaggatgaattgcgattatcattgcctcagcaagagggtcaagacttcttagaagccccattgccatcactatcgcttgaccagttgaaatcaccaactgccccagagcaagcagagcaactgccacaaccagaacagttgcaaacgccaatcgctccagaggagcaaattaactagctctaacagccagctggtaattcatatgcccctctcagccatagttcatagttctattccggtttttactctttgttccggcttttctatttcttctggaattgtaaagctgtatgcctgtatgtactgcagaaatgccatgtattccagtttgaaatgatataatacatcatacatccgatgttaaaccaaaattttggaaagaataatattcattgaccagcactattgagttgtatgaatttatgaccgaaaagtcttcatgattggtttcctctactatcacagctgtaagcagatttattgctgtggattttggctgttatgatcgtattctaagttcgtcgcggagatttgtttccctcgcgtagtgctctgtgtgtcttaggtttgagccttgctaattgccatgttgattagatagatagtgtggcaaaaattcttcacgcttcggtttgcttactgcagatgccaaaaaagcaaaggaaaaaggtcccgacaaaaaagaaaggatttgcatgtacaatatcagcagtggagtgttgagttaggctcaactcgtgtcatttactatatttctcctttcaccttgcaatccgaaaatttacaattcctgtaccaaaatgcatctatctgttctgtttttttttttgctttctttggattgctgttatccacgaattaaacaaatgatatgaataagttttcattataaattgccattttttgtttctttatagaaatatgtgtggattgtgaagaaaatgataacaaaaatagttgatacttctttgagggaggtggaaatttcttgaggtattcgtgctttgaaatgattcagtaacctcttttacaaacagatcgtagtacacttgctgtccatgtcctgcagaggaacgtctctcctggagacatacaaaggcatccagatatgtccccatcgaagaaacagttaacaaacaacaatgattcgctgtactggtcaaatgaaaaatatgactactcttgctcttggttggatgaccgggcaatgatttcagctttgcttgatgtggtcatagaagaagactctgcaagtctactccccccggagcgctctcccctcttcctcttgtagctggtgtggaggctgagctgcatccggtctctgttggccataagagcatggatgcagaaatgaaacagccacttgagggatccatgtccctgaacatcgacagcgaaggtgaaccccacattggaaatggatcgatcgtcgtcgagaaccctgcatctgacctggtgaagtcagaatctgaccgaataaaaaccttttaccagacggtcctgtcggctatcatggtgttcgtcacggcagcgctatcaagctacaaggacatgaagcctctttactcgaccacaagccacggcaaagctcacctcagcaacctcctagtcgacgagggcctattcatattcatgaccttcttgtgtgctatggtcctaatgatgtctgagttcgtcgtgcaccagcatggccggcggggccatgtctggtgctgggttcgcaccattctcgttgcagtcaccggtgtgatgctaatcgtggctgacacaatcctcctcatcgtgacgaaccgaagcaacatgttgctgtcagttcttcttgtaccggaggtgttgcttttcggcgtggccgtgagcgttggagcatggatgcaagagagtttacccagctcggagcttggcagcaggtacgattccgccatgaagggaacctttgatatagctacagttggcaccattgtctcgttcacgcttcaggggggcatcgtctttggctacctgaaaaccccagacagtaatcaggtcaagcatgacccgccgctggacctcgctgcgtgctacgccacctcgacgctctccctgaccggaatgacaatgtgtgccatgccgctggcatatctccccaacggcatgctggaggttctcgtcagagtcgtcgagaggcttaggagtgctgtgctggccgctctggcgatgatggcgctggtcgtctcagtggagttcctggatggattcgtcgtggtctccttctttcccgacgccgtcacgattgccctgtactacgtggtgaagctgttctcggcatgtcaaccccgagaggagatctcacagctggacttcaccttccggatcgttgccgccgcggggttcacgctaatgactggactctatgcggcttttacggggacagatcactatggcttcaacctcaagaccgctatgttcatcctgttgcttgcagttgtgtcgagcttgagccgtctggcaatcccacttcacatgcctgaggcgggagtgggaggagtcatcgagttcggcattgttagtatagctctctcttttcccctgctggcgcttctggctgccattccattggtgttcaaggtcttcgtcgaccattacatcaatcgctagtctttgggttgtctggcgcaattcttcctgtggtacagtgccagtaatgaatgatgcgtttttaaactaagggcataaatttaaaaatcttatttttattactgcatttactcagtctaggttgcttgtttggaagagcaacagcaagagactagccagatcctttgtaaggataaatttggctattattagaagaaaaatgtctttaaatttagtagctctctatccgtacagttttactattttatctacagttttactattttatttttagatagcctacttcgatcatcatataaagttctgaatttatggagtaggttgaactagtgtactttttaaaaatctattttag

SEQ ID NO: 36160 - DNA, 4645 bp, Zea Mays
cgcagcgcagcgcctcgtccgtccagtgaggcgacggcgtggcgtgggtggcactaccacggcaggacagctcatgcctcgatagcctttgctgttttgtcttctctgcccctcctatttccatcgcttcgcagttcgcagttcgcacactccgatttccgctcccgtcaacgaccgctgtatcttcgcaccgaccgacgggcccgccggccgtcgatctcctgttgcgaagcaccttgcccctaaacccgtacccgtccacgagccagctcgggtcaggggcatagacgtccactgtagatccctcgcgtcaggggtataaacgtccaatcccccacttaaccgtcaccacgcccacttgcatcgccgttgcggaattgcggagcgcgccgccaaaacaaacgcgtcctgctgccggaatcagaagatcccgaggggttctgatctgagggcccaccatcctctctacacggcacaggaacccaactactactactacaatcgttgccagggagctcaaccgactcgggaccaaaatcggctgctgttgctggctgggacgaaatcggaggcatccgcctttctcgagagatcgagctccgcgccggagcaggcgggccaggcggtgccgctgctgcctgctggtgggtttacaacatagggatggagtcgagatccatccggattcgacattcgaggtcttctgctttgctgttttaaacctgtagaggcagaggacttgggaatgctgaaaaatgtgcctgcaaaccgacgggggaattttttgtgcaaacaagattcgacctctgttcaagcagatattgttggcttctcatgagtatgggcttcatgctgatactgcccttattttcaatgatttaaagcacagtagattgaaggcctttatatttgttggccatcaccttggagacgacggttaaaatcttctacattctttgataagtggtgtggcgcttgttcattattctatcgttgcatagtttgatacgatggatgggaggaggacaattttgatgggacgatatgaaattggtaaacagctgggacaaggaacctttgcaaaggtcttttatgctcgtaatcttactactggcctggctgttgccataaagatgattaacaaggacaaggtcatgaaggttgggctcatggagcagataaagagggagatctcaataatgaggttagtgaagcatccaaatattcttcagctttatgaggttatggctagcaagagcaaaatttattttgttctggagtatgctaaaggtggtgagcttttcaacaaaattgctaaggggggaaagctcagtgaggatgctgcgaggaaatatttccagcagttggtcagtgctgttgatttttgccacagtcgaggtgtctatcaccgtgacttgaagcctgaaaaccttctacttgatgagaatgaaaaccttaaagtctcagattttggcctaagtgctctagctgagtccaagaggcaagatggtctcctgcataccacatgtggaactccagcttatgttgctcctgaagtgctgagtagaaaaggttatgatggtgcaaagtctgatgtgtggtcttgtggagtaattctttttgtgcttgtggctggttaccttcctttccatgacacaaatttgatagagatgtacaggaagatttccagagccgagtttagatgccctcgttttttctcaactgagctgaaggatctgctacataaaatccttgttccagatccaagcactagaatttctatctcgaggataaagaggagtgcttggtacagaaaaccggttgaagcacatgcaaagaaaaatgaggcagaaacaagcgagaatacttgtacgggtgaaggtacaacttctgtctcaacagagtgcagtacgtctgagggaaatcaagggccattaagcctcccaaacttgaatgcatttgacatcatctgtctctcaacaggttttaatctttctgggttttttgaggataagtatggtcgcagggaagagagatttactaccagacagcctgtaacaacagtatttacaaagctgaaggagcttgccaaacgcctaaagttgagggtcaagaagaaagaaaatgggaccttgaaattggcagctccgaaggaaggaaagaagggtatgcttgagcttgatgcagagatttttgaggttgctccttctttgctcttagttgagttgaaaaaaaccaatggggacacgctggagtatcaaaagctagtgaaagaggagataaggccggcactgaaggatattgtttgggtttggcaagatgatcaacaccagtgctcacaatcaccagagtctctattatcaccaccggagacacaggatgaattgcgattatcattgcctcagcaagagggtcaagacttcttagaagccccattgccatcactatcgcttgaccagttgaaatcaccaactgccccagagcaagcagagcaactgccacaaccagaacagttgcaaacgccaatcgctccagaggagcaaattaactagctctaacagccagctgatgccaaaaaagcaaaggaaaaaggtcccgacaaaaaagaaaggatttgcatgtacaatatcagcagtggagtgttgaaaatatgtgtggattgtgaagaaaatgataacaaaaatagttgatacttctttgagggaggtggaaatttcttgagaggaacgtctctcctggagacatacaaaggcatccagatatgtccccatcgaagaaacagttaacaaacaacaatgattcgctgtactggtcaaatgaaaaatatgactactcttgctcttggttggatgaccgggcaatgatttcagctttgcttgatgtggtcatagaagaagactctgcaagtctactccccccggagcgctctcccctcttcctcttgtagctggtgtggaggctgagctgcatccggtctctgttggccataagagcatggatgcagaaatgaaacagccacttgagggatccatgtccctgaacatcgacagcgaaggtgaaccccacattggaaatggatcgatcgtcgtcgagaaccctgcatctgacctggtgaagtcagaatctgaccgaataaaaaccttttaccagacggtcctgtcggctatcatggtgttcgtcacggcagcgctatcaagctacaaggacatgaagcctctttactcgaccacaagccacggcaaagctcacctcagcaacctcctagtcgacgagggcctattcatattcatgaccttcttgtgtgctatggtcctaatgatgtctgagttcgtcgtgcaccagcatggccggcggggccatgtctggtgctgggttcgcaccattctcgttgcagtcaccggtgtgatgctaatcgtggctgacacaatcctcctcatcgtgacgaaccgaagcaacatgttgctgtcagttcttcttgtaccggaggtgttgcttttcggcgtggccgtgagcgttggagcatggatgcaagagagtttacccagctcggagcttggcagcaggtacgattccgccatgaagggaacctttgatatagctacagttggcaccattgtctcgttcacgcttcaggggggcatcgtctttggctacctgaaaaccccagacagtaatcaggtcaagcatgacccgccgctggacctcgctgcgtgctacgccacctcgacgctctccctgaccggaatgacaatgtgtgccatgccgctggcatatctccccaacggcatgctggaggttctcgtcagagtcgtcgagaggcttaggagtgctgtgctggccgctctggcgatgatggcgctggtcgtctcagtggagttcctggatggattcgtcgtggtctccttctttcccgacgccgtcacgattgccctgtactacgtggtgaagctgttctcggcatgtcaaccccgagaggagatctcacagctggacttcaccttccggatcgttgccgccgcggggttcacgctaatgactggactctatgcggcttttacggggacagatcactatggcttcaacctcaagaccgctatgttcatcctgttgcttgcagttgtgtcgagcttgagccgtctggcaatcccacttcacatgcctgaggcgggagtgggaggagtcatcgagttcggcattgttagtatagctctctcttttcccctgctggcgcttctggctgccattccattggtgttcaaggtcttcgtcgaccattacatcaatcgctagtctttgggttgtctggcgcaattcttcctgtggtacagtgccagtaatgaatgatgcgtttttaaactaagggcataaatttaaaaatcttatttttattactgcatttactcagtctaggttgcttgtttggaagagcaacagcaagagactagccagatcctttgtaaggataaatttggctattattagaagaaaaatgtctttaaatttagtagctctctatccgtacagttttactattttatctacagttttactattttatttttagatagcctacttcgatcatcatataaagttctgaatttatggagtaggttgaactagtgtactttttaaaaatctattttag

SEQ ID NO: 36161 - DNA, 2593 bp, Zea Mays
gtccaatcccccacttaaccgtcaccacgcccacttgcatcgccgttgcggaattgcggagcgcgccgccaaaacaaacgcgtcctgctgccggaatcagaagatcccgaggggttctgatctgagggcccaccatcctctctacacggcacaggaacccaactactactactacaatcgttgccagggagctcaaccgactcgggaccaaaatcggctgctgttgctggctgggacgaaatcggaggcatccgcctttctcgagagatcgagctccgcgccggagcaggcgggccaggcggtgccgctgctgcctgctggtgggtttacaacatagggatggagtcgagatccatccggattcgacattcgaggtcttctgctttgctgttttaaacctgtagaggcagaggacttgggaatgctgaaaaatgtgcctgcaaaccgacgggggaattttttgtgcaaacaagattcgacctctgttcaagcagatattgttggcttctcatgagtatgggcttcatgctgatactgcccttattttcaatgatttaaagcacagtagattgaaggcctttatatttgttggccatcaccttggagacgacggttaaaatcttctacattctttgataagtggtgtggcgcttgttcattattctatcgttgcatagtttgatacgatggatgggaggaggacaattttgatgggacgatatgaaattggtaaacagctgggacaaggaacctttgcaaaggtcttttatgctcgtaatcttactactggcctggctgttgccataaagatgattaacaaggacaaggtcatgaaggttgggctcatggagcagataaagagggagatctcaataatgaggttagtgaagcatccaaatattcttcagctttatgaggttatggctagcaagagcaaaatttattttgttctggagtatgctaaaggtggtgagcttttcaacaaaattgctaaggggggaaagctcagtgaggatgctgcgaggaaatatttccagcagttggtcagtgctgttgatttttgccacagtcgaggtgtctatcaccgtgacttgaagcctgaaaaccttctacttgatgagaatgaaaaccttaaagtctcagattttggcctaagtgctctagctgagtccaagaggcaagatggtctcctgcataccacatgtggaactccagcttatgttgctcctgaagtgctgagtagaaaaggttatgatggtgcaaagtctgatgtgtggtcttgtggagtaattctttttgtgcttgtggctggttaccttcctttccatgacacaaatttgatagagatgtacaggaagatttccagagccgagtttagatgccctcgttttttctcaactgagctgaaggatctgctacataaaatccttgttccagatccaagcactagaatttctatctcgaggataaagaggagtgcttggtacagaaaaccggttgaagcacatgcaaagaaaaatgaggcagaaacaagcgagaatacttgtacgggtgaaggtacaacttctgtctcaacagagtgcagtacgtctgagggaaatcaagggccattaagcctcccaaacttgaatgcatttgacatcatctgtctctcaacaggttttaatctttctgggttttttgaggataagtatggtcgcagggaagagagatttactaccagacagcctgtaacaacagtatttacaaagctgaaggagcttgccaaacgcctaaagttgagggtcaagaagaaagaaaatgggaccttgaaattggcagctccgaaggaaggaaagaagggtatgcttgagcttgatgcagagatttttgaggttgctccttctttgctcttagttgagttgaaaaaaaccaatggggacacgctggagtatcaaaagctagtgaaagaggagataaggccggcactgaaggatattgtttgggtttggcaagatgatcaacaccagtgctcacaatcaccagagtctctattatcaccaccggagacacaggatgaattgcgattatcattgcctcagcaagagggtcaagacttcttagaagccccattgccatcactatcgcttgaccagttgaaatcaccaactgccccagagcaagcagagcaactgccacaaccagaacagttgcaaacgccaatcgctccagaggagcaaattaactagctctaacagccagctgaggaacgtctctcctggagacatacaaaggcatccagatatgtccccatcgaagaaacagttaacaaacaacaatgattcgctgtactggtcaaatgaaaaatatgactactcttgctcttggttggatgaccgggcaatgatttcagctttgcttgatgtggtcatagaagaagactctgcaagtctactccccccggagcgctctcccctcttcctcttgtagctggtgtggaggctgagctgcatccggtctctgttggccataagagcatggatgcagaaatgaaacagccacttgagagttcaacgtggaacatgattgcttggttgtagcagttacattacag

SEQ ID NO: 36162 - DNA, 3175 bp, Zea Mays
caacgaccgctgtatcttcgcaccgaccgacgggcccgccggccgtcgatctcctgttgcgaagcaccttgcccctaaacccgtacccgtccacgagccagctcgggtcaggggcatagacgtccactgtagatccctcgcgtcaggggtataaacgtccaatcccccacttaaccgtcaccacgcccacttgcatcgccgttgcggaattgcggagcgcgccgccaaaacaaacgcgtcctgctgccggaatcagaagatcccgaggggttctgatctgagggcccaccatcctctctacacggcacaggaacccaactactactactacaatcgttgccagggagctcaaccgactcgggaccaaaatcggctgctgttgctggctgggacgaaatcggaggcatccgcctttctcgagagatcgagctccgcgccggagcaggcgggccaggcggtgccgctgctgcctgctggtgggtttacaacatagggatggagtcgagatccatccggattcgacattcgaggtcttctgctttgctgttttaaacctgtagaggcagaggacttgggaatgctgaaaaatgtgcctgcaaaccgacgggggaattttttgtgcaaacaagattcgacctctgttcaagcagatattgttggcttctcatgagtatgggcttcatgctgatactgcccttattttcaatgatttaaagcacagtagattgaaggcctttatatttgttggccatcaccttggagacgacggttaaaatcttctacattctttgataagtggtgtggcgcttgttcattattctatcgttgcatagtttgatacgatggatgggaggaggacaattttgatgggacgatatgaaattggtaaacagctgggacaaggaacctttgcaaaggtcttttatgctcgtaatcttactactggcctggctgttgccataaagatgattaacaaggacaaggtcatgaaggttgggctcatggagcagataaagagggagatctcaataatgaggttagtgaagcatccaaatattcttcagctttatgaggttatggctagcaagagcaaaatttattttgttctggagtatgctaaaggtggtgagcttttcaacaaaattgctaaggggggaaagctcagtgaggatgctgcgaggaaatatttccagcagttggtcagtgctgttgatttttgccacagtcgaggtgtctatcaccgtgacttgaagcctgaaaaccttctacttgatgagaatgaaaaccttaaagtctcagattttggcctaagtgctctagctgagtccaagaggcaagatggtctcctgcataccacatgtggaactccagcttatgttgctcctgaagtgctgagtagaaaaggttatgatggtgcaaagtctgatgtgtggtcttgtggagtaattctttttgtgcttgtggctggttaccttcctttccatgacacaaatttgatagagatgtacaggaagatttccagagccgagtttagatgccctcgttttttctcaactgagctgaaggatctgctacataaaatccttgttccagatccaagcactagaatttctatctcgaggataaagaggagtgcttggtacagaaaaccggttgaagcacatgcaaagaaaaatgaggcagaaacaagcgagaatacttgtacgggtgaaggtacaacttctgtctcaacagagtgcagtacgtctgagggaaatcaagggccattaagcctcccaaacttgaatgcatttgacatcatctgtctctcaacaggttttaatctttctgggttttttgaggataagtatggtcgcagggaagagagatttactaccagacagcctgtaacaacagtatttacaaagctgaaggagcttgccaaacgcctaaagttgagggtcaagaagaaagaaaatgggaccttgaaattggcagctccgaaggaaggaaagaagggtatgcttgagcttgatgcagagatttttgaggttgctccttctttgctcttagttgagttgaaaaaaaccaatggggacacgctggagtatcaaaagctagtgaaagaggagataaggccggcactgaaggatattgtttgggtttggcaagatgatcaacaccagtgctcacaatcaccagagtctctattatcaccaccggagacacaggatgaattgcgattatcattgcctcagcaagagggtcaagacttcttagaagccccattgccatcactatcgcttgaccagttgaaatcaccaactgccccagagcaagcagagcaactgccacaaccagaacagttgcaaacgccaatcgctccagaggagcaaattaactagctctaacagccagctggtaattcatatgcccctctcagccatagttcatagttctattccggtttttactctttgttccggcttttctatttcttctggaattgtaaagctgtatgcctgtatgtactgcagaaatgccatgtattccagtttgaaatgatataatacatcatacatccgatgttaaaccaaaattttggaaagaataatattcattgaccagcactattgagttgtatgaatttatgaccgaaaagtcttcatgattggtttcctctactatcacagctaaatatgtgtggattgtgaagaaaatgataacaaaaatagttgatacttctttgagggaggtggaaatttcttgaggtattcgtgctttgaaatgattcagtaacctcttttacaaacagatcgtagtacacttgctgtccatgtcctgcagaggaacgtctctcctggagacatacaaaggcatccagatatgtccccatcgaagaaacagttaacaaacaacaatgattcgctgtactggtcaaatgaaaaatatgactactcttgctcttggttggatgaccgggcaatgatttcagctttgcttgatgtggtcatagaagaagactctgcaagtctactccccccggagcgctctcccctcttcctcttgtagctggtgtggaggctgagctgcatccggtctctgttggccataagagcatggatgcagaaatgaaacagccacttgagagttcaacgtggaacatgattgcttggttgtagcagttacattacag

SEQ ID NO: 36163 - DNA, 1384 bp, Zea Mays
gatgagtatccatccggtccggcagcggcagtagtagcatttggtgacgccgattgacatggatctctagcagtagccggcaccgagcagtcaccccaccccagacacacacaactactcctagaagtctacctgaagtgacgggtgaggaggcgagagccgagaggtggaggatgcgaggctgctagcacgtgcactacttgagtcagtgttgcctgaggtagccgcgctgaggtttgagcgggagagggacgcagctagaggcggggggctctatattacaatgcagcagtgaagaccatggagtgctcccgggggaggcagaggcagatgcagaggtggaggtggtgtggcagatccatgctaaagctggcggggttgtgcgtcgccgttgccatctgcctgtgcggcgttcggtcctgggcttgcagtggcagcggcagcggctgcagggggagtactgtgttgctccgttcagagtccttgagacgaggacgagcggcagcatcttgcggtaatcaggggtgctacacgactgggcaatggcggcggctgctggcggacggtccggggtcatacccgccacggtgcacgtccaagtgcggcgactgcagcccgtgctacccggtgcacgtggccgtgccgccgggcgtgcctgtcaccaccgaatactacccggaggcgtggaggtgcaagtgcggcaaccggctctacatgccatgagcccatgagcgagcaaggaggcggccagccggtgaagaatctctcgagagcgccggccgctggggccggcgctgcattattgcgccgggccgggtgcctctcgcctgcgcgcggtgtcgtcgtggtcctcgccgcgcgcatgggcgggatctgcgctctgcagcgcgcgtggtgacctaccacaggcacactgaccggctgccggctgggatactgagagactgcatgtctttttccgtgccgcgcgctggaattcgcacggccctaccacgagcacgtgccgtacggggcgtcagcgcgtgctggatcgaagagggatgcgagctgagagagcgcgcctgatgagaggctgagacgagacctgatgcggcccacacctgcacgtgtccgtataatctgttcagagtgttcataatcgatcttttcaaatttttctcaatgccgttttccgcatctgagtcctgttacacaaatttcctggtgaactctgtagccaaatgtagtgttgccgtgttggatactagcactatatatcgtggcagcatggaacagttcctggttggtctccccgcgctgtacccaggttcagtataccaataagtaaaagcacatagatttggaccgaaaaacttttgagatggctttctgatttatgtttatg

SEQ ID NO: 36164 - DNA, 2241 bp, Zea Mays
agcgccgggcctgtcctgtcctgtacacgcacgagcagttggcgtccgctacttgcgcgcgacgagcatgtgcgcctgattcgtatggggcaaccgccgtcgtgtagcggcgcgatcgtggtcggcgggggtgtagcgacgagcgcttctttctcgcccagcccccaccctcccctttatctcttttgtctccaattgcctgctgcccctccactccacgaaagttattaacgattccaactgccaggatcactgaccgttgctgggcgctggcctataagtacctggcctccgcgccccactcccttcacagccaagctagcaactctctcgagtcgattcctaagcagctagccagtgactcgatcttagcgtgctacaatggcggcagctgctagtgccctgctcctcctgctctgctcagccttctgctcccttgcccaccgggcggccggcgtcgactacggctcgtggcagagcgcccacgccacgttctacggcggcggcgacgcgtctggcacgatgggcggcgcgtgcggctacgggaacatgtacagcacggggtacggcaccaacacggcggcgctgagcacggcgctgttcaacgacggcgccgcgtgcgggtcctgctacgagctgcgctgcgacaacaacgggcagtcgtgcctgccgggcaccatcaccgtcacggccaccaacttctgcccgcccaactacggcctccccagcgacgacggcggctggtgcaacccgccgcgcccgcacttcgacatggcccagccggccttcctccagatcgcgcagtaccgcgccggcatcgtgcccgtcgcctacaggaggtgaggtttacttattatatttctcgtcggtttcgagctctcgtcatctcacgcactgaacggccggtcccagagatgagagagagagagagacgtgtgtgtggtgtggccgtgcgcgtgtcggtttctaaaattcagagttcggaccacgaccaaatatgtaagcaacggctggggttcaggccatgttacgtgggccagcaggcagattatctttcctttttctttttggttcggcttgttccgtcgtgcgccatgcatgcacgacagcgactcggcctgctgtttccgagtagattattaggcgtcacactgaccatattatgagcttccatgttagttgttagttgttacagtagctttagtctgatacaacgccatttccgcaagttgcaaaacgtcacgctcagcgacacttgtgcgctgtcatgctattagctgcacgccatgtgcggccgcttgaacttgaacctgttgcatgcgtgcgctttttgctcatcaccttttgcactcctcgtaccacgcattttgttgatagggtgccgtgcgtgaagaagggcgggatcaggttcaccatcaacggccactcctacttcaacctggtgctggtgaccaacgtggccggcgccggggacgtgcagtccgtgtccatcaagggctccagcaccgggtggcagcccatgtcccgcaactggggccagaactggcagagcaactcgctcctcgacggccagagcctgtccttccaggtcaccgccagcgacggccgcaccgtcaccagcaacggcgtcgctccggcgggctggcagttcggccagaccttcgagggcgcccagttctagctactactactccatcgacgagtgtgactgtgagcaagagagaaggagaaaccttcttcgctgtagtaaagaagaggctcccgccattccgaggctgcttattattagcacccgcttaggcatttccttctcttattattaccataggattgagctgtttattttctgcaccagtgattgtagcaatgggttaagcaaaacaaaaacctgcaaggctgattattgtagggctgcaggggagtggtgtcgtgcaacttattgtgttgttacgctgtactagcagcaacccccgaatctggccacatggtggtgggagatgtttgtggggattgcaccttttgggaccgtgaacatcaatgcttgtttatggtttattacatgcagtatatatgatatatatatgctcgtggtttgatcctcggtttgtacgaccccctatttttgtcttcggtcgatccgtctctttaccaacttgcagaggcagcatgtgcatgtgtggtctgatgtgtggtcagtttgaagctttcagaactcagagaacgaaaaaaaggaaagatgaa

SEQ ID NO: 36165 - DNA, 3900 bp, Zea Mays
cctagtcagacgcacagcttggcctagtcctactgcttccctccctagcggtttcaagagacgacgattctcctccgtgttcttccatccttctgctgctccggcgtcacgtctcaggagggtttcttggaacggatctgagctgtgcagggcagggcagggcagagcagagcagcgaattcccgtttatttcttgagatacagttggtgaacaggtggagaagaaatcgagagaattcttaagagttcggcgggtctaggtaagccgcacgccggctggccccggccgcaccgacatgcagaccgaggaggggaagtcgcggttcgggcggtgcccgtactgccgcgccatgatctaccaggacctcagcgcgatcatcttctactgcagcaggtgccgcacgcccatccgaggcaagaacccgcaacccacggacgagaccgagtacgcgctcgctcagctcgagatcctctccgccgacaccgcgtccgtgttctccgacgacgcggagccgccaaatccgaggtcagcctgggccgtcgacgacgacggtgggcggccgccgctgcagagcaggcgatcgagcggcggcagtgacgcgggatcgggcaccgaatccgactccgacgcgcccgcgccggctacgtcttacacgagccggtcgtcgccgctgagctcacaagaactcgaggtggcgacggtgttgtcaggaatccagccgtccgaccttacgaggacgccactcagcgacccggcgttccagaaggacctcctgcaggcgctggacaacctccggaagctcatcgccgccgtggaccacccgcgaagcatcgacgggcactggcaaggcgtgacgatgcctcggctgagcgcgtcctgcaacgacgagagcagcggcaagcgtacaataacaaggcgcagctcccggctcatgcgccgcctggagtcgcagctcacgcgggcgttgcccgccgagcgcccgcgccggaacgcgagcacttcgtcctcctcttcggcatcgagcagccggcgcgatggtaccaggccgcgggcgcaccaatgccgcccagtgctgggcggcgcgccgttcgttgtctgcggcgagtgttcggagatattgcagctgccgcccgccctgccggccggcagagccaccacgctgcagtgtggtggctgcggcgaagcgttccaggtgacgttgccgacgatcggctcggtggacctacccaagaagatcttttcagcgccgcagcctgctgtcttcgtcggacaggacgccgaggagtatccgctcgcgagaagcagcaacctgagcggtgaacaaccacggcctgcggggccgctgcaccgcgtgctggggtacagctccgtaagctcggttctacgcagtcggcggtacaaaatgcccacgctatctcactcggacccgatccaacgtttgcgcaagtctatcactctattggcagcacgggcccgcccgccggacaaacatatgatcgaacacctgaccgtctcccaaatgacaaatgacagcccatggagcatggccactgaatcttccgccgtcgccttcgctggcgacgcaaattccaccgaatcatggagcgcgcgggtgcgcaccctgacgcgcctcggacggcacaaggagtcgatagctcttttacgtcatggcggcccctcgccgccgccccacgcgcttgcgctcccggcctcggtcatctcctgcgccgcgctatccctccccaccggcgttgcccagatacacgcgctcgccgccaagcgcggcctgctccccgccgccgacgcctacctgctctccgcgctgctgaccgcctactcccgcctcggctgcctccggctcgcccaccagcttctcgacgaaacgcctattgagtccacatcccacaccacgctccgcaccgcgttcaactctctcatctccggctgcgcccgccactctctcccggtggcttgcttcgctctcttccgccgcatgcgcgccatcgcggtccgcttcgacgcggtgaccctcctcgcgcttgtccctgccgcgccactgagcgtggtgccgcaggtccacgccctcgctgcccaagtcgggctcgccaccgaaacttctgtggccaactgcctcatgtccacatacgcgcgcggtggcgcgttcggcgcggccctcgcccggagggtcttcgacgagatgccgctggcctcccgcgacctggtgtcgtggaacgctgtgctatcagcccacgcgcagaacggcctggctgtggacgccctcgatctctaccgccgcatgcgtagccccgaaggcagcggggtggagccggacgccgtgacgatcgtcggcgtgctctcctccgcagcgcacctgggcgcgcgcggtgtgggtttcgatgctgagcactacgtggtccagaggctcccgggcttccgcaccaacgtgcagctgtgcaacgcgctaatcaacttccatgcgcgctgcggtagcctgccccgagcgcagcaactgttcgacgaaatgcccgcgaaaagcatcgtgtcatggacggcgctgattactgggcacggcatgcacggaaatggtggcgtcgccgtcagcctcttcgaaaggatggtgtccgaaggcatccacccggacaacgtggcaatggtcggcgtcctctccgcatgcagccacgccgggttgtacgacgaggggcgcatgtacttctcaacaatggagagcgtctacaagctgcggcccacactggagcactacacctgcattgtggacctcctcggacgtgctggccgcctggaggaggctcgagagctcatctcatcgatgcccatgcctgccgacggtgccgtctggggcgcccttcttggtgcgtgcaagatacacaaaaacgtggagattggggaggaggcctttgcgcgcgtcgtcgagctggagccgaggaacgtgggatactacgtgctcatgtcgaatatatacaccgacacggggcagctggactgcgtcgcgagggtacgggcggtgatgaggaagcgcgggctcaagaaggagcccggatgcagctacgtcgagcacaacgggagggtgcacctcttcatggccgacgaccactcgcacccacaagcgaggaggatctacgagctggtgaccaggctggagctgatggtgaaggagaagtcgggagtgcgggagagcgtggtggcggtccccaagggacgcatggagaaggaggctgcacagccgctggttgggtttcacagcgagaagttggcggtggcgtttgggttgctgaacaccgaggccggcagtgagattgtggtgatcaagaacctaagggtttgcggggactgccactcgttcttgaaggcggtttcggccactaccaaccggtcgttcctggtcagggacgcgagccgattccatcgcttcgatggtggggtttgctcctgcaaggattactggtgaagggcctggtgctgggctgctgggtgtgtgagaccattttttgcctttgaacaaggcgctaaatgggatgcgcacgtgctgatacagacgtgatacaaagtccaaactacaacgtcctcactcccgggggacgccgtctctgctgtcaggcggtacaggttggaacttgaggaagacgagaggagcactagatcagggcacttcgtgacgaattaattccagccaaactcactccgttctgaatagtgcctagttagcgtggatactgatcgcaggcatcggctgttggttggagaatcgaaaccctaaccctaattcatgagttgggtctctattatatagagtcaagtggaccaaagcccattacgaaggggcaaaacatgtaactcctatacaacactctaacaccatcgcaattttaactctatctaat

SEQ ID NO: 36166 - DNA, 1333 bp, Zea Mays
caggcaaccatcatgggtcctcctgatagtccatatgctggaggtgttttcttagtgaacattcatttccccccggactaccctttcaagcctccaaaggtatcttttaagacgaaggtcttccatccaaacatcaatagtaatggaagcatatgtctcgacattcttaaggagcagtggagccctgctttgacaatctctaaggttttgctttctatctgctcgctgcttactgatcccaacccagacgatcctcttgtccctgagattgctcacatgtacaagacggatcggcctaagtacgaggcaacagcccgcagctggacccagaaatatgccatgggatgaaaatgaaatgaagtcgaaactccatattcggcattactgcttaaatgcagacgattgtggtgttgccccatgaaactgtctgtggggacgtatgttcttccattccttgtcgcccgtgtgcattctgatccatctaaggatcgaatgctagtccaacatcaacctaccattgccgtcgataatgagatgacttgtgctttctgttataactatgctagtgttgatgttatttggtaaatgattctcattgagggcttgttcaggcctcagggactggagtctggaggggatgagagcgattttgacttgtagttgtagaggagctctgctgcccatggcctgctctagggccctgcgggctgcggcagccaaccgagggcatggtagtggggaaatacccagggaagaatcattcttttaatcatccagatctatcaatttgcgaattcaataaaaaacggactgatcttcggaatacaccattatctttcgaagtgcgtagtcaatactatgttatattatattcaaagaaacaagtaaaagagtaaaggcttctcccttcaataccacacttccaatctaaattccaaggggttatgtggatgggggatttggagattcttgaaagaatgttttggcttcttcctattacgcttcaacacagaagaagattgttaaaaggtgctggaaggaggatatatttttccaattgtttcaattgtttcttgattgagtaaaaaagggatatatgaagttcgttctcttcctctgtgcatctcccttatgggtaaatccccataataaagggacaactttcgtgtagtttgtgatttgatgttactgtttagattttctctctgagaaagatttcttttaatggatctcctcttgttcctgtggccctcaattgcttctcttctggtctatccaatccaactcacatgtcggcgtcttagcaactgaaaactgtggccatgtttgcttg

SEQ ID NO: 36167 - DNA, 1486 bp, Zea Mays
catcgttttgctctgttctgtagaattctctgctttgggcgatcggggcgtaacatggcatcaaaacgtatcctcaaggaattaaaggacctgcaaaaggaccctccaacgtcatgcagtgcaggtcctgctggtgaggatatgttccactggcaggcaaccatcatgggtcctcctgatagtccatatgctggaggtgttttcttagtgaacattcatttccccccggactaccctttcaagcctccaaaggtatcttttaagacgaaggtcttccatccaaacatcaatagtaatggaagcatatgtctcgacattcttaaggagcagtggagccctgctttgacaatctctaaggttttgctttctatctgctcgctgcttactgatcccaacccagacgatcctcttgtccctgagattgctcacatgtacaagacggatcggcctaagtacgaggcaacagcccgcagctggacccagaaatatgccatgggatgaaaatgaaatgaagtcgaaactccatattcggcattactgcttaaatgcagacgattgtggtgttgccccatgaaactgtctgtggggacgtatgttcttccattccttgtcgcccgtgtgcattctgatccatctaaggatcgaatgctagtccaacatcaacctaccattgccgtcgataatgagatgacttgtgctttctgttataactatgctagtgttgatgttatttggtaaatgattctcattgagggcttgttcaggcctcagggactggagtctggaggggatgagagcgattttgacttgtagttgtagaggagctctgctgcccatggcctgctctagggccctgcgggctgcggcagccaaccgagggcatggtagtggggaaatacccagggaagaatcattcttttaatcatccagatctatcaatttgcgaattcaataaaaaacggactgatcttcggaatacaccattatctttcgaagtgcgtagtcaatactatgttatattatattcaaagaaacaagtaaaagagtaaaggcttctcccttcaataccacacttccaatctaaattccaaggggttatgtggatgggggatttggagattcttgaaagaatgttttggcttcttcctattacgcttcaacacagaagaagattgttaaaaggtgctggaaggaggatatatttttccaattgtttcaattgtttcttgattgagtaaaaaagggatatatgaagttcgttctcttcctctgtgcatctcccttatgggtaaatccccataataaagggacaactttcgtgtagtttgtgatttgatgttactgtttagattttctctctgagaaagatttcttttaatggatctcctcttgttcctgtggccctcaattgcttctcttctggtctatccaatccaactcacatgtcggcgtcttagcaactgaaaactgtggccatgtttgcttg

SEQ ID NO: 36168 - DNA, 1470 bp, Zea Mays
tgtattccggaattacccccggcctaccttgcatattcttcagttatcggttcacgacgcacccaccgaggccaaaggccaccaccattccttccccaactctgcaggctgctcgtcgccctccctccacgccggacgcgccccgatccagatccaggggcgtaacatggcatcaaaacgtatcctcaaggaattaaaggacctgcaaaaggaccctccaacgtcatgcagtgcaggtatcttttaagacgaaggtcttccatccaaacatcaatagtaatggaagcatatgtctcgacattcttaaggagcagtggagccctgctttgacaatctctaaggttttgctttctatctgctcgctgcttactgatcccaacccagacgatcctcttgtccctgagattgctcacatgtacaagacggatcggcctaagtacgaggcaacagcccgcagctggacccagaaatatgccatgggatgaaaatgaaatgaagtcgaaactccatattcggcattactgcttaaatgcagacgattgtggtgttgccccatgaaactgtctgtggggacgtatgttcttccattccttgtcgcccgtgtgcattctgatccatctaaggatcgaatgctagtccaacatcaacctaccattgccgtcgataatgagatgacttgtgctttctgttataactatgctagtgttgatgttatttggtaaatgattctcattgagggcttgttcaggcctcagggactggagtctggaggggatgagagcgattttgacttgtagttgtagaggagctctgctgcccatggcctgctctagggccctgcgggctgcggcagccaaccgagggcatggtagtggggaaatacccagggaagaatcattcttttaatcatccagatctatcaatttgcgaattcaataaaaaacggactgatcttcggaatacaccattatctttcgaagtgcgtagtcaatactatgttatattatattcaaagaaacaagtaaaagagtaaaggcttctcccttcaataccacacttccaatctaaattccaaggggttatgtggatgggggatttggagattcttgaaagaatgttttggcttcttcctattacgcttcaacacagaagaagattgttaaaaggtgctggaaggaggatatatttttccaattgtttcaattgtttcttgattgagtaaaaaagggatatatgaagttcgttctcttcctctgtgcatctcccttatgggtaaatccccataataaagggacaactttcgtgtagtttgtgatttgatgttactgtttagattttctctctgagaaagatttcttttaatggatctcctcttgttcctgtggccctcaattgcttctcttctggtctatccaatccaactcacatgtcggcgtcttagcaactgaaaactgtggccatgtttgcttg

SEQ ID NO: 36169 - DNA, 1694 bp, Zea Mays
cagatgtcagataatgaactgtacaatccgatgctcaaataaacatcaaaattaccatagcatcactcgtaagcgtaacacggaaattcttgcagaaggcatatgttttgtattccggaattacccccggcctaccttgcatattcttcagttatcggttcacgacgcacccaccgaggccaaaggccaccaccattccttccccaactctgcaggctgctcgtcgccctccctccacgccggacgcgccccgatccagatccaggggcgtaacatggcatcaaaacgtatcctcaaggaattaaaggacctgcaaaaggaccctccaacgtcatgcagtgcaggtcctgctggtgaggatatgttccactggcaggcaaccatcatgggtcctcctgatagtccatatgctggaggtgttttcttagtgaacattcatttccccccggactaccctttcaagcctccaaagacgaaggtcttccatccaaacatcaatagtaatggaagcatatgtctcgacattcttaaggagcagtggagccctgctttgacaatctctaaggttttgctttctatctgctcgctgcttactgatcccaacccagacgatcctcttgtccctgagattgctcacatgtacaagacggatcggcctaagtacgaggcaacagcccgcagctggacccagaaatatgccatgggatgaaaatgaaatgaagtcgaaactccatattcggcattactgcttaaatgcagacgattgtggtgttgccccatgaaactgtctgtggggacgtatgttcttccattccttgtcgcccgtgtgcattctgatccatctaaggatcgaatgctagtccaacatcaacctaccattgccgtcgataatgagatgacttgtgctttctgttataactatgctagtgttgatgttatttggtaaatgattctcattgagggcttgttcaggcctcagggactggagtctggaggggatgagagcgattttgacttgtagttgtagaggagctctgctgcccatggcctgctctagggccctgcgggctgcggcagccaaccgagggcatggtagtggggaaatacccagggaagaatcattcttttaatcatccagatctatcaatttgcgaattcaataaaaaacggactgatcttcggaatacaccattatctttcgaagtgcgtagtcaatactatgttatattatattcaaagaaacaagtaaaagagtaaaggcttctcccttcaataccacacttccaatctaaattccaaggggttatgtggatgggggatttggagattcttgaaagaatgttttggcttcttcctattacgcttcaacacagaagaagattgttaaaaggtgctggaaggaggatatatttttccaattgtttcaattgtttcttgattgagtaaaaaagggatatatgaagttcgttctcttcctctgtgcatctcccttatgggtaaatccccataataaagggacaactttcgtgtagtttgtgatttgatgttactgtttagattttctctctgagaaagatttcttttaatggatctcctcttgttcctgtggccctcaattgcttctcttctggtctatccaatccaactcacatgtcggcgtcttagcaactgaaaactgtggccatgtttgcttg

SEQ ID NO: 36170 - DNA, 1280 bp, Zea Mays
cttcaagcaagtctcagccatgcaacatcttacagtgatagccttcgtggctgcttctctcattgcaagcattccacatgccaaaagtgctgatctgaactctgacaaacaggctcttctcgcatttgctgcatcactgcctcgtggcaggaagctcaactggagctccaccacacctgtctgcacttcttgggtgggggtgacatgcacgccagataagagccgtgtacatacactgcgcctacctgctgtaggactttttggtccaataccatcagacacccttgggaagcttgatgccctggaggtattgagccttaggtcaaatcgccttactgtcgacctccctcctgagggaataaagctgatggaagggctccattgaactgggagacaagggtcaagatatctctggacgtagcccgtggaatcgcacatcttcatgctgagggaggagggaagttcatccatggcaacatcaaagcgtcgaacgtccttctatcgcagaacctcgacggtcgcgtctccgagttcggcttggcacagatcatgaccactccacagacgtccctgccacagcttgtcggataccgagcaccagaagtcctcgagacgaaaaaaacgatccagaagtccgacgtctacagctttggtgtcttgctccttgaaatgctaaccggaaaagcccctctcaggtctcccggtcgcaaggattccgtagagcacctcccaaaatgggtgcggtctgtggttcgcgaggagtggaccgcggagatcttcgacgtggacctgctgaggcaccccaacgtcgaggacgagatggtacagatgctccagatcgcgatggcgtgtgtggccgccgaccccgagcagcggcctaggatggacgaggtgatcaggaggatcacggagatccggaattcttactcttcttcttctgggacaaggacgcccctggaggacaggccagagaccgcgcaagcaccgtgatagtagtttagcaagagatgttagctaggttgcatagtgaattggttatagagcttcggcaaagttgatagccacctgcatagcgcagtttccgtcggttccatatcgtttccagtaaatctgttgtgcattttcttttttccgtcggttccagtaaatctgattgacagtccatgccattgtattgctaagttaaatcagtatctcttctgattttcataggatagtgtcgttctgtaatttgacataatctcctgaggccgtgattaatgatttgaatttcccttcta

SEQ ID NO: 36171 - DNA, 2046 bp, Zea Mays
cttcaagcaagtctcagccatgcaacatcttacagtgatagccttcgtggctgcttctctcattgcaagcattccacatgccaaaagtgctgatctgaactctgacaaacaggctcttctcgcatttgctgcatcactgcctcgtggcaggaagctcaactggagctccaccacacctgtctgcacttcttgggtgggggtgacatgcacgccagataagagccgtgtacatacactgcgcctacctgctgtaggactttttggtccaataccatcagacacccttgggaagcttgatgccctggaggtattgagccttaggtcaaatcgccttactgtcgacctccctcctgagaataactcactttctggacctattcctgacctccaacttcccaaattgagacatttgaatttgagcaacaataacctcagtgggccaataccaccttctttgcagaggtttccattaagttccttcttagggaatgcttttctgtgtggctttcctttggaaccatgttttggaactgcacctattccttctccagtatcaccaccatcacccaataagatcaagaagagcttctggaaaaagatcagaactggtgtgataattgcaattgctgctattggaggggtattgttgcttattttgattctcatgctcgtgatatgtattttcaagagaaagggacacactgaacctaccacagcttcgtccaaaggaaaagctattgcaggtggaagggcagaaaatcctaaggaagactacagcagtggtgttcaggaagcagagaggaataaattggttttcttcgggggtagttcatataattttgacttggaggatttgttgagagcttctgctgaagtccttggaaaaggaagttatggaaccacctacaaagctgttcttgaggatggaaccacagttgttgtcaaaagattgaaggaagtggtggttagcaagaaggactttgaacagcagatggagataattggcagggttggccagcatcaaaatgtcattccattgcgggcttattattactccaaggatgagaaattgttggtgtttgattatgtcccatctggtagccttgctgttgttttgcatgggaataaagctgatggaagggctccattgaactgggagacaagggtcaagatatctctggacgtagcccgtggaatcgcacatcttcatgctgagggaggagggaagttcatccatggcaacatcaaagcgtcgaacgtccttctatcgcagaacctcgacggtcgcgtctccgagttcggcttggcacagatcatgaccactccacagacgtccctgccacagcttgtcggataccgagcaccagaagtcctcgagacgaaaaaaacgatccagaagtccgacgtctacagctttggtgtcttgctccttgaaatgctaaccggaaaagcccctctcaggtctcccggtcgcaaggattccgtagagcacctcccaaaatgggtgcggtctgtggttcgcgaggagtggaccgcggagatcttcgacgtggacctgctgaggcaccccaacgtcgaggacgagatggtacagatgctccagatcgcgatggcgtgtgtggccgccgaccccgagcagcggcctaggatggacgaggtgatcaggaggatcacggagatccggaattcttactcttcttcttctgggacaaggacgcccctggaggacaggccagagaccgcgcaagcaccgtgatagtagtttagcaagagatgttagctaggttgcatagtgaattggttatagagcttcggcaaagttgatagccacctgcatagcgcagtttccgtcggttccatatcgtttccagtaaatctgttgtgcattttcttttttccgtcggttccagtaaatctgattgacagtccatgccattgtattgctaagttaaatcagtatctcttctgattttcataggatagtgtcgttctgtaatttgacataatctcctgaggccgtgattaatgatttgaatttcccttcta

SEQ ID NO: 36172 - DNA, 790 bp, Zea Mays
caacactggacgtacgcaatggtgccggtgctgaagaggtacccagccaggctctcggttctgtcactgacctgcatcttcgggctcctccagttcctggccattgccgccttcaccgaggaggacctgagcaggtggaaggtccgctcaggaggggagctcttcaccatcctatacgctggccttgtggcatccggggtagcgtttgctctgcagatctggtgcatcgacaggggaggcccgctcttcaccgccgtcttccagccagtgcagaccgtggccgtcgccgtcatggcttccgccatcctcggggaccagctctacacgggagggatcattggagctgtgctgatcgtcatcggcctctacttcgtgctgtggggcaagagcgccgagaagaagggcgccaggaacctgctgcaggatcagctggcgcagggagcagacgtgacgcggcacctgctcggcggagaagcttcggcgaaagatgaagaagcagccccggccatgctggcgtgatgatcgtttagtcgtctgtcaattggagcacagcgtagtcctgttgcatttgggaccgtatgagtcgtgtgatttcagctgttccaatctggcaaccaagaacaagtgtgcatgggttgccggtgtggaacagtgtgtagccatgctgctgtgagtctgtactctgttgctgtaatgttctgtgcaagcgtaggtaaggtgtataactataaaatcacttcatccataattcgtaccaatctaggtgtggtcacaaactaattggagcttc

SEQ ID NO: 36173 - DNA, 713 bp, Zea Mays
ataatgttgttcgtcgtattttacaattttcattgaatcatcatgaatcattataggctaattttttctggaggaacagctcaagggaagacctggctatgaacacttggatgatccaacacatatcttgattgaggccgaattacctgctgatgttattgatgctagactggcacaagcacaggagatactagaggagtcgctgaaaccagtggatgagtcacaagacaacatcaagagacaacaacttcgagaacttgccatgttgaactctgtatatcgagagggtagcctgcatcagaacggcagcgcctctccgttcagcaatggggcacaaaacagtgacagggaggagattcagctctgatccttcccggaaactctcgcgttagtcctgctctcatgacagacatagcttctctgatgctcaagctcccgtgatggtattggaattcatgccattgctaactggtgaattttgatatcccttgtgacattgacctgcggatgagaagactagcgagaaaaaactcccccatggctgtgtacttaggatatttcgtttattgcttgcgcccactattagtgcagagatgtctaagttctagtattttgagctctttgattatctataaagttatgactccgcaaaatatttgattatgatagtatttgtcgacataaaatttatatcttaagacgcattttgtgtg

SEQ ID NO: 36174 - DNA, 2957 bp, Zea Mays
tccagtccaaccgacccggcatcgtctcgcgagccgcgactcgtctcgtcatttccatcgaacgcccagatcccacattcccacctagctctgcgcgatccatcccggccgccacgccaaggaggccctcgcctgacctcggatcaaagcctcctccatccgccttcatcccggccggtggttcgggccgtcacgggaggggtccatcactggttactcggtggagagctcggggctcggctcccatctcacgattctcaccccacacgcgcaccgggtcacctcgattcggcagcctcgcggtgagttgagttcttcgcttgtcgggccagtccgcctctcgcttggcgcggttatggattcgcgggtggcgtggcgtcgtccgcgatcgctctagctcgcattgagcgattcgcgagttgcgactccttgttttgtttgctctctgtttttttttatgtcgatggtgatatgtggcggcgggattctgagctcggttgcttctaaccttccgcggagtggtttagctaatcggttttgaagctgttgatatggatgtgccgtgtgcgtgacgaatcgaatgggccgcagcaggattcctacgcagctcggcagcagggggaattggatcctgcgaccatgcgaatttggaaccctggagcagtggagtgctaggaggtctcggtgtcgtcatttttttctaggggcgtaggagtcgacttggttggaatctagttagtcataatttctctttctgatttcattggtctgtccatgcgtctgttttcgtcaaacaagaagtttgttattgccaagcatcccgctatggaggaagctgcctgccgtattgtgttacgcgaatccggtgagctgggctctgcgcgttcctcttgacgccctttgcgcgaacgacgagctttcttccagctcggttgcccctgaacaaccaacgccaaaagcagctccagaattttcctgatgtcgtctctatatttttgccttctaagtcatgcttaatggcagagtccttgttgcgtgggtcactgcctcactgggttctgaggcaaggaaaagaaggcttcagtagtcaggtctgggtcaagccatgatggagagatcgctgctggaggtgctggccacggcggcgcaaggagggaccgaggggacgtcagtgctgagcatgctcaagtacgccgtgctgcccatcgccaaggtgttcactgtctgcttcatggggttccttatggcctccaagtacgtcaacattctccagcccaacggccgcaagcttctcaatgggcttgtgttttcccttctgcttccatgccttatattttcccaattgggtagagcaatcactatcgagaagatgatacaatgtatcgggctctttgattggatttgttgtggcatctatcatcagacctccatatccatacttcaagttcactgttatccatataggaataggaaatattggaaatatacctctggtcctcattgcagcgttatgtcgtgatccttctaacccatttggcgactctgataaatgcaatcaagatgggaatgcatatatctcatttggccaatgggttggtgcaattattgtttacacatatgtattcaaaatgcttgctccaccaccaggacagacctttgatggttctgaagaggatggaatcccaatcaaggcatctggagagaatacagtgccccaagtaggaaaatatcctatgaacactaacagtagtactgtaccagagaatgaacctttgttatctgctggggaagttcaaaaggagcgtgccacttctgtaggaacaaagataatgggctatgttaaatgtgtggttaagtttctgaaagacaagcagcttctccagccaccaattattgcatctgcttttgcaattgcaatcggtgttatcccattcttgaagaattttgtacttacggatgatgctcctctgttctttttcacagacagctgcctcattcttggagaagctatgatcccatgcattttacttgctgttgggggcaatcttgtcgatggccctggtgaaggaagtaagaggcttggcgtgcgtaccactgttgctataatttttgcacggttggtcttggtccctcttgctggggttggcattaccatgttagttgataaacttggtttcattcccgaaggtgatagaatgttcaagtttgtcctgctactgcagcattctatgcccacatcagtgttgtcaggtgctgttgcaaatctgagaggttgtggaaaagaatcagctgcaattttgttctgggttcacatttttgctgtgttctccatggcgggatggattatattctatctgagtttgctcttctaatccgctggttcagatgccttactgcgcaggaatatctttgagatcaaatatggtccaaaatgttgaggaagaaaccagtatcatgaactgtacagatatatcgttgcagaggtacaagtgtatctgtacagatatatggatacggtccctcctataatcccatattaccgtggtctcctgctgctacaagccgtgagcgatgggaacactttccctttccctccacgtatcaacaggttcacacccaaccctagattgggatgctggccttcttagttctccataatattatttcatttgtacttcctgtatattgtaaaccttgagatggctgtgttcaaatagtttcttattgggcgagggctgaagtagtagtatagatgtattatactacctatttgagtgttcggttatgccgcaaatgatgctttattatgcagaacttgtgcccgctgctggcccgtcggtcgtactaactaaaattgccaatcgcggagacttgcatgttgcaagctcaggccggcgcccagcggtttgcagcaaatttttttttttgactcggctatctccaatagaatactcaac

SEQ ID NO: 36175 - DNA, 2995 bp, Zea Mays
cgcgtgtattatctagtccagtccaaccgacccggcatcgtctcgcgagccgcgactcgtctcgtcatttccatcgaacgcccagatcccacattcccacctagctctgcgcgatccatcccggccgccacgccaaggaggccctcgcctgacctcggatcaaagcctcctccatccgccttcatcccggccggtggttcgggccgtcacgggaggggtccatcactggttactcggtggagagctcggggctcggctcccatctcacgattctcaccccacacgcgcaccgggtcacctcgattcggcagcctcgcggtgagttgagttcttcgcttgtcgggccagtccgcctctcgcttggcgcggttatggattcgcgggtggcgtggcgtcgtccgcgatcgctctagctcgcattgagcgattcgcgagttgcgactccttgttttgtttgctctctgtttttttttatgtcgatggtgatatgtggcggcgggattctgagctcggttgcttctaaccttccgcggagtggtttagctaatcggttttgaagctgttgatatggatgtgccgtgtgcgtgacgaatcgaatgggccgcagcaggattcctacgcagctcggcagcagggggaattggatcctgcgaccatgcgaatttggaaccctggagcagtggagtgctaggaggtctcggtgtcgtcatttttttctaggggcgtaggagtcgacttggttggaatctagttagtcataatttctctttctgatttcattggtctgtccatgcgtctgttttcgtcaaacaagaagtttgttattgccaagcatcccgctatggaggaagctgcctgccgtattgtgttacgcgaatccggtgagctgggctctgcgcgttcctcttgacgccctttgcgcgaacgacgagctttcttccagctcggttgcccctgaacaaccaacgccaaaagcagctccagaattttcctgatgtcgtctctatatttttgccttctaagtcatgcttaatggcagagtccttgttgcgtgggtcactgcctcactgggttctgaggcaaggaaaagaaggcttcagtagtcaggtctgggtcaagccatgatggagagatcgctgctggaggtgctggccacggcggcgcaaggagggaccgaggggacgtcagtgctgagcatgctcaagtacgccgtgctgcccatcgccaaggtgttcactgtctgcttcatggggttccttatggcctccaagtacgtcaacattctccagcccaacggccgcaagcttctcaatgggcttgtgttttcccttctgcttccatgccttatattttcccaattgggtagagcaatcactatcgagaagatgatacaatggtggtatattccagtaaatattgttgttggcgcagtatcgggctctttgattggatttgttgtggcatctatcatcagacctccatatccatacttcaagttcactgttatccatataggaataggaaatattggaaatatacctctggtcctcattgcagcgttatgtcgtgatccttctaacccatttggcgactctgataaatgcaatcaagatgggaatgcatatatctcatttggccaatgggttggtgcaattattgtttacacatatgtattcaaaatgcttgctccaccaccaggacagacctttgatggttctgaagaggatggaatcccaatcaaggcatctggagagaatacagtgccccaagtaggaaaatatcctatgaacactaacagtagtactgtaccagagaatgaacctttgttatctgctggggaagttcaaaaggagcgtgccacttctgtaggaacaaagataatgggctatgttaaatgtgtggttaagtttctgaaagacaagcagcttctccagccaccaattattgcatctgcttttgcaattgcaatcggtgttatcccattcttgaagaattttgtacttacggatgatgctcctctgttctttttcacagacagctgcctcattcttggagaagctatgatcccatgcattttacttgctgttgggggcaatcttgtcgatggccctggtgaaggaagtaagaggcttggcgtgcgtaccactgttgctataatttttgcacggttggtcttggtccctcttgctggggttggcattaccatgttagttgataaacttggtttcattcccgaaggtgatagaatgttcaagtttgtcctgctactgcagcattctatgcccacatcagtgttgtcaggtgctgttgcaaatctgagaggttgtggaaaagaatcagctgcaattttgttctgggttcacatttttgctgtgttctccatggcgggatggattatattctatctgagtttgctcttctaaatgccttactgcgcaggaatatctttgagatcaaatatggtccaaaatgttgaggaagaaaccagtatcatgaactgtacagatatatcgttgcagaggtacaagtgtatctgtacagatatatggatacggtccctcctataatcccatattaccgtggtctcctgctgctacaagccgtgagcgatgggaacactttccctttccctccacgtatcaacaggttcacacccaaccctagattgggatgctggccttcttagttctccataatattatttcatttgtacttcctgtatattgtaaaccttgagatggctgtgttcaaatagtttcttattgggcgagggctgaagtagtagtatagatgtattatactacctatttgagtgttcggttatgccgcaaatgatgctttattatgcagaacttgtgcccgctgctggcccgtcggtcgtactaactaaaattgccaatcgcggagacttgcatgttgcaagctcaggccggcgcccagcggtttgcagcaaatttttttttttgactcggctatctccaatagaatactcaac

SEQ ID NO: 36176 - DNA, 2378 bp, Zea Mays
agcgaggctgggcgtacagcccaggacggcacgcccgcaattcctcgtgcccctgacctcctctcctccccccctgctacggattccaaaacggatataaaatgcgcgtgtattatctagtccagtccaaccgacccggcatcgtctcgcgagccgcgactcgtctcgtcatttccatcgaacgcccagatcccacattcccacctagctctgcgcgatccatcccggccgccacgccaaggaggccctcgcctgacctcggatcaaagcctcctccatccgccttcatcccggccggtggttcgggccgtcacgggaggggtccatcactggttactcggtggagagctcggggctcggctcccatctcacgattctcaccccacacgcgcaccgggtcacctcgattcggcagcctcgcgagtccttgttgcgtgggtcactgcctcactgggttctgaggcaaggaaaagaaggcttcagtagtcaggtctgggtcaagccatgatggagagatcgctgctggaggtgctggccacggcggcgcaaggagggaccgaggggacgtcagtgctgagcatgctcaagtacgccgtgctgcccatcgccaaggtgttcactgtctgcttcatggggttccttatggcctccaagtacgtcaacattctccagcccaacggccgcaagcttctcaatgggcttgtgttttcccttctgcttccatgccttatattttcccaattgggtagagcaatcactatcgagaagatgatacaatggtggtatattccagtaaatattgttgttggcgcagtatcgggctctttgattggatttgttgtggcatctatcatcagacctccatatccatacttcaagttcactgttatccatataggaataggaaatattggaaatatacctctggtcctcattgcagcgttatgtcgtgatccttctaacccatttggcgactctgataaatgcaatcaagatgggaatgcatatatctcatttggccaatgggttggtgcaattattgtttacacatatgtattcaaaatgcttgctccaccaccaggacagacctttgatggttctgaagaggatggaatcccaatcaaggcatctggagagaatacagtgccccaagtaggaaaatatcctatgaacactaacagtagtactgtaccagagaatgaacctttgttatctgctggggaagttcaaaaggagcgtgccacttctgtaggaacaaagataatgggctatgttaaatgtgtggttaagtttctgaaagacaagcagcttctccagccaccaattattgcatctgcttttgcaattgcaatcggtgttatcccattcttgaagaattttgtacttacggatgatgctcctctgttctttttcacagacagctgcctcattcttggagaagctatgatcccatgcattttacttgctgttgggggcaatcttgtcgatggccctggtgaaggaagtaagaggcttggcgtgcgtaccactgttgctataatttttgcacggttggtcttggtccctcttgctggggttggcattaccatgttagttgataaacttggtttcattcccgaaggtgatagaatgttcaagtttgtcctgctactgcagcattctatgcccacatcagtgttgtcaggtgctgttgcaaatctgagaggttgtggaaaagaatcagctgcaattttgttctgggttcacatttttgctgtgttctccatggcgggatggattatattctatctgagtttgctcttctaaatgccttactgcgcaggaatatctttgagatcaaatatggtccaaaatgttgaggaagaaaccagtatcatgaactgtacagatatatcgttgcagaggtacaagtgtatctgtacagatatatggatacggtccctcctataatcccatattaccgtggtctcctgctgctacaagccgtgagcgatgggaacactttccctttccctccacgtatcaacaggttcacacccaaccctagattgggatgctggccttcttagttctccataatattatttcatttgtacttcctgtatattgtaaaccttgagatggctgtgttcaaatagtttcttattgggcgagggctgaagtagtagtatagatgtattatactacctatttgagtgttcggttatgccgcaaatgatgctttattatgcagaacttgtgcccgctgctggcccgtcggtcgtactaactaaaattgccaatcgcggagacttgcatgttgcaagctcaggccggcgcccagcggtttgcagcaaatttttttttttgactcggctatctccaatagaatactcaac

SEQ ID NO: 36177 - DNA, 798 bp, Zea Mays
tccagtccaaccgacccggcatcgtctcgcgagccgcgactcgtctcgtcatttccatcgaacgcccagatcccacattcccacctagctctgcgcgatccatcccggccgccacgccaaggaggccctcgcctgacctcggatcaaagcctcctccatccgccttcatcccggccggtggttcgggccgtcacgggaggggtccatcactggttactcggtggagagctcggggctcggctcccatctcacgattctcaccccacacgcgcaccgggtcacctcgattcggcagcctcgcgagtccttgttgcgtgggtcactgcctcactgggttctgaggcaaggaaaagaaggcttcagtagtcaggtctgggtcaagccatgatggagagatcgctgctggaggtgctggccacggcggcgcaaggagggaccgaggggacgtcagtgctgagcatgctcaagtacgccgtgctgcccatcgccaaggtgttcactgtctgcttcatggggttccttatggcctccaagtacgtcaacattctccagcccaacggccgcaagcttctcaatggggtgagctttgtctcttgtaataactaataagtgctagctaatggaaggttgtgtaatggacaattgtttttctattgaggaattattttattaagtcaagatgattacccatcttggattttgtttaaagtaggaatatgtgaagcagtagaggagttgattgtctcatttgttttctcgctgtatcaaattagatataacattttcactgtttgttgc

SEQ ID NO: 36178 - DNA, 2035 bp, Zea Mays
cagaaggctactcgtcgctgattccttttgggagatgggagacgtgttgattccaagcctacggtgtgggaacttatctgtgacgatatgcgtccgtgtttctcggttttgggacttttctgatcctcaggatgatgcaaggctgctacactgtgatatggtgttgctggacgaagagggaaatagcatacatgctacgatatacccacccttcatagagaaattcaggccactcataaaagaaggcagcgtgtacaacatgacatactttcgagttcgagcatcaaacaacttgtacaagccagttccaaatgatatcatgattaccttcacgaattggacaaagttagagcaggttattgagattcctcctgcatttcctacacttacctactccctcactcacatagaccagatccattcgcgcatcgaccataaagactactatacagatgccattgggatagttacttcagtctcgaatgtttcgccacatcgctcaaaaggacaacaagcttccagcttgaagaggaacatttccatatgcagtgcgagcagaggtgcttcggtcaatgttgtgctgtggggtgcccaagccaccctattcccaggagagcgcatatacgaggatgggcagaattccccacagattgtgctatttgttggcacgctcgtcaaaaaatatgcagtggtacatcaatccatccattcctgaggcagaaacccttatgtccagcgcacgcggtgatcataaaccagtgaagtggaatgcaactgtcacttcgagccagcttatatctcctgttgctgaggaccaaaaggtgtcgtatatcaagtatctccatccctttgaaaacaagggaaaggaattcttggttactgtcactataaggaaaattgacaacaagtggtggtataactcgtgcagaaaatgtgcctgcacagctgtcactcacggagactcttacaaatgcacaaactgtgattgcgctaacattgctatgcccgtccaaaggtataaaatacttgtcacggcaggagacgagacagctgacacagactttattctctttgggcgcatggctcaaagaattgtcaaaaggccttgcgatatgctcatagcgaacactccatcaggcttcattccagatgcaatcacaaagctgcttgaaaggacgttcatttggaacgttagcttctctgggcacacaattaactctggaaacgtctgcttccaggtcaatgctaccataaaggaactgggcaatcagaatgttgacatttcaacatcaaccgcagggacacaccagtcttcgcttatgttctcacaaggtgcaagcagcagcatggaagacactcctcacaagacagacaccttgtcttcacctctgacacctttgacgcctcagggtagcatcgccactacaaagtatttggaaaccgttgaagctggagacgcagagcgtgtgactactcagacctcgacaactaggaagagatcatgctcttcgcctggcaaatcagtagcgaaaaagttgttcgttgctgacgatgaggaagaaagcatcagtcaatccagtggaggtggtgttggtggacccagtgatgacaaaaataattaggtgttggtgtacgaacgtggatcttttgcctccacagttgtagctatgtgtaattcagggttatcgtctatttctactcttctcaagttcttgtatatgttagctggatgggggagatgtggtacatacttttgtccgtaagaagctaacgatttgcctacacaaacctgccaaggttaactttgatcatgatgctacgcttatcacgcttttgatagactgtcgaccaacgtgaatgcatctcacttagaatcgtgcctgttacctttcctcccccgatgttcatccttagcgacttgtactatgtagtggcagaagaaaaacctactcttttgtatatatcaactgcccgttgctaaaccttttgctacatcgcacggctgcaaactgtgttctacttatttgtatggcta

SEQ ID NO: 36179 - DNA, 1977 bp, Zea Mays
cttttgacggagttcgcagaaggctactcgtcgctgattccttttgggagatgggagacgtgttgattccaagcctacggtgtgggaacttatctgtgacgatatgcgtccgtgtttctcggttttgggacttttctgatcctcaggatgatgcaaggctgctacactgtgatatggtgttgctggacgaagagggaaatagcatacatgctacgatatacccacccttcatagagaaattcaggccactcataaaagaaggcagcgtgtacaacatgacatactttcgagttcgagcatcaaacaacttgtacaagccagttccaaatgatatcatgattaccttcacgaattggacaaagttagagcaggttattgagattcctcctgcatttcctacacttacctactccctcactcacatagaccagatccattcgcgcatcgaccataaagactactatacagatgccattgggatagttacttcagtctcgaatgtttcgccacatcgctcaaaaggacaacaagcttccagcttgaagaggaacatttccatatgcagtgcgagcagaggtgcttcggtcaatgttgtgctgtggggtgcccaagccaccctattcccaggagagcgcatatacgaggatgggcagaattccccacagattgtgctatttgttggcacgctcgtcaaaaaatatgcagatggtctttgtctgactggaagctcaccatgtaagtggtacatcaatccatccattcctgaggcagaaacccttatgtccagcgcacgcggtgatcataaaccagtgaagtggaatgcaactgtcacttcgagccagcttatatctcctgttgctgaggaccaaaaggtgtcgtatatcaagtatctccatccctttgaaaacaagggaaaggaattcttggttactgtcactataaggaaaattgacaacaagtggtggtataactcgtgcagaaaatgtgcctgcacagctgtcactcacggagactcttacaaatgcacaaactgtgattgcgctaacattgctatgcccgtccaaaggtataaaatacttgtcacggcaggagacgagacagctgacacagactttattctctttgggcgcatggctcaaagaattgtcaaaaggccttgcgatatgctcatagcgaacactccatcaggcttcattccagatgcaatcacaaagctgcttgaaaggacgttcatttggaacggacacaccagtcttcgcttatgttctcacaaggtgcaagcagcagcatggaagacactcctcacaagacagacaccttgtcttcacctctgacacctttgacgcctcagggtagcatcgccactacaaagtatttggaaaccgttgaagctggagacgcagagcgtgtgactactcagacctcgacaactaggaagagatcatgctcttcgcctggcaaatcagtagcgaaaaagttgttcgttgctgacgatgaggaagaaagcatcagtcaatccagtggaggtggtgttggtggacccagtgatgacaaaaataattaggtgttggtgtacgaacgtggatcttttgcctccacagttgtagctatgtgtaattcagggttatcgtctatttctactcttctcaagttcttgtatatgttagctggatgggggagatgtggtacatacttttgtccgtaagaagctaacgatttgcctacacaaacctgccaaggttaactttgatcatgatgctacgcttatcacgcttttgatagactgtcgaccaacgtgaatgcatctcacttagaatcgtgcctgttacctttcctcccccgatgttcatccttagcgacttgtactatgtagtggcagaagaaaaacctactcttttgtatatatcaactgcccgttgctaaaccttttgctacatcgcacggctgcaaactgtgttctacttatttgtatggcta

SEQ ID NO: 36180 - DNA, 2165 bp, Zea Mays
ctccatttgttcccgcggaacaccgatctgccgtccacttgttaaatcgcctgggttaagttgaaacaccatctttaaatatagcaattccattttttattcgctcctcacacgtcgccgtcgcttctcgttattaatatcgccgtcgcctcgcacctccctttgttccgtcgccccgcattgctcgcccagagttcttgtttaggcaaaggcaaaagcaggagcaaaaagggtgctcctgagaaatggagactagtgaaggctcatggaacagctgtgggtctcccatctgatgatgacatgggcaacagtgaagttggtcacaatgcacttggtgctggtcggattttcgcccaaggtgctaagcttgttgatcaagctcttgcctcaggaaagatttatgatggagatgggttcaactacatcaaagaatcttttgaaaatggtactcttcaccttattgggttgttgagtgatggtggtgtccactcccgccttgaccaactgcagttacttctgaaaggtgtcagtgagagaggagcaaaaaaaattcgtgtgcacatccttaccgatgggcgtgacgttttggatggcagcagtgttggtttcgtggagaccctagagaatgatcttttggagcttcgaggcaagggtattgatgcacagattgcttctggtggtggaaggatgtatgttaccatggaccgttatgagaatgactgggatgtggttaaacgtggctgggatgctcaggtgctcggagaagcaccctacaaattcaaaagtgcacttgaggctgtgaaaacactgagagcacagcccaatgctaatgaccaatacttgcccccatttgtgatagttgatgacagcggcaaagctgttgggcctgtattagatggtgatgcagttgtcactatcaacttccgggctgatcgcatggttatgcttgctaaagcactagagtatgcagattttaacaattttgaccgtgtacgtgtccccaaaattcgatatgctgggatgcttcagtatgatggtgagttgaagcttccaagtcgctaccttgtttccccaccagagatagatagaacatctggggagtacttggtgaagaatggcatccgcacctttgcttgcagtgagacagtgaaatttggccatgtcacatttttctggaatggtaaccgctcgggatactttgatgaaactaaggaagagtatgtagaagttcctagtgacagtggtattacattcaatgttgcacccaagatgaaggcgcttcaaattgctgagaaagctagggacgctctcctaagtggaaagtttgaccaggtacgtgtcaacctgccaaatggtgacatggttggtcacactggggatattgaggctaccgttgttgcttgcaaggcagctgatgaagctgttaagatcattctgaatgctgtcgagcaagttggtggtatttaccttgttactgccgatcatggcaatgctgaggatatggtgaaaaggaacaaatctggcaagccgttgctcgacaagaatggtggtatccagattctaacctcgcatacccttcagccggtgccggttgccattggaggccctggtcttcaccccggagtgaaattccggaacgacattcaaatccctgggctcgccaatgtagccgcaactgtgatgaacctccatggatttgaggcccctgctgactacgagcaaaccctaattgaagtggctgacaactaaatactggccagctatgtccaattttggttctatagttttgagaagggatatggccatgccattcaataatttctgtttgcaagcacgttgctcaaactcaccaaaacattgagaaacgccttttgacttgcatttagatgctctatttataccgttgacaatcgtctcttctggcttttagcagtttgatggctatctttacttagctatataatgtatctgagactgcaaactttgtgtcagtcaaactgctcgaggttatatgctgtttgtgtgggtcatcacgtgtgattaccttcgcacgcattgacgcatgaattgtgttcaccattctaattgcaaggcattttgatgggctacaatgtttgggagcaagataatttcagccccttcattcgcctagctctcccaaataa

SEQ ID NO: 36181 - DNA, 1148 bp, Zea Mays
ctagcgatcaaagtctagaccctgcaaattgtggctgtgcctatccctacatgggtagggttttcttcaggtcaccactgtttgcagacttgagaaacaatgagcactttcagctattggaagctagcctctcaacagaactgggactgcaacctggttcagttttcctttctgatatccacttcaccagtgatgattacctccaagttcaagtcagactatttccatcgaccggaacatcctttaacttgtcggaaataacgaggataggctttgatcttagcaatcaaacttacaagccaccacaaggttttggaccttattactttgttgcagatccatatgtccactttgcaggagcagatgacggtggaaaatcgcaagtaagcacaggtgctgtcgctggaattgcagtagcatgtggtcttattctgattgctgtaacttctggggcaatatttgctttattacagaagagaagaagtagggaactatcaggacaaacaaatcctttcgcttcatggggaatcgctaaaaaagatagtggaggtgctccacagctgaaaggagcaaggttcttttcttttgatgaactgaagaattgcaccaacaattttgcagagaacaatgaaataggatcaggaggttatggaaaggtttacaaggcaatactggtaggtggaacaaatgtggccataaaacgagcagagtatggatcaaagcaaggcgcagtagagttcaaaaatgagattgagttgctatccagagtccaccacaagaacctggtaagtctgataggattttgctatgaacaaggagagcagatgctggtctatgaatacgtctcaaatgggacattaagacataacttacaagctagaggaatttacctggattggaagaagaggctcaggattgctctaggatcagcaagaggactagcatatcttcatgagctcgccgatccacctattatacacagagatgtcaagtccacaaatattcttttggatggaaactttaaaccaaaagttgctgattttggtctgtcaaagttagttgcagacactgaaaaaggccatatttccactcaagtaaaaggaacattggtaggttctttggtcacagtacctcatcaattatcataa

SEQ ID NO: 36182 - DNA, 3601 bp, Zea Mays
atggcggcgatgcagcagttgctactcctgttcttgctcttggtatacctccggccaagtttcggtcagacgaacccccaagatgttgctgcacttcaggctttgatgaataattggcaaaacgaaccaccaagctggacaggttcaactgatccctgcacctcctgggttggaatttcctgttccaatggtcgggtgacagaaatgagattaacaggcatgaatctgcaagcatcggacccccttaggccagaggtccgggtggcccgccatgaggaccaaaagccattcccgggggtccagccccctggcataggtgctgagagccctcgtcttcaagacacgtggcaaacccggacccctccactggggttccagagtgctgattatagggatctgtctaataaccaaaatctcgggggtccacttactccaaatattggaaatctgaagcagctcaccgttctgattttgcttggatgcacgttcacagggaatatcccgaaagaaataggcaacttgtcacagctcacattcctggcactaaactcaaataaattcactggtggaattcctccaacacttggccttctttcaaatcttttctggttggacatgtcagcaaatcagttgtcaggacaaataccagtttctccagggttggatcaacttgtcaacacgaggcatttccacttcagtgagaaccagttgacaggcccgatgagcgaaagccttttcagtgataagatgaaccttatacatgtgatatttaataataacaactttactgggccaatcccagcatctcttggacaagtcaaatcacttcaaataatccgactagatcataaccaattcagtggtccagttcccaacagtattaccaccctaagtaacctcatggaagtgagcatagcaaacaacctactgaacgggaccgtgccggatctcactaatctaactcagctagattatgtagacctaagcaataataactttgcaagctcgccagcaccaggatggttttcaacattgagatccttaaataccatatttatggatcatggtgaacttaatgggacaatccctagtgctatgttcagtctccccaacctgcagcaagtatcattagctaggaactcattcagtgggaaacttaatatgacaggtaacatcagctcacagttgcaggttgttaacttgacatctaatcaaatcatcgaagcgaatgtaacaggctacagcaacacccttatgtaagaattgtcctctcaaacataaatgattgtatgcttgcatacttaccggcatgtgttttttaaccaccatagtttctgttcttatccagattaacagagaatcctgtatgtttagacaacactagtttatgcaaactcaagcaaaagcagcaagcgtcatatgccactaaccttggcccatgtgctgccattccatgcccctttgatcagtcagcaagtccagtcacttcacagaactgtgcatgcaccagtcccattcagggtctgatgatcttccaagcacccgccttctctgatgtcataagccccacaatgttccaaattgtggagtcaacacttatgcagaatcttagcctggcaccaagatcagttgccatttccaatgttcaattcagccaaggaaaccctctaacattcatagtgagtatttttccggccagtggaacgagcttcaatcgctcagaagtcataagaatcatttctcctctggtcaaccaaacttataaagccccacccaattttggaccatacagcttcatagcgaacacatactttacagttcccagcaataagaagccctcgatgggcaaggctgcaataattggaatatcaattgggggtgttgtccttattcttggccttgttgcagtagcaacatatgctctacgacagaaaaggatagccaaggaggcagtagagcgaactacaaatcctttcgcatcatggggagctggtgggacagacaacggagatgcaccacaattgaagggtgcaagatactttccattcgaggaactgaaaaaatgcaccaataatttctcagaaactcaggagatagggtctggaggatatgggaaggtgtacaaaggaagacttgcaaacgggcaaatagctgcaataaaacgtgcacagcaagggtccatgcaaggtgcagctgaattcaagaatgagatagaactgctgtccagggttcatcacaagaacctagtgagcctagtgggtttctgctacgaacaaggggaacagatgttggtttatgaatatattccttatgggacactaagggagaacttgatgggtaaaagaggagtgaacttagattggaagaaccgcctcaggattgccattggctcagcaaaaggtctagcatacctccatgaacttgctgatccaccaatcatacacagagatatcaaatcaaccaatatccttttggatgaaagtctcaatgctaaggttgccgattttggtctttcaaaacttgtgtctgacacacaaaagggtcatgtttctacccaagtgaagggaacattgggctatttggatcctgagtattacatgacgcaacagctctctgagaagagtgatgtctacagctttggagttgtcctgctagaactagtaactgctagccagcccatagagaaaggcaggtatattgtccgtgagatcaggacagcaatagatcaatatgatcaagaatactatggcttgaagggcctaatcgatccaaaaatcagggattcagctaaattaattggcttcaggagatttatacagttggctatggaatgtgtggaagagtctgctgttgaccgcccaacaatgaatgatgtggtaaaggaacttgagatcatcatacagaatgaaggggcacaattgttaaactcagcgtctttatcagttgaacaatttggaaatgaaaagagacgagatccttatgcagaacatttgcctatgaatgatgaaagcagcagcagcacttttgactacaacagtgggtattcatactcagctgttcaaccaaagtagataacagtttccactctttgtttttgttgaaggatgtattatacgacattaatcttttccctgttgataaatcaatgaatgagtatttcagaaacacactggcacatgacttgcttcagatgaaacagcagtgaatgtctgatccatctataaaaccattcatgcctctgtactcctttacactgacaacataaggataaaaaatgtccgattagccagtcgaatcaagaactagtccaagacaatattgttgagaggtcatggccatgaagttcttgtcggtggatgccaatatgtgagtacaaaggactgatgagggacaatattataattgatgtttgccctttgttgacaaacagatgatttagtagaggcattgcccatgtgtgttgaaatatctttgtttgattatattaattaacagtgacgaaaataactcagtcattactactgcaatgcatgtctgttgcacttctgtagaagtagcagggacaagttctataaaaaatgttcgctgcacttaattgagt

SEQ ID NO: 36183 - DNA, 3431 bp, Zea Mays
atggcggcgatgcagcagttgctactcctgttcttgctcttggtatacctccggccaagtttcggtcagacgaacccccaagatgttgctgcacttcaggctttgatgaataattggcaaaacgaaccaccaagctggacaggttcaactgatccctgcacctcctgggttggaatttcctgttccaatggtcgggtgacagaaatgagattaacaggcatgaatctgcaaggtacattaagcaataccataggccaactatctgctttgaaatatctggatctgtctaataaccaaaatctcgggggtccacttactccaaatattggaaatctgaagcagctcaccgttctgattttgcttggatgcacgttcacagggaatatcccgaaagaaataggcaacttgtcacagctcacattcctggcactaaactcaaataaattcactggtggaattcctccaacacttggccttctttcaaatcttttctggttggacatgtcagcaaatcagttgtcaggacaaataccagtttctccagggttggatcaacttgtcaacacgaggcatttccacttcagtgagaaccagttgacaggcccgatgagcgaaagccttttcagtgataagatgaaccttatacatgtgatatttaataataacaactttactgggccaatcccagcatctcttggacaagtcaaatcacttcaaataatccgactagatcataacattgtcacaattgttgccagccgactagatcataaccaattcagtggtccagttcccaacagtattaccaccctaagtaacctcatggaagtgagcatagcaaacaacctactgaacgggaccgtgccggatctcactaatctaactcagctagattatgtagacctaagcaataataactttgcaagctcgccagcaccaggatggttttcaacattgagatccttaaataccatatttatggatcatggtgaacttaatgggacaatccctagtgctatgttcagtctccccaacctgcagcaagtatcattagctaggaactcattcagtgggaaacttaatatgacaggtaacatcagctcacagttgcaggttgttaacttgacatctaatcaaatcatcgaagcgaatgtaacaggctacagcaacacccttatattaacagagaatcctgtatgtttagacaacactagtttatgcaaactcaagcaaaagcagcaagcgtcatatgccactaaccttggcccatgtgctgccattccatgcccctttgatcagtcagcaagtccagtcacttcacagaactgtgcatgcaccagtcccattcagggtctgatgatcttccaagcacccgccttctctgatgtcataagccccacaatgttccaaattgtggagtcaacacttatgcagaatcttagcctggcaccaagatcagttgccatttccaatgttcaattcagccaaggaaaccctctaacattcatagtgagtatttttccggccagtggaacgagcttcaatcgctcagaagtcataagaatcatttctcctctggtcaaccaaacttataaagccccacccaattttggaccatacagcttcatagcgaacacatactttacagttcccagcaataagaagccctcgatgggcaaggctgcaataattggaatatcaattgggggtgttgtccttattcttggccttgttgcagtagcaacatatgctctacgacagaaaaggatagccaaggaggcagtagagcgaactacaaatcctttcgcatcatggggagctggtgggacagacaacggagatgcaccacaattgaagggtgcaagatactttccattcgaggaactgaaaaaatgcaccaataatttctcagaaactcaggagatagggtctggaggatatgggaaggtgtacaaaggaagacttgcaaacgggcaaatagctgcaataaaacgtgcacagcaagggtccatgcaaggtgcagctgaattcaagaatgagatagaactgctgtccagggttcatcacaagaacctagtgagcctagtgggtttctgctacgaacaaggggaacagatgttggtttatgaatatattccttatgggacactaagggagaacttgatgggtaaaagaggagtgaacttagattggaagaaccgcctcaggattgccattggctcagcaaaaggtctagcatacctccatgaacttgctgatccaccaatcatacacagagatatcaaatcaaccaatatccttttggatgaaagtctcaatgctaaggttgccgattttggtctttcaaaacttgtgtctgacacacaaaagggtcatgtttctacccaagtgaagggaacattgggctatttggatcctgagtattacatgacgcaacagctctctgagaagagtgatgtctacagctttggagttgtcctgctagaactagtaactgctagccagcccatagagaaaggcaggtatattgtccgtgagatcaggacagcaatagatcaatatgatcaagaatactatggcttgaagggcctaatcgatccaaaaatcagggattcagctaaattaattggcttcaggagatttatacagttggctatggaatgtgtggaagagtctgctgttgaccgcccaacaatgaatgatgtggtaaaggaacttgagatcatcatacagaatgaaggggcacaattgttaaactcagcgtctttatcagttgaacaatttggaaatgaaaagagacgagatccttatgcagaacatttgcctatgaatgatgaaagcagcagcagcacttttgactacaacagtgggtattcatactcagctgttcaaccaaagtagataacagtttccactctttgtttttgttgaaggatgtattatacgacattaatcttttccctgttgataaatcaatgaatgagtatttcagaaacacactggcacatgacttgcttcagatgaaacagcagtgaatgtctgatccatctataaaaccattcatgcctctgtactcctttacactgacaacataaggataaaaaatgtccgattagccagtcgaatcaagaactagtccaagacaatattgttgagaggtcatggccatgaagttcttgtcggtggatgccaatatgtgagtacaaaggactgatgagggacaatattataattgatgtttgccctttgttgacaaacagatgatttagtagaggcattgcccatgtgtgttgaaatatctttgtttgattatattaattaacagtgacgaaaataactcagtcattactactgcaatgcatgtctgttgcacttctgtagaagtagcagggacaagttctataaaaaatgttcgctgcacttaattgagt

SEQ ID NO: 36184 - DNA, 3359 bp, Zea Mays
ggcatggcggcgatgcagcagttgctactcctgttcttgctcttggtatacctccggccaagtttcggtcagacgaacccccaagatgttgctgcacttcaggctttgatgaataattggcaaaacgaaccaccaagctggacaggttcaactgatccctgcacctcctgggttggaatttcctgttccaatggtcgggtgacagaaatgagattaacaggcatgaatctgcaaggtacattaagcaataccataggccaactatctgctttgaaatatctggatctgtctaataaccaaaatctcgggggtccacttactccaaatattggaaatctgaagcagctcaccgttctgattttgcttggatgcacgttcacagggaatatcccgaaagaaataggcaacttgtcacagctcacattcctggcactaaactcaaataaattcactggtggaattcctccaacacttggccttctttcaaatcttttctggttggacatgtcagcaaatcagttgtcaggacaaataccagtttctccagggttggatcaacttgtcaacacgaggcatttccacttcagtgagaaccagttgacaggcccgatgagcgaaagccttttcagtgataagatgaaccttatacatgtgatatttaataataacaactttactgggccaatcccagcatctcttggacaagtcaaatcacttcaaataatccgactagatcataacattgtcacaattgttgccagccgactagatcataaccaattcagtggtccagttcccaacagtattaccaccctaagtaacctcatggaagtgagcatagcaaacaacctactgaacgggaccgtgccggatctcactaatctaactcagctagattatgtatttatggatcatggtgaacttaatgggacaatccctagtgctatgttcagtctccccaacctgcagcaagtatcattagctaggaactcattcagtgggaaacttaatatgacaggtaacatcagctcacagttgcaggttgttaacttgacatctaatcaaatcatcgaagcgaatgtaacaggctacagcaacacccttatattaacagagaatcctgtatgtttagacaacactagtttatgcaaactcaagcaaaagcagcaagcgtcatatgccactaaccttggcccatgtgctgccattccatgcccctttgatcagtcagcaagtccagtcacttcacagaactgtgcatgcaccagtcccattcagggtctgatgatcttccaagcacccgccttctctgatgtcataagccccacaatgttccaaattgtggagtcaacacttatgcagaatcttagcctggcaccaagatcagttgccatttccaatgttcaattcagccaaggaaaccctctaacattcatagtgagtatttttccggccagtggaacgagcttcaatcgctcagaagtcataagaatcatttctcctctggtcaaccaaacttataaagccccacccaattttggaccatacagcttcatagcgaacacatactttacagttcccagcaataagaagccctcgatgggcaaggctgcaataattggaatatcaattgggggtgttgtccttattcttggccttgttgcagtagcaacatatgctctacgacagaaaaggatagccaaggaggcagtagagcgaactacaaatcctttcgcatcatggggagctggtgggacagacaacggagatgcaccacaattgaagggtgcaagatactttccattcgaggaactgaaaaaatgcaccaataatttctcagaaactcaggagatagggtctggaggatatgggaaggtgtacaaaggaagacttgcaaacgggcaaatagctgcaataaaacgtgcacagcaagggtccatgcaaggtgcagctgaattcaagaatgagatagaactgctgtccagggttcatcacaagaacctagtgagcctagtgggtttctgctacgaacaaggggaacagatgttggtttatgaatatattccttatgggacactaagggagaacttgatgggtaaaagaggagtgaacttagattggaagaaccgcctcaggattgccattggctcagcaaaaggtctagcatacctccatgaacttgctgatccaccaatcatacacagagatatcaaatcaaccaatatccttttggatgaaagtctcaatgctaaggttgccgattttggtctttcaaaacttgtgtctgacacacaaaagggtcatgtttctacccaagtgaagggaacattgggctatttggatcctgagtattacatgacgcaacagctctctgagaagagtgatgtctacagctttggagttgtcctgctagaactagtaactgctagccagcccatagagaaaggcaggtatattgtccgtgagatcaggacagcaatagatcaatatgatcaagaatactatggcttgaagggcctaatcgatccaaaaatcagggattcagctaaattaattggcttcaggagatttatacagttggctatggaatgtgtggaagagtctgctgttgaccgcccaacaatgaatgatgtggtaaaggaacttgagatcatcatacagaatgaaggggcacaattgttaaactcagcgtctttatcagttgaacaatttggaaatgaaaagagacgagatccttatgcagaacatttgcctatgaatgatgaaagcagcagcagcacttttgactacaacagtgggtattcatactcagctgttcaaccaaagtagataacagtttccactctttgtttttgttgaaggatgtattatacgacattaatcttttccctgttgataaatcaatgaatgagtatttcagaaacacactggcacatgacttgcttcagatgaaacagcagtgaatgtctgatccatctataaaaccattcatgcctctgtactcctttacactgacaacataaggataaaaaatgtccgattagccagtcgaatcaagaactagtccaagacaatattgttgagaggtcatggccatgaagttcttgtcggtggatgccaatatgtgagtacaaaggactgatgagggacaatattataattgatgtttgccctttgttgacaaacagatgatttagtagaggcattgcccatgtgtgttgaaatatctttgtttgattatattaattaacagtgacgaaaataactcagtcattactactgcaatgcatgtctgttgcacttctgtagaagtagcagggacaagttctataaaaaatgttcgctgcacttaattgagt

SEQ ID NO: 36185 - DNA, 315 bp, Zea Mays
ttttttctttcaatttttcctgttgaaaagtatcagaacaaatgaaaatacgtaagtttcaattcaatgggcatcaaagcccatacagtaaagcaacaaaaagatttaataggaagtttcagttattcgagaaaaaggattgttgttcttacaagtaaaaccgaaaggagcattcgggcatttccagaaaaatgggctcttaaacctctagctaaattccctattgcctgagtagcttccaccgaaacagccaaattaacatctgtgatgagctgcagcacaaaacaccaccataagaataaaaaaatactaata

SEQ ID NO: 36186 - DNA, 476 bp, Zea Mays
tttttttttttttttttttttggcagctcagataaaggacatctctgagctagcgaacattccggacgaggacttccctgagataatgccgatgaggaagggggtaaacagattcgttgtgagcaagaggaagacaccattggagaggagattaacttccccacagtacagaaggaacctgccaattgtcagatctgaaacggacgaggatgctagctgaaaacagaggtatgattgcctgcataccagtacggcagtataccaccacagccttaactgtgatgcgattgcgatgtaccatttttatttgtgacgataagcgagcgatcggaaacagaaatcatggaaaacaataccccaagatagttttctgtatagtaaaattttgttcgcaagcctgaggtttgcgggattgtctttgctacttctaaactatacagatttgcgttgtactaaaaccctttttaacattcaac

SEQ ID NO: 36187 - DNA, 3054 bp, Zea Mays
aacacacactagcgagtagcgacatgcttcagaaagactgtatttgtccatttatatggcagggctgtagtctgtagaagtgtagtgctaggcgatgaagcaacatctctccacatgattcagctcgtggctgaaggttagataattagagatgccattgtgttgacttctccattcaaatcatgactaatgtaccaccctcctctcatcagaggatggccaagctcctagctaattgaaatataaaacagaaacaggaaaggagctcagttcgttatagaggtgctggagatgaggtttgtaactatcattttccaattcaactgtgctggactaagaaaggtccgtccttgatgtttcaacccactggttttaagacatctttaacctcttataagcggtattgttcagtttgttttcttgttcatgtgctccaataacaaacctgtcataagcttcctttgaatttttcttattcataagcttcccttgataaaaggacaagtggtcatctttttagcctaattcaacaaaaaagaaacgatagcagctttctctgcctggtgggtaggatgattgccgatcagccacacatatgaggctatgagctaaccgagattcactgttacagttcgaaagatactaagcacagctgttttctacactgtaacatacactcgccttgagtaaaatcaagccaaataaatgatcatgcagtaaaacttagctactgaatacttgtgaagacattgtttcagtattgtaacatataaggggctttcaatgcggggaacaaatagcagcaaatcattgacatgacctaactagttgtacatgtggtctgaaagattggcctaacatttgcgtaagcgggcagatcatatttcatggaagcaactgccttgagcaatacgatacttcttcaattttgaaatgaataaaatgtatgagccttccgtttcgataaacatgactaacagaaaaaacgttaatttatttactatatatgaaagccggtaagaaacgtgcattcctagccttccacgtcaattgaattattttcagcccctcgatcatcaatcaagggcttgcgtccggtagcgggtaaaaagataaaactctccatgctcccacggtccctctgcctctcgagagttccgtccacacatgcttctagatgcctctcctcgcttcatccacctcgtctcactccggcgtcttccatttggcctccgtgccttctcctcttgcttgtggccacagtctgagccatgccgcgccgacatggtgagcaagagcgacagccagtagaaaccgctctcgagcgcgacgctgcagcaggcacaggcgaggtcacgctcatccagatcgcactggcccatcgacgacagcaacgccttctcgggcaccgccgccgcgacgcagtcctcgcacatgtccccggcgtccacgagccagcggtgggtcctgaagaggctgccaatgccgaggcgggagcagagcgcacacggcggtgcgaggccgaagaagccggcgaaccgagctatgaggattaggattttggttttaaggttcttttttagctcgagcatccttataaaaaattatttcattggctgttttttagagctagtttggcaaccccattttcaaatagatttccattttcccaagaaaaaatgaactaatttcccttgaaaaatgaaaatcccttggaaaaatttagttgccaaactagcccctatattatttctctatgtgttgcactacattataaatatcaagtaattgtaatggtgcttctttcctttaaatatgcgcattaattcttgcagcagttaagtctacatgcacatttgtgtatctatttacgtagtgaactgcaaaatatcatgtgtaaagctatttttacaagtttattaaccacattccttgtcacgcgcagggcaatttttcccaatcactataggctcctatactcttctcaaatattgatgtggtatgcgagtaacaaaacttcttctcaatataaataggtttggtagtgtggccttactgttacgttactttccttcttttaaaaaaaattaaaggtacctacaagatattgaccatggatgtctattgtttgtagcatgctatataattcgaatgtgtgttaatcatggccaggtcacacaatgtgtcatgctatatagtaaactagtatctataatcaggggtccaaaaaagcaatctcaagctcatgtaaacaagcagctcaacatatcattgaagctactgtcttgaccaatatgacactcgtgcaggatgtcctttttgtaatgagttacatacaggagaatccagtcttatggttcttcattatctacatatggtcttttattcttaggcactcattttgtctaggctttcagtttaatatttttattcagcggccatgattattggcaagaactcattgaatctatagtttgggctcataacaaattaaaagttgctcttgctactcagcctaaagccttgagcattatacaagaacgtgctctaggagtaacccactaccttctgggcacttcagtttggataggagtataggacaaacaatggtagatcgttgaccgaattaaccagccatatatgtgatttgaaagaaccatctttgcctgctcgtgtgaacaaacagcttaatatatcatggaaacaacagtcgtaaacatttttttagtgcactgcgaattagatgagtgctcagaaagacgttgtactgccatgacaaaactgtacacatattagctctaataatcacaccccccccccccccccacacacacacaagaacatatgcagacaagccttctaaattattattattttcaaatacatctcttgattgcctaatgttaagagtctaaattgatatgttcttttctttgagacgcagataattaattaagcctttggaagtgtacaaagacagcaccaaacgaatgaaacataaaggagatttggcctaaaacgctagcaagcccacctgaccctctcgaggttgtc

SEQ ID NO: 36188 - DNA, 2680 bp, Zea Mays
aacacacactagcgagtagcgacatgcttcagaaagactgtatttgtccatttatatggcagggctgtagtctgtagaagtgtagtgctaggcgatgaagcaacatctctccacatgattcagctcgtggctgaaggttagataattagagatgccattgtgttgacttctccattcaaatcatgactaatgtaccaccctcctctcatcagaggatggccaagctcctagctaattgaaatataaaacagaaacaggaaaggagctcagttcgttatagaggtgctggagatgaggtttgtaactatcattttccaattcaactgtgctggactaagaaaggtccgtccttgatgtttcaacccactggttttaagacatctttaacctcttataagcggtattgttcagtttgttttcttgttcatgtgctccaataacaaacctgtcataagcttcctttgaatttttcttattcataagcttcccttgataaaaggacaagtggtcatctttttagcctaattcaacaaaaaagaaacgatagcagctttctctgcctggtgggtaggatgattgccgatcagccacacatatgaggctatgagctaaccgagattcactgttacagttcgaaagatactaagcacagctgttttctacactgtaacatacactcgccttgagtaaaatcaagccaaataaatgatcatgcagtaaaacttagctactgaatacttgtgaagacattgtttcagtattgtaacatataaggggctttcaatgcggggaacaaatagcagcaaatcattgacatgacctaactagttgtacatgtggtctgaaagattggcctaacatttgcgtaagcgggcagatcatatttcatggaagcaactgccttgagcaatacgatacttcttcaattttgaaatgaataaaatgtatgagccttccgtttcgataaacatgactaacagaaaaaacgttaatttatttactatatatgaaagccggtaagaaacgtgcattcctagccttccacgtcaattgaattattttcagcccctcgatcatcaatcaagggcttgcgtccggtagcgggtaaaaagataaaactctccatgctcccacggtccctctgcctctcgagagttccgtccacacatgcttctagatgcctctcctcgcttcatccacctcgtctcactccggcgtcttccatttggcctccgtgccttctcctcttgcttgtggccacagtctgagccatgccgcgccgacatggtgagcaagagcgacagccagtagaaaccgctctcgagcgcgacgctgcagcaggcacaggcgaggtcacgctcatccagatcgcactggcccatcgacgacagcaacgccttctcgggcaccgccgccgcgacgcagtcctcgcacatgtccccggcgtccacgagccagcggtgggtcctgaagaggctgccaatgccgaggcgggagcagagcgcacacggcggtgcgaggccgaagaagccggcgaaccgagctatgaggattaggattttggttttaagggcaatttttcccaatcactataggctcctatactcttctcaaatattgatgtggtatgcgagtaacaaaacttcttctcaatataaataggtttggtagtgtggccttactgttacgttactttccttcttttaaaaaaaattaaaggtacctacaagatattgaccatggatgtctattgtttgtagcatgctatataattcgaatgtgtgttaatcatggccaggtcacacaatgtgtcatgctatatagtaaactagtatctataatcaggggtccaaaaaagcaatctcaagctcatgtaaacaagcagctcaacatatcattgaagctactgtcttgaccaatatgacactcgtgcaggatgtcctttttgtaatgagttacatacaggagaatccagtcttatggttcttcattatctacatatggtcttttattcttaggcactcattttgtctaggctttcagtttaatatttttattcagcggccatgattattggcaagaactcattgaatctatagtttgggctcataacaaattaaaagttgctcttgctactcagcctaaagccttgagcattatacaagaacgtgctctaggagtaacccactaccttctgggcacttcagtttggataggagtataggacaaacaatggtagatcgttgaccgaattaaccagccatatatgtgatttgaaagaaccatctttgcctgctcgtgtgaacaaacagcttaatatatcatggaaacaacagtcgtaaacatttttttagtgcactgcgaattagatgagtgctcagaaagacgttgtactgccatgacaaaactgtacacatattagctctaataatcacaccccccccccccccccacacacacacaagaacatatgcagacaagccttctaaattattattattttcaaatacatctcttgattgcctaatgttaagagtctaaattgatatgttcttttctttgagacgcagataattaattaagcctttggaagtgtacaaagacagcaccaaacgaatgaaacataaaggagatttggcctaaaacgctagcaagcccacctgaccctctcgaggttgtc

SEQ ID NO: 36189 - DNA, 1501 bp, Zea Mays
gctttgtcttctgcagagcttttcacggccgtatcactttgagaatagagcggatggcatatctaattttgtctctgaaaatgggaacaaaataacagaccagaaatcaggatttagcgttggaagagatggtagaggtggcaggcaatttggtgcatttagagggaggggcagaggaaggcatcctaatcaaaatcgtggaagaggaagcaacaactggggagaaataaaatcaaacttcatgggacacaaaagttcagcatcaaagcattgcagtgatattgcagctccagcatctggaggacgccgaaagccccctccaataatttatgatgcaaatgaagttaaacagtgggtagaggcacgaaaaaagaactaccctacaagtgtcaacgtaaataagaagttgtctgagatgaaatcagataatgaaaacaaggacaaagatgcccaactgcgacgtcaggttgaactgaaggaagtcatagcaaagcaacaagagctgggttttgacccacctgagctaccgcctggctatctatcagaaattggggatcaatgcattgaaaataaaaataataggaaaactcaattcagggattctcattttggaaatcgtttcaataataacaaaagatcaaggtatgagcgtggaggttttcagtctaaaagatctaaggtatggaactgtactcctcacgctgatcacgggatggtcaagagcagagaaccaaccctcctgcagaagcttcttagctctgatatcaagagggatagacatagacttcttcacgtgttcagattcatgaccttgaacaatttctttaaggactggcctgacaggcctttacagtttcctagtgttaagatgaatcagattgaaataggaagcaatattagcacagatgacttggagaatgctgggatgtccaaagacagcatccttggtgtaaacgaaaatggtgattggaaagagttgagctcgattgatgaagaggataccgatagcgccaaccacaatgatgaagacgtcgatgatgacagtgttgacagcagcattgaggatggggccgaggaggacgggtacgaagagcagtttaatgagcctgaagatgatacggcagtctgaatttgactgggccgggtatccacatcaaaaagacaaagcgcttcttcttgagtagagtttttgcacaacacattctgtagctcttcgcatattcctgttccaggagagggtctggtgtttaaagaaactttgtactttgttgtagttgaattgttatgttatcgccgggaatatatatacaatatgcggacgtgttctctgtccttttctgaatgtatacaaaagagtaaaatgtattaggagtctttgaaattaacatgtgttatttgggtcccgaactcttaagagtaggaaaacgagtgttgggacttggtggtctatctaaaaccgagtttgagcggacttggtggtttatctaaaactgagtttgct

SEQ ID NO: 36190 - DNA, 2048 bp, Zea Mays
ctaaaaccctattgggacggcggccacctcttcgtcgtcaagaacgccgccgcagacatgcgccccttccacactccccgccccaaccaacatcaccgcgcacggcccggcggcgacccgggcccgcctcaccttcccggtacccccatgcaccccgccttcccgccacctgtccccaacctcgccgccgccgccaaccccatggctgcagcggcggcggccaaccctttcctggcgctgcagcttctaggccaggcccagcagctccagaatctcggtttcctcgccgccgccgcgctccagaagcagcagcagcaggcgccgttctttcctggagggttcccttcgaaccccaatcagtttgcgcctttcgcgggtggccccccgcctgtcggtttcaatggcggcggggcgtttcgaccgggcggtgcttggatttgtgggccgcggccacccagtcccatgatgagccctgcggggaacggttccaacaacaacaacatcgctggaagcggtggagcgtcgaggccgattttcaacgttgggaggaaggaccacaacaatatagctggcagcggtggcatgccgaggccgattctcgacgctgggaggaaggaccgggatagcagtgctggcggcaacggcgagaccagaaatcaggatttagcgttggaagagatggtagaggtggcaggcaatttggtgcatttagagggaggggcagaggaaggcatcctaatcaaaatcgtggaagaggaagcaacaactggggagaaataaaatcaaacttcatgggacacaaaagttcagcatcaaagcattgcagtgatattgcagctccagcatctggaggacgccgaaagccccctccaataatttatgatgcaaatgaagttaaacagtgggtagaggcacgaaaaaagaactaccctacaagtgtcaacgtaaataagaagttgtctgagatgaaatcagataatgaaaacaaggacaaagatgcccaactgcgacgtcaggaactgaaggaagtcatagcaaagcaacaagagctgggttttgacccacctgagctaccgcctggctatctatcagaaattggggatcaatgcattgaaaataaaaataataggaaaactcaattcagggattctcattttggaaatcgtttcaataataacaaaagatcaaggtatgagcgtggaggttttcagtctaaaagatctaaggtatggaactgtactcctcacgctgatcacgggatggtcaagagcagagaaccaaccctcctgcagaagcttcttagctctgatatcaagagggatagacatagacttcttcacgtgttcagattcatgaccttgaacaatttctttaaggactggcctgacaggcctttacagtttcctagtgttaagatgaatcagattgaaataggaagcaatattagcacagatgacttggagaatgctgggatgtccaaagacagcatccttggtgtaaacgaaaatggtgattggaaagagttgagctcgattgatgaagaggataccgatagcgccaaccacaatgatgaagacgtcgatgatgacagtgttgacagcagcattgaggatggggccgaggaggacgggtacgaagagcagtttaatgagcctgaagatgatacggcagtctgaatttgactgggccgggtatccacatcaaaaagacaaagcgcttcttcttgagtagagtttttgcacaacacattctgtagctcttcgcatattcctgttccaggagagggtctggtgtttaaagaaactttgtactttgttgtagttgaattgttatgttatcgccgggaatatatatacaatatgcggacgtgttctctgtccttttctgaatgtatacaaaagagtaaaatgtattaggagtctttgaaattaacatgtgttatttgggtcccgaactcttaagagtaggaaaacgagtgttgggacttggtggtctatctaaaaccgagtttgagcggacttggtggtttatctaaaactgagtttgct

SEQ ID NO: 36191 - DNA, 3108 bp, Zea Mays
gttacatactcataatgcaaaagtctattttgttaatgatgctcgtgtgccaaaaacatccgacatgtacagcttgcttatcgcggtcccagacgaaacggacaaatggtcgcattagaccgttatatatgcttacggaatcgcacggaacgtacattgcttgtcgacgttgcggtcgtttctcgtaggaattcaatttgacgtcacgacgccgttaaaagctttttccgattaaaaaaaagctccggatccgtcggctttcagccactaattttcaaagccaattttctcgcttcgcctttccttctcccatctctctcgacgaggctcgccatcgccgctattcccattcgccctcccctcctcttctccacccccgcaaaaccctagccgccgacccctccaatcccctaccagcgcccgattgccggccccaatcgagctagggctcgccaaattctggccgggctcgttgaaatttcggccggtcttttctggtgaatcctttggtttatcctgaggggatattttgatttctgcggcgcacgatggggagcagaagggaggaggagaggaacgagaagatcatccgcggactcatgaagttgccgcccaaccgcaagtgcatcaattgcaacagtgtggggccacagtatgtgtgtaccaatttctggaccttcatttgcctgtcatgtagtggaattcaccgtgaattcactcaccgtgttaagtcggtgtcaatgtccaaatttactacccaagaagtgcaggccctcgaacaggggggtaaccagcgagcacgtgacatctacctaaaggattgggattggcaacgaatgaggttgcctatcaacaccaatccggataggataagggaatttatcagggctgtttatgtggataagaagtatgctggtggatcctctaacaaaccagccacagaaagtgagagtatgaagagcaatgaccatgacatgagaagacctagttcttatcattcatattcccagagcccaccctatgattttcaatatgaagatagacgatatggtaagcaagtgaacacacttgctagaaggccttcagatagggcgctcttcgatgggaaacttggcaacctactattcagtccaggtcgtttgcgagatcagatgaatgaagaccgttttgccaatgaaagttcaggatcaaggttttctgacttctcagcctcaagcactggcgacttcagaaatgatgtgctttctcctagctctcaggagacaggctacagtagtccctcagtccaccattcaagaaatgtctctgctgacaatcctcaaacccagaaatgtcctaacgcagcttcacaaatagatttcaatggagttcgacgtccacagcgaacaacttcttctggaagttttggatcatttgatggtagctcagtttccaacaaatcaattgaatcaggttacccacctgatgcaccaacagaaaagtcagtgcattgtgctgtaaaccatcagactgtaccttctcctgaggcctgttcgacacaacaatatgcctccccatccgacaatcacaacttgatacctcacaaacctgctgatttaggtagccaaattgttgccaccaggaaaccagtgcaacatagttgcgctcagattgaaaatgtggtgccgatgcatgctccagtacaaccaacgacttccacacctcttggcctctttgatcaatcaactgtgcaacatcctgtcacatctgctgcaccgatagatctgtttgctggctttaatgaacagttaccagcttctcataatacagatggtgtatccagtcattctgttgttgctaaagaacctgcccataatgttgttcagaagggcataatgccatcagctgaagcactcgccacatctcatgctgtgcaccaagatttgttcagtctgtcaattttgcaggaaccagcaacacccttaccctctcagccaatagatctgtttgctggctttgaccaacatttgccgcatttgtctactgttcagaaaattccatcggcagttccatttcctgctaatgatggatgggctttctttgacgtgcaacatggattgttgacatctgtttcaaatgtgcaaggtcaggtgcctgctgcattctctccatctgatggtattgctaaaggaattgaccaattaacattaccaacttcgccaccaaatgtaattgggtcacaaaattctccggctatgatggataactggagtttaaatgctgaggaagtgaagatccctgtcctcaacgaaaattctcagtcttggaatgcctttggtgaatctactcagagcgcatcaaatgatctgttcacatttaatactatgtctcaagtagaagctcatcaattctctatgccaagtggtccatatgttgaatccagaattccacaggatttagttagggatgagcctgaaaggccaactcctagggatgtgttttctggcttcaatatttcacatgttgaggtggttggaccatcgtctccatcactccagccccatttgggtggcatggtctctcatcctgaaaaatcaacaaatccatttgacatggcatttgaatccgacgttgacgccaatgacatgttcatggatttgacctcactgcaagaaacattaccagatcatcacactctcacagattattcggggagcttaacagagccatggatttctcagaattccactatgtcatatattccttctgggcctcaaggaggtttatcctatgtggcaggacaggactctcacatgttgagttcaacacatcaaggagcttttccacctaggaatccatttgagtgagactagtaaagagagttttgctggatagtggtggacagaagaggaaggcaatcagcaccggtcgaaactcaaatggatactcaggtctactatactagatgcattgaaagcaactgtgcatcgaatctgaaaccctgagatggaccggtgccaactgccaactcatattcaatgatcggtgccagctcatattcaatgacctatgccaagcggcgaagaagtggcacactaggagcatcaccaatgtttctacaaccatata

SEQ ID NO: 36192 - DNA, 3283 bp, Zea Mays
gttacatactcataatgcaaaagtctattttgttaatgatgctcgtgtgccaaaaacatccgacatgtacagcttgcttatcgcggtcccagacgaaacggacaaatggtcgcattagaccgttatatatgcttacggaatcgcacggaacgtacattgcttgtcgacgttgcggtcgtttctcgtaggaattcaatttgacgtcacgacgccgttaaaagctttttccgattaaaaaaaagctccggatccgtcggctttcagccactaattttcaaagccaattttctcgcttcgcctttccttctcccatctctctcgacgaggctcgccatcgccgctattcccattcgccctcccctcctcttctccacccccgcaaaaccctagccgccgacccctccaatcccctaccagcgcccgattgccggccccaatcgagctagggctcgccaaattctggccgggctcgttgaaatttcggccggtcttttctggtgaatcctttggtttatcctgaggggatattttgatttctgcggcgcacgatggggagcagaagggaggaggagaggaacgagaagatcatccgcggactcatgaagttgccgcccaaccgcaagtgcatcaattgcaacagtgtggggccacagtatgtgtgtaccaatttctggaccttcatttgcctgtcatgtagtggaattcaccgtgaattcactcaccgtgttaagtcggtgtcaatgtccaaatttactacccaagaagtgcaggccctcgaacaggggggtaaccagcgagcacgtgacatctacctaaaggattgggattggcaacgaatgaggttgcctatcaacaccaatccggataggataagggaatttatcagggctgtttatgtggataagaagtatgctggtggatcctctaacaaaccagccacagaaagtgagagtatgaagagcaatgaccatgacatgagaagacctagttcttatcattcatattcccagagcccaccctatgattttcaatatgaagatagacgatatggtaagcaagtgaacacacttgctagaaggccttcagatagggcgctcttcgatgggaaacttggcaacctactattcagtccaggtcgtttgcgagatcagatgaatgaagaccgttttgccaatgaaagttcaggatcaaggttttctgacttctcagcctcaagcactggcgacttcagaaatgatgtgctttctcctagctctcaggagacaggctacagtagtccctcagtccaccattcaagaaatgtctctgctgacaatcctcaaacccagaaatgtcctaacgcagcttcacaaatagatttcaatggagttcgacgtccacagcgaacaacttcttctggaagttttggatcatttgatggtagctcagtttccaacaaatcaattgaatcaggttacccacctgatgcaccaacagaaaagtcagtgcattgtgctgtaaaccatcagactgtaccttctcctgaggcctgttcgacacaacaatatgcctccccatccgacaatcacaacttgatacctcacaaacctgctgatttaggtagccaaattgttgccaccaggaaaccagtgcaacatagttgcgctcagattgaaaatgtggtgccgatgcatgctccagtacaaccaacgacttccacacctcttggcctctttgatcaatcaactgtgcaacatcctgtcacatctgctgcaccgatagatctgtttgctggctttaatgaacagttaccagcttctcataatacagatggtgtatccagtcattctgttgttgctaaagaacctgcccataatgttgttcagaagggcataatgccatcagctgaagcactcgccacatctcatgctgtgcaccaagatttgttcagtctgtcaattttgcaggaaccagcaacacccttaccctctcagccaatagatctgtttgctggctttgaccaacatttgccgcatttgtctactgttcagaaaattccatcggcagttccatttcctgctaatgatggatgggctttctttgacgtgcaacatggattgttgacatctgtttcaaatgtgcaaggtcaggtgcctgctgcattctctccatctgatggtattgctaaaggaattgaccaattaacattaccaacttcgccaccaaatgtaattgggtcacaaaattctccggctatgatggataactggagtttaaatgctgaggaagtgaagatccctgtcctcaacgaaaattctcagtcttggaatgcctttggtgaatctactcagagcgcatcaaatgatctgttcacatttaatactatgtctcaagtagaagctcatcaattctctatgccaagtggtccatatgttgaatccagaattccacagggtggcatggtctctcatcctgaaaaatcaacaaatccatttgacatggcatttgaatccgacgttgacgccaatgacatgttcatggatttgacctcactgcaagaaacattaccagatcatcacactctcacagattattcggggagcttaacagagccatggatttctcagaattccactatgtcatatattccttctgggcctcaaggaggtttatcctatgtggcaggacaggactctcacatgttgagttcaacacatcaaggagcttttccacctaggaatccatttgagtgagactagtaaagagagttttgctggatagtggtggacagaagaggaaggcaatcagcaccggtcgaaactcaaatggatactcaggtctactatactagatgcattgaaagcaactgtgcatcgaatctgaaaccctgaggtaaatatgtgtcttggatttcattgtctatggtctctcgtgtatcagaaaggactgcatagaagtctacatggcaggagtgctggaatttttgcccgaagcaaaagctgtcctctactcccatggactaatgtatctctggcaggcagtgctggtccagcatcaaaaaatttctttcatttcgacatttgcccaatagttgtgttcatgttcttgttaaaccctgttgtgaatgagaagggacgacatttacctccttaatatagtaaaaacatgttcgtcaaaagattgaattgctgtcagatgctgtgttgttcagtaatggttattacctttgtatgttgaaggggcctgtcgactctcctgagcaatattaatgctcatcatagtaaaggatcatgatgacattttt

SEQ ID NO: 36193 - DNA, 3313 bp, Zea Mays
gttacatactcataatgcaaaagtctattttgttaatgatgctcgtgtgccaaaaacatccgacatgtacagcttgcttatcgcggtcccagacgaaacggacaaatggtcgcattagaccgttatatatgcttacggaatcgcacggaacgtacattgcttgtcgacgttgcggtcgtttctcgtaggaattcaatttgacgtcacgacgccgttaaaagctttttccgattaaaaaaaagctccggatccgtcggctttcagccactaattttcaaagccaattttctcgcttcgcctttccttctcccatctctctcgacgaggctcgccatcgccgctattcccattcgccctcccctcctcttctccacccccgcaaaaccctagccgccgacccctccaatcccctaccagcgcccgattgccggccccaatcgagctagggctcgccaaattctggccgggctcgttgaaatttcggccggtcttttctggtgaatcctttggtttatcctgaggggatattttgatttctgcggcgcacgatggggagcagaagggaggaggagaggaacgagaagatcatccgcggactcatgaagttgccgcccaaccgcaagtgcatcaattgcaacagtgtggggccacagtatgtgtgtaccaatttctggaccttcatttgcctgtcatgtagtggaattcaccgtgaattcactcaccgtgttaagtcggtgtcaatgtccaaatttactacccaagaagtgcaggccctcgaacaggggggtaaccagcgagcacgtgacatctacctaaaggattgggattggcaacgaatgaggttgcctatcaacaccaatccggataggataagggaatttatcagggctgtttatgtggataagaagtatgctggtggatcctctaacaaaccagccacagaaagtgagagtatgaagagcaatgaccatgacatgagaagacctagttcttatcattcatattcccagagcccaccctatgattttcaatatgaagatagacgatatggtaagcaagtgaacacacttgctagaaggccttcagatagggcgctcttcgatgggaaacttggcaacctactattcagtccaggtcgtttgcgagatcagatgaatgaagaccgttttgccaatgaaagttcaggatcaaggttttctgacttctcagcctcaagcactggcgacttcagaaatgatgtgctttctcctagctctcaggagacaggctacagtagtccctcagtccaccattcaagaaatgtctctgctgacaatcctcaaacccagaaatgtcctaacgcagcttcacaaatagatttcaatggagttcgacgtccacagcgaacaacttcttctggaagttttggatcatttgatggtagctcagtttccaacaaatcaattgaatcaggttacccacctgatgcaccaacagaaaagtcagtgcattgtgctgtaaaccatcagactgtaccttctcctgaggcctgttcgacacaacaatatgcctccccatccgacaatcacaacttgatacctcacaaacctgctgatttaggtagccaaattgttgccaccaggaaaccagtgcaacatagttgcgctcagattgaaaatgtggtgccgatgcatgctccagtacaaccaacgacttccacacctcttggcctctttgatcaatcaactgtgcaacatcctgtcacatctgctgcaccgatagatctgtttgctggctttaatgaacagttaccagcttctcataatacagatggtgtatccagtcattctgttgttgctaaagaacctgcccataatgttgttcagaagggcataatgccatcagctgaagcactcgccacatctcatgctgtgcaccaagatttgttcagtctgtcaattttgcaggaaccagcaacacccttaccctctcagccaatagatctgtttgctggctttgaccaacatttgccgcatttgtctactgttcagaaaattccatcggcagttccatttcctgctaatgatggatgggctttctttgacgtgcaacatggattgttgacatctgtttcaaatgtgcaaggtcaggtgcctgctgcattctctccatctgatggtattgctaaaggaattgaccaattaacattaccaacttcgccaccaaatgtaattgggtcacaaaattctccggctatgatggataactggagtttaaatgctgaggaagtgaagatccctgtcctcaacgaaaattctcagtcttggaatgcctttggtgaatctactcagagcgcatcaaatgatctgttcacatttaatactatgtctcaagtagaagctcatcaattctctatgccaagtggtccatatgttgaatccagaattccacagttagggatgagcctgaaaggccaactcctagggatgtgttttctggcttcaatatttcacatgttgaggtggttggaccatcgtctccatcactccagccccatttgggtggcatggtctctcatcctgaaaaatcaacaaatccatttgacatggcatttgaatccgacgttgacgccaatgacatgttcatggatttgacctcactgcaagaaacattaccagatcatcacactctcacagattattcggggagcttaacagagccatggatttctcagaattccactatgtcatatattccttctgggcctcaaggaggtttatcctatgtggcaggacaggactctcacatgttgagttcaacacatcaaggagcttttccacctaggaatccatttgagtgagactagtaaagagagttttgctggatagtggtggacagaagaggaaggcaatcagcaccggtcgaaactcaaatggatactcaggtctactatactagatgcattgaaagcaactgtgcatcgaatctgaaaccctgaggagtgctggaatttttgcccgaagcaaaagctgtcctctactcccatggactaatgtatctctggcaggcagtgctggtccagcatcaaaaaatttctttcatttcgacatttgcccaatagttgtgttcatgttcttgttaaaccctgttgtgaatgagaagggacgacatttacctccttaatatagtaaaaacatgttcgtcaaaagattgaattgctgtcagatgctgtgttgttcagtaatggttattacctttgtatgttgaaggggcctgtcgactctcctgagcaatattaatgctcatcatagtaaaggatcatgatgacattttt

SEQ ID NO: 36194 - DNA, 3294 bp, Zea Mays
gttacatactcataatgcaaaagtctattttgttaatgatgctcgtgtgccaaaaacatccgacatgtacagcttgcttatcgcggtcccagacgaaacggacaaatggtcgcattagaccgttatatatgcttacggaatcgcacggaacgtacattgcttgtcgacgttgcggtcgtttctcgtaggaattcaatttgacgtcacgacgccgttaaaagctttttccgattaaaaaaaagctccggatccgtcggctttcagccactaattttcaaagccaattttctcgcttcgcctttccttctcccatctctctcgacgaggctcgccatcgccgctattcccattcgccctcccctcctcttctccacccccgcaaaaccctagccgccgacccctccaatcccctaccagcgcccgattgccggccccaatcgagctagggctcgccaaattctggccgggctcgttgaaatttcggccggtcttttctggtgaatcctttggtttatcctgaggggatattttgatttctgcggcgcacgatggggagcagaagggaggaggagaggaacgagaagatcatccgcggactcatgaagttgccgcccaaccgcaagtgcatcaattgcaacagtgtggggccacagtatgtgtgtaccaatttctggaccttcatttgcctgtcatgtagtggaattcaccgtgaattcactcaccgtgttaagtcggtgtcaatgtccaaatttactacccaagaagtgcaggccctcgaacaggggggtaaccagcgagcacgtgacatctacctaaaggattgggattggcaacgaatgaggttgcctatcaacaccaatccggataggataagggaatttatcagggctgtttatgtggataagaagtatgctggtggatcctctaacaaaccagccacagaaagtgagagtatgaagagcaatgaccatgacatgagaagacctagttcttatcattcatattcccagagcccaccctatgattttcaatatgaagatagacgatatggtaagcaagtgaacacacttgctagaaggccttcagatagggcgctcttcgatgggaaacttggcaacctactattcagtccaggtcgtttgcgagatcagatgaatgaagaccgttttgccaatgaaagttcaggatcaaggttttctgacttctcagcctcaagcactggcgacttcagaaatgatgtgctttctcctagctctcaggagacaggctacagtagtccctcagtccaccattcaagaaatgtctctgctgacaatcctcaaacccagaaatgtcctaacgcagcttcacaaatagatttcaatggagttcgacgtccacagcgaacaacttcttctggaagttttggatcatttgatggtagctcagtttccaacaaatcaattgaatcaggttacccacctgatgcaccaacagaaaagtcagtgcattgtgctgtaaaccatcagactgtaccttctcctgaggcctgttcgacacaacaatatgcctccccatccgacaatcacaacttgatacctcacaaacctgctgatttaggtagccaaattgttgccaccaggaaaccagtgcaacatagttgcgctcagattgaaaatgtggtgccgatgcatgctccagtacaaccaacgacttccacacctcttggcctctttgatcaatcaactgtgcaacatcctgtcacatctgctgcaccgatagatctgtttgctggctttaatgaacagttaccagcttctcataatacagatggtgtatccagtcattctgttgttgctaaagaacctgcccataatgttgttcagaagggcataatgccatcagctgaagcactcgccacatctcatgctgtgcaccaagatttgttcagtctgtcaattttgcaggaaccagcaacacccttaccctctcagccaatagatctgtttgctggctttgaccaacatttgccgcatttgtctactgttcagaaaattccatcggcagttccatttcctgctaatgatggatgggctttctttgacgtgcaacatggattgttgacatctgtttcaaatgtgcaaggtcaggtgcctgctgcattctctccatctgatggtattgctaaaggaattgaccaattaacattaccaacttcgccaccaaatgtaattgggtcacaaaattctccggctatgatggataactggagtttaaatgctgaggaagtgaagatccctgtcctcaacgaaaattctcagtcttggaatgcctttggtgaatctactcagagcgcatcaaatgatctgttcacatttaatactatgtctcaagtagaagctcatcaattctctatgccaagtggtccatatgttgaatccagaattccacaggatttagttagggatgagcctgaaaggccaactcctagggatgtgttttctggcttcaatatttcacatgttgaggtggttggaccatcgtctccatcactccagccccatttgggtggcatggtctctcatcctgaaaaatcaacaaatccatttgacatggcatttgaatccgacgttgacgccaatgacatgttcatggatttgacctcactgcaagaaacattaccagatcatcacactctcacagattattcggggagcttaacagagccatggatttctcagaattccactatgtcatatattccttctgggcctcaaggaggtttatcctatgtggcaggacaggactctcacatgttgagttcaacacatcaaggagcttttccacctaggaatccatttgagtgagactagtaaagagagttttgctggatagtggtggacagaagaggaaggcaatcagcaccggtcgaaactcaaatggatactcagaaaggactgcatagaagtctacatggcaggagtgctggaatttttgcccgaagcaaaagctgtcctctactcccatggactaatgtatctctggcaggcagtgctggtccagcatcaaaaaatttctttcatttcgacatttgcccaatagttgtgttcatgttcttgttaaaccctgttgtgaatgagaagggacgacatttacctccttaatatagtaaaaacatgttcgtcaaaagattgaattgctgtcagatgctgtgttgttcagtaatggttattacctttgtatgttgaaggggcctgtcgactctcctgagcaatattaatgctcatcatagtaaaggatcatgatgacattttt

SEQ ID NO: 36195 - DNA, 1419 bp, Zea Mays
agcgcctcttccttcgtagtgtcaacaattccgccccgcgcccgcgcggatctgattgtctcgatcgtccaatcgagcgccgcctcttcgccaagaaggagatgaggattctcatggtcgggctcgatgccgccggtaagaccaccatcctctataagctcaagctcggcgagatcgtcaccaccatccccaccattggattcaatgttgaaactgttgagtacaagaacattagcttcaccgtttgggatgttggtggccaggacaagatcaggcccctgtggaggcactactttcagaacacgcagggacttatttttgttgtagacagcaatgatagggaacgtgttgttgaggctagagatgagctccacaggatgctgaatgaggatgagctgcgtgatgccgtgctgcttgtatttgcaaacaaacaagatcttcccaatgctatgaatgctgctgaaattactgacaagcttggtctgcattctcttcgccagcggcactggtacatccagagcacttgtgctacatctggtgaagggttgtatgaggggcttgattggctttccaacaacatcgccaacaagtcttgaagcttttcagcagggctcctagcaagaggaagacgtctgaacaacttatggatgcttttttacattttattacaaagatactccctctgtctcgatttactattccttttgggatagtggttgattcatataatatttgatgtatgtgtttaatagatgtgtctagattcaccatcatctattttaatatggacatagatataaagagctaaaacaaatactattttgaaatggagtgagtacaatctatagtagatagtgtgggtgctgtggagagaaaaaaatctgagctttcttttgagtgtttgctagtgtttaccttcggagatgatatggtaaattatattgacatgctttcgcgtaggtcttcaccgatccagtgctgtggcagctacatttcgttcttagatggttaacgtgtgccaacataaatccaatatgttgcttgtggtacgcaccgttttaaaatagctatggacagaccataattgacatcatcttctgtcgaactagcgttgggcttagttaggacttgggatgtcaatgctagatagctagagctgtatagcatctctaaggggtatttggtttgatgttcgatgaatcatctacatattctttatttatttttatttgggttatgatgtggaataggttgatgcatcaccatctcatatctcatatattagaagataactagcaaagtgtccgttgctacagtttttatttatacttgaggataaagtataaaatataaaaatatgtttgttttattggttatttgagtgtgaatgtaagtttaaagcgaataattgtggttcaa

SEQ ID NO: 36196 - DNA, 1483 bp, Zea Mays
gtgagtgctcccagtcaagcgcctcttccttcgtagtgtcaacaattccgccccgcgcccgcgcggatctgattgtctcgatcgtccaatcgagcggatttcattgaggaagagatggggctctcctttgggaagctgttcagccgcctcttcgccaagaaggagatgaggattctcatggtcgggctcgatgccgccggtaagaccaccatcctctataagctcaagctcggcgagatcgtcaccaccatccccaccattggattcaatgttgaaactgttgagtacaagaacattagcttcaccgtttgggatgttggtggccaggacaagatcaggcccctgtggaggcactactttcagaacacgcagggacttatttttgttgtagacagcaatgatagggaacgtgttgttgaggctagagatgagctccacaggatgctgaatgaggatgagctgcgtgatgccgtgctgcttgtatttgcaaacaaacaagatcttcccaatgctatgaatgctgctgaaattactgacaagcttggtctgcattctcttcgccagcggcactggtacatccagagcacttgtgctacatctggtgaagggttgtatgaggggcttgattggctttccaacaacatcgccaacaagtcttgaagcttttcagcagggctcctagcaagaggaagacgtctgaacaacttatggatgcttttttacattttattacaaagatactccctctgtctcgatttactattccttttgggatagtggttgattcatataatatttgatgtatgtgtttaatagatgtgtctagattcaccatcatctattttaatatggacatagatataaagagctaaaacaaatactattttgaaatggagtgagtacaatctatagtagatagtgtgggtgctgtggagagaaaaaaatctgagctttcttttgagtgtttgctagtgtttaccttcggagatgatatggtaaattatattgacatgctttcgcgtaggtcttcaccgatccagtgctgtggcagctacatttcgttcttagatggttaacgtgtgccaacataaatccaatatgttgcttgtggtacgcaccgttttaaaatagctatggacagaccataattgacatcatcttctgtcgaactagcgttgggcttagttaggacttgggatgtcaatgctagatagctagagctgtatagcatctctaaggggtatttggtttgatgttcgatgaatcatctacatattctttatttatttttatttgggttatgatgtggaataggttgatgcatcaccatctcatatctcatatattagaagataactagcaaagtgtccgttgctacagtttttatttatacttgaggataaagtataaaatataaaaatatgtttgttttattggttatttgagtgtgaatgtaagtttaaagcgaataattgtggttcaa

SEQ ID NO: 36197 - DNA, 1963 bp, Zea Mays
gcggacggtctcagcccgccacgcgacaaccgacaatccttcgcagtcccgcaccgcaccgccgcaccgcaccaccgcaccgcggccaaggccaatagcctcgcctagcgctcactcgctcgccccactaccaccgcaccacgcgctcccgtttccgccgatccgagcgcgcagatcgcggaagcccagcggctcagagtccagggggagggagctcgcggcggctgaggaaggcgttcaccaccgtcgcggatttcattgaggaagagatggggctctcctttgggaagctgttcagccgcctcttcgccaagaaggagatgaggattctcatggtcgggctcgatgccgccggtaagaccaccatcctctataagctcaagctcggcgagatcgtcaccaccatccccaccattggattcaatgttgaaactgttgagtacaagaacattagcttcaccgtttgggatgttggtggccaggacaagatcaggcccctgtggaggcactactttcagaacacgcagggacttatttttgttgtagacagcaatgatagggaacgtgttgttgaggctagagatgagctccacaggatgctgaatgaggatgagctgcgtgatgccgtgctgcttgtatttgcaaacaaacaagatcttcccaatgctatgaatgctgctgaaattactgacaagcttggtctgcattctcttcgccagcggcactggtaagaagttttattttcatacacttttatctccctgtatctgaatcatggttgcttgacattctgatatttgttagtgtatctagttatctacactgcacatatttgcgaggagcgtatctttgaaccacttgttttagtcatcaatcttcatgatgtgacagtatgaattatgcattaatctgcaccgctttaaatactgtgattgagctgaatctttatctccattctgcaactgtcttgtcttgaataattgccaacgtcacaattgcctttgatatttagcagatgtatacatgttaatgtgtctgttccctggttgcaggtacatccagagcacttgtgctacatctggtgaagggttgtatgaggggcttgattggctttccaacaacatcgccaacaagtcttgaagcttttcagcagggctcctagcaagaggaagacgtctgaacaacttatggatgcttttttacattttattacaaagatactccctctgtctcgatttactattccttttgggatagtggttgattcatataatatttgatgtatgtgtttaatagatgtgtctagattcaccatcatctattttaatatggacatagatataaagagctaaaacaaatactattttgaaatggagtgagtacaatctatagtagatagtgtgggtgctgtggagagaaaaaaatctgagctttcttttgagtgtttgctagtgtttaccttcggagatgatatggtaaattatattgacatgctttcgcgtaggtcttcaccgatccagtgctgtggcagctacatttcgttcttagatggttaacgtgtgccaacataaatccaatatgttgcttgtggtacgcaccgttttaaaatagctatggacagaccataattgacatcatcttctgtcgaactagcgttgggcttagttaggacttgggatgtcaatgctagatagctagagctgtatagcatctctaaggggtatttggtttgatgttcgatgaatcatctacatattctttatttatttttatttgggttatgatgtggaataggttgatgcatcaccatctcatatctcatatattagaagataactagcaaagtgtccgttgctacagtttttatttatacttgaggataaagtataaaatataaaaatatgtttgttttattggttatttgagtgtgaatgtaagtttaaagcgaataattgtggttcaa

SEQ ID NO: 36198 - DNA, 1681 bp, Zea Mays
ctggaattcctggacgcaaaaaaatgttaattgggtaaacgctgcggacggtctcagcccgccacgcgacaaccgacaatccttcgcagtcccgcaccgcaccgccgcaccgcaccaccgcaccgcggccaaggccaatagcctcgcctagcgctcactcgctcgccccactaccaccgcaccacgcgctcccgtttccgccgatccgagcgcgcagatcgcggaagcccagcggctcagagtccagggggagggagctcgcggcggctgaggaaggcgttcaccaccgtcgcggatttcattgaggaagagatggggctctcctttgggaagctgttcagccgcctcttcgccaagaaggagatgaggattctcatggtcgggctcgatgccgccggtaagaccaccatcctctataagctcaagctcggcgagatcgtcaccaccatccccaccattggattcaatgttgaaactgttgagtacaagaacattagcttcaccgtttgggatgttggtggccaggacaagatcaggcccctgtggaggcactactttcagaacacgcagggacttatttttgttgtagacagcaatgatagggaacgtgttgttgaggctagagatgagctccacaggatgctgaatgaggatgagctgcgtgatgccgtgctgcttgtatttgcaaacaaacaagatcttcccaatgctatgaatgctgctgaaattactgacaagcttggtctgcattctcttcgccagcggcactggtacatccagagcacttgtgctacatctggtgaagggttgtatgaggggcttgattggctttccaacaacatcgccaacaagtcttgaagcttttcagcagggctcctagcaagaggaagacgtctgaacaacttatggatgcttttttacattttattacaaagatactccctctgtctcgatttactattccttttgggatagtggttgattcatataatatttgatgtatgtgtttaatagatgtgtctagattcaccatcatctattttaatatggacatagatataaagagctaaaacaaatactattttgaaatggagtgagtacaatctatagtagatagtgtgggtgctgtggagagaaaaaaatctgagctttcttttgagtgtttgctagtgtttaccttcggagatgatatggtaaattatattgacatgctttcgcgtaggtcttcaccgatccagtgctgtggcagctacatttcgttcttagatggttaacgtgtgccaacataaatccaatatgttgcttgtggtacgcaccgttttaaaatagctatggacagaccataattgacatcatcttctgtcgaactagcgttgggcttagttaggacttgggatgtcaatgctagatagctagagctgtatagcatctctaaggggtatttggtttgatgttcgatgaatcatctacatattctttatttatttttatttgggttatgatgtggaataggttgatgcatcaccatctcatatctcatatattagaagataactagcaaagtgtccgttgctacagtttttatttatacttgaggataaagtataaaatataaaaatatgtttgttttattggttatttgagtgtgaatgtaagtttaaagcgaataattgtggttcaa

SEQ ID NO: 36199 - DNA, 739 bp, Zea Mays
gtgaccacgacggcggcacgtagcaagagccggaggaggagaaaacacaggagagagaggaggcggcccacgaggaaggggaatgcggcttcgtcattgcgagtgtagccagggcagagtttagcctggagccctggacggcagcagcctcgctttccacggctccaggatcgctccctttgcctttgtttggacagcttggtgatggcggtacagcaagcatgcagagtgcagactggtagcagtggccttgctgctaatgggaaggagatgggaggacgaacaggtaagcagcctggctatacggggagagcggagagtaggagaggaaatgaccgacgcccaccgtaacttggaagcttttagaagcgtatataatcttcatccaagaagggacttctctactgattcattcaagatttctgagagagcaatagtgtgagaggaagacttcccaatcctctatcaacacgagaagatggacctcacccccttagatttcacccctggtcatgacattgaagggtaggtcaatacccttatttcccatagttcttggttgaagcgccttccttttcttctagtggcatctttgggtagatgcaagtttttatctatcttctgtgtcgatcaactttctttttcaattagccattgatagactaaggattttcacactcttcgacttgctgactgtcgcagtatcagcttattcacacaacagctctgtgcatcattt

SEQ ID NO: 36200 - DNA, 474 bp, Zea Mays
gatattggtaactcaatagtttatacagccacctgttcatttcagagttggaaaatatacttttctctgagcctcttccggaacccaagtaccaactgaggagaaccggctcagcgactttctgattgtatgcagaatatcttgttttgctgtaggttgtaagtcctgtagcttgtaagtttttttgtctctttggtttagaatcatttgctagcttgggagtttttgtttatcctagctcgatggtttgctctctccctccctccctttctctagactagcaggagccgagcatgtgctgtccgaggccttgctaccagtatagtatgtaaaatcttcaggacacatgtaggtggtcggagcttgtttacatggtgtgacttaacagatggatacatataactatgagaagtatgggagccctttctttggtaaccggagttaaatgacttgactcttctggtcgttgttctt

SEQ ID NO: 36201 - DNA, 605 bp, Zea Mays
cttctgggcaatcttctgtatgctgcaaaggttgtagcagagcaggaagggcttgctgatggcttcagaattgtcatggacgatgggcccagaggatctcaatcggtctaccaccggcacctacacgttcatcttctcgggggacggcagatgaattggccaccggggtggacaggtcgcgaggacgcagcagaggcggagccgcggagcgcaccgatgaggcgatgaccgacccccacctcaaaagctctccattgctcccacgtatcgttcaaatttataatgtttcctttggttttcgacaacgcactgtttttcaagtgttgggcatgttccctttggtttcaaaattaaaacacgcatatcgtttttgaaacactcgacaacacactgtttctcaaacgttggactgcaggttttggactgctgatatccgggtgccctcactgtacacgtgcttgtcaaatacctgaaactctaggaagtagttgatgattttatcttgcagcctgctgtttcagatcatcacacatatggaacctaacagattcaggattgtacgacgccttctttttgtgtttagttaagtttgcaccttgaaaaag

SEQ ID NO: 36202 - DNA, 1847 bp, Zea Mays
cccgagaatcctaccattgccctccacacctctacctctagtactggtattaaagccgcgtccagcggccggcgcgtttctcctcgccctaaactaaaaaaaggtaaccgtccccgaagcccaaagccaaaaattcccccaccccaaggccgcatcctcctgcagcctgctcgaaaccctccttcctcctcctgaattcgtcaaccggtctcccaaatcgtagcggcaatcggattgtttggtctcgagactgagctgtgctccagtccgtgagctattcgttgatttttccagcgtgaaggcgccgatttttgggccgttggctgtggtggccggttcggcgtctctggatccggctggcttcccgcgatagatcgggccattggagcagcacaatacttcggattcttgatgtgtccgtagctgcactcgcggtgaccttttttgagggtccttctcaatcttctgaagaagcgagcagagacggcttttgaaccgggcgatgcaggccaaggctcggatccacgctgacccggtccatgagtttgaccaattcgactgcttgcacgattctcttgtgctgctgatcctgaacaagctcgaggacgtgcgttcactcggcaggtgctctgccgtgtccaagcgattcagtggcctggttctcctcgtccatgatgtgcgtgtcaagatcgaccacgttgtgaccgtggacggcggcgccgatgacgctctgaacctgtcgtcaccgaagccccacaacatcatctcgcatctattcaagatgatgctgttcgcgatcgccaagcccttccatgacatgcggagccccattagcgcagggcggctgctgttccctcagctctctcagcattcaccggtgcaggtgctgaagaacttctcccatgttcgcaatcttcaggtagagctcccctccggagatgttgcagtcgaggagggggttctgctgaagtggcgggctgaatatggcagcacacttcagagctgcgtgatccttggtggaaccttggttgatcgcaaggccgctggcagtgggcatgagccatcaccggatgacaagggaagcatgccagaatctttctataccaatggtgggctgaaactccgtgtcgtatggactatcagctgtttgattgccgcgtcgacaaggcactatcttctccggtcgatcatcaacgaccatccgacgctgaggagcctggtcttggcagatgccgagggacagggcgcactctccatgggggcagagcagctgaatgatttcagggaacaccaattgtcagcctcaccatgttctaacaggacgcaggtgccggcatgcaacatgaagctgaagtacgctcagtacctcgaattgcctggtggcttggcactgcaaggtgcaaccttgcttgtcaccaagcctgccagcgatggtcatggcaatcgcaaggaagttgaagcctttgtttcaagcgcgttcgatggacccttgaggtttgctgcgaaggcgctgatgaagaggcgcacctatctcctggagatgaatgggttctagagaccttgtttttttggtgcttcttatgaggaactcctgtctgtctggtctttgtatatacactatagtcatcgaagcggatggacatgatatcagattaatgcctaaagtaagcatgcgtagagaattgagatgtctcgtgcacggtggcagtttgtgcctactaaaaacacgtgtagcgcgaagtatgtgcgtgtttccatttctcaatggaagtgctgcctactaatgcatgttggtcatccctgagaaagaagccgctctctttcacttgcctgaatatacgatatac

SEQ ID NO: 36203 - DNA, 4378 bp, Zea Mays
actaaaaaaaagtaaccgtccccgaagcccaaagccaaaaaaaaaacctcctgcagcctgctcgaaaccctccttcctcctcctgaattcgtcaaccggtctcccaaatcggagcggcaatcggattgttgggtacttgggtctcgagactgagctgtgctccagtccgtgagctattcgttgatttttccagcgtgaaggcgccgatttttgggccgttggctgtggtggcgggttcggcggctctggatccggctgtcttccggcgatagatcgggctattggagcagaacaatacttcggattcttgaggtgtccgtagctgcactcgcgatgacctttttttaggaagccggttgaattcgtagacctgaagatttattagctggcccacgccattttcggcaataaaatagtcggctgtttcatagcaatttcagagtccttctcaatcttctgaagaagcgagcatacgccactgctttgctggctttgacctcggaggcgatcccttgctgttcttattgactcggctttcgcctccgttgctgcctacccctggttgctgtcatagccacagggcctcggttcactgccgttgtccgcttcttcttctcctgccgctgctccttcgagttttttgcaggcctcgctctcagctgctgggctactgcttagtttcttcaaaggtttgtgttggaggataagagggttacatgcaatggcccttgaggcaaaacaagctgctctgtgtttcaaggaagttttgaggttatccattagaaaaagctatagatttgtttcagaacaccctatccttttcggtttgggtgtttttctctatctattctacagatcttcaccaaggctctttgtgttcctgctttcttcttcacctgtaaatatatgcactgctcttcttcttggaatcctactgagttatggagaagttaatcttcctgaggccagtaaagatcacagggacactacagaagtttcaacttccatggttggaaattcgtccagtgatgtccactttgaagcaaatcagagaccttctgtacttgaatttagggagaatgcatcaaacttcaaagagagagaaaccaaacagaaagtttccttcagggagagggctagcgagcatgttgaccttgatgattatatccctcttctgaagagagctggtgaagaagatgagagaggtgatcggggtaacatatctagaacacttacaccatttccttctatggtcaatattcgccaagagtctgtgataggggaggacttgaccttcaccaagaaaagacaatcggaaggttcttttttcatgcaggatagggccgactgtcagactagcctatttgatgaggcctgtctgtgtggtctgaatgacaaagatataccttttggtttgttttcttctagtgagaatgttaataagaatgatgagatggaggaaaaatttaatcaacagagagtatttgcagattcaacagctaccaaagagagagatagttctgaagcgatgccaaccgaagagcttgctggaactagcaaacaagctgcttctgtccctattgaccaatgggaaaacaatggcagacttaatgttgatactagcaatgtttttgaggacaacttgcttgattcctctcttggctcaccatgggcaagagttagcagtcatgatggttcatctggttttgattctgatcaggctgagagttctcctgatgcttccatgactgacattgctcccgttcttgatgagattgatccacttttgcgtgctgattccaatcaccccgatcctgttcctaatgatgattcagacacagattctcatgtctcagaggatcatcaaattgacgatgatagtaatgatgagggtgatgacattgatgctaaagataatgtggagggggagaaggaaaatgatgggaaggaagctgcatttctttggacagcagatgatgaaaagaatctgatggatcttggatattctgagatagaaaggaaccgcaggttggaaattttgatggctagacgaagatcctggaagaacatggcatttgaaatcgataacaacttgatagatgttcatagttctggctctggtacaagtttagatgatttgtcacgcttccgtgcacaggtacctcctattgcagtgcccaggaggaacccttttgaccttccatatgattctgaagaagcagcaattcctggctcagctccttcaatactgcatgcacggaagaacccgtttgaccttccccttgaacagtcaaatgacagtgttgttgtccatgcacatgatattttaaactctggagaacctgcgacttctcgtcgtgacatgatctttagaaggcatgaaagcttcaactttggaaggatggatgtgatccaggagaagcgtttttctagactcaagccatattttgttcctgaaactgtggaatggaatgcaagcaatttcgaaagacagttcaatgataagtctgagtctaagatgagctctgttactaaatctgatattgcttcttcagttgctgatcaggaggatcataaggaccaagatgaaaaggaccttgcagatgttggaagtgaatgctcagatggtatcaactccatagatgttgaactagaccacagtgacatcgatgaccgtgagattgctctacagcaatttgtctttgaaagagcacaagaaagggaagcacatcttgtttcaactaaaggaaaaggacgtgaagaagattatgcaccagaatcagctgggagttcaacgatgccatttcatgcagtccctgacctgcttagctgggaagatggagatggccacccgtggagggagaatctgattctggggatcttccagagtaccttgatactgaagttgcatcaagctcaaacacagccatacttggtgcaaacaatgcagctgagaaaggtggaaatgttgatcgcatgtcatattcaaacgatgaaatgcctttagataacctgattcatcggtctatggagctgccttctgaatttttcactgaaacattgccagtcatatctagggacctacaccctatcccagaggagagagttgttgagaacttcaacgtgcaagaaaatcatgaagcagcaatttttactgattcagttgttgccttgactgggttgcatgtaattgaagagcactttgatgatggaactgacagaactctaagctctgaagttgtttcctcatatcctcgagctaatggtgtcacccaatctccatcaagtgagcatgcagaaatcttgaatccatttgttttgatggctgctgaacataataaggtggatataagcgacatgcatggtgaagcaactgccggatatctacttgattctgatgatgaggctggtaaaatctatcctgagcctatggaaggcagtggaattgatgaaagtttcctgtctgaattggatgtggtgggagactttggagttgaaccgatgagactggaccagcaggtgacagatcaggcttctcatggtgataacactaccgatagtgttactgcagattctgttattagtcctcagacatctgacgatgtctccttgatcatgtcggaagttggtgctgaagaatccagggagcagtctccattggttgatgacctaaatggctccgaattatattaagaagaaaaaaatgtttggaatcataaacacacacaaaaacattcacacagcaaactcagattacatgcacaccttgactaagtttagaacagtaaaaaaggaactcggactagacctctgatctccatttgatatgctgtattggtttaatcacaaatacatgatcttcatatgactcccctaagaatgagcacttacaacttctcgtgatgctataaggacgcacttacagatttttgcgtaaacaacgagcatcctagttgtgttttttaccagcaggcgctgctactcctgtcatacttcaaccatttgtattcacatggtcttaatggtttgatgacagctatcctgttgttttgttcttatctaaaacacagtcacgcttctgtcttgcattgtaatcgtatttttctgacacttgtgaacttggttgctcaggttcatgttgtctctgctaaatatgtagtgaagtgcgataatgatacttttgtgagacttgattcagtagtcattgaaattaagaaggtaccaggtgggagaaagactttacatggggagtatgaatatacaacacaagccacgacgccatgggaaacaggctgtaacctatgaggtcaagcttatggaatgtttgccatagcagttattacatttcattcttcaaacaccaccttaacatttctta

SEQ ID NO: 36204 - DNA, 2092 bp, Zea Mays
gggaatttggtggtttccatctaccagtaaatcacgcgcgatgtaccgggtgaagagcgagggggagggcgagggcgagggcgactgcgaaatgatgctgcaggaacagatggactcgctggtggccgacgacgtcagcagcggaggagggtcgcctcacaggggcgtcggcacgcccctgaagaaggggccatggacgtccgcggaggacgccatcctggtggactacgttaagaagaacggcgagggcaactggaacgcggtgcagaagaacaccgggctgttccgctgcggcaagagctgccgcctccggtgggcgaaccacctcaggcccaacctcaagaagggggccttcacccccgaggaggagcgcctcatcatccagctccacgccaagatggggaacaagtgggcgaggatggctggtcacttgccagggcgtactgacaatgagatcaagaactactggaacactcgaataaagagatgtcaacgagctagccttcctatttatcctgctagtgtatgcaatcaatctacaaatgaagatcagcaactgtctggtaattttaacggtggcgagaatatatccaatgatcttctatctgggaacagcctttatctgccagattttaccagtgacaatttcattgcgaacccagaggctttatcctatgcaccacagttgtcagctgtttcaataagcaatttgctcggccaaagctttgcatcaaaaagttgtagcttcatggatcaggttgaccaagcggggatgctgaaacaatctggctgtgtgcttcctgcattgagcgatgccattgacagtgtgctttcctcagctgatcatttttcaaatgactctgagaagctcaggcaggctttaggttttgattatctgaatgaagccaatgctagcagcaagagtattgcacctttcggggttgcacttactggcagccatgcctttttaaatggcaatttctctgcttctaggcccacaaatggtcctttgaagatggagctcccttcactccaagatactgaatctgatccaaatagctggctcaagtatactgtggctcctgcaatgcagcctactgaattagtagatccttacctgcagtctccatcagcgaccccttcagtgaaatctgagtgtgcatcgccgaggaacagtggtcttttggaagagctgcttcatgaagctcaggcactaagatctgggaagaaccaacaatcatcggtccgaagttcaagttcttctgctggcacaccttatgagactaccacggtggttagcccagagtttgatatgggtcaggaatattgggaagaacagcccagttctttcctcagtgaatatgctcattttagtggaaattctttcactgaatccactcctcctgttagtgctgcgtcacctgatatcttccagctctccaagatttctcctgcacaaagcccttcaatgggctctggcgagcaggcgttagagcctaaacatgagtcggcagcttcacctcgtcctgaaaacttgaggcctgatgcattattctctgggaacacagccgatccatccattttcaataatgccatagccatgctcctgggcaatggcattgatgccgagtacaaacctgttcttggtgatggaattgtgctcgattcttcgtcatggaacaacatgcaacatgcttttcagatggcgggattcaaatgagttccatgcacttgtttgtgatgctgaagggcttcttgttgcttgttttggggtcagtatcagcgaaggccgcattgattgtgacgctgcattcctgacagagggcgtgcaggtgcagcagctaccatatgtgatcttcatgctaatagtccttttgtctaataaagtgcatgaagataaaccggatattttttttttgctttgtattagagaaccgtttttgtcaaccctgtcaggattctgttggaaatgtgtcatgatttttgtttgaacaatttaatatctgtcattgatactgtgctgtgtgctactccttgatgcatttgcttgtggcagcaaattgtttaagtatacactgtcattgctgctggc

SEQ ID NO: 36205 - DNA, 2962 bp, Zea Mays
cgaggagcgagcggacaagagaagaaatcaagaaaacccccctacctcgccccaaaaatgccaaaccacaacaagtcgcttccgtccctccccacgccgccgagggccgccgaccaggagatcacgcgctcatctctcatggagtccgtctagcttccgctcgtctgcgcccactccaagcagccgcagcggaactcaactactgcaggttgagatgaacggtccatcgaatttcatgcctactcctgaacaggatgttctggacgtcaagcccttgaggacattggctccaatgttccctgctcctctgggtgtcaatacatttaaccactcaaccacgccaccattgatatttgtcactccttctggacaatttcaagggggttttggtgattggaataattctgctgccaaatcatttttcgctttcagcagcaaggatgctcgtggaggcaaggctgatacatttagtgatcagaatactggtactggcaaggctgccacttttggtgatcaggatgcttttggcagccagaatgtttttgctagtgatcacagtactggtactggcaaggctgccacttttggtgatcaggatgcttttggcagccagaatgtcgccactggtgtgcaggatgctgcgaaaggccagactgcaacagattggacagatgtgagtgccaatcctaatggcccaattgatgccattgccatttcagcttacaggtcaacacagcctaatgttatatcactggatgatgatgatgacgacgacgatgatgagccttatgctgctaacaagacatcagcatctggacgcaagatcaagaggccatcccacctcagcggatacaatgtgagtgatgctttggtaagtgacagctccaacagcatgaaggttaagcgccccaaatcctctcacgggaaagctgctgctgacaacgagcatgccttgcttccaccttctgaggatcccagggaaattgtggaggcagttctcatgacctttgaggcgttgcggcgtaggcatctccaattggatgaggcacaagagactagcaagcgtgcagatctgaaggctagtgctatcttgatgtccagtaatatcagggctaaccctgggaagaggataggggttgttcctggagttgaaataggggacattttctacttcaggatggagctatgtattattgggctgcatgctcctagcatggccggaattgactatatgactgccaagtttggtgacgaggatgattctgttgcaatatgtattgttgctgcaggtggttatgacaataatgatgatgatacagatgtactggtttacagtggttcaggaggtaatagcaagaacagtgaggagaagcatgaccagaagcttgagaggggcaacctggctcttgagaggagcttgtccagaaaaaatgtaatccgtgtggttcggggctataaggatccaggttgcttgactgggaaggtttatatttatgatggcctctataggattcacgagtcatggaaggagaaaacgaagagtggaatattttgttttaagtacaagctgctgcgagagccaggacaacctgatggggttgcaatctggaagatgtcccagaaatgggtacaaaatccactgactagaggcagtgttttaaatcctgatctatcatctggtgcagaaaatcttccagtgtgtcttgttaatgacattgacagtgatgaagtgccacaccatttcacatataccactcaggtcgaacacttgaaaccactcagttctgtgaagcctttacagggttgcagatgccttagtgtttgtctgcctggtgatgccaactgctgctgtgcacagcgtaatggaggcagcttaccttacagctcatcaggactgcttgtatgccgcaagactatggtttatgaatgtggtgaatcctgtcggtgttctttcaattgtcgtaacagagtgacccagaaaggagttaggatccactttgaggtctttaagacgggaaatcgaggctggggtcttcgttcgtgggacgctatacgggctggttcatttatatgcgagtatgttggtgaggttattgatgatgctaacattaatctgaatgatattgaagatgattatatatttcagatgtcgtgtcctggtgagaggacattaaaatggaattttggacctgaattgataggggagcaaagcacaaatgtttctgctgatacctttgagactctacccattaagataagtgctaaaagaataggaaacatatcacgtttcatgaaccatagttgtgctcctaacgtattttggcagccagttcagtttgaccatgaagatgatcatcgcccacatatcatgttctttgctttgaagcatattcctcccatgacagagttgacttatgactatggtgacgttggagctgatcctagtggtgtacggtctcctagagcaaagaactgcctttgtgaatcctcaaattgtcggggattctttatctgaccgtggaaaatgcatattctatctatcaacattcaaccctaccagctaggcctgttctgtccatagatgtgagttgctgcgagaaagctccattcacaataaggatgtatgtttagacagcgaacgagctgagagaatggctacaggaaactcttctctttgcttggagcttatttttgtttgcctccaaaagtacatgcttcttcaccgttcctatggaattcttttccgccagttcttcaataccaaacaggtagtgacgtcagcaaaaatggaggttcagctttccattgagattgagcctttcgaattcccccattccaaataaggcgtgttctgaactatttgtccatctcgagcataccgtgtaaacaggtcatacaaattattattttatattgtagattgtactatttatagagtagagtttgaaatagagaatgtgat

SEQ ID NO: 36206 - DNA, 3123 bp, Zea Mays
ctctgtttctcttctcgcaagcgtttcgtctctcgcctctcgcccccgaccccgccggtgccggaagctaggggctcagtgcccgagttcaagatcgttgctttgctccaccctcaacgcgacacctccaggcgaacccgccgttgggaactcaactactgcaggttgagatgaacggtccatcgaatttcatgcctactcctgaacaggatgttctggacgtcaagcccttgaggacattggctccaatgttccctgctcctctgggtgtcaatacatttaaccactcaaccacgccaccattgatatttgtcactccttctggacaatttcaagggggttttggtgattggaataattctgctgccaaatcatttttcgctttcagcagcaaggatgctcgtggaggcaaggctgatacatttagtgatcagaatactggtactggcaaggctgccacttttggtgatcaggatgcttttggcagccagaatgtttttgctagtgatcacagtactggtactggcaaggctgccacttttggtgatcaggatgcttttggcagccagaatgtcgccactggtgtgcaggatgctgcgaaaggccagactgcaacagattggacagatgtgagtgccaatcctaatggcccaattgatgccattgccatttcagcttacaggtcaacacagcctaatgttatatcactggatgatgatgatgacgacgacgatgatgagccttatgctgctaacaagacatcagcatctggacgcaagatcaagaggccatcccacctcagcggatacaatgtgagtgatgctttggtaagtgacagctccaacagcatgaaggttaagcgccccaaatcctctcacgggaaagctgctgctgacaacgagcatgccttgcttccaccttctgaggatcccagggaaattgtggaggcagttctcatgacctttgaggcgttgcggcgtaggcatctccaattggatgaggcacaagagactagcaagcgtgcagatctgaaggctagtgctatcttgatgtccagtaatatcagggctaaccctgggaagaggataggggttgttcctggagttgaaataggggacattttctacttcaggatggagctatgtattattgggctgcatgctcctagcatggccggaattgactatatgactgccaagtttggtgacgaggatgattctgttgcaatatgtattgttgctgcaggtggttatgacaataatgatgatgatacagatgtactggtttacagtggttcaggaggtaatagcaagaacagtgaggagaagcatgaccagaagcttgagaggggcaacctggctcttgagaggagcttgtccagaaaaaatgtaatccgtgtggttcggggctataaggatccaggttgcttgactgggaaggtttatatttatgatggcctctataggattcacgagtcatggaaggagaaaacgaagagtggaatattttgttttaagtacaagctgctgcgagagccaggacaacctgatggggttgcaatctggaagatgtcccagaaatgggtacaaaatccactgactagaggcagtgttttaaatcctgatctatcatctggtgcagaaaatcttccagtgtgtcttgttaatgacattgacagtgatgaagtgccacaccatttcacatataccactcaggtcgaacacttgaaaccactcagttctgtgaagcctttacagggttgcagatgccttagtgtttgtctgcctggtgatgccaactgctgctgtgcacagcgtaatggaggcagcttaccttacagctcatcaggactgcttgtatgccgcaagactatggtttatgaatgtggtgaatcctgtcggtgttctttcaattgtcgtaacagagtgacccagaaaggagttaggatccactttgaggtctttaagacgggaaatcgaggctggggtcttcgttcgtgggacgctatacgggctggttcatttatatgcgagtatgttggtgaggttattgatgatgctaacattaatctgaatgatattgaagatgattatatatttcagatgtcgtgtcctggtgagaggacattaaaatggaattttggacctgaattgataggggagcaaagcacaaatgtttctgctgatacctttgagactctacccattaagataagtgctaaaagaataggaaacatatcacgtttcatgaaccatagttgtgctcctaacgtattttggcagccagttcagtttgaccatgaagatgatcatcgcccacatatcatgttctttgctttgaagcatattcctcccatgacagagttgacttatgactatggtgacgttggagctgatcctagtggtgtacggtctcctagagcaaagaactgcctttgtgaatcctcaaattgtcggggattctttatctgaccgtggaaaatgcatattctatctatcaacattcaaccctaccagctagattctcggctttgtcgacaactcgacatcgaattgtttctgattcaacagctaatgtcgcaagacagcatcaatttcgtcatccaaaattatcactccatatcctttttggtggcacctgaagaaaaagtaggactgttcgaacagcttgcatcactctgtcgttgtggaaccattatattaattaatgtcaatcttttagatgaccattcagcaactaatgcacaaacgtttcttttgtgggggaagaatgttggtcttggaagttcaattttgtgtagtttgtagacttgtagagcatttagtgctgctaaacttgtgcaccttaagtcttttggctgtaaaagagcctcgaggctccagctgaattggttaggcagtctaagtagcatttctttgatcctgaatttgactccacgtgagtcaatttcaagctggagttaaaaaaaacattcttatgttctatactaaagtacagttctaaggctcaaccatgatcatagtcgttctcacatgtgctatattgctgttgtgtatgggtgtggtacgtgaaacttgatatattggtaaagtttttttatactaattaaaaacttgagaaaat

SEQ ID NO: 36207 - DNA, 2986 bp, Zea Mays
gtttgatcaggaactcaactactgcaggttgagatgaacggtccatcgaatttcatgcctactcctgaacaggatgttctggacgtcaagcccttgaggacattggctccaatgttccctgctcctctgggtgtcaatacatttaaccactcaaccacgccaccattgatatttgtcactccttctggacaatttcaagggggttttggtgattggaataattctgctgccaaatcatttttcgctttcagcagcaaggatgctcgtggaggcaaggctgatacatttagtgatcagaatactggtactggcaaggctgccacttttggtgatcaggatgcttttggcagccagaatgtttttgctagtgatcacagtactggtactggcaaggctgccacttttggtgatcaggatgcttttggcagccagaatgtcgccactggtgtgcaggatgctgcgaaaggccagactgcaacagattggacagatgtgagtgccaatcctaatggcccaattgatgccattgccatttcagcttacaggtcaacacagcctaatgttatatcactggatgatgatgatgacgacgacgatgatgagccttatgctgctaacaagacatcagcatctggacgcaagatcaagaggccatcccacctcagcggatacaatgtgagtgatgctttggtaagtgacagctccaacagcatgaaggttaagcgccccaaatcctctcacgggaaagctgctgctgacaacgagcatgccttgcttccaccttctgaggatcccagggaaattgtggaggcagttctcatgacctttgaggcgttgcggcgtaggcatctccaattggatgaggcacaagagactagcaagcgtgcagatctgaaggctagtgctatcttgatgtccagtaatatcagggctaaccctgggaagaggataggggttgttcctggagttgaaataggggacattttctacttcaggatggagctatgtattattgggctgcatgctcctagcatggccggaattgactatatgactgccaagtttggtgacgaggatgattctgttgcaatatgtattgttgctgcaggtggttatgacaataatgatgatgatacagatgtactggtttacagtggttcaggaggtaatagcaagaacagtgaggagaagcatgaccagaagcttgagaggggcaacctggctcttgagaggagcttgtccagaaaaaatgtaatccgtgtggttcggggctataaggatccaggttgcttgactgggaaggtttatatttatgatggcctctataggattcacgagtcatggaaggagaaaacgaagagtggaatattttgttttaagtacaagctgctgcgagagccaggacaacctgatggggttgcaatctggaagatgtcccagaaatgggtacaaaatccactgactagaggcagtgttttaaatcctgatctatcatctggtgcagaaaatcttccagtgtgtcttgttaatgacattgacagtgatgaagtgccacaccatttcacatataccactcaggtcgaacacttgaaaccactcagttctgtgaagcctttacagggttgcagatgccttagtgtttgtctgcctggtgatgccaactgctgctgtgcacagcgtaatggaggcagcttaccttacagctcatcaggactgcttgtatgccgcaagactatggtttatgaatgtggtgaatcctgtcggtgttctttcaattgtcgtaacagagtgacccagaaaggagttaggatccactttgaggtctttaagacgggaaatcgaggctggggtcttcgttcgtgggacgctatacgggctggttcatttatatgcgagtatgttggtgaggttattgatgatgctaacattaatctgaatgatattgaagatgattatatatttcagatgtcgtgtcctggtgagaggacattaaaatggaattttggacctgaattgataggggagcaaagcacaaatgtttctgctgatacctttgagactctacccattaagataagtgctaaaagaataggaaacatatcacgtttcatgaaccatagttgtgctcctaacgtattttggcagccagttcagtttgaccatgaagatgatcatcgcccacatatcatgttctttgctttgaagcatattcctcccatgacagagttgacttatgactatggtgacgttggagctgatcctagtggtgtacggtctcctagagcaaagaactgcctttgtgaatcctcaaattgtcggggattctttatctgaccgtggaaaatgcatattctatctatcaacattcaaccctaccagctagattctcggctttgtcgacaactcgacatcgaattgtttctgattcaacagctaatgtcgcaagacagcatcaatttcgtcatccaaaattatcactccatatcctttttggtggcacctgaagaaaaagtaggactgttcgaacagcttgcatcactctgtcgttgtggaaccattatattaattaatgtcaatcttttagatgaccattcagcaactaatgcacaaacgtttcttttgtgggggaagaatgttggtcttggaagttcaattttgtgtagtttgtagacttgtagagcatttagtgctgctaaacttgtgcaccttaagtcttttggctgtaaaagagcctcgaggctccagctgaattggttaggcagtctaagtagcatttctttgatcctgaatttgactccacgtgagtcaatttcaagctggagttaaaaaaaacattcttatgttctatactaaagtacagttctaaggctcaaccatgatcatagtcgttctcacatgtgctatattgctgttgtgtatgggtgtggtacgtgaaacttgatatattggtaaagtttttttatactaattaaaaacttgagaaaat

SEQ ID NO: 36208 - DNA, 3192 bp, Zea Mays
aaatgccaaaccacaacaagtcgcttccgtccctccccacgccgccgagggccgccgaccaggagatcacgcgctcatctctcatggagtccgtctagcttccgctcgtctgcgcccactccaagcagccgcagcggttgagatgaacggtccatcgaatttcatgcctactcctgaacaggatgttctggacgtcaagcccttgaggacattggctccaatgttccctgctcctctgggtgtcaatacatttaaccactcaaccacgccaccattgatatttgtcactccttctggacaatttcaagggggttttggtgattggaataattctgctgccaaatcatttttcgctttcagcagcaaggatgctcgtggaggcaaggctgatacatttagtgatcagaatactggtactggcaaggctgccacttttggtgatcaggatgcttttggcagccagaatgtttttgctagtgatcacagtactggtactggcaaggctgccacttttggtgatcaggatgcttttggcagccagaatgtcgccactggtgtgcaggatgctgcgaaaggccagactgcaacagattggacagatgtgagtgccaatcctaatggcccaattgatgccattgccatttcagcttacaggtcaacacagcctaatgttatatcactggatgatgatgatgacgacgacgatgatgagccttatgctgctaacaagacatcagcatctggacgcaagatcaagaggccatcccacctcagcggatacaatgtgagtgatgctttggtaagtgacagctccaacagcatgaaggttaagcgccccaaatcctctcacgggaaagctgctgctgacaacgagcatgccttgcttccaccttctgaggatcccagggaaattgtggaggcagttctcatgacctttgaggcgttgcggcgtaggcatctccaattggatgaggcacaagagactagcaagcgtgcagatctgaaggctagtgctatcttgatgtccagtaatatcagggctaaccctgggaagaggataggggttgttcctggagttgaaataggggacattttctacttcaggatggagctatgtattattgggctgcatgctcctagcatggccggaattgactatatgactgccaagtttggtgacgaggatgattctgttgcaatatgtattgttgctgcaggtggttatgacaataatgatgatgatacagatgtactggtttacagtggttcaggaggtaatagcaagaacagtgaggagaagcatgaccagaagcttgagaggggcaacctggctcttgagaggagcttgtccagaaaaaatgtaatccgtgtggttcggggctataaggatccaggttgcttgactgggaaggtttatatttatgatggcctctataggattcacgagtcatggaaggagaaaacgaagagtggaatattttgttttaagtacaagctgctgcgagagccaggacaacctgatggggttgcaatctggaagatgtcccagaaatgggtacaaaatccactgactagaggcagtgttttaaatcctgatctatcatctggtgcagaaaatcttccagtgtgtcttgttaatgacattgacagtgatgaagtgccacaccatttcacatataccactcaggtcgaacacttgaaaccactcagttctgtgaagcctttacagggttgcagatgccttagtgtttgtctgcctggtgatgccaactgctgctgtgcacagcgtaatggaggcagcttaccttacagctcatcaggactgcttgtatgccgcaagactatggtttatgaatgtggtgaatcctgtcggtgttctttcaattgtcgtaacagagtgacccagaaaggagttaggatccactttgaggtctttaagacgggaaatcgaggctggggtcttcgttcgtgggacgctatacgggctggttcatttatatgcgagtatgttggtgaggttattgatgatgctaacattaatctgaatgatattgaagatgattatatatttcagatgtcgtgtcctggtgagaggacattaaaatggaattttggacctgaattgataggggagcaaagcacaaatgtttctgctgatacctttgagactctacccattaagataagtgctaaaagaataggaaacatatcacgtttcatgaaccatagttgtgctcctaacgtattttggcagccagttcagtttgaccatgaagatgatcatcgcccacatatcatgttctttgctttgaagcatattcctcccatgacagagttgacttatgactatggtgacgttggagctgatcctagtggtgtacggtctcctagagcaaagaactgcctttgtgaatcctcaaattgtcggggattctttatctgaccgtggaaaatgcatattctatctatcaacattcaaccctaccagctagattctcggctttgtcgacaactcgacatcgaattgtttctgattcaacagctaatgtcgcaagacagcatcaatttcgtcatccaaaattatcactccatgtgaaattattttgtgacattttcaatctagcccacttatatttgtggaaacatgtagtggaacgatctcttactaatggccttgcattttacacagatcctttttggtggcacctgaagaaaaagtaggactgttcgaacagcttgcatcactctgtcgttgtggaaccattatattaattaatgtcaatcttttagatgaccattcagcaactaatgcacaaacgtttcttttgtgggggaagaatgttggtcttggaagttcaattttgtgtagtttgtagacttgtagagcatttagtgctgctaaacttgtgcaccttaagtcttttggctgtaaaagagcctcgaggctccagctgaattggttaggcagtctaagtagcatttctttgatcctgaatttgactccacgtgagtcaatttcaagctggagttaaaaaaaacattcttatgttctatactaaagtacagttctaaggctcaaccatgatcatagtcgttctcacatgtgctatattgctgttgtgtatgggtgtggtacgtgaaacttgatatattggtaaagtttttttatactaattaaaaacttgagaaaat

SEQ ID NO: 36209 - DNA, 2997 bp, Zea Mays
aaaaatgccaaaccacaacaagtcgcttccgtccctccccacgccgccgagggccgccgaccaggagatcacgcgctcatctctcatggagtccgtctagcttccgctcgtctgcgcccactccaagcagccgcagcggttgagatgaacggtccatcgaatttcatgcctactcctgaacaggatgttctggacgtcaagcccttgaggacattggctccaatgttccctgctcctctgggtgtcaatacatttaaccactcaaccacgccaccattgatatttgtcactccttctggacaatttcaagggggttttggtgattggaataattctgctgccaaatcatttttcgctttcagcagcaaggatgctcgtggaggcaaggctgatacatttagtgatcagaatactggtactggcaaggctgccacttttggtgatcaggatgcttttggcagccagaatgtttttgctagtgatcacagtactggtactggcaaggctgccacttttggtgatcaggatgcttttggcagccagaatgtcgccactggtgtgcaggatgctgcgaaaggccagactgcaacagattggacagatgtgagtgccaatcctaatggcccaattgatgccattgccatttcagcttacaggtcaacacagcctaatgttatatcactggatgatgatgatgacgacgacgatgatgagccttatgctgctaacaagacatcagcatctggacgcaagatcaagaggccatcccacctcagcggatacaatgtgagtgatgctttggtaagtgacagctccaacagcatgaaggttaagcgccccaaatcctctcacgggaaagctgctgctgacaacgagcatgccttgcttccaccttctgaggatcccagggaaattgtggaggcagttctcatgacctttgaggcgttgcggcgtaggcatctccaattggatgaggcacaagagactagcaagcgtgcagatctgaaggctagtgctatcttgatgtccagtaatatcagggctaaccctgggaagaggataggggttgttcctggagttgaaataggggacattttctacttcaggatggagctatgtattattgggctgcatgctcctagcatggccggaattgactatatgactgccaagtttggtgacgaggatgattctgttgcaatatgtattgttgctgcaggtggttatgacaataatgatgatgatacagatgtactggtttacagtggttcaggaggtaatagcaagaacagtgaggagaagcatgaccagaagcttgagaggggcaacctggctcttgagaggagcttgtccagaaaaaatgtaatccgtgtggttcggggctataaggatccaggttgcttgactgggaaggtttatatttatgatggcctctataggattcacgagtcatggaaggagaaaacgaagagtggaatattttgttttaagtacaagctgctgcgagagccaggacaacctgatggggttgcaatctggaagatgtcccagaaatgggtacaaaatccactgactagaggcagtgttttaaatcctgatctatcatctggtgcagaaaatcttccagtgtgtcttgttaatgacattgacagtgatgaagtgccacaccatttcacatataccactcaggtcgaacacttgaaaccactcagttctgtgaagcctttacagggttgcagatgccttagtgtttgtctgcctggtgatgccaactgctgctgtgcacagcgtaatggaggcagcttaccttacagctcatcaggactgcttgtatgccgcaagactatggtttatgaatgtggtgaatcctgtcggtgttctttcaattgtcgtaacagagtgacccagaaaggagttaggatccactttgaggtctttaagacgggaaatcgaggctggggtcttcgttcgtgggacgctatacgggctggttcatttatatgcgagtatgttggtgaggttattgatgatgctaacattaatctgaatgatattgaagatgattatatatttcagatgtcgtgtcctggtgagaggacattaaaatggaattttggacctgaattgataggggagcaaagcacaaatgtttctgctgatacctttgagactctacccattaagataagtgctaaaagaataggaaacatatcacgtttcatgaaccatagttgtgctcctaacgtattttggcagccagttcagtttgaccatgaagatgatcatcgcccacatatcatgttctttgctttgaagcatattcctcccatgacagagttgacttatgactatggtgacgttggagctgatcctagtggtgtacggtctcctagagcaaagaactgcctttgtgaatcctcaaattgtcggggattctttatctgaccgtggaaaatgcatattctatctatcaacattcaaccctaccagctagatcctttttggtggcacctgaagaaaaagtaggactgttcgaacagcttgcatcactctgtcgttgtggaaccattatattaattaatgtcaatcttttagatgaccattcagcaactaatgcacaaacgtttcttttgtgggggaagaatgttggtcttggaagttcaattttgtgtagtttgtagacttgtagagcatttagtgctgctaaacttgtgcaccttaagtcttttggctgtaaaagagcctcgaggctccagctgaattggttaggcagtctaagtagcatttctttgatcctgaatttgactccacgtgagtcaatttcaagctggagttaaaaaaaacattcttatgttctatactaaagtacagttctaaggctcaaccatgatcatagtcgttctcacatgtgctatattgctgttgtgtatgggtgtggtacgtgaaacttgatatattggtaaagtttttttatactaattaaaaacttgagaaaat

SEQ ID NO: 36210 - DNA, 2997 bp, Zea Mays
cgaggagcgagcggacaagagaagaaatcaagaaaacccccctacctcgccccaaaaatgccaaaccacaacaagtcgcttccgtccctccccacgccgccgagggccgccgaccaggagatcacgcgctcatctctcatggagtccgtctagcttccgctcgtctgcgcccactccaagcagccgcagcggaactcaactactgcaggttgagatgaacggtccatcgaatttcatgcctactcctgaacaggatgttctggacgtcaagcccttgaggacattggctccaatgttccctgctcctctgggtgtcaatacatttaaccactcaaccacgccaccattgatatttgtcactccttctggacaatttcaagggggttttggtgattggaataattctgctgccaaatcatttttcgctttcagcagcaaggatgctcgtggaggcaaggctgatacatttagtgatcagaatactggtactggcaaggctgccacttttggtgatcaggatgcttttggcagccagaatgtttttgctagtgatcacagtactggtactggcaaggctgccacttttggtgatcaggatgcttttggcagccagaatgtcgccactggtgtgcaggatgctgcgaaaggccagactgcaacagattggacagatgtgagtgccaatcctaatggcccaattgatgccattgccatttcagcttacaggtcaacacagcctaatgttatatcactggatgatgatgatgacgacgacgatgatgagccttatgctgctaacaagacatcagcatctggacgcaagatcaagaggccatcccacctcagcggatacaatgtgagtgatgctttggtaagtgacagctccaacagcatgaaggttaagcgccccaaatcctctcacgggaaagctgctgctgacaacgagcatgccttgcttccaccttctgaggatcccagggaaattgtggaggcagttctcatgacctttgaggcgttgcggcgtaggcatctccaattggatgaggcacaagagactagcaagcgtgcagatctgaaggctagtgctatcttgatgtccagtaatatcagggctaaccctgggaagaggataggggttgttcctggagttgaaataggggacattttctacttcaggatggagctatgtattattgggctgcatgctcctagcatggccggaattgactatatgactgccaagtttggtgacgaggatgattctgttgcaatatgtattgttgctgcaggtggttatgacaataatgatgatgatacagatgtactggtttacagtggttcaggaggtaatagcaagaacagtgaggagaagcatgaccagaagcttgagaggggcaacctggctcttgagaggagcttgtccagaaaaaatgtaatccgtgtggttcggggctataaggatccaggttgcttgactgggaaggtttatatttatgatggcctctataggattcacgagtcatggaaggagaaaacgaagagtggaatattttgttttaagtacaagctgctgcgagagccaggacaacctgatggggttgcaatctggaagatgtcccagaaatgggtacaaaatccactgactagaggcagtgttttaaatcctgatctatcatctggtgcagaaaatcttccagtgtgtcttgttaatgacattgacagtgatgaagtgccacaccatttcacatataccactcaggtcgaacacttgaaaccactcagttctgtgaagcctttacagggttgcagatgccttagtgtttgtctgcctggtgatgccaactgctgctgtgcacagcgtaatggaggcagcttaccttacagctcatcaggactgcttgtatgccgcaagactatggtttatgaatgtggtgaatcctgtcggtgttctttcaattgtcgtaacagagtgacccagaaaggagttaggatccactttgaggtctttaagacgggaaatcgaggctggggtcttcgttcgtgggacgctatacgggctggttcatttatatgcgaatgtcgtgtcctggtgagaggacattaaaatggaattttggacctgaattgataggggagcaaagcacaaatgtttctgctgatacctttgagactctacccattaagataagtgctaaaagaataggaaacatatcacgtttcatgaaccatagttgtgctcctaacgtattttggcagccagttcagtttgaccatgaagatgatcatcgcccacatatcatgttctttgctttgaagcatattcctcccatgacagagttgacttatgactatggtgacgttggagctgatcctagtggtgtacggtctcctagagcaaagaactgcctttgtgaatcctcaaattgtcggggattctttatctgaccgtggaaaatgcatattctatctatcaacattcaaccctaccagctagatcctttttggtggcacctgaagaaaaagtaggactgttcgaacagcttgcatcactctgtcgttgtggaaccattatattaattaatgtcaatcttttagatgaccattcagcaactaatgcacaaacgtttcttttgtgggggaagaatgttggtcttggaagttcaattttgtgtagtttgtagacttgtagagcatttagtgctgctaaacttgtgcaccttaagtcttttggctgtaaaagagcctcgaggctccagctgaattggttaggcagtctaagtagcatttctttgatcctgaatttgactccacgtgagtcaatttcaagctggagttaaaaaaaacattcttatgttctatactaaagtacagttctaaggctcaaccatgatcatagtcgttctcacatgtgctatattgctgttgtgtatgggtgtggtacgtgaaacttgatatattggtaaagtttttttatactaattaaaaacttgagaaaat

SEQ ID NO: 36211 - DNA, 3211 bp, Zea Mays
aacacatcagaccggacacagcgagaagctcgagcatttgtccccgaggagcgagcggacaagagaagaaatcaagaaaacccccctacctcgccccaaaaatgccaaaccacaacaagtcgcttccgtccctccccacgccgccgagggccgccgaccaggagatcacgcgctcatctctcatggagtccgtctagcttccgctcgtctgcgcccactccaagcagccgcagcggaactcaactactgcaggttgagatgaacggtccatcgaatttcatgcctactcctgaacaggatgttctggacgtcaagcccttgaggacattggctccaatgttccctgctcctctgggtgtcaatacatttaaccactcaaccacgccaccattgatatttgtcactccttctggacaatttcaagggggttttggtgattggaataattctgctgccaaatcatttttcgctttcagcagcaaggatgctcgtggaggcaaggctgatacatttagtgatcagaatactggtactggcaaggctgccacttttggtgatcaggatgcttttggcagccagaatgtttttgctagtgatcacagtactggtactggcaaggctgccacttttggtgatcaggatgcttttggcagccagaatgtcgccactggtgtgcaggatgctgcgaaaggccagactgcaacagattggacagatgtgagtgccaatcctaatggcccaattgatgccattgccatttcagcttacaggtcaacacagcctaatgttatatcactggatgatgatgatgacgacgacgatgatgagccttatgctgctaacaagacatcagcatctggacgcaagatcaagaggccatcccacctcagcggatacaatgtgagtgatgctttggtaagtgacagctccaacagcatgaaggttaagcgccccaaatcctctcacgggaaagctgctgctgacaacgagcatgccttgcttccaccttctgaggatcccagggaaattgtggaggcagttctcatgacctttgaggcgttgcggcgtaggcatctccaattggatgaggcacaagagactagcaagcgtgcagatctgaaggctagtgctatcttgatgtccagtaatatcagggctaaccctgggaagaggataggggttgttcctggagttgaaataggggacattttctacttcaggatggagctatgtattattgggctgcatgctcctagcatggccggaattgactatatgactgccaagtttggtgacgaggatgattctgttgcaatatgtattgttgctgcaggtggttatgacaataatgatgatgatacagatgtactggtttacagtggttcaggaggtaatagcaagaacagtgaggagaagcatgaccagaagcttgagaggggcaacctggctcttgagaggagcttgtccagaaaaaatgtaatccgtgtggttcggggctataaggatccaggttgcttgactgggaaggtttatatttatgatggcctctataggattcacgagtcatggaaggagaaaacgaagagtggaatattttgttttaagtacaagctgctgcgagagccaggacaacctgatggggttgcaatctggaagatgtcccagaaatgggtacaaaatccactgactagaggcagtgttttaaatcctgatctatcatctggtgcagaaaatcttccagtgtgtcttgttaatgacattgacagtgatgaagtgccacaccatttcacatataccactcaggtcgaacacttgaaaccactcagttctgtgaagcctttacagggttgcagatgccttagtgtttgtctgcctggtgatgccaactgctgctgtgcacagcgtaatggaggcagcttaccttacagctcatcaggactgcttgtatgccgcaagactatggtttatgaatgtggtgaatcctgtcggtgttctttcaattgtcgtaacagagtgacccagaaaggagttaggatccactttgaggtctttaagacgggaaatcgaggctggggtcttcgttcgtgggacgctatacgggctggttcatttatatgcgagtatgttggtgaggttattgatgatgctaacattaatctgaatgatattgaagatgattatatatttcagatgtcgtgtcctggtgagaggacattaaaatggaattttggacctgaattgataggggagcaaagcacaaatgtttctgctgatacctttgagactctacccattaagataagtgctaaaagaataggaaacatatcacgtttcatgaaccatagttgtgctcctaacgtattttggcagccagttcagtttgaccatgaagatgatcatcgcccacatatcatgttctttgctttgaagcatattcctcccatgacagagttgacttatgactatggtgacgttggagctgatcctagtggtgtacggtctcctagagcaaagaactgcctttgtgaatcctcaaattgtcggggattctttatctgaccgtggaaaatgcatattctatctatcaacattcaaccctaccagctagattctcggctttgtcgacaactcgacatcgaattgtttctgattcaacagctaatgtcgcaagacagcatcaatttcgtcatccaaaattatcactccatatcctttttggtggcacctgaagaaaaagtaggactgttcgaacagcttgcatcactctgtcgttgtggaaccattatattaattaatgtcaatcttttagatgaccattcagcaactaatgcacaaacgtttcttttgtgggggaagaatgttggtcttggaagttcaattttgtgtagtttgtagacttgtagagcatttagtgctgctaaacttgtgcaccttaagtcttttggctgtaaaagagcctcgaggctccagctgaattggttaggcagtctaagtagcatttctttgatcctgaatttgactccacgtgagtcaatttcaagctggagttaaaaaaaacattcttatgttctatactaaagtacagttctaaggctcaaccatgatcatagtcgttctcacatgtgctatattgctgttgtgtatgggtgtggtacgtgaaacttgatatattggtaaagtttttttatactaattaaaaacttgagaaaat

SEQ ID NO: 36212 - DNA, 2778 bp, Zea Mays
cgaggagcgagcggacaagagaagaaatcaagaaaacccccctacctcgccccaaaaatgccaaaccacaacaagtcgcttccgtccctccccacgccgccgagggccgccgaccaggagatcacgcgctcatctctcatggagtccgtctagcttccgctcgtctgcgcccactccaagcagccgcagcggaactcaactactgcaggttgagatgaacggtccatcgaatttcatgcctactcctgaacaggatgttctggacgtcaagcccttgaggacattggctccaatgttccctgctcctctgggtgtcaatacatttaaccactcaaccacgccaccattgatatttgtcactccttctggacaatttcaagggggttttggtgattggaataattctgctgccaaatcatttttcgctttcagcagcaaggatgctcgtggaggcaaggctgatacatttagtgatcagaatactggtactggcaaggctgccacttttggtgatcaggatgcttttggcagccagaatgtttttgctagtgatcacagtactggtactggcaaggctgccacttttggtgatcaggatgcttttggcagccagaatgtcgccactggtgtgcaggatgctgcgaaaggccagactgcaacagattggacagatgtgagtgccaatcctaatggcccaattgatgccattgccatttcagcttacaggtcaacacagcctaatgttatatcactggatgatgatgatgacgacgacgatgatgagccttatgctgctaacaagacatcagcatctggacgcaagatcaagaggccatcccacctcagcggatacaatgtgagtgatgctttggtaagtgacagctccaacagcatgaaggttaagcgccccaaatcctctcacgggaaagctgctgctgacaacgagcatgccttgcttccaccttctgaggatcccagggaaattgtggaggcagttctcatgacctttgaggcgttgcggcgtaggcatctccaattggatgaggcacaagagactagcaagcgtgcagatctgaaggctagtgctatcttgatgtccagtaatatcagggctaaccctgggaagaggataggggttgttcctggagttgaaataggggacattttctacttcaggatggagctatgtattattgggctgcatgctcctagcatggccggaattgactatatgactgccaagtttggtgacgaggatgattctgttgcaatatgtattgttgctgcaggtggttatgacaataatgatgatgatacagatgtactggtttacagtggttcaggaggtaatagcaagaacagtgaggagaagcatgaccagaagcttgagaggggcaacctggctcttgagaggagcttgtccagaaaaaatgtaatccgtgtggttcggggctataaggatccaggttgcttgactgggaaggtttatatttatgatggcctctataggattcacgagtcatggaaggagaaaacgaagagtggaatattttgttttaagtacaagctgctgcgagagccaggacaacctgatggggttgcaatctggaagatgtcccagaaatgggtacaaaatccactgactagaggcagtgttttaaatcctgatctatcatctggtgcagaaaatcttccagtgtgtcttgttaatgacattgacagtgatgaagtgccacaccatttcacatataccactcaggtcgaacacttgaaaccactcagttctgtgaagcctttacagggttgcagatgccttagtgtttgtctgcctggtgatgccaactgctgctgtgcacagcgtaatggaggcagcttaccttacagctcatcaggactgcttgtatgccgcaagactatggtttatgaatgtggtgaatcctgtcggtgttctttcaattgtcgtaacagagtgacccagaaaggagttaggatccactttgaggtctttaagacgggaaatcgaggctggggtcttcgttcgtgggacgctatacgggctggttcatttatatgcgagtatgttggtgaggttattgatgatgctaacattaatctgaatgatattgaagatgattatatatttcagatgtcgtgtcctggtgagaggacattaaaatggaattttggacctgaattgataggggagcaaagcacaaatgtttctgctgatacctttgagactctacccattaagataagtgctaaaagaataggaaacatatcacgtttcatgaaccatagttgtgctcctaacgtattttggcagccagttcagtttgaccatgaagatgatcatcgcccacatatcatgttctttgctttgaagcatattcctcccatgacagagttgacttatgactatggtgacgttggagctgatcctagtggtgtacggtctcctagagcaaagaactgcctttgtgaatcctcaaattgtcggggattctttatctgaccgtggaaaatgcatattctatctatcaacattcaaccctaccagctaggtaaaaacttctagttttttttccagttctgagtttcagccatgcttctagttacggatgaagttcctgggttttcttgtttcgtctaaggggttgagttttcataggcaaccagtttgtgttgatactattcctgtaatcctgtttactgttgatgttttttaatgtgaaaccatgctgcttgttgattttggtttatctgtcgatgtgtctt

SEQ ID NO: 36213 - DNA, 1064 bp, Zea Mays
ccctaccatcgacctttgcaaaagaaataaaaatcggtagtggtctcttactggtggcggcgtagaggtgacgaaaaaaccttgacaatgagcagcataggcacaggttatgatctgtctgtcaccaccttctctcccgatggccgcgtcttccaggtcgagtatgccacgaaggctgtcgacaacagcgggaccgttgttgggatcaagtgcaaagatggcattgttctgggtgtcgagaagctggtaacctcaaagatgatgctggagggatcaaaccgtaggatccattcagtgcacaggcactcgggcttggccgttgctggtttggcagcagatggcaggcaaattgtttcaaggaccaaatcagaagctgccagttatgaaaaggtctatggagaacccatttctgtgaaggaattggcagatcgtgtggcaagttatgttcatctttgcacgctgtactggtggctcagaccttttggttgtggtgttattcttggaggttatgatagggatggaccacagctttacatgatagagccctcaggagtttcgtataaatacttcggtgctgcattggggaagggaaggcaggctgcaaagactgagatagaaaagttgaaactttcagagcttacctgccgagaaggcattgttgaagttgcaaagataatttatgcagtgcatgatgaagctaaggacaaagcttttgagttggagttgagctggatctgtgaggaatcgaagcgccagcatcagaaggttccaaatgagctgttggagcagggcaaggccgctgctcaggcagctcttgaggacatggatgctgaaagaaacaccattgctaggcccgaacttgttccatcatctttcgttgcttttgaaatctttggtccctttgggctgccgggctgggctggacgtggcaaagaattgtcagattttactttcagttcgatgtaaaatctcatagatgtacctaacgaaactaggctccgttcatcggttcatggaagtttgaatctagacaggagatatcagggccgtgttgaaacagcggc

SEQ ID NO: 36214 - DNA, 1827 bp, Zea Mays
cctgcctctccctcccgccgccacagcgcgaagctctgtcggacaccgaccccgacgctgctctaccgctcgttgcgtcatccctccactggctcacacgtacaccttctcgaccgcgcgtcgtcactccactaccatatcccgaagattgcctcctccctgagactgccccctccacctcgcgtgcctcgcagacgggcgacctcgcatcgcgggctcggtgctcaaccgtggcccgaatttcgcttcgacgtcatcccgaacagctcgagaacaccatcctccatctcatcacagtataatacacatttgttcataagttatcgtggtattatatgattccgttgcaacgcacgggcactgacctagtcaaaatagaaaacagaaacaaaaatcatgagagtgagagttcatcttcttctccaagctgatttctgcttgttagctactcacgtcaacagaaaatctcgcgttcacctcctctccagtctctccgcctcccgcttacttctctgactctgtcctctttggtttctttcctgtcggcgacggctggggtgctgcgccgctctcaccttcaccgccgacgagcattcacaagtagtggtctcttactggtggcggcgtagaggtgacgaaaaaaccttgacaatgagcagcataggcacaggttatgatctgtctgtcaccaccttctctcccgatggccgcgtcttccaggtcgagtatgccacgaaggctgtcgacaacagcgggaccgttgttgggatcaagtgcaaagatggcattgttctgggtgtcgagaagctggtaacctcaaagatgatgctggagggatcaaaccgtaggatccattcagtgcacaggcactcgggcttggccgttgctggtttggcagcagatggcaggcaaattgtttcaaggaccaaatcagaagctgccagttatgaaaaggtctatggagaacccatttctgtgaaggaattggcagatcgtgtggcaagttatgttcatctttgcacgctgtactggtggctcagaccttttggttgtggtgttattcttggaggttatgatagggatggaccacagctttacatgatagagccctcaggagtttcgtataaatacttcggtgctgcattggggaagggaaggcaggctgcaaagactgagatagaaaagttgaaactttcagagcttacctgccgagaaggcattgttgaagttgcaaagataatttatgcagtgcatgatgaagctaaggacaaagcttttgagttggagttgagctggatctgtgaggaatcgaagcgccagcatcagaaggtcccaaatgacctgttggagcatgccaaagctgctgctcagacagctcttgaggagatggatgctgactaagaaacaagatgatatgcccaaacttcatgttttggcgctgttgaaatctctgatccctttggggtgacagactggatatggcaaatttgtcggattttattttgatgtcatgtaaaactcaattgatgttccaaatgagctgttggagcagggcaaggccgctgctcaggcagctcttgaggacatggatgctgaaagaaacaccattgctaggcccgaacttgttccatcatctttcgttgcttttgaaatctttggtccctttgggctgccgggctgggctggacgtggcaaagaattgtcagattttactttcagttcgatgtaaaatctcatagatgtacctaacgaaactaggctccgttcatcggttcatggaagtttgaatctagacaggagatatcagggccgtgttgaaacagcggc

SEQ ID NO: 36215 - DNA, 1744 bp, Zea Mays
cctgcctctccctcccgccgccacagcgcgaagctctgtcggacaccgaccccgacgctgctctaccgctcgttgcgtcatccctccactggctcacacgtacaccttctcgaccgcgcgtcgtcactccactaccatatcccgaagattgcctcctccctgagactgccccctccacctcgcgtgcctcgcagacgggcgacctcgcatcgcgggctcggtgctcaaccgtggcccgaatttcgcttcgacgtcatcccgaacagctcgagaacaccatcctccatctcatcacagtataatacacatttgttcataagttatcgtggtattatatgattccgttgcaacgcacgggcactgacctagtcaaaatagaaaacagaaacaaaaatcatgagagtgagagttcatcttcttctccaagctgatttctgcttgttagctactcacgtcaacagaaaatctcgcgttcacctcctctccagtctctccgcctcccgcttacttctctgactctgtcctctttggtttctttcctgtcggcgacggctggggtgctgcgccgctctcaccttcaccgccgacgagcattcacaagtagtggtctcttactggtggcggcgtagaggtgacgaaaaaaccttgacaatgagcagcataggcacaggttatgatctgtctgtcaccaccttctctcccgatggccgcgtcttccaggtcgagtatgccacgaaggctgtcgacaacagcgggaccgttgttgggatcaagtgcaaagatggcattgttctgggtgtcgagaagctggtaacctcaaagatgatgctggagggatcaaaccgtaggatccattcagtgcacaggcactcgggcttggccgttgctggtttggcagcagatggcaggcaaattgtttcaaggaccaaatcagaagctgccagttatgaaaaaacccatttctgtgaaggaattggcagatcgtgtggcaagttatgttcatctttgcacgctgtactggtggctcagaccttttggttgtggtgttattcttggaggttatgatagggatggaccacagctttacatgatagagccctcaggagtttcgtataaatacttcggtgctgcattggggaagggaaggcaggctgcaaagactgagatagaaaagttgaaactttcagagcttacctgccgagaaggcattgttgaagttgcaaagataatttatgcagtgcatgatgaagctaaggacaaagcttttgagttggagttgagctggatctgtgaggaatcgaagcgccagcatcagaaggtcccaaatgacctgttggagcatgccaaagctgctgctcagacagctcttgaggagatggatgctgactaagaaacaagatgatatgcccaaacttcatgttttggcgctgttgaaatctctgatccctttggggtgacagactggatatggcaaatttgtcggattttattttgatgtcatgtaaaactcaattgatgtaagtttggatctgaattgattgatgtcatagctgtggctatttacattcaccgcagttgcgtcctttagaacttgctgttgttagactttataggaccttgcacacgaaccattgctactagacggcgattgttttgcgtgtcggacctctttctgtttttgtaggctatgtgaaagaggacggcagccataaggttgttgcgctctcgattagggtgcgagagg

SEQ ID NO: 36216 - DNA, 818 bp, Zea Mays
gttaatcctgatcacaggcaagacgggttcagctaactactcaaacttgtatcatcccaaacataagctcaatcgattccagtatttatcttttctttatggcatggttttaagcaaaataaaaaattaaattttatccatatagtacaaaaatggtaaattatgaatttcacaatgatggttcttgggtttttagcaggattcagggatattttatagatcacgaaggcaacaactctatatgggagcaagacttagagcaatgctctgtgaccagggccattgtgcctagcaaatattatcagaaataaatccccacatacaagaatggttcagatggtgtagtgatcaagctagccgatgatctagaaatgccacctatcaaggagatagtcgcaaagaaaattacaggtctacttgatcattgccaccatctctttgtacgtgaacatgcaatgaagtttgagaagggtctcaacactgctatgctgttgtcaaatgaggtttggacccgttcatttcagtttgtttgcgccagttgtatgtaaattgattcaactcacctacaccacaccactagctcaatcatttcctagctctgcctacttcctatgccaccgtctcccacttcggccctggttccccaagcaagcaagattccatggcgaccgccgagctgagggagcagctcaacgccctcctctcctccatgatcacctcgggtctggtgtatgaatagttccagcagttgaagatgctgtaggaagacaggggcatgccgggctttatcgccaatgtcgtcacccacttttgtgaat

SEQ ID NO: 36217 - DNA, 2292 bp, Zea Mays
gcccgccgccgcctggcgcctgttcgcctgctgcttggacggctggacgcctgatcggcgatcggcctggcgcctgttcgcctgccgcttggacggctggacgcctgatcagcgatcggcgatcgcctacacggctaagagctgaatcgcctgctgcctgtcagcctgtgcgtaggatttggagatgatgttggtgtgatgagcggttgcatcctgttcattcagagggaccttcacatcaacgaggctatttaagtgttttgtgtaatcatgtcatcgagaagatatctatctggaagtgaaaaaagaaaaagaaaaaaacgtgttgatgatctcatagactcacagagaggagctattgacaagtttttcaagagcaatgctagtgcttcgacgaattcaaatgatgcgtttgcattggcaataattcccgtgaggacagaggaaccaaccaatgagaattctagagaagaagaacatgttgatatcaacgccgatgataacaatgtaagtgaccatgacaatatgtctaattcatcagatgcacatgcacagtttggtagtgttgatgatcaacctgacatttatgatccaagaaattgggataatcttgataataaagcaagagacatattaattgagaaaggacctataagagaggaaggtctcgagttccctttagataatgcctcaagacatttttcatatgctcattattatagaaagttaagcaatggagagttatatgatagaaaatggttggtttattcaaagcatgttgataaagttttttgcttttgttgtaagatcttaaagtctagcactagcaacagtctcagttctctagcacataatggatgtagaaattggaggaatattagtacaaagcttagagaacatgaaaatagtgttgagcatttttagaacatgaacaagtggaatgaattgaggacacgaatgcagaaagaggaaactattgataaagacttgcaaaagcaaatcaataaagagaaagaacgtttgagacaagttttgctaagaataatagcaattgtgaaatttcttggtaaacgcaacttggcttttagaggaagagcagctttatagtgatagtaatggaaatttcttagcctgtgttgagatgattgcagagtttgatttggtaatgcaagaccatcttaggcgtattcagaacaaagaaattcattaccattatctcagtcctaagattcagaatgagttgatagttcttttgtcttctaatattacaagatctatcataaagattgttaaagaggccaaatatttctctgttatcctagattgtacccctgatattagtcatcaagaacaaatgactttgttagttcgttgtgttaatttgtctaatggaaaaataaatattgaggaatactttttggggttcttgaatgtcgatgacacatctggtttggggcttttcagtgtgttgcttgattctatgaagtcattaggcctaaatattaatgatataaggggtcaaggctatgataatggttccaatatgaaaggaaaacatcaaggggtacaaaagcggttgcttgatattaatccaagagcattgtatatgccatgtgcttgccatagtcttaatcttactctttgtgatatggcaaaatcttgtgggaaagctgtttcattttttgggattgttcaacgcatatatgtgttatttgctggttcaaccaaaaggtggaatgttttgtgtaaacatgttcccatttttactctgaaatcattgtcaaatactcgttgggagagtcgtatctcaagtattacagcaataagatatcaagcaaaggagttgaggtcagctttgtttgagttaagtcgtgcttctgatattgaacctaaggacaaaagtgatgcaaaaagtttatttgatgcacttggcaactttgagtttttgcttggtatggttatctggcatgatattttatattctgtaaacaaagtgagtaagaaattgcaatcgccagacatgtgcattgactctgctttgaatcaaatacaaggtatggtgcaatactttgaggcatacagaaatgaggggtttccttctagtctgatcatctccaaaggcattgcagatgaaatgggtctagaggcatcgtttccagtaaaacgtcgtgccttgaggaagaaacaatttgatgaaagtaatgatcaagaagaaattctagaggctgaaagggtttttaaagtgaaatatttttggttgtagttgatatggcaatcacttctttgaaaacc

SEQ ID NO: 36218 - DNA, 1012 bp, Zea Mays
ggactgatcagtaataatatttgttcaaggatatatgctatcaacacttcaaagatgccacattacttccacaaagttgcatcacaaccaaggagctcggaaccgtgatgcggtctctcgggcagaaccccaccgaggcggagctgcaggacatgatcgccgaggtggacagcaacggcagcggcaccatcgacgagcaggagttcctgggcctgatggcgcgcaagatgagggacgcggagtcggaggaggagctcagggaggcgttccgcgtgttcgacaaggaccagaacggggtgatctccgcggccgagctccggcacttgatgaccaacctcggggagaagctgagcgagcaggaggtggccgagatggtccgtgaggccgacgtggaccgcgacggccacatcaactacgacgagttcgtcaaggtcatgacggccaagcgaaggagcaagaggacggaggagaaggcgacgcgcggcaagaagaaaccggcggcggcgccgtccgacgccggcaagcgtggccagaaatgcgtgatcctgtgagccggagcttcggttgtccagtacatgctggtgcagtggtgctgcgtgcgtgtcacccgctcgacctctgcttccggcacaccagctgcgggaagctccacttgttctgcaggtgaatgtagctgtttgtaaacttatcagagcgtgtttgggagcatgattgaatgggaaaatccacttgagtaagggattttagtcatctagatctcctctaatctccttgctcccaaacaagccattaaataagaaaaacggaggaagtaactgtttgtcaatcttgtacatgtgctcgtgtagcctgtctggtcttgtagtttcgggctcataggtcagtggtaaaagcaatgtcacaacagaatttgtgatgaatatttaactatcacaataagaaacgatctgatttttacgaccatgttaactttactccctccggtttcctattagttgtcgtttttgataag

SEQ ID NO: 36219 - DNA, 1732 bp, Zea Mays
agaagatgatagaaagacgctgatcctagccttagccaaacaaagctccgacgaggcagcggccacggccagctggcatgctcctgctgcggcgccttgtccgggccggccggtcgtggggcaccgaggcgagaggcctcgcctcgggggccccgcgggaggcggcggacgccgtggtggtgggagcgggcgtcgtcgggctcgcggcggcgcgcgcgctggcgatggccgggcgcgaggtagtcgtggtcgaggcggcccccagtttcggcaccggcaccagttcccgcaacagcgaggtcatccacgccggtatctactaccctccgcgaagtcttaaggctaggctttgtgtaaggggaaaggaaatgctctacaagtactgtgaagaacgaggtgttgcccacaaacgaatcagcaaactcatcgttgccactggtgctgcagaggttccaaagttggacatgcttctcagaaatgccaaagaaaacggggtggatgatcttcagttgatggagggttctgaagctatggagatggaacctgagcttcgatgtcttaaagctttactatcacctagtactgggataattgactctcattcactcatgctctcccttttggctgatgctgaaaacttgggaacaactatatcatataacacatcagttatcagtgggcatgttggatccaatggccttgaactccatgtttgtgaaagcaaagagctgcagaattatcatgtagggtctcatgtgaacgcacaacttgttttgcttccgaagcttgtgataaactctgcaggtctgagtgcagttctacttgccaaacaatttcatggccttgaccaggaatttgtgcccactcctcactatgcgcgtgggtgttacttcaccctctctcaaaccaagagtcctttcagtcggttaatatatcctctaccagaggatggtggcataggagtccatgtcactttagatttgaatggccttgttagatttggtccagatgttgaatggatatctgatggtggaaaggaccatgtgtcatgttttctgaacaagggtgggatgtccatggtgttcctggactggttaatttgtttggaatagaatcccctggtttgacctcaagcttggcaattgctgaacacattgtttcaaagtatttgtgatgggagtctcctatacaaagcttcattgccagatgctccatgcactgcagaatgatgaacctgacgtgtcaggaccagggttcaccaaagaaaatcgtacagtaaaaacaacattttgagctgttttttttcttgatcatttggatacttattgcatgtgactgttagaagatgaaattctatgaaagtttcagcgaaacattaatatgatggagattgaacgggtatatgacactttacgggcatggtacctggtctggactctgaatgtggactagagaattataccaagttgcttgatagatggcgcaactccacttctagttgcacaacggaaattgtaataagcccaacactgtgatacatgttggtgctagacctagacatttgtgtcggtcgggcatcacttgctgctatcgaaacatatcacgaaacagacgaattcaaaagaatgaagaactatgaattgggatatgatgcataggattggtcatattgaatcacattgagatcgactttcgttttatctatgaacgtgtggcggactggcggctggtg

SEQ ID NO: 36220 - DNA, 1610 bp, Zea Mays
agaagatgatagaaagacgctgatcctagccttagccaaacaaagctccgacgaggcagcggccacggccagctggcatgctcctgctgcggcgccttgtccgggccggccggtcgtggggcaccgaggcgagaggcctcgcctcgggggccccgcgggaggcggcggacgccgtggtggtgggagcgggcgtcgtcgggctcgcggcggcgcgcgcgctggcgatggccgggcgcgaggtagtcgtggtcgaggcggcccccagtttcggcaccggcaccagttcccgcaacagcgaggtcatccacgccggtatctactaccctccgcgaagtcttaaggctgatgctgaaaacttgggaacaactatatcatataacacatcagttatcagtgggcatgttggatccaatggccttgaactccatgtttgtgaaagcaaagagctgcagaattatcatgtagggtctcatgtgaacgcacaacttgttttgcttccgaagcttgtgataaactctgcaggtctgagtgcagttctacttgccaaacaatttcatggccttgaccaggaatttgtgcccactcctcactatgcgcgtgggtgttacttcaccctctctcaaaccaagagtcctttcagtcggttaatatatcctctaccagaggatggtggcataggagtccatgtcactttagatttgaatggccttgttagatttggtccagatgttgaatggatatctgatggtggaaaggaccatgtgtcatgttttctgaacaagtttgattactcagtaaatcccaatcgctgttctgtattttaccctgtggtaaggaagtattttccaaatctcaaggatgggtctttggaacctggttattctgggatccgaccaaagctttctggtcctggacaacctccttcagattttgttattcaggggtgggatgtccatggtgttcctggactggttaatttgtttggaatagaatcccctggtttgacctcaagcttggcaattgctgaacacattgtttcaaagtatttgtgatgggagtctcctatacaaagcttcattgccagatgctccatgcactgcagaatgatgaacctgacgtgtcaggaccagggttcaccaaagaaaatcgtacagtaaaaacaacattttgagctgttttttttcttgatcatttggatacttattgcatgtgactgttagaagatgaaattctatgaaagtttcagcgaaacattaatatgatggagattgaacgggtatatgacactttacgggcatggtacctggtctggactctgaatgtggactagagaattataccaagttgcttgatagatggcgcaactccacttctagttgcacaacggaaattgtaataagcccaacactgtgatacatgttggtgctagacctagacatttgtgtcggtcgggcatcacttgctgctatcgaaacatatcacgaaacagacgaattcaaaagaatgaagaactatgaattgggatatgatgcataggattggtcatattgaatcacattgagatcgactttcgttttatctatgaacgtgtggcggactggcggctggtg

SEQ ID NO: 36221 - DNA, 512 bp, Zea Mays
caagcactgtgctgttcaggagtaggggtagtttgcgcatacgcggctcaatggcaatcatttgactgggccgatcccaagggaactttctggaatatctagtctcaaagttgtcgatgtttcaagcaatgatttatgtgggacgattcccacatctggaccatttgagcacattcctctgagcaactttgagaagaacccacgcttggaaggtccagagctacaaggcctggccatatatgacaccaactgctagagggggcaccacgaacaaaagaatcgctaggaagaaatgggcgaacaaggttaccaaaaagtgggcgacatagattattaggtctggttctgctgccactctgtaatcccccctgcatagctcttatttgtaacttgctgtctgcacgaaagttggtggatgttttagcagaatgctttctgcccgtgaaagtaaacttgaaactgcttattatgagtgaaatgatgatgttatttcccttgccatgagtttttgg

SEQ ID NO: 36222 - DNA, 599 bp, Zea Mays
cagcattcaaggaacaatcccttctgagcttggtaatttgaagaatctaataagcttggacttgtacaagaacaacatttcggggacaatacctccttcccttggaaagttgaaatcccttgtattcctgcggctcaatggcaatcatttgactgggccgatcccaagggaactttctggaatatctagtctcaaagttgtcgatgtttcaagcaatgatttatgtgggacgattcccacatctggaccatttgagcacattcctctgagcaactttgagaagaacccacgcttggaaggtccagagctacaaggcctggccatatatgacaccaactgctagagggggcaccacgaacaaaagaatcgctaggaagaaatgggcgaacaaggttaccaaaaagtgggcgacatagattattaggtctggttctgctgccactctgtaatcccccctgcatagctcttatttgtaacttgctgtctgcacgaaagttggtggatgttttagcagaatgctttctgcccgtgaaagtaaacttgaaactgcttattatgagtgaaatgatgatgttatttcccttgccatgagtttttgg

SEQ ID NO: 36223 - DNA, 739 bp, Zea Mays
tcaggatttcatatttcattgaagaatttatgacaatctaagacacacacatgagatcttggtaatttgaacttatctggtcatctggtgcctgagcttgggaaattggagcatctgcagtacctggaactttacaagaacagcattcaaggaacaatcccttctgagcttggtaatttgaagaatctaataagcttggacttgtacaagaacaacatttcggggacaatacctccttcccttggaaagttgaaatcccttgtattcctgcggctcaatggcaatcatttgactgggccgatcccaagggaactttctggaatatctagtctcaaagttgtcgatgtttcaagcaatgatttatgtgggacgattcccacatctggaccatttgagcacattcctctgagcaactttgagaagaacccacgcttggaaggtccagagctacaaggcctggccatatatgacaccaactgctagagggggcaccacgaacaaaagaatcgctaggaagaaatgggcgaacaaggttaccaaaaagtgggcgacatagattattaggtctggttctgctgccactctgtaatcccccctgcatagctcttatttgtaacttgctgtctgcacgaaagttggtggatgttttagcagaatgctttctgcccgtgaaagtaaacttgaaactgcttattatgagtgaaatgatgatgttatttcccttgccatgagtttttgg

SEQ ID NO: 36224 - DNA, 2214 bp, Zea Mays
gtttggttgtttttttaaacacgtgcctgtggcacgtgcctctcaagtctcaactagtatgtagaaattggctagtcgatcggatactccctttccctgcgaagtgttctacgactggtggactctcttggctgtggctgctgatccgccaatgtcaaaggcacgtgcagcagcagttgcccttgcccctgggtctggttgatcgcgatgcacatgaccggagcctgactttggtgcggcgtgagcacgatgatgcgttgcgcggttcggattcgtgagagctgtagtcaaaaggctggaacggatggaattatccgagcagattgggtgggacggcggagggagccctttgcgccgtcacaaatcgcaaccaatcgccgagttgcttgtgttaaatagctcttcgcgtacgacacggcaagcgggctgcgacggcgactttctcatctgctcactgctctgcttctccactccgctccgctggcagcgcaggccatggcgacacaggcgctggcgccctccctccgcctcctcctgctgctaccgctgctcgccgccgccgccgccgccgccgcgttgtctcacccagcgcacgagttctgcgcggtcgggggtgacgcctccggctgcggcggcggaggagacggcacgaggatcctgatcaagggcgggacggtggtcaacgcgcacctcgcggaggaggccgacgtctacatcgaggacggcgtcgtcgtcgccgtccgcccagacatcccggttgatgttgataatgtcagggtaatcgacgcaacaggaaaatatgtcatgccaggtggaattgaccctcacacgcacctggagatggagttcatgggcaccgtgaccatagatgacttcttcagcggccatgctgcggcactggcgggtgggacgacgatgcatattgactttgtcattcccgtggacggcaacttgactgcagggttggagtcctacaagcacaaagccgcaaaagctgccatggattatggctttcacatggccattacaaagtggaatgatgaggttgcaagggaaatggaagtgatggttaaagaacatgggataaattctttcaagtttttcatggcatataaaggctccttgatggttactgatgacctcctcctgcaaggcctacggaaatgcaagtcgcttggtgcccttgctatggttcatgcagagaatggtgatgctgttgccgagggacaacagcggatgattgaccttgggataactggtccagaagggcatgctctctcaaggcctccaattttagaaggagaagcaactgcacgggcaatccgtttagctaagttcatcaatacgccactgtatgttgttcatgtgatgagcatcgacgcaatggatgagattgccaaggctaaaagagaagggcagagagtcatcggtgaacctgtggtttctggactagtgcttgatgattcttggctttgggatcctgacttcacgattgcttcaaagtacgtgatgagtcctccaatccgggaagcagggcatggtaaagcactccaagctgctctttcatcgggaattctacagcttgtaggtactgatcactgcacattcaactccacacagaaagcttttggttctgatgattttcggaagattcccaatggtgtaaatggtcttgaggaacggatgcatatactttgggacagcatggtggagactggcaagatttctgtaaccgactatgtcagagtgacaagcacagaatgcgccaagaccttcaacatattccctcggaaaggagcaatcctggaaggatctgacgcagatatcataatcctgaaccctgaaaggagctttgtgatgggtgctctcacacaccattcgaggtccaacaccaatgtgtacgagggcaggaaaggaaagggaatggtggaaataacaatctcaaggggccgagtggtatgggaggatggcgttctgaacattgcacctggttcaggacgatacgtcatgatgccacctttcggctacgtctttgatgggatcgagaagtccgatgcgacctacagagcttccctccgagcccctgtacagcgtggtaaagctgctgcatagctatgacagctgctgatgccattgacagggcagtagccccccatctgattcaagaacgagttgctccaaggtacaagaagcactaggcacacaattatatgg

SEQ ID NO: 36225 - DNA, 2212 bp, Zea Mays
gtttggttgtttttttaaacacgtgcctgtggcacgtgcctctcaagtctcaactagtatgtagaaattggctagtcgatcggatactccctttccctgcgaagtgttctacgactggtggactctcttggctgtggctgctgatccgccaatgtcaaaggcacgtgcagcagcagttgcccttgcccctgggtctggttgatcgcgatgcacatgaccggagcctgactttggtgcggcgtgagcacgatgatgcgttgcgcggttcggattcgtgagagctgtagtcaaaaggctggaacggatggaattatccgagcagattgggtgggacggcggagggagccctttgcgccgtcacaaatcgcaaccaatcgccgagttgcttgtgttaaatagctcttcgcgtacgacacggcaagcgggctgcgacggcgactttctcatctgctcactgctctgcttctccactccgctccgctggcagcgcaggccatggcgacacaggcgctggcgccctccctccgcctcctcctgctgctaccgctgctcgccgccgccgccgccgccgccgcgttgtctcacccagcgcacgagttctgcgcggtcgggggtgacgcctccggctgcggcggcggaggagacggcacgaggatcctgatcaagggcgggacggtggtcaacgcgcacctcgcggaggaggccgacgtctacatcgaggacggcgtcgtcgtcgccgtccgcccagacatcccggttgatgttgataatgtcagggtaatcgacgcaacaggaaaatatgtcatgccaggtggaattgaccctcacacgcacctggagatggagttcatgggcaccgtgaccatagatgacttcttcagcggccatgctgcggcactggcgggtgggacgacgatgcatattgactttgtcattcccgtggacggcaacttgactgcagggttggagtcctacaagcacaaagccgcaaaagctgccatggattatggctttcacatggccattacaaagtggaatgatgaggttgcaagggaaatggaagtgatggttaaagaacatgggataaattctttcaagtttttcatggcatataaaggctccttgatggttactgatgacctcctcctgcaaggcctacggaaatgcaagtcgcttggtgcccttgctatggttcatgcagagaatggtgatgctgttgccgagggacaacagcggatgattgaccttgggataactggtccagaagggcatgctctctcaaggcctccaattttagaaggagaagcaactgcacgggcaatccgtttagctaagttcatcaatacgccactgtatgttgttcatgtgatgagcatcgacgcaatggatgagattgccaaggctaaaagagaagggcagagagtcatcggtgaacctgtggtttctggactagtgcttgatgattcttggctttgggatcctgacttcacgattgcttcaaagtacgtgatgagtcctccaatccgggaagcagggcatggtaaagcactccaagctgctctttcatcgggaattctacagcttgtaggtactgatcactgcacattcaactccacacagaaagcttttggttctgatgattttcggaagattcccaatggtgtaaatggtcttgaggaacggatgcatatactttgggacagcatggtggagactggcaagatttctgtaaccgactatgtcagagtgacaagcacagaatgcgccaagaccttcaacatattccctcggaaaggagcaatcctggaaggatctgacgcagatatcataatcctgaaccctgaaaggagctttgtgatgggtgctctcacacaccattcgaggtccaacaccaatgtgtacgagggcaggaaaggaaagggaatggtggaaataacaatctcaaggggccgagtggtatgggaggatggcgttctgaacattgcacctggttcaggacgatacgtcatgatgccacctttcggctacgtctttgatgggatcgagaagtccgatgcgacctacagagcttccctccgagcccctgtacagcgtggtaaagctgctgcatagctatgacagctgctgatgccattgacagggcagtagccccccatctgattcaagaacgagttgctccaaggtacaagaagcactaggcacacaattatat

SEQ ID NO: 36226 - DNA, 2457 bp, Zea Mays
acacgtgcctgtggcacgtgcctctcaagtctcaactagtatgtagaaattggctagtcgatcggatactccctttccctgcgaagtgttctacgactggtggactctcttggctgtggctgctgatccgccaatgtcaaaggcacgtgcagcagcagttgcccttgcccctgggtctggttgatcgcgatgcacatgaccggagcctgactttggtgcggcgtgagcacgatgatgcgttgcgcggttcggattcgtgagagctgtagtcaaaaggctggaacggatggaattatccgagcagattgggtgggacggcggagggagccctttgcgccgtcacaaatcgcaaccaatcgccgagttgcttgtgttaaatagctcttcgcgtacgacacggcaagcgggctgcgacggcgactttctcatctgctcactgctctgcttctccactccgctccgctggcagcgcaggccatggcgacacaggcgctggcgccctccctccgcctcctcctgctgctaccgctgctcgccgccgccgccgccgccgccgcgttgtctcacccagcgcacgagttctgcgcggtcgggggtgacgcctccggctgcggcggcggaggagacggcacgaggatcctgatcaagggcgggacggtggtcaacgcgcacctcgcggaggaggccgacgtctacatcgaggacggcgtcgtcgtcgccgtccgcccagacatcccggttgatgttgataatgtcagggtaatcgacgcaacaggaaaatatgtcatgccaggtggaattgaccctcacacgcacctggagatggagttcatgggcaccgtgaccatagatgacttcttcagcggccatgctgcggcactggcgggtgggacgacgatgcatattgactttgtcattcccgtggacggcaacttgactgcagggttggagtcctacaagcacaaagccgcaaaagctgccatggattatggctttcacatggccattacaaagtggaatgatgaggttgcaagggaaatggaagtgatggttaaagaacatgggataaattctttcaagtttttcatggcatataaaggctccttgatggttactgatgacctcctcctgcaaggcctacggaaatgcaagtcgcttggtgcccttgctatggttcatgcagagaatggtgatgctgttgccgagggacaacagcggatgattgaccttgggataactggtccagaagggcatgctctctcaaggcctccaattttagaaggagaagcaactgcacgggcaatccgtttagctaagttcatcaatacgccactgtatgttgttcatgtgatgagcatcgacgcaatggatgagattgccaaggctaaaagagaagggcagagagtcatcggtgaacctgtggtttctggactagtgcttgatgattcttggctttgggatcctgacttcacgattgcttcaaagtacgtgatgagtcctccaatccgggaagcagggcatggtaaagcactccaagctgctctttcatcgggaattctacaggtactgatcactgcacattcaactccacacagaaagcttttggttctgatgattttcggaagattcccaatggtgtaaatggtcttgaggaacggatgcatatactttgggacagcatggtggagactggcaagatttctgtaaccgactatgtcagagtgacaagcacagaatgcgccaagaccttcaacatattccctcggaaaggagcaatcctggaaggatctgacgcagatatcataatcctgaaccctgaaaggagctttgtgatgggtgctctcacacaccattcgaggtccaacaccaatgtgtacgagggcaggaaaggaaagggaatggtggaaataacaatctcaaggggccgagtggtatgggaggatggcgttctgaacattgcacctggttcaggacgatacgtcatgatgccacctttcggctacgtctttgatgggatcgagaagtccgatgcgacctacagagcttccctccgagcccctgtacagcgtggtaaagctgctgcatagctatgacagctgctgatgccattgacagggcagtagccccccatctgattcaagaacgagttgctccaaggtgaacaccgcatcgttccatgcgtattgtctatacagaacagtttatttaagatcagattcaggataggtaaaggcctcagcttgcctatgtacatcaaacacatttgttactagttctggtcaatttgtgcaactagcaattcgctgttccaataaatcatattatcacattcattactcgcattgtaatgttaaacccttcttcctattcatcatgagctatccccaaacatgctaaaagaacatggttactgattgttcatgaaaaggatggcctatgcagtactgtgattctttg

SEQ ID NO: 36227 - DNA, 2384 bp, Zea Mays
acacgtgcctgtggcacgtgcctctcaagtctcaactagtatgtagaaattggctagtcgatcggatactccctttccctgcgaagtgttctacgactggtggactctcttggctgtggctgctgatccgccaatgtcaaaggcacgtgcagcagcagttgcccttgcccctgggtctggttgatcgcgatgcacatgaccggagcctgactttggtgcggcgtgagcacgatgatgcgttgcgcggttcggattcgtgagagctgtagtcaaaaggctggaacggatggaattatccgagcagattgggtgggacggcggagggagccctttgcgccgtcacaaatcgcaaccaatcgccgagttgcttgtgttaaatagctcttcgcgtacgacacggcaagcgggctgcgacggcgactttctcatctgctcactgctctgcttctccactccgctccgctggcagcgcaggccatggcgacacaggcgctggcgccctccctccgcctcctcctgctgctaccgctgctcgccgccgccgccgccgccgccgcgttgtctcacccagcgcacgagttctgcgcggtcgggggtgacgcctccggctgcggcggcggaggagacggcacgaggatcctgatcaagggcgggacggtggtcaacgcgcacctcgcggaggaggccgacgtctacatcgaggacggcgtcgtcgtcgccgtccgcccagacatcccggttgatgttgataatgtcagggtaatcgacgcaacaggaaaatatgtcatgccaggtggaattgaccctcacacgcacctggagatggagttcatgggcaccgtgaccatagatgacttcttcagcggccatgctgcggcactggcgggtgggacgacgatgcatattgactttgtcattcccgtggacggcaacttgactgcagggttggagtcctacaagcacaaagccgcaaaagctgccatggattatggctttcacatggccattacaaagtggaatgatgaggttgcaagggaaatggaagtgatggttaaagaacatgggataaattctttcaagtttttcatggcatataaaggctccttgatggttactgatgacctcctcctgcaaggcctacggaaatgcaagtcgcttggtgcccttgctatggttcatgcagagaatggtgatgctgttgccgagggacaacagcggatgattgaccttgggataactggtccagaagggcatgctctctcaaggcctccaattttagaaggagaagcaactgcacgggcaatccgtttagctaagttcatcaatacgccactgtatgttgttcatgtgatgagcatcgacgcaatggatgagattgccaaggctaaaagagaagggcagagagtcatcggtgaacctgtggtttctggactagtgcttgatgattcttggctttgggatcctgacttcacgattgcttcaaagtacgtgatgagtcctccaatccgggaagcagggcatgaaagcttttggttctgatgattttcggaagattcccaatggtgtaaatggtcttgaggaacggatgcatatactttgggacagcatggtggagactggcaagatttctgtaaccgactatgtcagagtgacaagcacagaatgcgccaagaccttcaacatattccctcggaaaggagcaatcctggaaggatctgacgcagatatcataatcctgaaccctgaaaggagctttgtgatgggtgctctcacacaccattcgaggtccaacaccaatgtgtacgagggcaggaaaggaaagggaatggtggaaataacaatctcaaggggccgagtggtatgggaggatggcgttctgaacattgcacctggttcaggacgatacgtcatgatgccacctttcggctacgtctttgatgggatcgagaagtccgatgcgacctacagagcttccctccgagcccctgtacagcgtggtaaagctgctgcatagctatgacagctgctgatgccattgacagggcagtagccccccatctgattcaagaacgagttgctccaaggtgaacaccgcatcgttccatgcgtattgtctatacagaacagtttatttaagatcagattcaggataggtaaaggcctcagcttgcctatgtacatcaaacacatttgttactagttctggtcaatttgtgcaactagcaattcgctgttccaataaatcatattatcacattcattactcgcattgtaatgttaaacccttcttcctattcatcatgagctatccccaaacatgctaaaagaacatggttactgattgttcatgaaaaggatggcctatgcagtactgtgattctttg

SEQ ID NO: 36228 - DNA, 694 bp, Zea Mays
ctttttccctcagcctggtggcaggagctcctttctcctccttactctgtcatctccgtccgttccttttcttcgttccctgatttccttgccacctgtgcaccggatccatcttgggattgctctgcctgtaaggcgagattgcgagaagatggggcagacaaggaaggaggtcgtattggcgctggactctaggttcacaagcatgatgacggaccaaagaagctcgagaactccatgctgcattgctatctcaaccaagaggacttggtggaggaaggaaaggaggaagagaagaaggagaaactgagtaacatgtttgtcctgattaccgtaaaaaacagatattgaagggttggaatcaacctaaaggcacatggaggtactgaaagggaaatgtgcccttgggccatttctaagtattttggtgattgcgtgccaacacaagtgcttaaatgtgaatctatgcccatgaatggacaaagtgcaaatcaagagcaaaggtatgtttctaagtcttagtacattggttttgtgtactaatatacttgtctaagtgttagaaacagaaagaagaagaaacgaagagagttggctgtgtacagccaagaggctgtttcggtctggggcaccggactgtccggtggtgcaccggacagtgtccggtgcgtcaggctgcctcgaccgaagtggc

SEQ ID NO: 36229 - DNA, 551 bp, Zea Mays
ctttttccctcagcctggtggcaggagctcctttctcctccttactctgtcatctccgtccgttccttttcttcgttccctgatttccttgccacctgtgcaccggatccatcttgggattgctctgcctgtaaggcgagattgcgagaagatggggcagacaaggaaggaggtcgtattggcgctggactctaggttcacaagcatgatgacggaccaaagaagctcgagaactccatgctgcattgctatctcaaccaagaggacttggtggaggaaggaaaggaggaagagaagaaggagaaactgagtaacatgtttgtcctgattaccgtaaaaaacaggtttgtcctgatcattcaactcctcctccatctgtttctcaaaaatctttactatgcctgcctaagacggtaggagatttgccaatgtaagtttctgattggctcaaagatgctgaagtccttttcctatttctggaagtccttgagaatcatgtctggtcactcatcctctcgtataaagccttacatcaagtgaatcagttgttg

SEQ ID NO: 36230 - DNA, 1685 bp, Zea Mays
ccacacgtgagtccgccggaaaagccgaggcatctcgctcgctcggcgccagttgcctcgcagtttggatcatctcatacctcggcgaagatgagggagatcctgcacatccagggagggcaatgtggcaaccagattggcgccaagttctgggaggtggtgtgcgatgaacatggcattgaccctaccgggcggtacactggcaattccgaccttcagttggagcgtgttaatgtctactacaatgaagcctcctgcggacgctttgttccccgcgctgttctcatggatcttgagcctgggacaatggacagtgtccggaccggaccctatgggcagatcttccgccctgacaactttgtgtttgggcaatctggtgctggtaacaattgggctaagggccactacaccgagggtgctgagctcattgactctgttctggatgttgtgaggaaggaagctgagaactgtgactgcttgcaaggattccaagtatgccactcccttggtggtggtactggatctggtatgggtacgctgttgatctcaaagatcagggaagagtaccctgaccgcatgatgcttacattctcagttttcccctcaccgaaagtatctgataccgtggttgagccatacaatgccactctttctgtccaccagttggtcgagaatgctgatgagtgcatggttctcgataacgaagccctctatgacatctgcttcaggactcttaagctgaccacccctagctttggtgatctgaaccatttgatctctgcaaccatgagtggagtcacctgctgcctaaggttccctggtcagctgaactccgacctcaggaagctggcagtgaacctgatccccttcccccgtctccacttcttcatggtcggcttcgcgccgctgacgtcccgtggctcccagcagtaccgggccctcacagtccccgagctcacgcagcagatgtgggatgccaagaacatgatgtgtgccgctgaccctcgccatgggcgttacctcaccgcctcggccatgttccgcgggaagatgagcaccaaggaggttgacgagcagatgatcaacgtccagaacaagaactcgtcctacttcgtggagtggatccccaacaacgtcaagtccagcgtgtgcgacatcccgcccaggggcctgtccatggcgtccaccttcatcggcaactcgacctccatccaggagatgttccggagggtgagcgagcagttcactgccatgttcaggaggaaggctttcttgcactggtacacgggcgagggcatggacgagatggagttcaccgaggccgagagcaacatgaacgacctcgtgtcggagtaccagcagtaccaggacgcgactgccgacgaggaggagtacgaggacgaggaggaggtgcaggccgatgacatgtgaggggagggctgttatcgtgtgaagccttgtggtccctagggcaagcggacctcgatgagttcggtgttccctttcgtgttgttgccatctttctactgctagcgtacccaccctcgtggcccattccgtcgctgttgacgtatgtatttttcttgtgctatggaaccttgcttttggtacggtactatcctgctagtatgcttggcgtttgaggttcctggcgtgaaaaaaaagaaccaagggagtaataaaaa

SEQ ID NO: 36231 - DNA, 1814 bp, Zea Mays
gagctcccgcaacatcagcagcaaggacatcctggtggagccgtcgcgcatctcacgcttccttcacctgaccaacagccaagccgggaggcacgcttgagagccacacactgagacctcacgcgcggatggccgccgccgcgggcgggaccggcggctgcggctgccacattgtagcggtgccgttcccgggccgcggccatgtcaacgccatgatgaacctgagccgcctcctcgcagcccggggcgcggcggtcaccttcgtcgtcaccgaggagtggctcggactcatccgctcctcctccgccgccgccgctgccgagccggccggcatccgcatccgcaccatccccaacgtcatcccttccgagcacggccgcgccgccaaccactcaggcttcctcgacgccgtcgccacagagatggaggcgcccttcgaccgccttcttgacgggctcgaaggcccgccgcccgcggcgctcgtggccgacgcctacgttccctgggtggtcggcgtcggcaaccggaggggcgtccccgtctggtcgctcttccccatgtccgccgcctttttctttgcctactaccacttcgaccgcctcccggcctggcttaccaactctgagcacgcgccggaatccggtgagactattggaaactctgatcagagacttgggcactatatcgctgggcaggcttcaagttcaatacggttgtcagatctcgagcccttaattcacaacaagagaacagtgaagcatatcctaacaactatctctagcatcagaaatgctcagtctctccttttcaccaccatgtatgagcttgaggccagtgtcattgactcgctaagttttgtttcagtctcagcctctcaacttgaagagatcgcattgggcctaatagccagtgaggtcaggttcttgtggattcttcgagaacaatcccctcgggtgcaagaactcttctctggcatcaataatgggatgatactgccatggtgtgagcagcttgaggtgttgtgccatcattcagttgggggcttcatgacccattgcgggatgaactcgacacttgaaggcgtcttcgctggtgtgcctatgcttgccttaccactgttttttgatcaaccgattgatgggcgattaattgtggaagagtggaagattggccttgccgttagggattgggctagcaagggtggtctgatcgggagagaggatattgcacgggctgtgaagaagctgatgtcttctgatgaaactgggacaaaggcgctgagggaacgtgctcttgagttgaaggaggcttctcgcagagcagtcaatgagggtggatcttcatactgcaatctgagttcattgatggagacggtatgcactccaaaataattggaattgtatttggtatgtgctaaaacactgtagtggtggtgtaacctgtaaccatcatgcttcaaatatcaattctacaatcaacccttgcgcagctcaactctttagaatttgtgcaactttcggaaagggtgatgatgcgattgatgtacgatttgttcaatacgttgttattttgtccgagctccatttggattgtacttatagcaaaatgtcttcgtttcaagatagctgcgaattagcttgaagtttcaaatttacagcagcctttgaattgtacttatagcaaaatggattgtacttaccattttgatcctgaagacttgagcagcctttgaaggacaagggtgtttgggtctggtttttgtaaggaaaaataacatttgatcaatgaattttggtgtttaataatcaaacata

SEQ ID NO: 36232 - DNA, 1846 bp, Zea Mays
ataatcgctccagtcaaatctcctctatgtacaggaggtgatagtcttcagcccagctcgctctgcagtcttcgcgtagcaaaaacaatggccacagcggcggcagctcggcacgtggtcgcagtgccgtaccccggccgaggtcacgtcaaccccatgctcgtcgtgtgccgcctgctcgccgccgcggacgctgccttgagcgtgaccgtcgtcgtcacagaggagtggcacgcgctgctggccgcagcgggggtgcccggcacgctccccgaccgcgtccgcctcgccaccatccccaacgtcatcccctccgagagggtccgcggcgccgacttcgcaggcttcgtcgaggccgtgcatatcaagatggtggcgcccgtcgagcggctgctggaccggctgtccctggagcggaagccggacgccatcgtggccgacaccttcctggcttggggcgttggggttggatctgcgcgggggataccggtgtgctcgctgtggacgcaaccggccacgttcttcttggcgctctggcacctggaccgttggccgccggtggatggtcatcaaggggaagaaggcctaagctgcaggtccctggatcaatatctcccgttcccagccctcgcgccggtaaaatgttctgatatgaagaccctccgctccatggtgctgccaatgaaacggctagcgcaggtgttctccaacctgcgcaaggcacagtgtgtcctcttcacctccttctacgagctcgaaaccggcgccatcgatggaacatcgcaagtggttccatgccctatatatgcagttggcccttcaattccatatatgccactggaaggtgattcgggcgagtttcaccatgaagaagactacttcggttggctggatgcccagccaagaagctcggtactgtacgtctcatttggcacccatgtctcgatgccttcgtctcagctggaagaggtcgccctggggttgcatgaaagcacggttaggttcttctgggtggcccgggacagagctagcaccgccacccttgagcagatctctgctggtggcaagggcttggtggtgccgtggtgtgaccaactgaaggtcctgtgccacccctccgtcggtggcttcctgagccattgtgggtggaactcgaccctggaggccgtgttcgctggagtgccgatgcttgcctttcccgttgcttgggatcagctggtgattggccatctcgtggctgatgagtggaagatcggcgtcgacttgagggaacggagaagggaggatggtgttgtcggaagggccgcgatctgcgatactgtaacgaagcttatggatttgactgacgatgatagcctagagatgagaagaagggctgcggagctgagagaggcttcacgccgcgcagttcaggaagtttcagggggacagaactgttgctcgtaggcagaaacgttgtgctcctgcaagtaaaggagtatagctgcacattttctgaagctgaaaacagaagacttgatgctgtctgtagcaaagatgggggacagcgatagtgatggcacaaaaaattctgtgctcctggacttgtgtaggttatgcacgtgatgagcaagcgtgtatatagccataaaaaatattgttttacatcgtatattatttatatagtaaagtttggataagaagtgtgatggggaaggataagaaagacttctagagcagcctaaaaatattaatatcgtggaataatcaagagctttgtatcgtaacagagtttatatgtacttcttaaaaaagtggtgttgtattttatataccaaagtttataggttaatgatgtggtgtcaag

SEQ ID NO: 36233 - DNA, 1851 bp, Zea Mays
ataatcgctccagtcaaatctcctctatgtacaggaggtgatagtcttcagcccagctcgctctgcagtcttcgcgtagcaaaaacaatggccacagcggcggcagctcggcacgtggtcgcagtgccgtaccccggccgaggtcacgtcaaccccatgctcgtcgtgtgccgcctgctcgccgccgcggacgctgccttgagcgtgaccgtcgtcgtcacagaggagtggcacgcgctgctggccgcagcgggggtgcccggcacgctccccgaccgcgtccgcctcgccaccatccccaacgtcatcccctccgagagggtccgcggcgccgacttcgcaggcttcgtcgaggccgtgcatatcaagatggtggcgcccgtcgagcggctgctggaccggctgtccctggagcggaagccggacgccatcgtggccgacaccttcctggcttggggcgttggggttggatctgcgcgggggataccggtgtgctcgctgtggacgcaaccggccacgttcttcttggcgctctggcacctggaccgttggccgccggtggatggtcatcaaggggaagaaggcctaagctgcaggtccctggatcaatatctcccgttcccagccctcgcgccggtaaaatgttctgatatgaagaccctccgctccatggtgctgccaatgaaacggctagcgcaggtgttctccaacctgcgcaaggcacagtgtgtcctcttcacctccttctacgagctcgaaaccggcgccatcgatggaacatcgcaagtggttccatgccctatatatgcagttggcccttcaattccatatatgccactggaaggtgattcgggcgagtttcaccatgaagaagactacttcggttggctggatgcccagccaagaagctcggtactgtacgtctcatttggcacccatgtctcgatgccttcgtctcagctggaagaggtcgccctggggttgcatgaaagcacggttaggttcttctgggtggcccgggacagagctagcaccgccacccttgagcagatctctgctggtggcaagggcttggtggtgccgtggtgtgaccaactgaaggtcctgtgccacccctccgtcggtggcttcctgagccattgtgggtggaactcgaccctggaggccgtgttcgctggagtgccgatgcttgcctttcccgttgcttgggatcagctggtgattggccatctcgtggctgatgagtggaagatcggcgtcgacttgagggaacggagaagggaggatggtgttgtcggaagggccgcgatctgcgatactgtaacgaagcttatggatttgactgacgatgatagcctagagatgagaagaagggctgcggagctgagagaggcttcacgccgcgcagttcaggaagtttcagggggacagaactgttgctcgtaggcagaaacgttgtgctcctgcaagtaaagtgcaggagtatagctgcacattttctgaagctgaaaacagaagacttgatgctgtctgtagcaaagatgggggacagcgatagtgatggcacaaaaaattctgtgctcctggacttgtgtaggttatgcacgtgatgagcaagcgtgtatatagccataaaaaatattgttttacatcgtatattatttatatagtaaagtttggataagaagtgtgatggggaaggataagaaagacttctagagcagcctaaaaatattaatatcgtggaataatcaagagctttgtatcgtaacagagtttatatgtacttcttaaaaaagtggtgttgtattttatataccaaagtttataggttaatgatgtggtgtcaag

SEQ ID NO: 36234 - DNA, 826 bp, Zea Mays
ctccagccgtttctgcaaggacaaacaaagccaaccaggcccatgaccatggcgatcaattctatctctacggtgcttggaagttggaacttggacgcgataaattcagaggccgcgaagcgcacctccatgacttgcttctcgtagtccctgagctggtgcgcgtaggtcatgtccttgttggccacccggaacatgtaggtggagatccaccccaccgtcatcccgagcaccaccagcagctgcacgacgttgccggcctcgagcccgtacttgaggccgacgccgaaggcggtgacgccgaggccgatcagcagcacgtctttcctcgtgtacccgaacggcgcctgcacgcgaccgtagtaccccgctcgatcggttagtttttgtgcgtgctttgtgtttggtggtgtgggggcgtggattaccttctcttgtttcggggattgggagtcatccgtgctgctctccgaggtgctgctccgtgccgccaagcgccgcctctgcctggcggatctgagcaggccggtccgtggtggcagcagcacgattttggcttaggggggagcacgaagcagtaaaaagaaaaggattggattccgaccaaattaaccagcgcaagatggcgagaaagataagagagttgcagtggcacgtactggaagagtggaaagggtgcagggaggctaccctggcggagcggacggcgccggcgggggcgagcgcagctgccgcgcgggagaccgaagccacgggagcggccaccggtgccggagccattgcctgacgcgctactcccgctcggctcggccgcacgccagtaagt

SEQ ID NO: 36235 - DNA, 1250 bp, Zea Mays
cacaaattcgcaacagcagcagcaggtttcaaaacagggaacgcagcagatgccaggacgccgacggctcacacgtccgaagggacacgcctgtacagttcctccttgtccaggcgcggcgtggcgacggcctgcagcggcgtggccatgaaggtgacgagcccgggggactccatcatgctcacgtcctcgggacaggtcccgctcggcagcgtccacgtgaagtggtgcagcatgtggccgatcatggacgccacgaggttgatcccgagctgcgcgccggggcacacccggcggccggcgccgaacggcagcacgcggaagtcggcgcccttgatgtcgatgttctcccggaggaaccgctccggccggaactcgagcgggctgtcccacacctcggggtcgcgcgccaccgcccacacgttgacgacgacgttggcgcccttggggatgtcgtagccggcgatcttgacgctggcgctggccctgtgggggagcatcagcggcgtcggcgggtgcaggcgcagggactccttgacgacggcctgcaggtaaggcaggttcgggaagtccgtctccgacaggacccggtcgcggccgacgacacggtccagctcctcctgcagcttctcctgcactctggggttcctcagcagctccgccatcgcccactccaccgagatcaccgtcgtgtccgtgccggcggtgatcatgtcctggacaacacaacccacgtacgcagcaagccggtcgatggccagtctcatcagtcagtgaatacaatcaagcacacaaacagatcggcacggaacggaagaaagatggacgggccacattaggcagaggcagcgcgcgtacccagaggaggcctatgacggtgtcatcgctgaggtcgtacttgtccctgagagtgaagagcgcgtcgacgaagtgctgctgggcgccgcgctgcttgagggccctggcgtgctcctccatgatcttcacggtgaggcggtcgcgccgttcgccgtgggctttgaaggcctgctcgtcgaccggggccagccagcgtagccacgggatgtgctgcgcgatggagagggacgcaccgatcttgatgccgttgtggacgatccccttgaactcgcgcccttgctcgtccagctcgccggccgcgtccacgaaccgcttcccgaaggccagccgcgtgatgttgttgaaggccaccatcgagaggtggttctttacaaccaacggcttccctgcac

SEQ ID NO: 36236 - DNA, 1029 bp, Zea Mays
ttaaaccttgtactattgaaaatgctcttaatctcattgaaaaatcgaggatcgaatccactgccatctctatccatatccgtagcgtgacgcgtccggaacacgtgttacgacggcgtagcttcagtgtagaagcctagaagggtaaaatgtcctccctttccctttccaatccccacgccgccacaacaatatcgcattgacatatcgttcatcggatccagtcctctcccgggatctcctccggctataaatttccggccccaattcacccaatccagatgcgcaaacatcgaatcgtctcgctagtggctgccctactcgtgctgcttgccctcgccgccgtttcctccacgcgcagcgcacaaaaggagtccgcggctgacaacgccgggatgttggcaggcggcatcaaggacgtgccggcgaacgagaacgacctccagctccaggagctcgcgcgcttcgccgtcaatgagcacaaccaaaaggccaatgctcttctggggttcgagaagcttgtgaaggccaagacacaagtggttgctggcacgatgtactatctcactattgaagtgaaggatggcgaagtcaataagctctatgaagctaaggtctgggagaagccatgggagaacttcaagcagctgcaggaattcaagcctgttgaagagggtgctagcgcctaaggttgtggccacagcccggctctcgcaggatctgtcgtctccctgtgcaatttgctgcctgaagcgcaaaactaagttgcagaataaggagctgcttcggaacatgccagagcatgcaccctcgcgtattttcataaaatcagtgctcttaatgtaatatcttgaattgccgtgccatgtgtaataagtaatatcatgaataacagttgctattatgggttctaaatgtgtattaacagccatccatggcagagttctcatattactttgctgaagtctttgttggaatatacatgacagaattctcacattgccttgctgaagtctttgttggaatttt

SEQ ID NO: 36237 - DNA, 529 bp, Zea Mays
caccacacaggaacggccaagcattcttcatgccaattagttggaagcacaattgttggtattggttcaccggatcctcctgcattcgtgtatgacgatgaagactacaaggatgtttttgtgtcagaggcttgcttgctcactcgcgacgagaacgagtggtacagggaaccaatctcggccaatgccacgtctggcaaagaaggtttgcaagcctcggttgctgactgatttaagtcaggttctgtatcagttttgtgactattatacagatacaggatttgatcaacgcctcgacatggtaggaaagaacactacggtataggcggggattgttcacaagacaatctggttctggaatggaccattttcagtatagcaactattgatttgagcaacagtcagactaatggttccaggagaaatttatcccgtagatgtataaggatcaaatgaacaagggaaaatgactttctccgtgaatttttaacaatacaagcacacgtagttttgaaacaattatgcaaat

SEQ ID NO: 36238 - DNA, 1670 bp, Zea Mays
atggccaaacacatggtgatgacaaggaacgccgaacgcgaccttgaccggagcagacgtttggagtctcagaccaatcgtcatatccgaccccataattttatttcgacatatcaagtctaaagcaagcgcactactcctcggatagccacggcagcagcagcagccatggcttgctccgcgcaccttgtgtcccagagcctctactcgtcccaccgcgccagcccgggcgggcctaggaatctccgttcccagggccgaccgccggcgcgggcgtctccctctgcgaggcctggctcaagggtcagtggctgccggggtgtcagcctgagagtcgccgcgtcgttcgagcagggaaggaggcaagtggaggtctcttatgacccacaagcgaggtttaaccagatagcagaccaaattgacaaggatgctgggatgacacggcttaacctattctcaccttgcaaaattaatgtgttcttgaggataacgggcaagagaccagatgggttccatgacctggcttctctatttcatgtcataagtttgggtgatactatcaaattctcattgtcaccaagtaaaagtagagatcgcctgtcaaccaatgttccaggtgtcccagttgatgaaagcaatttgatcatcaaggcactcaacctttaccgacagaaaactgggactaataacttcttctggatacatcttgataagaaggtcccaactggtgctggtcttggtggtggaagcagtaatgctgcaactgcactatgggccgctaaccagtttgctggctgcatagcttcagagaaggatcttcaagagtggtctggtgagattggatcagatatcccctttttcttttcacgaggagcagcatattgtacagattgtccaagatatcccaaatcccttgccggaaaatttaccaatggttcttataaagccacctgaagcatgctcaactgctgaagtttacaagcgattcaggttggaacaaacaagtcaagctgatcccatgaccctgctcgaggaaataactcagaatgggatatcacaagatgtttgtgttaatgacctagagcctccagcttttgaggtgttgccctcacttaagaggttgaagaaacgaattattgcagctggccgggatgattatagtgctgtttttatgtcaggaagtggaagcacaattgttggtattggttcaccggatcctcctgcattcgtgtatgacgatgaagactacaaggatgtttttgtgtcagaggcttgcttgctcactcgcgacgagaacgagtggtacagggaaccaatctcggccaatgccacgtctggcaaagaaggtttgcaagcctcggttgctgactgatttaagtcaggttctgtatcagttttgtgactattatacagatacaggatttgatcaacgcctcgacatggtaggaaagaacactacggtataggcggggattgttcacaagacaatctggttctggaatggaccattttcagtatagcaactattgatttgagcaacagtcagactaatggttccaggagaaatttatcccgtagatgtataaggatcaaatgaacaagggaaaatgactttctccgtgaatttttaacaatacaagcacacgtagttttgaaacaattatgcaaat

SEQ ID NO: 36239 - DNA, 1608 bp, Zea Mays
atggccaaacacatggtgatgacaaggaacgccgaacgcgaccttgaccggagcagacgtttggagtctcagaccaatcgtcatatccgaccccataattttatttcgacatatcaagtctaaagcaagcgcactactcctcggatagccacggcagcagcagcagccatggcttgctccgcgcaccttgtgtcccagagcctctactcgtcccaccgcgccagcccgggcgggcctaggaatctccgttcccagggccgaccgccggcgcgggcgtctccctctgcgaggcctggctcaagggtcagtggctgccggggtgtcagcctgagagtcgccgcgtcgttcgagcagggaaggaggcaagtggaggtctcttatgacccacaagcgaggtttaaccagatagcagaccaaattgacaaggatgctgggatgacacggcttaacctattctcaccttgcaaaattaatgtgttcttgaggataacgggcaagagaccagatgggttccatgacctggcttctctatttcatgtcataagtttgggtgatactatcaaattctcattgtcaccaagtaaaagtagagatcgcctgtcaaccaatgttccaggtgtcccagttgatgaaagcaatttgatcatcaaggcactcaacctttaccgacagaaaactgggactaataacttcttctggatacatcttgataagaaggtcccaactggtgctggtcttggtggtggaagcagtaatgctgcaactgcactatgggccgctaaccagtttgctggctgcatagcttcagagaaggatcttcaagagtggtctggtgagattggatcagatatcccctttttcttttcacgaggagcagcatattgtacaggtagaggagagattgtccaagatatcccaaatcccttgccggaaaatttaccaatggttcttataaagccacctgaagcatgctcaactgctgaagtttacaagcgattcaggttggaacaaacaagtcaagctgatcccatgaccctgctcgaggaaataactcagaatgggatatcacaagatgtttgtgttaatgacctagagcctccagcttttgaggtgttgccctcacttaagaggttgaagaaacgaattattgcagctggccgggatgattatagtgctgtttttatgtcaggaagtggaagcacaattgttggtattggttcaccggatcctcctgcattcgtgtatgacgatgaagactacaaggatgtttttgtgtcagaggcttgcttgctcactcgcgacgagaacgagtggtacagggaaccaatctcggccaatgccacgtctggcaaagaaggatttgatcaacgcctcgacatggtaggaaagaacactacggtataggcggggattgttcacaagacaatctggttctggaatggaccattttcagtatagcaactattgatttgagcaacagtcagactaatggttccaggagaaatttatcccgtagatgtataaggatcaaatgaacaagggaaaatgactttctccgtgaatttttaacaatacaagcacacgtagttttgaaacaattatgcaaat

SEQ ID NO: 36240 - DNA, 1614 bp, Zea Mays
atggccaaacacatggtgatgacaaggaacgccgaacgcgaccttgaccggagcagacgtttggagtctcagaccaatcgtcatatccgaccccataattttatttcgacatatcaagtctaaagcaagcgcactactcctcggatagccacggcagcagcagcagccatggcttgctccgcgcaccttgtgtcccagagcctctactcgtcccaccgcgccagcccgggcgggcctaggaatctccgttcccagggccgaccgccggcgcgggcgtctccctctgcgaggcctggctcaagggtcagtggctgccggggtgtcagcctgagagtcgccgcgtcgttcgagcagggaaggaggcaagtggaggtctcttatgacccacaagcgaggtttaaccagatagcagaccaaattgacaaggatgctgggatgacacggcttaacctattctcaccttgcaaaattaatgtgttcttgaggataacgggcaagagaccagatgggttccatgacctggcttctctatttcatgtcataagtttgggtgatactatcaaattctcattgtcaccaagtaaaagtagagatcgcctgtcaaccaatgttccaggtgtcccagttgatgaaagcaatttgatcatcaaggcactcaacctttaccgacagaaaactgggactaataacttcttctggatacatcttgataagaaggtcccaactggtgctggtcttggtggtggaagcagtaatgctgcaactgcactatgggccgctaaccagtttgctggctgcatagcttcagagaaggatcttcaagagtggtctggtgagattggatcagatatcccctttttcttttcacgaggagcagcatattgtacaggtagaggagagattgtccaagatatcccaaatcccttgccggaaaatttaccaatggttcttataaagccacctgaagcatgctcaactgctgaagtttacaagcgattcaggttggaacaaacaagtcaagctgatcccatgaccctgctcgaggaaataactcagaatgggatatcacaagatgtttgtgttaatgacctagagcctccagcttttgaggtgttgccctcacttaagaggttgaagaaacgaattattgcagctggccgggatgattatagtgctgtttttatgtcaggaagtggaagcacaattgttggtattggttcaccggatcctcctgcattcgtgtatgacgatgaagactacaaggatgtttttgtgtcagaggcttgcttgctcactcgcgacgagaacgagtggtacagggaaccaatctcggccaatgccacgtctggcaaagaagatacaggatttgatcaacgcctcgacatggtaggaaagaacactacggtataggcggggattgttcacaagacaatctggttctggaatggaccattttcagtatagcaactattgatttgagcaacagtcagactaatggttccaggagaaatttatcccgtagatgtataaggatcaaatgaacaagggaaaatgactttctccgtgaatttttaacaatacaagcacacgtagttttgaaacaattatgcaaat

SEQ ID NO: 36241 - DNA, 1527 bp, Zea Mays
ccgagcggcgccactccgggttagcagcaacaatactgtgggattatatgagatgagaaggagactactagactagcagccgtatcactcactactcgctgcccgcgcccgatcgggcgcactgccctgtggtgtactggtgtgtcacgcccctcgtcactcaccccgtcacccgcaaccccatcttctattcttcccgacggcgctcctggcagcaggtctcttatgacccacaagcgaggtttaaccagatagcagaccaaattgacaaggatgctgggatgacacggcttaacctattctcaccttgcaaaattaatgtgttcttgaggataacgggcaagagaccagatgggttccatgacctggcttctctatttcatgtcataagtttgggtgatactatcaaattctcattgtcaccaagtaaaagtagagatcgcctgtcaaccaatgttccaggtgtcccagttgatgaaagcaatttgatcatcaaggcactcaacctttaccgacagaaaactgggactaataacttcttctggatacatcttgataagaaggtcccaactggtgctggtcttggtggtggaagcagtaatgctgcaactgcactatgggccgctaaccagtttgctggctgcatagcttcagagaaggatcttcaagagtggtctggtgagattggatcagatatcccctttttcttttcacgaggagcagcatattgtacaggtagaggagagattgtccaagatatcccaaatcccttgccggaaaatttaccaatggttcttataaagccacctgaagcatgctcaactgctgaagtttacaagcgattcaggttggaacaaacaagtcaagctgatcccatgaccctgctcgaggaaataactcagaatgggatatcacaagatgtttgtgttaatgacctagagcctccagcttttgaggtgttgccctcacttaagaggttgaagaaacgaattattgcagctggccgggatgattatagtgctgtttttatgtcaggaagtggaagcacaattgttggtattggttcaccggatcctcctgcattcgtgtatgacgatgaagactacaaggatgtttttgtgtcagaggcttgcttgctcactcgcgacgagaacgagtggtacagggaaccaatctcggccaatgccacgtctggcaaagaaggtttgcaagcctcggttgctgactgatttaagtcaggttctgtatcagttttgtgactattatacagatacaggatttgatcaacgcctcgacatggtaggaaagaacactacggtataggcggggattgttcacaagacaatctggttctggaatggaccattttcagtatagcaactattgatttgagcaacagtcagactaatggttccaggagaaatttatcccgtagatgtataaggatcaaatgaacaagggaaaatgactttctccgtgaatttttaacaatacaagcacacgtagttttgaaacaattatgcaaat

SEQ ID NO: 36242 - DNA, 1889 bp, Zea Mays
agcccttggtagaaacatcgtgctgccccaagtcgcctgctagtcctcaaattgaacgtcctgatgtagaccaagctccgtagtgcccaatagagatccttgatgcccaacttgattcatcttttgagatcttccccacgtagatcaagctgctccttccatctcgccttgaatcaagcttgtctcgtggaatcaatctcttgccaagcagaatcggcttggctctcccatggatgagctcatggtatgtgagaaggggcagagagaggagaacccagcaaaggaactaaacagacaagcaaatctcatcttcctttgcagagtgagatgaggcgaggatggctaagcatggtgggactggcaaaggttgcaaacatgcccttaattacggaggatgggaccatgtgctgaccgaatccaaataaaatggtagggtcggatttctccagaatcactctgctgcaatccaaacatgctcttaatctaccgctgctgaaggaacaagatgtccaatagggccacacattggtgttatgcctgtcggcggccaattcgtctccgtgggcaggatatcgcatgccccaactgcaatgatggttttatccaggaaattagtgagatgggtggcatattgaacacttatgggctaattgaaccagactttgaagagcgtcgagctagaagattcggaatgatggatgccatgtcttcccttatgcggcaacggatggaagaaatgggaagagatggtttgtttgatattcgtggtagacaaggaacaggtactgaatatggaaggaggccaactgctgttcctacattggtatttggcggcatcccttctcctggagttgatagcggtgatgttaatgttgtcctcaggggaggccgcagagttggcgctgcccaaccaaatttcagtagtttagttgttggtcccagtctggaagccctttttgagcagctacttctccagaacaaccgtcaaggcccagcacctgctccacagtcagctattgactccatgcctgtggtaaagataaaccgcaggcatcttgacgacgatccacagtgcgcagtttgcaaagacaaattcgaggttggagcagaggcacgggagatgccatgcaagcacctgtaccatactgactgcatcatcccctggctggttcagcacaattcttgccctgtttgccgccatccactgccatcacagagatcaggcagtaccagtagcgcccggccttcagcttactacaacgaagccgctgatcctcctggggtcaccagagcagatcttgaacctgctccaagagacggtggcagggaaagccaggaaaggcgccgctccttctcgtttctgtggccgtttggcccgtcgagttccagatccagttcttaccagtacgaacagaatgttgatgagcctgcagtatacgatccaaaccagatagcatattctgagtggcactatgaccactgactgaaaccctgcagcaatcgcaagctatctgcaattcgtgccttcaaccctcagctttggagaggcattcatcagctgtaatggctgcttgccgtataaaaaaaggatggttcttgcctgttatattgtgttcagtgcatagccttgctccgtatgtccgtcgtatatataatcccttgcgtgtagtaagcgatgaactgaatgcatccagaatatcatgtcatgataaacttgaatatagtttcatggttgttatttcagactgaaaataaaatcagtcttctgttccggttatactgatttctgaaagaattctagacctccgttcttgaatatttgttgtctgttttatatttgttgtccatttgttgtccgttttatatttgttgtccgttttatttctgag

SEQ ID NO: 36243 - DNA, 1437 bp, Zea Mays
gttgctttctccgctcttctggagtagagggaaaccctcaagaaatgaacaagatgtccaatagggccacacattggtgttatgcctgtcggcggccaattcgtctccgtgggcaggatatcgcatgccccaactgcaatgatggttttatccaggaaattagtgagatgggtggcatattgaacacttatgggctaattgaaccagactttgaagagcgtcgagctagaagattcggaatgatggatgccatgtcttcccttatgcggcaacggatggaagaaatgggaagagatggtttgtttgatattcgtggtagacaaggaacaggtactgaatatggaaggaggccaactgctgttcctacattggtatttggcggcatcccttctcctggagttgatagcggtgatgttaatgttgtcctcaggggaggccgcagagttggcgctgcccaaccaaatttcagtagtttagttgttggtcccagtctggaagccctttttgagcagctacttctccagaacaaccgtcaaggcccagcacctgctccacagtcagctattgactccatgcctgtggtaaagataaaccgcaggcatcttgacgacgatccacagtgcgcagtttgcaaagacaaattcgaggttggagcagaggcacgggagatgccatgcaagcacctgtaccatactgactgcatcatcccctggctggttcagcacaattcttgccctgtttgccgccatccactgccatcacagagatcaggcagtaccagtagcgcccggccttcagcttactacaacgaagccgctgatcctcctggggtcaccagagcagatcttgaacctgctccaagagacggtggcagggaaagccaggaaaggcgccgctccttctcgtttctgtggccgtttggcccgtcgagttccagatccagttcttaccagtacgaacagaatgttgatgagcctgcagtatacgatccaaaccagatagcatattctgagtggcactatgaccactgactgaaaccctgcagcaatcgcaagctatctgcaattcgtgccttcaaccctcagctttggagaggcattcatcagctgtaatggctgcttgccgtataaaaaaaggatggttcttgcctgttatattgtgttcagtgcatagccttgctccgtatgtccgtcgtatatataatcccttgcgtgtagtaagcgatgaactgaatgcatccagaatatcatgtcatgataaacttgaatatagtttcatggttgttatttcagactgaaaataaaatcagtcttctgttccggttatactgatttctgaaagaattctagacctccgttcttgaatatttgttgtctgttttatatttgttgtccatttgttgtccgttttatatttgttgtccgttttatttctgag

SEQ ID NO: 36244 - DNA, 1416 bp, Zea Mays
cacacgccgagcggcgccactccgggaacaagatgtccaatagggccacacattggtgttatgcctgtcggcggccaattcgtctccgtgggcaggatatcgcatgccccaactgcaatgatggttttatccaggaaattagtgagatgggtggcatattgaacacttatgggctaattgaaccagactttgaagagcgtcgagctagaagattcggaatgatggatgccatgtcttcccttatgcggcaacggatggaagaaatgggaagagatggtttgtttgatattcgtggtagacaaggaacaggtactgaatatggaaggaggccaactgctgttcctacattggtatttggcggcatcccttctcctggagttgatagcggtgatgttaatgttgtcctcaggggaggccgcagagttggcgctgcccaaccaaatttcagtagtttagttgttggtcccagtctggaagccctttttgagcagctacttctccagaacaaccgtcaaggcccagcacctgctccacagtcagctattgactccatgcctgtggtaaagataaaccgcaggcatcttgacgacgatccacagtgcgcagtttgcaaagacaaattcgaggttggagcagaggcacgggagatgccatgcaagcacctgtaccatactgactgcatcatcccctggctggttcagcacaattcttgccctgtttgccgccatccactgccatcacagagatcaggcagtaccagtagcgcccggccttcagcttactacaacgaagccgctgatcctcctggggtcaccagagcagatcttgaacctgctccaagagacggtggcagggaaagccaggaaaggcgccgctccttctcgtttctgtggccgtttggcccgtcgagttccagatccagttcttaccagtacgaacagaatgttgatgagcctgcagtatacgatccaaaccagatagcatattctgagtggcactatgaccactgactgaaaccctgcagcaatcgcaagctatctgcaattcgtgccttcaaccctcagctttggagaggcattcatcagctgtaatggctgcttgccgtataaaaaaaggatggttcttgcctgttatattgtgttcagtgcatagccttgctccgtatgtccgtcgtatatataatcccttgcgtgtagtaagcgatgaactgaatgcatccagaatatcatgtcatgataaacttgaatatagtttcatggttgttatttcagactgaaaataaaatcagtcttctgttccggttatactgatttctgaaagaattctagacctccgttcttgaatatttgttgtctgttttatatttgttgtccatttgttgtccgttttatatttgttgtccgttttatttctgag

SEQ ID NO: 36245 - DNA, 1644 bp, Zea Mays
gcgggcccgtgagcgtgcagtgctgagtacacacgccgagcggcgccactccgggttagcagcaacaatactgtgggattatatgagatgagaaggagactactagactagcagccgtatcactcactactcgctgcccgcgcccgatcgggcgcactgccctgtggtgtactggtgtgtcacgcccctcgtcactcaccccgtcacccgcaaccccatcttctattcttcccgacggcgctcctggcagcaggaacaagatgtccaatagggccacacattggtgttatgcctgtcggcggccaattcgtctccgtgggcaggatatcgcatgccccaactgcaatgatggttttatccaggaaattagtgagatgggtggcatattgaacacttatgggctaattgaaccagactttgaagagcgtcgagctagaagattcggaatgatggatgccatgtcttcccttatgcggcaacggatggaagaaatgggaagagatggtttgtttgatattcgtggtagacaaggaacaggtactgaatatggaaggaggccaactgctgttcctacattggtatttggcggcatcccttctcctggagttgatagcggtgatgttaatgttgtcctcaggggaggccgcagagttggcgctgcccaaccaaatttcagtagtttagttgttggtcccagtctggaagccctttttgagcagctacttctccagaacaaccgtcaaggcccagcacctgctccacagtcagctattgactccatgcctgtggtaaagataaaccgcaggcatcttgacgacgatccacagtgcgcagtttgcaaagacaaattcgaggttggagcagaggcacgggagatgccatgcaagcacctgtaccatactgactgcatcatcccctggctggttcagcacaattcttgccctgtttgccgccatccactgccatcacagagatcaggcagtaccagtagcgcccggccttcagcttactacaacgaagccgctgatcctcctggggtcaccagagcagatcttgaacctgctccaagagacggtggcagggaaagccaggaaaggcgccgctccttctcgtttctgtggccgtttggcccgtcgagttccagatccagttcttaccagtacgaacagaatgttgatgagcctgcagtatacgatccaaaccagatagcatattctgagtggcactatgaccactgactgaaaccctgcagcaatcgcaagctatctgcaattcgtgccttcaaccctcagctttggagaggcattcatcagctgtaatggctgcttgccgtataaaaaaaggatggttcttgcctgttatattgtgttcagtgcatagccttgctccgtatgtccgtcgtatatataatcccttgcgtgtagtaagcgatgaactgaatgcatccagaatatcatgtcatgataaacttgaatatagtttcatggttgttatttcagactgaaaataaaatcagtcttctgttccggttatactgatttctgaaagaattctagacctccgttcttgaatatttgttgtctgttttatatttgttgtccatttgttgtccgttttatatttgttgtccgttttatttctgag

SEQ ID NO: 36246 - DNA, 1221 bp, Zea Mays
ctacacatatcctcgagagccactttcgccaaggtccccataggccataggttgccctgcgggttttacaaaacaagaagaaaaaaaatcacctgctcaacggcggcatcatcggcaagacggcgggtttctgtaccaatctcagcctccccatgtcctgggcggtttcccttgaaggcttgaactagaaggtgtgaaatcgtacggatgtcgatggtgacccactcgctgtcgctgtggatgacgaccctccacatgagggcgcccacgttgctccccgccgtagtcgcgctggacggcttggcggccgcggtagcctggtggcgccagggcgagcgagatcgtgaggtagtggccaatagaagacggcacggcggcggcacgcggccatgcgggcgcagtgagactcgatccccgtcggcggcggcgtggagtcgtgtctatctgattccaggaatcaagcgtattgtggtgaacatgaactccacatcttctcagcgtggttaccctgccaagaggtggtgtgcagcgaacatgagctccacatctatgcgtcactctgcatggaagtctgagccctggactcaccttacccacaaacagagacgaccacaatggattgcttataatccaaggacaatgaggcctccaccacttagcactgataccaattctatgaagattctgtcctggaacgttaatggactgcaagctattgtacagtcagggttttctgcagatgaattggttgccagagagaactttgacgtcttatgtcttcaagagacacacttggaggagcgcaatgttgacctttttaaaaacctggtacatgaatatgattacacctgttggtcatgcagtgttgcaaggcttggttattcaggaactgctgttatatcacgggtacaaccaatctcagttcaatatgggcttggcataccagagcatgatcaggaaggcaggcttattaccttggagtttgatgatttttacttggtcaatgcttatgtcccaaattctggccgtggtttacgtagactgaattacaggatcaatgattgggatccatgctttagcgacttcataaagaaactggaatgttctaaaccagtaattgttgctggggatctaaactgtgctcgtcaaagtattgacattcacaatcctcaagtgccaattttgttaaggggaattgcagactttattttacattgttag

SEQ ID NO: 36247 - DNA, 2390 bp, Zea Mays
gtccaatcttctcccacagcaactcgttccttccccgcatcccttgccgtacttcgacgtccgcacggtctcggccgctcgctgataaataaacgcagtgaccagtgacgcgcacggatcaatcacgtaaaggcgagaccgcaaggacaccgagctacttcgaatacgaatacgagctcagcctgttccgagatggacgacgagagcgaggcgagagcaatgccgcggcggcccacgccgccgtcgccacccccgtgggaggcgctccacctcgtcgcgccgttcctcgacgccgcatccctcgcggcggcgtcctgcgtgtccacctcgtggcacaccgccttcgccgcggacgacctctgggcgcggctctgcgcgcagcacttcccctccgcgctgggcctcctccccgacaccgacagcgaccggcggtgctcctccccaccccaccgacgcctgttcaagctgttccgctccgcgtccgtccgctgccgcgcgctcccggccccgcgcctcgccctcgcggacgtctcgttcgccgtcgacgtcgtcacggccggcggcgacagcacgctgtccttcctggtagccgcggacaaggccgcccacgtcgagaattccgcggggctgttcctgttcggggtcgacctgagcggtcggaacggggcgatcgggccaggggagtggcgcgtcaggtggacggcggtgcggacggcggcgcgccgcggcgaggaacccgcggcggtcctgatgatggacgccaaggtgccggcggcaagggcggcaggagccgtcgccttcggcggcagaggtgaggcgggggtctcggcgaggctgcccgcgcccggctgcggcggcgccaagctggacgcggaggtggtggtagagctggctggggaggagaaggccgtcgggaaggtgaggctcggagtgatgtgcgagtgtcggtacgtgtgcgccgacgaggggctccggtacctgcagcatttcctcgtgtgatgtaaaacgcacgtgattcttcgatgatctcgtgcacgcggtcgaatgagaactccgcttgagggaagcagagtagtgtagctgtggaggtagtgcaatgaactgaaccccgaagtctcatttgttgttttcgccgtttaataatggtttcatcttgtagttgttcatatactttttcggacatctttgtgtgtgtgtgatgattctcagattaaagcatcttcaagagttctcaaaacattatcctattcctttccaattcttggttttgtattccagttcttgtttttttacaatatccaaaaaaacatctctatcctgattcctgacagcccagtcaattcttgtttgtttacaatatccaaaaaaacatctctatcttgataagttcgaacatactccgttgatcatcttggtgagccttgtctttaatccatattgtttttactacttctacattatttttgtttctataaaggctttaattcgaaatctgtatcgacttttactactactacactatttttgtctctacgaattagagttagagttaggctttaatcaaagtgtgtcaatctcaagtgtgtgtctccagtctcggcagagttgaaacgtgttacactgtcatgatatatcacatcatgatcctaccgattcagcttacctacgttaggtcagatggagtttatcgatgtgtatttagagttttagacgttccactactgtccgtagataatggttcggttaaatacgttgtttcatatgctgtccgtaggtaacgttcggttacctgcattcggtcagatgggatatattgatcgtgcattcagacgttcggtctgatggagtctactgattgtgttttagtcgtgttacacttacaccacgacgaccctgccgctgccgacgcagactactcggttctgttctgcagccacagatgcagactactcgcgctcggcagccgcatggagtctgtctgtacgtgacgacgctcggcggccggatactacgtgttcagggcacacgaggtgatatgcgacggtgttgtatactgtagttttttctctctgaaagtgaacctctcatccaaacaggactcgatgttgggcttcccaggccggacgtgggaacaacaaacgcgggtacacgtaaggatttttctgaggagaagaggacaggacagagtgtttagggtgtttggtttgagtaataagtaagacatttttttcacttttcactccttactttttaaaaagtttagtttgtgcaatgaaatgagttgatttatcaccatctcgttccttataattagttagtattagtattaacacgagtgcaagatgatagactcatgatgtactacctcatgttggatagtttgattcctc

SEQ ID NO: 36248 - DNA, 2750 bp, Zea Mays
cgtcgatccctctcctcttcgtgatcgtagcgttagcacgaactatatgttagaacagagaaaattcacataagacgaagaaatatccagaaaacaaaatcgcaacaatatcatacccccatcacctccctccaaatctaggtgcacaaaatttttgatgtacaaattgattgatcaaacttggccaaaatttagaagataaaagagaaatataactgcttctaccattaactaccaactaaaactaccaaaaaaatttgagcttgccaaatttcaacagggttaaattgtcacaaaccaaataagccgctcattatttctctacactatttagtcctctagattagattgggataaaaaattcgacctgcggaggtaagagagctcccaggcattatattaaaaaaaataccctctcacgcatgtcgagaaaacccataaacccctgtcccaatcgtacacaacagcattgtagcccaggtgagaatacaaccgcgagcgaaatcaagccttagacttgtgctttggcatgggacagacgagggacttttttaaccacaacctgaaattcactctgatggggagtcaaactcaggacccgaggagtgctactcagaccacctaaccaactcggctagagacccttccacattagattgggatacacgaccaatatccttctcgttcctctactcctctcccaacatctctgtttctattaccaaatttttcggtacatattttctcctatcacctaatttataaccgccactcagagctaatttaccccttcatttggtggaactattttggcctctagattagattaagattttttttctcgagcacgcagaagatatatgtatcattatttaagaagaaaaatgactaaaatggaccagaacatggtacaaagatatataaatgagtccattaaaaactcctaagaaattaccaaaagcctacaaccctagaattaagggtgttaggagagagacacgcttggcccctgccatctcccacgactctcttcttcctcagcccttctaatgacggcctctaaatttggggtgttattcccaaagactcaactatttctatggttccaaagggtccaaaatccaaggaagattaaggtattaagtcccttttcagcaataccttacacctagaggttgatgaaattcctcgcaaatacacatccaattaacagatggtctatggacccatgttcttgatcaaagcgaacatcgttccaggtgttcaagccattgtttttgtaactggtcagataaccacataaaaaacttacagttcgatggagccatgagtgccaaagtctcacacaaagttcaaactggactaatctaatgaaaatgctttcataagtagctttagcttagtgtttgccatcagttgcaaatctgagaatgtgtttgtcctccccttcttggtgcagctcgatcgtgcatcgtgcataagacatattatgcacgatcgagttgtagctcgacagtacctcatgatgacaatacctcacgataggatgaaaaaatggcagtgtgctgctaggggtggtaatggatcgcgatccaaatggttattcacaaaatggtagggccctaaataaattctagttcaaaatgaatggaaatagggtccgatccttgaattttatagtataaaatttagagctcattgtcacccttatgtgctgcagttcgaggagagaaacaagccaaaagtccgacaattattattatttactttagatttagatgccatctttcatgaataattagatcataatttatcaattagctcagatgacgaatggactagactatcttcaatcatatcctctatatgccttctttatagtcttattaaaaagattatctcctttatatctcattcttcttcttctttatacttaccaaaaaccgtatatagaaatcgtagcaatacacgagcaataagaggacaaagaaaaacaaatatgaagaaggcacaggtaaaccatatctttcaagaacaagagaaaataacagcaaacacgctctaaaagacaaaggaaactgaaaggggagtcaggacgctgcatcgagcctgttcttcatacactctaaaagaaaaaggaaaaaatattacctctagaatgcagttcaatctttttttccctagttgcctttcaactgcagtgctgtagataaatcgtataaaagaaaaggctccaagactttgaatggtcttggtatgaacagatcgtttttcttcttgccttccaactgcagatcctacttttgatatggatcacatcaaccaaccccaaggcttttaagggatttttatatgaccaatcctccgatatgtcaatcgcttgtggcagatgacaaaacaaaaccctagcaccgcaaacatgtgctcctctgacggtgggcaccatagaatccaagttgcatatttataggataggaaaccgccctagatattttcgtggtaggaactaactccagatctgttcaagaatctgaggggataagcagaatccaaacctctgcttggagatgaatctataaataaataaaatccggaagaaaaggaccaaacgggcctctctgctgcagcagtgtggccttatcggctgggcggcccacatgcggccctaccgtcccgacccaatgctaacgctgggcccagccaccggcggccggtcaccgccacggttcagcgctcccgcctgtcctggt

SEQ ID NO: 36249 - DNA, 600 bp, Zea Mays
cgggaaccccggaaggagccgctaccactctcatcgccggaggcagcacggacacgatttgggcccgacacggagtggcaagagaagcaggtcaagcagcgagggcgccaggaccgtagaggtcgccggcggcctggtgggtggacgccggggccagagtggccaccaccggcgcgggggaggctcacctcaccggctcacccaacggtcacactcacgcatagctctgccctgaaccaagatctcacagaaaactgaaacagtacactgttttccattttacgtctcaggttctcaattttcgaaatatatatattttttcgtcacacagaaaaggtgacctcttgttttacaagtatgtacagtatctaatcactcgacactggagaataaaccaaagtcgagtttctgagagcttggtacacacgcctttcgcgctatgtctacaccgccaccggcaaagccgtccagaagcatcaccgcttccttgctagcattcggttctctggcattctgaacatacccacatgtcgtgaagagctagcacgagtgcacaagccgccggccacggccggtggcttcgggacgatgcctaccgtt

SEQ ID NO: 36250 - DNA, 560 bp, Zea Mays
gttaatctagtgttgaattgatgtggtctttaaaaatgtgagcattattgctcttttctggtgttaaattggtttgaaattaactagcaattgattatgttcacgatgttaaattgtattagttcgaccaagtaatcaacacaaaataagtcataacctagcccgacttaaattctttcaaggataacaactagtagccaagtgatcaatcatgatgatggcgtttcgtagaagtttaagcagggcatgatgatcatagacattaagatacagattacgagttgatagcacaatctttacgactttacccagtagaatgaactagcatggactctgctagcatgtttcaaatatttcagcacacgtggtatatatagaaagcctaaagataaactcatgatcttgatgtacagagttagagtaacaatggcatctaataacgcaatatcttaccaaacggtatggaacgcgagagggacggatatcccgcaacagaatcgacaacaccagctgatgtgaacagcctctcacagtctcacatgagcagagagagaactaat

SEQ ID NO: 36251 - DNA, 1377 bp, Zea Mays
ggctgatgtggatctgttcgcgtgtttgttccaatccaaacatttgacatcgcttttgtagttttggtatcctgtgatctggaagcacgcgcttaaggctgatgattaggcttccccatttgctagtgtcgcacagcgggaactttgtataagtctgatctgtcaatatctttagtggttatactatctgattgaatttcagatcaggatttcagggaactcgtgcagaaggtccctgaaggttgcctattcaccatcgtctctgactcatgccatagtggtggcctgctggacagtgctaaggagcagataggtaatagcaccaagcagaataagacccagtcccgtgaacctgatgagcctcgtcattctggttctggcagcggcttccggtcatttctcaaagagactgtccgcgatgtgttcgagtctgaggggattcacatccctcatagtcgtcgccatggggatgatgaccaggacgacggttacgcacagccaactggaaatggccgcaccaaaaaccgctccctgccactctcgaccctgatagagatgctcaaggaacaaactggaaaggatgacattgatgtgggttctatccggatgacgctgttcaacatctttggtgatgatgccagcccaaagattaagaagttcatgaaggtcatgctcggaaagttccaccagggccagtcaggtgagcaaggcagtggtggtggtggtgtctttggcatggttggtgcccttgctcaggagttcttgaaggctaagcttgaagggaaggaggaagaggctttcaaacctgcattagagcaagaggttcacagtgttgacgaggtgtacgccgggagtaaggcctgggcaccaaacaatggcattctgatcagtgggtgccagactaaccaaacatcagcggatgcaactacaccgcagggtgtctcctttggtgctctgagcaatgctatccaaaccattcttgcagacaagcacgggaaggtgacgaataaggatctcgtgatgaaagcacgtgagctgctgtccaagcaagggtacactcaacagcctggactatactgcagcgatgagcatgttcatgtcgctttcatatgctaaaacttggattgttacagcgattgctttcctccatccttttgtgttgatcggtgcaccagaggttgatgtttttcttcccatgtatgttacagctatattgtatcagtgtttgttgcttgaggatatgtttcaatggactatgtcaatattgaaataacttttgagaaatgtttctatatatgaataatatacacacttgtatcatgatctgtaccaacctgtaagctacactaaacatatcagttttcctacattccgtcg

SEQ ID NO: 36252 - DNA, 553 bp, Zea Mays
ccgctcgcgtcccaccagcagcgcgcatgcagcacccgcgacgcaaccgccctgctgcccactctctccagctcgcccacgacgcccagaacccggagccgaaaccaccccatggattcgtagcgtgttgaccgagcggccattctcacgatcgttgttaatagggaacacactcacaccctctcctcttcttcgctcgctctctgtcgtcgaaataatctccggctgcacgcaaccaagacctccactcgccggccatggtggacgcaaggtgtcgtcgtcgacgctgttctcttccccggcgcgctcgtcgctcgtacccgcctcgtcggtcgtcctcggcgggtgtagatcgtgattcgtttccaaacctcgaggaatcgaggatcaagcgctggcgaccaagtgatctggctcttcgagttctacaagattgaagaccctgagcatctgtttggtgaaggcaagtgttctctgacccattatgtcacatttactgtataattcactgtcccgcatactatgaacaacataaggattgactagctttcta

SEQ ID NO: 36253 - DNA, 1684 bp, Zea Mays
cgccttcgcaatactgcgtccgcctttctctaggcgacaggcgagctcccacgcctcaccaaattttggcgggttttcgacctggacattgctcgttgcccgccctcctcagttcctgcatctctcccattccacagctgccgcctgccggcatatcgcataccctagggcgcagggccactggaaatcgctgaagcgcctcggtgcgaatgctcctctccaacatctttgagccgcacgggacagcaggataagcagcataatggcgtcctattattcctcttggaggcaaaggcagacaatccgatttccaaggctgcaaactataaatcacggtcaggtgatttcattccaacatatgctcgggctgcttgttcgtccagatgttggagtaattgtcatccaaggtattgctggctctggaaagacatgggctgcgaaggctgcataccgggcagcaaggacttcgaatctctttcaagagtatgtttgggttcccttgtcaattaactgtagcatgagacagtgtctcaataagattgcagcatctctttcatgtaacaaaggagataacttgtctgtagaaagaaccaaggccataatcaaggaatatctcacagcacggaaattcctcattgttcttgataatgtttattttactgaagagggtatcttagaatacctgggagttcctcgtcctcgacagcaaagtcttggctcaaaaatatttgtgactacacgaactgtgaggggagaatcaatcatggagccagatgtagttataatgccacaacctcttacttatgaagagtcatacgacctgctgcgtgaaaagattggaaaagatatcaactttgcacatgacttaatcagttgctgttttggcatgccgctcacagtcattctattggctggggttctgtatggctcacctacacaagaagcatttgatgagttggtcgcaaaagcgcatgtcactctagaagctcagacatcagcgttaaacaccatgaagcgcctggtgaaatttggataccagcagcttcctaacaataatgtgcgacgatgcttgctgtactgcctactcttcccggaggatcaaggaatttcagtcaaaaatctggcactggaaaacagatggtctactccagaaaactactgattttgatgaggttaaccatattggcaaggaaattcttgatgttctcataaagcatggcatgttatatttggacgtcgatggtgattatatacgtcgatggcatgttatatttggacgtcgatggcatgttatatttggacgtcgatgtagataggaggtcgttcgattccatcacctccgccacctatagcttgactacacgacggcctcagatggacaccctagtgacactataacgtggaggaagcgtggaggaagatgtttataggaatgttagttttgatgtaatgaagaacgtgaatgtgatgttcgatgaaaggccctcttttggctagattttcgcaagagcttgtgaggagattagttgcaatttaaacgaccctgtcaacatatcaattgagggtttattgtcccatgttgcatctgggacaatattttgacagttgatctccattggctctgaagatgactggttgaaatatgtcaaaattgtgatgacgattgttcacaaattttgacata

SEQ ID NO: 36254 - DNA, 2038 bp, Zea Mays
ctcgaattctcgatacgatcgtcttgtctaccctactggcctactactcaagtcaaggtctcgccttcgcaatactgcgtccgcctttctctaggcgacaggcgagctcccacgcctcaccaaattttggcgggttttcgacctggacattgctcgttgcccgccctcctcagttcctgcatctctcccattccacagctgccgcctgccggcatatcgcataccctagggcgcagggccactggaaatcgctgaagcgcctcggtgcgaatgctcctctccaacatctttgagccgcacgggacagcaggataagcagcataatggcgtcctattattcctcttggaggcaaaggcagacaatccgatttccaaggctgcaaactataaatcacggtcaggtgatttcattccaacatatgctcgggctgcttgttcgtccagatgttggagtaattgtcatccaaggtattgctggctctggaaagacatgggctgcgaaggctgcataccgggcagcaaggacttcgaatctctttcaagagtatgtttgggttcccttgtcaattaactgtagcatgagacagtgtctcaataagattgcagcatctctttcatgtaacaaaggagataacttgtctgtagaaagaaccaaggccataatcaaggaatatctcacagcacggaaattcctcattgttcttgataatgtttattttactgaagagggtatcttagaatacctgggagttcctcgtcctcgacagcaaagtcttggctcaaaaatatttgtgactacacgaactgtgaggggagaatcaatcatggagccagatgtagttataatgccacaacctcttacttatgaagagtcatacgacctgctgcgtgaaaagattggaaaagatatcaactttgcacatgacttaatcagttgctgttttggcatgccgctcacagtcattctattggctggggttctgtatggctcacctacacaagaagcatttgatgagttggtcgcaaaagcgcatgtcactctagaagctcagacatcagcgttaaacaccatgaagcgcctggtgaaatttggataccagcagcttcctaacaataatgtgcgacgatgcttgctgtactgcctactcttcccggaggatcaaggaatttcagtcaaaaatctggcactggaaaacagatggtctactccagaaaactactgattttgatgaggttaaccatattggcaaggaaattcttgatgttctcataaagcatggcatgttatatttggacgtcgatggtgattatatacgtcgatggcatgttatatttggacgtcgatggcatgttatatttggacgtcgatgtagataggaggtcgttcgattccatcacctccgccacctatagcttgactacacgacggcctcaggtatactcgttttttacacaatattaatcgatcatataactgcttgatgtggttagttatttattagtgtatagttagtattaagtgtttaggcattattagattagtaagtatataggtagtagtatatagttatatgtaagcaattatctattacttatttattacttagtaagtatttaggcattagtatattagtagatggggatagtatttagttaggcattagttgatagtgttagtcaggtaccatctttaatggttattgagttatgaatccgtgtttgtaatagatggacaccctagtgacactataacgtggaggaagcgtggaggaagatgtttataggaatgttagttttgatgtaatgaagaacgtgaatgtgatgttcgatgaaaggccctcttttggctagattttcgcaagagcttgtgaggagattagttgcaatttaaacgaccctgtcaacatatcaattgagggtttattgtcccatgttgcatctgggacaatattttgacagttgatctccattggctctgaagatgactggttgaaatatgtcaaaattgtgatgacgattgttcacaaattttgacata

SEQ ID NO: 36255 - DNA, 4020 bp, Zea Mays
gtcgctagggaccccaggtgaaaccatcagctcattctcgcctctcaaagtctcaatcgtgcaatccggccgctggccgcatgccgcgacccgaagtgataagccaccgcccaccgccgctggcatgagcccgatggcgctgctcacaccactgcccattccccttctctcgccgtattgccaacgcgtctcgtctccgtcgcttctggcggccggggcagttatcagacctctcatttgtctttccccccacaatcaccgccaccacgatgcactctacccctctgtccccaatgtgtggccacgccaccggcgccgccgcaggggcgcagttgcttccgtcgaccaggaggagtctagtgcctcggaaaccgcagtcgctcccgaggaagacctggggccaccggtatcctctgatgcggctgccgaggacggggtcgcgacttctgcccagccggcggaggcgagcccggaggacctggagaacatccgcgaaattaaaagggtactggagctgctgaagaagaacagagacatgacctttggcgaggttaagcttaccatcatgattgaggaccctagagatatagaaagaaagagaacactcgggatagaggatcctgatgaaattactagggatgatttagctgacgctttggctgaggttaacgaaggaaagattccagagaatcgtgttgcacttcagttgcttgccaaggagatggcagaatggccagacattgagatagaagctccaaaaaagaagagcaaacctgggaaatctgtctatgcaaaagccacagatactggcatcgatcctgagacagctgctaaaagacttaaccttgactgggactctgctgctgatatagatggcgaagaggaggacgatgatgaaactgaagtgccgtctgcagtgggatatggtgccttgtatttgttgacagcttttccggaaacagctgatcacagttgtgtagacagaatcgcaggctcgctggcccaaccgcccatggctccaagctttcggatacgatcaagtgagaagtcaaccgaacagctcaccgacacagcatggcctggagacaatgtagagagctccggcaagctcacttttccttgtgccatgagccaagaagatgcctcttccttcaagagagaagctgaagctcgagtagcagacgatgaagaggagggccggcgattccgctccggttcgtcggtcaccgacctctcgagcaacgcgtcgtcgattaactaccgcaaggcgcggcagggcaagatcggcggggacggcttctggtgcggcgtcctgtgcatgtacctgccgggcctgtccaggaggcggtcgatgcagcagcagcagtccatgagcctgagcgaggcgaacacggccgggcctgccggggaccgttcgagcacggtgtcgaaggtggcctccatggagaggttcaagtacagctcgtcgtcctcgggcgccgcgttcgagcgcacgggcgcgagcgaggaagaagaggaggtgtcggcgtacttcgacctgccgctggagcttctgaggatcagcagcgttgacacggagtcgccggtcacggcggcgttcgtcttcgacggcaaccgcggccggagcgccaagaagatcgtgcctgagatcccggacctcgattttagcttccccgcgccgccggttttctcgaatccttcgtcgccaaggtcttgaaagttgaaactatcagagaggaggtgctcaatatcctgcaacgcgttgcgctttcggtgttccacttttttcttgctgctgatgtctggtgtctggtgtctggggcacgtaggttaaggtcgtaaaattgtctgctgattaggtcaaattatgcgattctatattcgatcaagctagcacgctgtgcattgcacaactgccatggatccagacaggccctaagtgagggcatagtgtggttcatgacttcccggctcgagttagtcgttggcatccaatctatagagtgcattacatttagcctggatttggatcattgactcatttgggtgtgcatgctgctttcagcaacttgcggatttcacctgtcatacactcatactgcttctgagcaagtaccatttctggtctagtgaaaccattgccttctcatttaaaaaacacctttgcagattgcaaggcttttttttccaagatatgcacgtacagtatttgcataaattttgaacgccgctccgctcaccaacatataatttgtgctactgctaacctcagttcttctgtacgatcagtttagctcttgcatgccccgcctcaatcctatactgctcgcctaccccgaagtgcgccatcaagaaccaaacgaccgtgagcagctcgccgccggtgctcagctgcttggcatggaagttgctttggcacttgttcgcggcatagcagagcatctccacccacaccacacggatgacgcgccaccgcttgtgcggctgcagctccagcagcgacttggccagccggcacgcgtcgaacagcacggatttgctccggtcacccttcacgtccctcggcgcgatctcggcgttcacgtcgagcaccatcctcgccgcagcgctcgcgctcgggcgcgccatctctgcccgcttgaagaagttcttggcctcggcgcaggtgtcgccgaaccggatctgcccaatgccggcggtcagcatgaaggggcgcgcgacgagaaggaaaagcatgtagttcgatatcgcccggctgatatcaacgtaatgagggatcatcttggcgtcgttgtcatcgccatcccccgagtggaagcagaggtctgtggctatgtgccagaggaggatgctctcgtcgaactccacctcgacgctccagccgagctccttgtagtagcccttgcactgcagagcccactggcccctgtggttgctgaacttgcggtagctctcggcgtccacgatgctcaccgtcttatccttgagctccctgaagaccaaggtcttgagctccgatgacacgtcgatgtgccggatgtacagccacctgtcccagtggactttaagccctaggacgctcaaaaccttggtgagcttggttggtttgtccaggaggcagaagccgatgaggttgtgctgggccatcaaattggaccacttcgcccggctttccggccggaaatactgaatgctccggaacaccaggctgcccagtgaccggtagttgcagtcatgcagagcggcataagtccagtaggatacaagcatcatcccaatggcatacacctccaggcacagcgctcctccgaacaaaatgttggtgatgcagatgtcgatgcggctgtgtgacttgtgtttacccctgtcaagcatgttgaagaggacgcacgccgtagaggtcgagaggagagtcagacatcgaaacaggcggccgtaccaggtgtgtatcactgccgccttggagtgaagggtgtcgtacatgagtgacagctcgatctcgatgatcttgtatgcctgctctggcgtcagccgcagaaacgtgctctggctctgggtgcgctcctggaagctgaggatgaggttgacgaagagccgcttgaagatgacaaagaagtggctcgcttcggtgatcaccgtcgtgtagggcactgcctcctctgcgacggccacagtcacggcggcggcagtcttcgcacgacgttcctgctcgatgacgatctccgcctcgagccctgcctcacgcagtcacgcgtgaaccggtactcctccatgaacttggcgtagttggggcccggatccggcgtcgtgaccatgctgctccgcagattgtccatgctcgcacacttgagcgcccatgtcctctcggcgtacttgacaataccactcaagaacatgaacaaggcgggggctaggacattgttgccagggtgcgacttggcgaagacatacacggcgagggcgacctgttttttttcccgcgaccgggcaaaaaaaagtagcagtttttcatctagggag

SEQ ID NO: 36256 - DNA, 2252 bp, Zea Mays
cggctgcgagagagtgcggcaggggccgtcgcctttcggtttactctcccactgcccaagtttaaaaatagcaagcagagaaagagacaggccgcaaacggagggagagaagaagagacacggaggagaggagaggagcgggctagccagtctcgatctcaggttctcaagaaagaccctgcagggagagcgatcaaaaaggctgccggcacggccgggtagcagctacaactacaagctggcctatagctagctagctagctatagctgctacagccgccgagctcgatcctcggactcggactgcaacgaggaaggagaggaaatggtgggctccggcgcggatgggggcggcggaggggatgacgcgcggagcaaagaggccgcggggatgatggcgctccacgaggccctccgcaacgtctgcctcgactcggactggacctactccgtcttctggaccatccgtcctcgcccgcgctgccgcggcggcaacgggtgcatggtcggcgacgacaacggcagcctgatgctgatgtgggaggacggcttctgccggccacgggtggcggagtgcctggcggacatgagcggcggcgaggacccggtgcggaaggccttcatcaagatgtccatccaactctacaactacggagaagggctgatgggaaaggtggcctctgataaatgtcacaaatgggtcttcaaggaaccttctgaatgcgagcccaacatctccaactactggcagagctccttcgacgcacttcctccggaatggactgatcagttcgcatcaggcatccagaccatagctgtgatccaagccgggcatggcctcctgcagctgggctcttgcaagattatacccgaggacctgcacttcgtgctgcggatgcgacacacgttcgagtcgctgggctaccagtcgggcttcttcctctcccagctcttctcgtcggcgcggggcgcctcgccgacgccgcctcctccggccgcgcgtcccccgccggcgcagcttttcaactggccgggcgcccaccagccgcagctcttcccgcccggtccgggcgcgttccaccacccgtcggcgcgggcgatgccgccattgttcccaggcggcggcaaggacgagggccacatgttccacattccaccggcacaccatggcagcaagccactgcacatggacgagctccagcaccggcaccagcagacgatgggggccggtggcgaggcgcccgacggtgaactccggtggcccaacgggctgtccttcttcaccgcgctcaccgggcgagacgacgacgcgaagctgctattcggtggccccggcgccgcggacgacgagaaggcggcgccggacgcgcagaccgggcacggcggggctgggaacgtggaggagtacctgagcctggagagccactcggacaaggcgccgagcaaggtggagaacggcgcccagcacagcaccaagtccaagaggagcttcacgttgcccgcgcgggtgagctcgtccacgaccacgtccccgtccgtgtcggcctccacggcgccgcaagggatggagtaccgagggacgcacgagggcggcgtctactcggacctcatggagacgttcttggagtagctagctagatccgtagcatgcatgatcggttggttcaagccttcaaggtcactacaacaacaagtgcacgcttctttttttttcttttcctcaccgccctcccaagtcccaagctttgttttaggtctggagttttaatcgcataatatctttaattagatttgtatgttctttgtttttttcttcttttctcctcttcttggaaaaaaaattctttgcataccagatgcaaagcccaacttttgcagcccctcacataccccattgctggtccatacaaataaattaaaaataaattactaaagggttattttgtaaattttgatctgtctttgtgggccttcaagtggtatatgtgaggggctgcaaaaggtagagtttgcatccggtatgcacagaattttttccccctcttcttatagttgcattgcagcagctcgatcgtaacgctaaaaaaaacctttgatggatacatgcatgcatgcaagcaagaagggcatgagtttgcttccatgatggctggcaattgtatggtgcattggtgcaaccgccatgatggcgaggtacaatgatatgcaacaccccaagattatgggcctttttttcgcgccaaaagctatct

SEQ ID NO: 36257 - DNA, 3452 bp, Zea Mays
ctcagataggagaaaaaaaaactactgctacaaaaacatgcatggggtgccgcgcagtgagtcgggagtccgttccttcctattcgctctgcgtctgcggctgcgagagagtgcggcaggggccgtcgcctttcggtttactctcccactgcccaagtttaaaaatagcaagcagagaaagagacaggccgcaaacggagggagagaagaagagacacggaggagaggagaggagcgggctagccagtctcgatctcaggttctcaagaaagaccctgcagggagagcgatcaaaaaggctgccggcacggccgggtagcagctacaactacaagctggcctatagctagctagctagctatagctgctacagccgccgagctcgatcctcggactcggactgcaacgaggaaggagaggaaatggtgggctccggcgcggatgggggcggcggaggggatgacgcgcggagcaaagaggccgcggggatgatggcgctccacgaggccctccgcaacgtctgcctcgactcggactggacctactccgtcttctggaccatccgtcctcgcccgcgctgccgcggcggcaacgggtgcatggtcggcgacgacaacggcagcctgatgctgatgtgggaggacggcttctgccggccacgggtggcggagtgcctggcggacatgagcggcggcgaggacccggtgcggaaggccttcatcaagatgtccatccaactctacaactacggagaagggtgggtactatactgggtaggtgctgtgcaggtgcaggtgcaggccgtcgagttcggtcggagtcgtgtcgtgtgcaatttctttccgactttccaatctccactcccggcttagcttagcttagcttatggcactactagtattaggcggtaattatggtgtgatgtagacacgtacggcgcccattttttttcaagtcgtggctgctgctgctgctgctttctgcgaggatcaagcacgggcgctgctgtcacgtgagggaggggacacggctggagtggggcggtgcctcgtgaggcttaaacaatcccacccgcgtcagtgggctataacagccggatcagctcgtgattaacatattcacgattgtgctacgcacgctacatgcacagccaggtgctacacggcgtcgggggcagtgtcttttttttatttatcttagaggacgatgtgaaatgaaagagcgacatgtcgtcagagttgcgtgtcacacgttagctgtcagtcagtcagtcagtcgttctgtgtatttttgtgtgtgtctcggcctcttttgatctcgctttgctgctgtaccgagatttcggaggcatacaatacatacatgagtcatggacgataatgtgctaatagacagacccatgggtccgtttgatttggaccgtcgctcccgcatgcaggctgatgggaaaggtggcctctgataaatgtcacaaatgggtcttcaaggaaccttctgaatgcgagcccaacatctccaactactggcagagctccttcgacgcagtacgtactatcagcagcagctgtgcctctgcacccgcttctttctctttctgcactctgtaacgtacacgtactccatccccacctgttccaaaacaaagggtacttctcatttactaatgggttaaaagaaaatgtttccaatttcaattatgtatgtgttaatatccacagtatacagttaatatcattacatagatcagtaaatctattttttataatggatttgtttaaaggtataaatattattaaaatttagatataaatattattaagattcattacaaatttagtttttggagattttactttcatccatccttgtacacatccccgcggagctctcagacttttgcatcagatctgctccgcgaaaagaagagaagaattggatgctccgtcagagcagcaatcgcctgtctgtctgtctgtctgtcaccaagaattaacgccacgaacgcagtaacctttattccctctcgatcggcttttgcttttgcagcttcctccggaatggactgatcagttcgcatcaggcatccagaccatagctgtgatccaagccgggcatggcctcctgcagctgggctcttgcaagattgtgagtgccaactggaggccctctctacctccaccacctgtgtttctatgcttgaccttttgttttgtcgtttcgtttggtcgtcgaggacgtctcacggaagcgtaggcaggcgagctaggctaattaacagcgacgtgacactgtgcgcgcgcagatacccgaggacctgcacttcgtgctgcggatgcgacacacgttcgagtcgctgggctaccagtcgggcttcttcctctcccagctcttctcgtcggcgcggggcgcctcgccgacgccgcctcctccggccgcgcgtcccccgccggcgcagcttttcaactggccgggcgcccaccagccgcagctcttcccgcccggtccgggcgcgttccaccacccgtcggcgcgggcgatgccgccattgttcccaggcggcggcaaggacgagggccacatgttccacattccaccggcacaccatggcagcaagccactgcacatggacgagctccagcaccggcaccagcagacgatgggggccggtggcgaggcgcccgacggtgaactccggtggcccaacgggctgtccttcttcaccgcgctcaccgggcgagacgacgacgcgaagctgctattcggtggccccggcgccgcggacgacgagaaggcggcgccggacgcgcagaccgggcacggcggggctgggaacgtggaggagtacctgagcctggagagccactcggacaaggcgccgagcaaggtggagaacggcgcccagcacagcaccaagtccaagaggagcttcacgttgcccgcgcgggtgagctcgtccacgaccacgtccccgtccgtgtcggcctccacggcgccgcaagggatggagtaccgagggacgcacgagggcggcgtctactcggacctcatggagacgttcttggagtagctagctagatccgtagcatgcatgatcggttggttcaagccttcaaggtcactacaacaacaagtgcacgcttctttttttttcttttcctcaccgccctcccaagtcccaagctttgttttaggtctggagttttaatcgcataatatctttaattagagaattttttccccctcttcttatagttgcattgcagcagctcgatcgtaacgctaaaaaaaacctttgatggatacatgcatgcatgcaagcaagaagggcatgagtttgcttccatgatggctggcaattgtatggtgcattggtgcaaccgccatgatggcgaggtacaatgatatgcaacaccccaagattatgggcctttttttcgcgccaaaagctatct

SEQ ID NO: 36258 - DNA, 520 bp, Zea Mays
ggtcatcgaactttcgtaccttggtccgtgacaaggttgaagacaatagttggttctaaagcaaataagaccatctaaaatagagttaggtaaattttgataggagctagttatgcatgttttaacgtttgaaattaggttattttatttacacaaattgtttttgaaagaatgaataggcatatctggtgaagtcttctcgatatcactgaccaaaacaaccactccatgttctttgagaacctagttttgtaaaagaacaatatcagattttgatgcagtcagaaaaaaagaaaattaacatataactaaaaaggcgcacaatacatacttgatgcctagggtgagcaccaaaaagggatggtctaggacatatgaagtaacaaaaaagtcaaagtaatagtaaattttatttgacattacacgtatcatacacgatacttgaatatattggtctgaaacctatttcttgtgaaacataagcatcactaataaattgtgcgaacaaagatccaagttt

SEQ ID NO: 36259 - DNA, 2272 bp, Zea Mays
cacgtggcccccccgtaggcggcagccggcaggtcattgtccgtctgtgtgagcactgagcacgtcgttttggacctgtttccgccaccttttattgctcgcggcgagtaggcgacaaaaacagtccgagggaaaggaaagcggacagggatgtgcatgcatgcatgcaagtttcactgacacgtaggtcacagcgacagcggccccaccggcgtggaaaagttgctgctccgttcggcgccgctcgctcgcacagtcgcactcgcacgacgtttagcagggcaccaccgcaccaggcaggcaggcaggtaccagtgcgcagacagtgctctcccagtctccacctcgtgctcgtggcaaagaccaaacaccacgcacgttgctgtaacccaacaagcccgcccagctctcgatcccagatggatcccacgcttcgggcagtgctgagccgcggcggcggcggcagtggcggggcgaggggcggcggaggaggcggcgcgcactacagaggcgtgaggaagcggccgtggggcaggtacgcgaccgagatccgcgacccgtggaagaagacgcgggtgtggctgggcacgttcgacacccccgtggaggccgccctcgcgtacgactgcgccgcgcgcaccctccgcggcgccaaggccaagaccaacttccctgccgaccacgccgcccaggcccagcagcagcggcagcgcctccgtctggcgccgcttcttcgtcaacccccgccgcggcacgtctcgttcggaggcgtcgacgtccacgtcgactgccctactccgtggcattccgtctgcttgcagacgacccagacagcggccgcggccgcggccccgcttcccacgactgcaccgatgccgctggcatccgagccaccgtcaacggcgctggcgctggagctgggcacgggccgaagccgcgccggtctgcccttcgacctcaacgaggcgccgtcatgctgatgctcgatcggattgtgacgtggctgcagtgtcaatggtgactggcggtgagcaggtgaggactgggcagcgggagttgggaagtagtagagcagtgggtgcacgctgcacggcgcactattccggctagctgtactgtacatacctatttaaggaaagcttagtcctgtcttgttgggctcgctcctttaagcgttgctatttctggtgccctgcgtggctgtgtcggtgatggtggtggagcgggtgcttgtttcaccgcaggaggtaaaacgggccggatttagggcggtaaaacagttagtatgacagtactactagggtaggttcgtctgggtccttggtgttgcctgttggtggccttctgccttcaccgacgggcaacggcacgccgcgaagagtgcggtcgtcgtgctgcgtgaccagagtccagtgcacatgtttacggatccttggtacgtatgctgccgtgagctactacgtgacatgcttatattttaacaatgctaatgagccgggcgagacggactgtgcaggggccacacgcactcttgtacaatactagtggatgtggcgcgcgcccagcgcgcgttgtaaaatttgagcccggagtacttttacgtagagaaggatataaccagacctaaattattttattttacaatcagtaatcggtatggttagacaaagttcaaaacattagatagtatcattgcaaaatatgtaaaaaagatatttgttgagcatgtctttagctggattatgttcataaatttttgacatatatatacatgtagaagtggccgcctgatgctatcctagaagcatagcagacattacacataagacaagagtaaacattgtacaaaagatattagttatgcattacaataagttgttcacagtttcagcttgacgtatagtcaataaaatcaccacatgtcatatcaaggtgcgagcatcgattgtattgttcctgtacaatgaatcatttttttagcttttaaatatcaaagggaagttgtaaaatgcagtattgaagttatataaataaagacaaaccatgcactgattgcaagtggagaaatgacatgcaagtggagaaatgacatgcaacatcgaatcatctgcaagatttagagttgttcaaggagattgtgacacaaacgttttataccctaatccaatgctacagactaaagttagctttttttagtttaccataatttctcaacatctttttttctaatcaacttatatatattgttctcatatgtggttgttgatttgct

SEQ ID NO: 36260 - DNA, 420 bp, Zea Mays
tagcacgctttcatcagagttcccctgtagcccctctggtatgctgacatggctgaagctgagaaggcgaccgcagaggctgcgaagagagccgctgttacgctgcgtagcgatcatctactcaacgaaacctgtgatgaagaggacgtggatacttttagcgagtgtgatactgtgatgattatgaggaggaggccatttggaatcaaccactccctccaactctcgctgatcactgtgaggagtggggcctcaacctagaggagatcctagatcgctccatttgaatgttgtcgtactaacagaagattgttttaagttatcaatgaattgtttagtcttttagattatgtgatatgtcgttttgaacaggacaatgccctgagtagcttttgaacaaccttctataatatgaaccgg

SEQ ID NO: 36261 - DNA, 1654 bp, Zea Mays
cgaagatcaagatcactcactcccagttctaaaccctaaacctgacgccgccatggccgccgccgttcgccacatcgtgcgccgccgcctctccacggccgccgccatcactgcaccggtccccactccggcctccatcctcaacccgtcctcgccgagcactcccctcacctcgcgacataagacccgactcgccatctccctcctcaagtcttccccgccgcctccccccgaccagatcctctccatttgccgcgccgcggcactgaccccggagacacacatcgaccgcatcgcgctgtcgctagccgcatcaaagctctcctccgctccggacaccctccgtgacctcgcctccaccgtcctcaccccgcgccacgcaccccacgccatcgcgctcttcggccaggcacacctcctccccgacgccatctccactttccagtcctccccctccacccgctccctcaacgccctcatcttcgcgtgcatcgtctccggtaaccacacggaggccgcccgcgtcttccagacattcccagacgcccatggcgtcaagcccaacactgagaccttcaatgccatcatcaaatcattcgccgagtctggcaccataaggtccttttactcggttttcgatgaaatgtgcaagaagggcttgaagcccaactccatcacatttaccactgcgctcgctggtttctacaaggaggagaagttcgatgacatcaagaaggtattagagctcatgaagaagaatggatgtggtgagtccctgccggtatacaatgtgagggtgcagagtttgtgcaaactcggtcggagtggtgaggcgagggcattagtggacgagatgatgaagaagggcacaaagccaaattgggtgacctacaaccatctgatttatggattctgtaaggagggggatttggaggaagcaaagcgtctgtacaaggagatgggaagaaaggggcttgttggggatagcgatttctattttatgcttatttattacctttgtaagggtgatgatttggacactgcccttggactatacaatgaaatagcagctaagaattgggtgccatgcttctcaaccatgaaaatgcttgtgaatggacttgctgggagctcaaggatcgatgaggcaaagggaatcattgagaagatgaaagagaagttcccagataaaactgaggggtggaaggaggtggaggaagcatttcctcattagagtaaaacatcgatgatctcagcaaatttgccagtgctgaagacattgttggttggtagttgggactgcatctatatttgatcaactgtttcgagtatatgaagatatggcctggattcaattttatatagatgtgaatcatgctccagctgtgatgactgattaacagtggcagctgcaggttgttcttggcgatgccccagtagttaataccttttgcatattgaagttttagttgtgggaattagagagaataaaactgtcagttttgttggcacaggctgagcctgtcattgccttgtacggaccttgcgcctgcaatttttgcagtctgtaagcgatgcaatgtatgctataactgtaacgacttccgtttcagtttgaatggactgaaattaatgtttcctccctggaattgtg

SEQ ID NO: 36262 - DNA, 3027 bp, Zea Mays
aagcattactttttttattatttataaaatcaaccaaatcacatgcagatatcacaccatgtcagcgtgaggacaatacataataatattttcccctcaaaaaatcagtcatagtttacatcaagggtggtgcctataaatataggggtgggcaagagaaaagcaatgaaatgttaagaagactaactaaaccaaatacttcaagtagcttataggtaccatatttaacttaaagatgaaaagagatgaatcatcaggaggtgagccatctttcatagagcctactagcggtatggatgacccaactttgatggggtcgcttggtggtatcgacggtccatctttgatggagccttttggtcgtgttggtggtgggacttcatcacaaacgagtgacatacctgaaaatgggtcaagcaaccagtctgtggaagcacatgcaaacaatggtaaacgagaaagccccggtgatggtgccgctagaatcaatgaggtaaattcgagcaccgctgtcaaaaagaagaagaaacgcagtgaccgccagcagcaggatggcccacagccaaagaagttgctacacagggtcaccagccagcagttagaaatactcgaaggtttcttcagcatatgcgcacaccctgacgacagccaaaggaagcagctgagtgagtcgacgggtctttcggtacatcaagtgaagttttggttccagaataaaaggacccatgtaaagcatctgagtggaagagaagagaactacaggttgaaagtggagaatgaaatgctgaaggaggaaaacaataggcttattaggcaggcacagagcaatgctcctgctcctgcccctgctccctgtcccagatgcattaatgacgcggggcacctcctgctcgagaaagaagttgaacggctcaaggcgcttaaccagatgctgcagcaagagttgcagctacaaggcacggaaggtgaaacacctgtggctgtggacccagcttccggcgctttccatcctgatcctgagccctcgttggagaacgtcttcgcggcgcaacacgacgggcaaatgctcgccaagctagccgagaacgcggcacaggagcttctcgtcctggccgaccccgaaagccctctctggctgcctgtcccaggcggctcgttcgaaacgctgaacatgatcgcctacgcccagacatttcccgggcagatgagcgtagatgccatcgcgttgaagacggaggctacccgcgccagcggtgtggtcatgctggacccgaagagccttgtggagttcctcatggatgctgagagctatggcacgatgttccctggactcgtgtccggtgcagccaccgacaaggtgtacaactggcctaccagtcgcgaggagagctatgatggggctgtgcagatgatgactgttgagctggcgttcccctcgcccctggtggcggctcggaagtgcacgttcgtgcgctgctgcaagaagctggaacagggagcctttgctgtcgtcgacgtgtctttggacgacggcgccaggtgccgcaagatgccatcggggatgctgatacagcccataaggtacaacagctgcaaggtcagcgccatcgatcacgttcgagtagatgacactagcattcatgacatcttccatccatgcctgagcggtgtcctcttcggggccaggcgctgggtgacgagcatggcgcgacagtgcgcgcggatcagagatgtgttccatgtcaccaactgtaccctcaacgtcacttcaagggggaggaagactatcatgaagctggcagacaatctgctggccgactacaccagcagcgtcgccgccttccctgacgacgcctggaccgtccagtgcggtgtgggcacggaacaggacatcaagatcatgtacaagaggcaaagcgaaggcagcagcagcagcagcaacaccgcggtcgtgtgcgcgtgcgcgtcgttcctgctgccgctgcgcatgaggaaagcgttcgacctgctcaagaacaatctgctgcgtgccaagtgggacgtactggtgaacggaggctccgtgaaggaggaggttcgtgtcgccaatggtgtcggaagcgacgacgctgtctccatcctgcatgtcaagcatggccacggggcaaacagggacaccatgatgatcctgcagaacagcagctacgacgcgtccgggtcgttcatggtctactcctctctcgacaagcagctggtggagacaattacgaacccgggtgacagccaggcgatgagcagcatcaacctcttccccgccggcttctccctcgtccccctcaccaacccggacccggcgccgcaagagggctccggcagcatcgcacagcctggggcgaccgtgatgactgccgggttccagattctgatgaagatggcccgtgggaccggcctttgccctcgctcggtgtcgtccgcggtcaagatcatgtcagacaacatcaccaacatcaaagacgctctgttgaaaagccaccctgttttctacaagagcattcagtctgtcgactgaatagcggcaagggagaaagggaggtcgtccaatgcttgtggaggctgctgtttaaatcaaggatactgaaacggaaccccatcagctttggtcgccgcctgcgtttctcccggcaatatatacccgttccgtctactgtgtggaactgctcttggctgccaagagcctgtaatgatgttagtggaaccgaagttgtgctatgtggacccgtcacctgataatgtatgccatgttaaatccttaatttgcttgttgacttggtttggcatgataagtttagtgctcatctgttacaacaccggaatggcaattgaccaatctcgagttaatgcattactggtttatatgcaagaggtcaacagaacaatgttgaaatccttaggctagtcacacatggagctggacgaagaatttgtcacagccataatacaagcatgatgcttgacaactgaagctggtttagcaagtcaaactaattt

SEQ ID NO: 36263 - DNA, 2166 bp, Zea Mays
cctaacatcagctgccctgcccttagtgacgcaagagaaaatgattgcttgagggtccaactttagggagcttcaatgttcaaggggcggcagcacgctggacgtgtcaaaacaagctgattaatcacagatctctgcacgcaggcggcgctaccggagctaaaggggcggcagcacactgggagcgcggctgcgccagatcggcgacgcgatgggattgcgtccagagggtggcggctgtgcataaatgatgttcctcactctcccacctgcatctatccatgagcgtccataatcgcaatgggattgcatcgggaaggtgaatggggactagctacaggtcggccgcgtgttgctgtgcgtacatatcactgtctaggggccctagctgcatgtgggaggcgtggcgatcatcacttcagatgaggttaacttcactgcttactatttcctcctttcgattgtttagctgctaggagtcagggatgtcaaaacaagctgattaatcacagatctctgcatgcaggttatagacctgaaactagattgtaggtttcttcatagcagaaaagtgtgaagcagcgtgatttatagtccatttctgtgtgctgtgcaaaggtagtaatttgcacagaatttgagatataaatctacataatggtttagaaagtcacattgtatacctaagtgatccccgtaatggcttaaccaaataagctcactttctgctctgccactgggctagatgagatattatgtgaacgtttttcatttccatctaattacagagtatgtgcaagtgatatgaaatctggaaaccattttccagtacttgtaaccagaacagaggtgagggagtatacttgttgtgtagaagtaattgcttgctgagttttgaatggaggtgtgttttgttccttggtttattattatctcaaaataggagtgtactgtaacgaaatagtttctactggtattcctttgtttttacaacagattcttactttctagctctctctgaatcaactttattcctttgtttttagggggagatctcttcaaacaggtgcaaaggatgtttctgctgggcaagaaaagatggtttaaatttttctattgggtagagagaaaaatagtattggttggatttaagtacaatacatgttccatgttgccataatataatagctaaaacagtgttcgtactttagaatcctaggtgtcttaaactgtcttgtcattgctattagtattttccaatgtccccactatgcacgatctgctgctggaagcaaattactaaccgtaggtgacttttatggtggtccagaaacggcacaataccaggtcctttttcagtcgacaggagcgggaacgtacttcctggtgggtggaaatgacactttgtgtctgcagggaaacaatctgatttgaccccagattttcagtagctggattcaagatttggcctttgggatatcaaaagtaggaagcgtgttgtatattctctgctagcagcaccagcatccaagattttacactccaggtgtccaaacccatcacggttcagtgtttacaattgaaaagtgatccaccggagaaccagcagtgtccaggaacaaaccagcagcgcgtgcgagctgttgttattaccatgaggacacataggtgctgtcataattgtaatgtgacgggtaacaaatagcgttaaattatgtttgtttaagtctaaccgtaattagatatcacactagaaactgtattcaaatttattatcgttgtcacttgagcgtgaattattactgctgtcattacgttataatccgtgaatcaaacaataccatagtgttatggtcatcgataatgagggaagcatgggcaagcttgggaaatgaaagtacagtggccggccccaaggaattctgaattaatggttgagatttggacgcaaacatgaagctgactcgatggcatttgaagaggcgacagtcagtgaccttcagtgaaatcggattgtcacacaacaatgtgatggagatgccggacaatttcttttgaccaacggaaccgtataatgacatgtgaaattcactaacatatatacttggttatcctatcaatatggtcctaccaagtaaacgtcatgaacattcttctacatgatca

SEQ ID NO: 36264 - DNA, 1446 bp, Zea Mays
cttcactctaccttggttttattgcattgatcatttgggttgggcggcgctaccggagctaaaggggcggcagcacactgggagcgcggctgcgccagatcggcgacgcgatgggattgcgtccagagggtggcggctgtgcataaatgatgttcctcactctcccacctgcatctatccatgagcgtccataatcgcaatgggattgcatcgggaaggtgaatggggactagctacaggtcggccgcgtgttgctgtgcgtacatatcactgtctaggggccctagctgcatgtgggaggcgtggcgatcatcacttcagatgagggggagatctcttcaaacaggtgcaaaggatgtttctgctgggcaagaaaagatggtttaaatttttctattgggtagagagaaaaatagtattggttggatttaagtacaatacatgttccatgttgccataatataatagctaaaacagtgttcgtactttagaatcctaggtgtcttaaactgtcttgtcattgctattagtattttccaatgtccccactatgcacgatctgctgctggaagcaaattactaaccgtaggtgacttttatggtggtccagaaacggcacaataccaggtcctttttcagtcgacaggagcgggaacgtacttcctggtgggtggaaatgacactttgtgtctgcagggaaacaatctgatttgaccccagattttcagtagctggattcaagatttggcctttgggatatcaaaagtaggaagcgtgttgtatattctctgctagcagcaccagcatccaagattttacactccaggtgtccaaacccatcacggttcagtgtttacaattgaaaagtgatccaccggagaaccagcagtgtccaggaacaaaccagcagcgcgtgcgagctgttgttattaccatgaggacacataggtgctgtcataattgtaatgtgacgggtaacaaatagcgttaaattatgtttgtttaagtctaaccgtaattagatatcacactagaaactgtattcaaatttattatcgttgtcacttgagcgtgaattattactgctgtcattacgttataatccgtgaatcaaacaataccatagtgttatggtcatcgataatgagggaagcatgggcaagcttgggaaatgaaagtacagtggccggccccaaggaattctgaattaatggttgagatttggacgcaaacatgaagctgactcgatggcatttgaagaggcgacagtcagtgaccttcagtgaaatcggattgtcacacaacaatgtgatggagatgccggacaatttcttttgaccaacggaaccgtataatgacatgtgaaattcactaacatatatacttggttatcctatcaatatggtcctaccaagtaaacgtcatgaacattcttctacatgatca

SEQ ID NO: 36265 - DNA, 1582 bp, Zea Mays
ttggagcttgtggtgacataattttagggtacatacctaacatcagctgccctgcccttagtgacgcaagagaaaatgattgcttgagggtccaactttagggagcttcaatgttcaaggggcggcagcacgctggacgtgtcaaaacaagctgattaatcacagatctctgcacgcaggcggcgctaccggagctaaaggggcggcagcacactgggagcgcggctgcgccagatcggcgacgcgatgggattgcgtccagagggtggcggctgtgcataaatgatgttcctcactctcccacctgcatctatccatgagcgtccataatcgcaatgggattgcatcgggaaggtgaatggggactagctacaggtcggccgcgtgttgctgtgcgtacatatcactgtctaggggccctagctgcatgtgggaggcgtggcgatcatcacttcagatgagggggagatctcttcaaacaggtgcaaaggatgtttctgctgggcaagaaaagatggtttaaatttttctattgggtagagagaaaaatagtattggttggatttaagtacaatacatgttccatgttgccataatataatagctaaaacagtgttcgtactttagaatcctaggtgtcttaaactgtcttgtcattgctattagtattttccaatgtccccactatgcacgatctgctgctggaagcaaattactaaccgtaggtgacttttatggtggtccagaaacggcacaataccaggtcctttttcagtcgacaggagcgggaacgtacttcctggtgggtggaaatgacactttgtgtctgcagggaaacaatctgatttgaccccagattttcagtagctggattcaagatttggcctttgggatatcaaaagtaggaagcgtgttgtatattctctgctagcagcaccagcatccaagattttacactccaggtgtccaaacccatcacggttcagtgtttacaattgaaaagtgatccaccggagaaccagcagtgtccaggaacaaaccagcagcgcgtgcgagctgttgttattaccatgaggacacataggtgctgtcataattgtaatgtgacgggtaacaaatagcgttaaattatgtttgtttaagtctaaccgtaattagatatcacactagaaactgtattcaaatttattatcgttgtcacttgagcgtgaattattactgctgtcattacgttataatccgtgaatcaaacaataccatagtgttatggtcatcgataatgagggaagcatgggcaagcttgggaaatgaaagtacagtggccggccccaaggaattctgaattaatggttgagatttggacgcaaacatgaagctgactcgatggcatttgaagaggcgacagtcagtgaccttcagtgaaatcggattgtcacacaacaatgtgatggagatgccggacaatttcttttgaccaacggaaccgtataatgacatgtgaaattcactaacatatatacttggttatcctatcaatatggtcctaccaagtaaacgtcatgaacattcttctacatgatca

SEQ ID NO: 36266 - DNA, 1418 bp, Zea Mays
gtcctttggagcttgtggtgacataattttaggcggcgctaccggagctaaaggggcggcagcacactgggagcgcggctgcgccagatcggcgacgcgatgggattgcgtccagagggtggcggctgtgcataaatgatgttcctcactctcccacctgcatctatccatgagcgtccataatcgcaatgggattgcatcgggaaggtgaatggggactagctacaggtcggccgcgtgttgctgtgcgtacatatcactgtctaggggccctagctgcatgtgggaggcgtggcgatcatcacttcagatgagggggagatctcttcaaacaggtgcaaaggatgtttctgctgggcaagaaaagatggtttaaatttttctattgggtagagagaaaaatagtattggttggatttaagtacaatacatgttccatgttgccataatataatagctaaaacagtgttcgtactttagaatcctaggtgtcttaaactgtcttgtcattgctattagtattttccaatgtccccactatgcacgatctgctgctggaagcaaattactaaccgtaggtgacttttatggtggtccagaaacggcacaataccaggtcctttttcagtcgacaggagcgggaacgtacttcctggtgggtggaaatgggaaacaatctgatttgaccccagattttcagtagctggattcaagatttggcctttgggatatcaaaagtaggaagcgtgttgtatattctctgctagcagcaccagcatccaagattttacactccaggtgtccaaacccatcacggttcagtgtttacaattgaaaagtgatccaccggagaaccagcagtgtccaggaacaaaccagcagcgcgtgcgagctgttgttattaccatgaggacacataggtgctgtcataattgtaatgtgacgggtaacaaatagcgttaaattatgtttgtttaagtctaaccgtaattagatatcacactagaaactgtattcaaatttattatcgttgtcacttgagcgtgaattattactgctgtcattacgttataatccgtgaatcaaacaataccatagtgttatggtcatcgataatgagggaagcatgggcaagcttgggaaatgaaagtacagtggccggccccaaggaattctgaattaatggttgagatttggacgcaaacatgaagctgactcgatggcatttgaagaggcgacagtcagtgaccttcagtgaaatcggattgtcacacaacaatgtgatggagatgccggacaatttcttttgaccaacggaaccgtataatgacatgtgaaattcactaacatatatacttggttatcctatcaatatggtcctaccaagtaaacgtcatgaacattcttctacatgatca

SEQ ID NO: 36267 - DNA, 1639 bp, Zea Mays
ggattgtaggagttgagcccttgggggagttttgtcctttggagcttgtggtgacataattttaggcacatatactcattgcagggtacatacctaacatcagctgccctgcccttagtgacgcaagagaaaatgattgcttgagggtccaactttagggagcttcaatgttcaaggggcggcagcacgctggacgtgtcaaaacaagctgattaatcacagatctctgcacgcaggcggcgctaccggagctaaaggggcggcagcacactgggagcgcggctgcgccagatcggcgacgcgatgggattgcgtccagagggtggcggctgtgcataaatgatgttcctcactctcccacctgcatctatccatgagcgtccataatcgcaatgggattgcatcgggaaggtgaatggggactagctacaggtcggccgcgtgttgctgtgcgtacatatcactgtctaggggccctagctgcatgtgggaggcgtggcgatcatcacttcagatgagggggagatctcttcaaacaggtgcaaaggatgtttctgctgggcaagaaaagatggtttaaatttttctattgggtagagagaaaaatagtattggttggatttaagtacaatacatgttccatgttgccataatataatagctaaaacagtgttcgtactttagaatcctaggtgtcttaaactgtcttgtcattgctattagtattttccaatgtccccactatgcacgatctgctgctggaagcaaattactaaccgtaggtgacttttatggtggtccagaaacggcacaataccaggtcctttttcagtcgacaggagcgggaacgtacttcctggtgggtggaaatgacactttgtgtctgcagggaaacaatctgatttgaccccagattttcagtagctggattcaagatttggcctttgggatatcaaaagtaggaagcgtgttgtatattctctgctagcagcaccagcatccaagattttacactccaggtgtccaaacccatcacggttcagtgtttacaattgaaaagtgatccaccggagaaccagcagtgtccaggaacaaaccagcagcgcgtgcgagctgttgttattaccatgaggacacataggtgctgtcataattgtaatgtgacgggtaacaaatagcgttaaattatgtttgtttaagtctaaccgtaattagatatcacactagaaactgtattcaaatttattatcgttgtcacttgagcgtgaattattactgctgtcattacgttataatccgtgaatcaaacaataccatagtgttatggtcatcgataatgagggaagcatgggcaagcttgggaaatgaaagtacagtggccggccccaaggaattctgaattaatggttgagatttggacgcaaacatgaagctgactcgatggcatttgaagaggcgacagtcagtgaccttcagtgaaatcggattgtcacacaacaatgtgatggagatgccggacaatttcttttgaccaacggaaccgtataatgacatgtgaaattcactaacatatatacttggttatcctatcaatatggtcctaccaagtaaacgtcatgaacattcttctacatgatca

SEQ ID NO: 36268 - DNA, 1622 bp, Zea Mays
ggattgtaggagttgagcccttgggggagttttgtcctttggagcttgtggtgacataattttaggcacatatactcattgcagggtacatacctaacatcagctgccctgcccttagtgacgcaagagaaaatgattgcttgagggtccaactttagggagcttcaatgttcaaggggcggcagcacgctggacgtgtcaaaacaagctgattaatcacagatctctgcacgcaggcggcgctaccggagctaaaggggcggcagcacactgggagcgcggctgcgccagatcggcgacgcgatgggattgcgtccagagggtggcggctgtgcataaatgatgttcctcactctcccacctgcatctatccatgagcgtccataatcgcaatgggattgcatcgggaaggtgaatggggactagctacaggtcggccgcgtgttgctgtgcgtacatatcactgtctaggggccctagctgcatgtgggaggcgtggcgatcatcacttcagatgagggggagatctcttcaaacaggtgcaaaggatgtttctgctgggcaagaaaagatggtttaaatttttctattgggtagagagaaaaatagtattggttggatttaagtacaatacatgttccatgttgccataatataatagctaaaacagtgttcgtactttagaatcctaggtgtcttaaactgtcttgtcattgctattagtattttccaatgtccccactatgcacgatctgctgctggaagcaaattactaaccgtaggtgacttttatggtggtccagaaacggcacaataccaggtcctttttcagtcgacaggagcgggaacgtacttcctggtgggtggaaatgggaaacaatctgatttgaccccagattttcagtagctggattcaagatttggcctttgggatatcaaaagtaggaagcgtgttgtatattctctgctagcagcaccagcatccaagattttacactccaggtgtccaaacccatcacggttcagtgtttacaattgaaaagtgatccaccggagaaccagcagtgtccaggaacaaaccagcagcgcgtgcgagctgttgttattaccatgaggacacataggtgctgtcataattgtaatgtgacgggtaacaaatagcgttaaattatgtttgtttaagtctaaccgtaattagatatcacactagaaactgtattcaaatttattatcgttgtcacttgagcgtgaattattactgctgtcattacgttataatccgtgaatcaaacaataccatagtgttatggtcatcgataatgagggaagcatgggcaagcttgggaaatgaaagtacagtggccggccccaaggaattctgaattaatggttgagatttggacgcaaacatgaagctgactcgatggcatttgaagaggcgacagtcagtgaccttcagtgaaatcggattgtcacacaacaatgtgatggagatgccggacaatttcttttgaccaacggaaccgtataatgacatgtgaaattcactaacatatatacttggttatcctatcaatatggtcctaccaagtaaacgtcatgaacattcttctacatgatca

SEQ ID NO: 36269 - DNA, 863 bp, Zea Mays
caaagacatcctgatttcaggtactattccatgtatgggcatgttggcaaactagctgaagagatcaagaaaggtgccttatctgttgaaggtgttgaggctaaaatatggcaggtccctgaaattctctctgaagaagtgcttggaaagatgggcgcgccccctaagcccgacgtgccagtcatcacaccgcaggaacttgcagaggctgacggtatcctctttgggttcccgacaaggttcggaatgatggcagctcagatgaaggcgttcttcgatgccaccggtgggctctggagggagcagagcctcgctggcaagcctgccggcatgttcttcagcactggaacccagggtggtggccaagagactacaccgctgacggcgattacccagttgacgcaccacggcatggtgtttgtgcccgtgggctacaccttcggcgccaagctgttcggcatggaccaggtccagggtggcagcccctacggcgccggcacgttcgccgccgacggctcgaggtggccgagcgaggtggagctggagcacgccttccaccaggggaaatacttcgcgggcatcgccaagaagctcaagggctctgcttgatctgcacatacccctctgtcagatatcataaaacatttacagattcgtcatacccgtcaccgtcaatagattggtctgtgttctctcgtggtgcctcgatgctatgtagttcattggtactgctgccgtatgaatttcgatgattgctctggtgacttggtttgtaatttggagttggactatcgttgtttctgccgcataaatttcgatgatttggtcaagtaaacgacttgcaggcttgcagctggttgatc

SEQ ID NO: 36270 - DNA, 611 bp, Zea Mays
ctgcccccttagtttagttcaccgtgagttgtagtggctcacgtcttcatgtctgtgttagcgttcccctagccgcaccgggtgtttgcccaagttcttcgcacgacgattccctacgtttggtgatcatgccaccgacgtctcaccccatcagggtcaagctagcacgaacaccggcttgccgtcgtggatcgacgccgtgaaccacccccaacgtcgaccgatccgcttatgacttctcagagcaaacttcggtgagcaccgtgtgctcggtgaaccactgatgctccccgtactcttcattcaagttctaccatgtccaaggttctagccgtggccagggccggtcctagcattttaggggccctagacgaaaactaatttagaggctcctctttggctcttatccctatatatattactaggtaggtgcccgtgcgttgcaacggaaacatatcgtcagcatagggaacgcatctcctaccaatctggtataaaggtctcgacgatcatgagctctgcctctgcccccaggcagcagccgccgccagcatcaggcggccccccagcaacgtccagcgcgcaggtcgcagcctctgcttcgttgggag

SEQ ID NO: 36271 - DNA, 1497 bp, Zea Mays
gtttacattgacaacatgcatttcgagcaaaccgccgggccccgagcaagcgcgtggtggtgatcgctgtcgtggcgacagttaccggcgtgctccttcttctgctgtcggccggctgctgctgcgtctggaggagaaagaggagggagcgccacggcgagacggatccctgcccggcgccgccgagcggcggcggagacgacgcgctcccgttcagggcaaggaagcagcaggcgctggacgaggactggaggagcgccgagaaagacgttgacctgccgttgttcgatctggcggcggtcctggcagctacgggcagcttctccgcgagcaacaagatcggcgaaggcgggtttggtcctgtctacatgggaaagctggaggatgggcaggaagtagccgtcaagaggctgtcccggaggtcgatgcagggggcggtggagttcaagaacgaggtgaagctgatcgccaagctccagcaccggaacctcgtcaggctgctcggctgctgcatagacgaggacgagaggatgctcctgtacgagtacatgcacaaccagagcctcgacacgttcatattcgatgaaggcaagcggaggctgctagggtggcagaaacgcttcgatatcattctgggggtcgcgcggggtctgcagtacctgcacgaggattcgaggttcaggatcgtccacagggatctcaaggcgagcaacgtgttgctggacacgaacatggtccccaaaatttcggacttcggcatcgcaaggatgttcggaggtgaccagaccacggcatacacactgaaggtcattgggacatacggctacatgtccccggagtatgcgatggacggcgtgttttccatgaagtccgacgtctacagcttcggcgtgctggttctagagatcatcaccggcaagagaaaccgaggcttctacgaagaagagctcgacctcaacctcctccgatatgcatggatgatgtggaaagaaggcagaggcgctgatctgctggacccggtcatggacggcggcggcagcgtcaaccacagcgaggtgctgcggtgcgtccaggtcgccctgctgtgcgtcgaagtgctgcccaggaacaggcccctcatgtcgtcggcggtcatgatgctggccagcgagaacgcgacggtcgccgagccgaacgagcccggggtcaacgtcgggaagaacacgtcggacacggagtcgtctcacggcttcacggccaacagcgtcaccataaccgccattgacgctaggtagcttttggatagatttgccctcaccagagcgcgaccaccggcaggtgattattctaatgacgacgcagtctgttgtcttgtattaactgtgtattttgtacagcaaaggttccgttgccgaaggcctacatctctcactcgaagcctccagtaatatgtaaagttcagagcttgtaaagatttacattcaaaagccacccggttcaatttgttgatggattttc

SEQ ID NO: 36272 - DNA, 422 bp, Zea Mays
atgggcgtggagagccctccagcggtggagatctccttccacacccccgacattcgctggaccgcaacatccaagtctacctgggaaggatccgccgctattcctaaattgcgcgaggttcgaggacgagccgacctcgtgtgctgctgcggggacgacgacgccatcacctatgatgaggcggaagcgacagagagcgatgcacgggttgggcgggcacacgccgcagcgagagtgtgtggggagcatgttgagcgcaagcagttgagatccaggtggcacaggaatgagagcaggctggtggtgacgagggcttggaaggagaggagcggtgtggtcggggaggaagaagactcctatctggttcactaattggaaaacggagcagagggggacccgcaccatcactcggcatgaccgcg

SEQ ID NO: 36273 - DNA, 932 bp, Zea Mays
cggtggtcctgctcagggttcagcacatccacattctctggatttgtaccctattcaggttgttgtggtcttgttctgagtttagcatatccacgttatctcaatctctttttagatagcactcaaaattcagatgtcaggtctctatgatattggttatctataattctagtgcccttcttttgtaatgataattaggtcagttgtctcactaacgctatgctgcgctagattgaatgcagggattgcagctgcagctaatgacgttttccttggcccagtccatacttatcagccaatagtgttcaagggagggtaattagaagaatgcttatgctgccactatttttattggctcaaaggaagaactgaatcaggagaggaaacggtaatagagtgcggagataatgaattccaaattgctcaatgatctatctgagataaagtctgctgccaacgttatttgtaagattgtgagaaggaggaaggcacgtgtgctcgtggaagaagtctgtgacgaattatcgaaagagatcacataagacaaagctgaggtggaggctctaacacttgaagcaatgaaggttaggctgaggtttggcgtgaatagagggttggggtccagcggggttaacatgccttctgctcgtattttccaatcacaaagttcattgtaatttagaaattacagtgatgtcatgtagaaaacactcaagagttgaaccaacatattgagaaaacaaagttagctataccaacctccaaattttgtaggaccttctggtgtttcatggccataactaagaccatttagctccttcatctcaaagttgtataaataacctacaaaacataccaaaggccaaaactttagttcataaatgaatcatagtgcaagcagttatacaaagtgcaaaaaatggttgtttgac

SEQ ID NO: 36274 - DNA, 3018 bp, Zea Mays
ctcaatttgtttgcctggaatctagacttgcatggtgtccgttagatgttttgatcccctctacacttctttctctttaagcgtttttagtgttgattattatctggtcaaagtcaagcagatagaaaaagtggagtatgattgcaataactgagagatagtcagttccctgtcaaactatcattctcaagtggacgagctggttgccaatcagtgcttagagtttagtatccattagagacgccaatgttgaccgacgactagaaaattgacctcatagttctatcatggaacttctaaaactcataactctgaatgttcatcccaaaagttttacccgctggcactccccaccacgcattctctctccccacccccaacgcagcgattgcaggaaccatttcacttatctgggagaattcagagaggtacatttcacttatttgggagaattcagagagatgggaggggcaactcattcacagtggcttatggacggggagtgcaagatgtggaggctgcaatgctggataacggcaatttcatcttaaggagcatcacgaaccaagctaagatcatatggcagagctttgactctcctactgatacatggttccctggaattaatattacacttggtgctaaattgctgacttcatggaagagctatgatgacccagcagtaggggattattcttttggacctggcataactaatgcatctcaactcattatctggtggaaagggatccaattttggaccagtttacgctggaatggtgataccaactctctcattccagagctgacatctcttggtatcatccctgttttatttcaatgtgacaaccttacatgtacatacactgccaatcccagagacacaatgacaaagattgtgttagatccaaatggttcattgaacatagcccaatttagtcctgtaactgagtcatggactctgttatggcgacagcctcctagctgtgaggtatctaacatatgtggtgtttttggtatatgcaacaacaatatgtcacccatatgtcattgtccactaggctttgaacaacaagcaggagatacccggaaagggtgcactaggcaaatccaactgcagtgtaatggtgataggtttgttaatatgtccaatatgcgattccctgactcaagagttaaactttctgttatgggagacggcaaatgccaattggaatgcatgaaaaattgctcctgcactgcatacacttattctgtattggatggttgcagcctatggtatggcaatttaacaaatatgcaggacggatataagagtggagcagggactctttatcttcgtgttgctaatagttcaggtcacaaattactttggatagctggtgtacttccttcaattggatttcttattttttgtctgatcttgtttatttggatcagcagatcaaaaaacaaaggaaaaggaaaacaggatggtcatcactccataatgacttcggatgctatcaaactctgggaggaaaacatgcttggagaaggggggtttggcccagtgtacaagggccacttaccggatgggcaagagattgctgttaagagactggcagcaaattcagggcaagggttaactgagtttaaaaacgaagtcctcctcatagctaaacttcagcacagcaatttagtccggctgttaggttgctgcattgaagaggaagagatgctattagtgtatgagtacatgccaaacaaaagcttggatttcttcttatttgaaaaatcaagaagagctttgctagactgggagatgcgcatgaacataatcgaaggggtcgcgcagggtcttatctatctccacaagcattctcggctcagggttatccatagggacctgaaagcaagcaacattttgctggacactgatatgaaccctaagatctcggactttgggatggcgagaatattcgatcccaaaggaacgcaagccaatacgaaaagagttgtaggaacatatggctacatggctcccgagtatgctatggcaggcaatttctccaccaagtccgatgtgtttagctacggagtgttgcttctggagattatcagtggaatgagaaacgctggacctcgaaggcatggcaactccgttagcctccttggttacgcatgggaactatggaacgaaggcaggtgccatgagctcatcgataaaccattacgcggcaggtgtcctgagaacgtagcgttaagatgcatccatgtcagcttgctgtgtgttcaggagcaagctgcggatcggccctccatgactgaggtcatttcaatgattaccaacggaagtgccacgttaccagacccaaagcagcccggtttcctctccatgttggtcccaaacgaaaccgatgtcgctgaagaaacatgctccctgaatggtctctcagtcaccatccttgacggaagatagcactagttcaaatcgccgcctttctttgcttggtccatgcatgcgcgttaccattgcatcactttgcatggtatttcccaaaagttatattacgggagcctgaaagttttgttctcatgcatccaggctaatggtatataagcatcgccgcatcattgagtccttgtccttagaggaacgtatggttgttgatggtgccaacctggcattatgactttctgatttcatcacatattttcatccaggctatatatatgctcgcttttattctgttcggtcaagattcaacacgaggatttaaacgacaatgcaaatgaactggcataaacatttcatcggtggggattgctttctctcttttcctctctctatctacatgatggagacaatgtcagtcgctgcatagtcgcggcatgttcttatgcatggctcgttcatcatgacttttgattggtttggcgagctcaggctggcacacagttgtaaaaaaaagtaagcgttctgatgtgtgacagttgcccaaatcaatctttgtccgttgcgtgacaacgatggtg

SEQ ID NO: 36275 - DNA, 2281 bp, Zea Mays
aaaggaataaaatgaagggactaaacattagtccctagaaaccaaacacccccttataaaatctatgtaacatactcaatttgtttgcctggaatctagacttgcatggtgtccgttagatgttttgatcccctctacacttctttctctttaagcgtttttagtgttgattattatctggtcaaagtcaagcagatagaaaaagtggagtatgattgcaataactgagagatagtcagttccctgtcaaactatcattctcaagtggacgagctggttgccaatcagtgcttagagtttagtatccattagagacgccaatgttgaccgacgactagaaaattgacctcatagttctatcatggaacttctaaaactcataactctgaatgttcatcccaaaagttttacccgctggcactccccaccacgcattctctctccccacccccaacgcagcgattgcaggaaccatttcacttatctgggagaattcagagaggtacatttcacttatttgggagaattcagagagcctatggtatggcaatttaacaaatatgcaggacggatataagagtggagcagggactctttatcttcgtgttgctaatagttcaggtcacaaattactttggatagctggtgtacttccttcaattggatttcttattttttgtctgatcttgtttatttggatcagcagatcaaaaaacaaaggaaaaggaaaacaggatggtcatcactccataatgacttcggatgctatcaaactctgggaggaaaacatgcttggagaaggggggtttggcccagtgtacaagggccacttaccggatgggcaagagattgctgttaagagactggcagcaaattcagggcaagggttaactgagtttaaaaacgaagtcctcctcatagctaaacttcagcacagcaatttagtccggctgttaggttgctgcattgaagaggaagagatgctattagtgtatgagtacatgccaaacaaaagcttggatttcttcttatttgaaaaatcaagaagagctttgctagactgggagatgcgcatgaacataatcgaaggggtcgcgcagggtcttatctatctccacaagcattctcggctcagggttatccatagggacctgaaagcaagcaacattttgctggacactgatatgaaccctaagatctcggactttgggatggcgagaatattcgatcccaaaggaacgcaagccaatacgaaaagagttgtaggaacatatggctacatggctcccgagtatgctatggcaggcaatttctccaccaagtccgatgtgtttagctacggagtgttgcttctggagattatcagtggaatgagaaacgctggacctcgaaggcatggcaactccgttagcctccttggttacgcatgggaactatggaacgaaggcaggtgccatgagctcatcgataaaccattacgcggcaggtgtcctgagaacgtagcgttaagatgcatccatgtcagcttgctgtgtgttcaggagcaagctgcggatcggccctccatgactgaggtcatttcaatgattaccaacggaagtgccacgttaccagacccaaagcagcccggtttcctctccatgttggtcccaaacgaaaccgatgtcgctgaagaaacatgctccctgaatggtctctcagtcaccatccttgacggaagatagcactagttcaaatcgccgcctttctttgcttggtccatgcatgcgcgttaccattgcatcactttgcatggtatttcccaaaagttatattacgggagcctgaaagttttgttctcatgcatccaggctaatggtatataagcatcgccgcatcattgagtccttgtccttagaggaacgtatggttgttgatggtgccaacctggcattatgactttctgatttcatcacatattttcatccaggctatatatatgctcgcttttattctgttcggtcaagattcaacacgaggatttaaacgacaatgcaaatgaactggcataaacatttcatcggtggggattgctttctctcttttcctctctctatctacatgatggagacaatgtcagtcgctgcatagtcgcggcatgttcttatgcatggctcgttcatcatgacttttgattggtttggcgagctcaggctggcacacagttgtaaaaaaaagtaagcgttctgatgtgtgacagttgcccaaatcaatctttgtccgttgcgtgacaacgatggtg

SEQ ID NO: 36276 - DNA, 2104 bp, Zea Mays
cgagggtcttcgccctagtcgcctgtgcgcagcgggcctagaggcagcgactgagatatccattccactcccgtcaataattcgtcatgaccactgaccaggttgccttcacggagccgagctcatctatgacgttactgaaattgaaacttgaacggggatggggatccaaggaagaagatgacggatcgtgcaaataaggagccgctatgcccgcggaagaggaagaagcgaataagcgatatatctgcttccaaaaggctagaagctggaattccattcagacacatgtcacaagcaacatgatttggacatttcaacgaacacgtcgttggacgtagcagcagcagcagcctatggtatggcaatttaacaaatatgcaggacggatataagagtggagcagggactctttatcttcgtgttgctaatagttcagttcaggtcacaaattactttggatagctggtgtacttccttcaattggatttcttattttttgtctgatcttgtttatttggatcagcagatcaaaaaacaaaggaaaaggaaaacaggatggtcatcactccataatgacttcggatgctatcaaactctgggaggaaaacatgcttggagaaggggggtttggcccagtgtacaagggccacttaccggatgggcaagagattgctgttaagagactggcagcaaattcagggcaagggttaactgagtttaaaaacgaagtcctcctcatagctaaacttcagcacagcaatttagtccggctgttaggttgctgcattgaagaggaagagatgctattagtgtatgagtacatgccaaacaaaagcttggatttcttcttatttgaaaaatcaagaagagctttgctagactgggagatgcgcatgaacataatcgaaggggtcgcgcagggtcttatctatctccacaagcattctcggctcagggttatccatagggacctgaaagcaagcaacattttgctggacactgatatgaaccctaagatctcggactttgggatggcgagaatattcgatcccaaaggaacgcaagccaatacgaaaagagttgtaggaacatatggctacatggctcccgagtatgctatggcaggcaatttctccaccaagtccgatgtgtttagctacggagtgttgcttctggagattatcagtggaatgagaaacgctggacctcgaaggcatggcaactccgttagcctccttggttacgcatgggaactatggaacgaaggcaggtgccatgagctcatcgataaaccattacgcggcaggtgtcctgagaacgtagcgttaagatgcatccatgtcagcttgctgtgtgttcaggagcaagctgcggatcggccctccatgactgaggtcatttcaatgattaccaacggaagtgccacgttaccagacccaaagcagcccggtttcctctccatgttggtcccaaacgaaaccgatgtcgctgaagaaacatgctccctgaatggtctctcagtcaccatccttgacggaagatagcactagttcaaatcgccgcctttctttgcttggtccatgcatgcgcgttaccattgcatcactttgcatggtatttcccaaaagttatattacgggagcctgaaagttttgttctcatgcatccaggctaatggtatataagcatcgccgcatcattgagtccttgtccttagaggaacgtatggttgttgatggtgccaacctggcattatgactttctgatttcatcacatattttcatccaggctatatatatgctcgcttttattctgttcggtcaagattcaacacgaggatttaaacgacaatgcaaatgaactggcataaacatttcatcggtggggattgctttctctcttttcctctctctatctacatgatggagacaatgtcagtcgctgcatagtcgcggcatgttcttatgcatggctcgttcatcatgacttttgattggtttggcgagctcaggctggcacacagttgtaaaaaaaagtaagcgttctgatgtgtgacagttgcccaaatcaatctttgtccgttgcgtgacaacgatggtg

SEQ ID NO: 36277 - DNA, 3436 bp, Zea Mays
cgagggtcttcgccctagtcgcctgtgcgcagcgggcctagaggcagcgactgagatatccattccactcccgtcaataattcgtcatgaccactgaccaggttgccttcacggagccgaggaagaagatgacggatcgtgcaaataaggagccgctatgcccgcggaagaggaagaagcgaataagcgatatatctgcttccaaaaggctagaagctggaattccattcagacacatgtcacaagcaacatgatttggacatttcaacgaacacgtcgttggacgtagcagcagcagcagcgattgcaggaaccatttcacttatctgggagaattcagagaggtacatttcacttatttgggagaattcagagaggtacggagaaattcaatccctttcctcatgattatgtcagtgcatttctctcttgctgctttgatttgattagcctagtttggtaatcggagtaaagcagatagccatgtttgggaaaataagtttctgcagagagtgcacccttgttaatttgttgatcctgtctgtaatagcatcaagatgcttgtcagctcccacagaaagattaggcagtatttttcagaaccaatcaattttagatgggcagacactagtgtccatgagcagaattttcgtgctcggtttctttagccctggagcttcgagcaagcgatatgttggtatatggcacaacgatgtttcagaaagaagagttgtatgggttgccaacaggaacgatccattacaagatacttctggcatacttaagtttgataacagtagcaatctgatcgttttagatgggaggggcaactcattcacagtggcttatggacggggagtgcaagatgtggaggctgcaatgctggataacggcaatttcatcttaaggagcatcacgaaccaagctaagatcatatggcagagctttgactctcctactgatacatggttccctggaattaatattacacttggtgctaaattgctgacttcatggaagagctatgatgacccagcagtaggggattattcttttggacctggcataactaatgcatctcaactcattatctggtggaaagggatccaattttggaccagtttacgctggaatggtgataccaactctctcattccagagctgacatctcttggtatcatccctgttttatttcaatgtgacaaccttacatgtacatacactgccaatcccagagacacaatgacaaagattgtgttagatccaaatggttcattgaacatagcccaatttagtcctgtaactgagtcatggactctgttatggcgacagcctcctagctgtgaggtatctaacatatgtggtgtttttggtatatgcaacaacaatatgtcacccatatgtcattgtccactaggctttgaacaacaagcaggagatacccggaaagggtgcactaggcaaatccaactgcagtgtaatggtgataggtttgttaatatgtccaatatgcgattccctgactcaagagttaaactttctgttatgggagacggcaaatgccaattggaatgcatgaaaaattgctcctgcactgcatacacttattctgtattggatggttgcagcctatggtatggcaatttaacaaatatgcaggacggatataagagtggagcagggactctttatcttcgtgttgctaatagttcaggtcacaaattactttggatagctggtgtacttccttcaattggatttcttattttttgtctgatcttgtttatttggatcagcagatcaaaaaacaaaggaaaaggaaaacaggatggtcatcactccataatgacttcggatgctatcaaactctgggagggtgagaaaacaagcacttattttgcggtgttttccttttcacaaataagaaatggtacagacaaattttcaacagaaaacatgcttggagaaggggggtttggcccagtgtacaagggccacttaccggatgggcaagagattgctgttaagagactggcagcaaattcagggcaagggttaactgagtttaaaaacgaagtcctcctcatagctaaacttcagcacagcaatttagtccggctgttaggttgctgcattgaagaggaagagatgctattagtgtatgagtacatgccaaacaaaagcttggatttcttcttatttgagctttgctagactgggagatgcgcatgaacataatcgaaggggtcgcgcagggtcttatctatctccacaagcattctcggctcagggttatccatagggacctgaaagcaagcaacattttgctggacactgatatgaaccctaagatctcggactttgggatggcgagaatattcgatcccaaaggaacgcaagccaatacgaaaagagttgtaggaacatatggctacatggctcccgagtatgctatggcaggcaatttctccaccaagtccgatgtgtttagctacggagtgttgcttctggagattatcagtggaatgagaaacgctggacctcgaaggcatggcaactccgttagcctccttggttacgcatgggaactatggaacgaaggcaggtgccatgagctcatcgataaaccattacgcggcaggtgtcctgagaacgtagcgttaagatgcatccatgtcagcttgctgtgtgttcaggagcaagctgcggatcggccctccatgactgaggtcatttcaatgattaccaacggaagtgccacgttaccagacccaaagcagcccggtttcctctccatgttggtcccaaacgaaaccgatgtcgctgaagaaacatgctccctgaatggtctctcagtcaccatccttgacggaagatagcactagttcaaatcgccgcctttctttgcttggtccatgcatgcgcgttaccattgcatcactttgcatggtatttcccaaaagttatattacgggagcctgaaagttttgttctcatgcatccaggctaatggtatataagcatcgccgcatcattgagtccttgtccttagaggaacgtatggttgttgatggtgccaacctggcattatgactttctgatttcatcacatattttcatccaggctatatatatgctcgcttttattctgttcggtcaagattcaacacgaggatttaaacgacaatgcaaatgaactggcataaacatttcatcggtggggattgctttctctcttttcctctctctatctacatgatggagacaatgtcagtcgctgcatagtcgcggcatgttcttatgcatggctcgttcatcatgacttttgattggtttggcgagctcaggctggcacacagttgtaaaaaaaagtaagcgttctgatgtgtgacagttgcccaaatcaatctttgtccgttgcgtgacaacgatggtg

SEQ ID NO: 36278 - DNA, 3763 bp, Zea Mays
cgagggtcttcgccctagtcgcctgtgcgcagcgggcctagaggcagcgactgagatatccattccactcccgtcaataattcgtcatgaccactgaccaggttgccttcacggagccgagctcatctatgacgttactgaaattgaaacttgaacggggatggggatccaaggaagaagatgacggatcgtgcaaataaggagccgctatgcccgcggaagaggaagaagcgaataagcgatatatctgcttccaaaaggctagaagctggaattccattcagacacatgtcacaagcaacatgatttggacatttcaacgaacacgtcgttggacgtagcagcagcagcagtcaagcagatagaaaaagtggagtatgattgcaataactgagagatagtcagttccctgtcaaactatcattctcaagtggacgagctggttgccaatcagtgcttagagtttagtatccattagagacgccaatgttgaccgacgactagaaaattgacctcatagttctatcatggaacttctaaaactcataactctgaatgttcatcccaaaagttttacccgctggcactccccaccacgcattctctctccccacccccaacgcagcgattgcaggaaccatttcacttatctgggagaattcagagaggtacatttcacttatttgggagaattcagagaggtacggagaaattcaatccctttcctcatgattatgtcagtgcatttctctcttgctgctttgatttgattagcctagtttggtaatcggagtaaagcagatagccatgtttgggaaaataagtttctgcagagagtgcacccttgttaatttgttgatcctgtctgtaatagcatcaagatgcttgtcagctcccacagaaagattaggcagtatttttcagaaccaatcaattttagatgggcagacactagtgtccatgagcagaattttcgtgctcggtttctttagccctggagcttcgagcaagcgatatgttggtatatggcacaacgatgtttcagaaagaagagttgtatgggttgccaacaggaacgatccattacaagatacttctggcatacttaagtttgataacagtagcaatctgatcgttttagatgggaggggcaactcattcacagtggcttatggacggggagtgcaagatgtggaggctgcaatgctggataacggcaatttcatcttaaggagcatcacgaaccaagctaagatcatatggcagagctttgactctcctactgatacatggttccctggaattaatattacacttggtgctaaattgctgacttcatggaagagctatgatgacccagcagtaggggattattcttttggacctggcataactaatgcatctcaactcattatctggtggaaagggatccaattttggaccagtttacgctggaatggtgataccaactctctcattccagagctgacatctcttggtatcatccctgttttatttcaatgtgacaaccttacatgtacatacactgccaatcccagagacacaatgacaaagattgtgttagatccaaatggttcattgaacatagcccaatttagtcctgtaactgagtcatggactctgttatggcgacagcctcctagctgtgaggtatctaacatatgtggtgtttttggtatatgcaacaacaatatgtcacccatatgtcattgtccactaggctttgaacaacaagcaggagatacccggaaagggtgcactaggcaaatccaactgcagtgtaatggtgataggtttgttaatatgtccaatatgcgattccctgactcaagagttaaactttctgttatgggagacggcaaatgccaattggaatgcatgaaaaattgctcctgcactgcatacacttattctgtattggatggttgcagcctatggtatggcaatttaacaaatatgcaggacggatataagagtggagcagggactctttatcttcgtgttgctaatagttcaggtcacaaattactttggatagctggtgtacttccttcaattggatttcttattttttgtctgatcttgtttatttggatcagcagatcaaaaaacaaaggaaaaggaaaacaggatggtcatcactccataatgacttcggatgctatcaaactctgggagggtgagaaaacaagcacttattttgcggtgttttccttttcacaaataagaaatggtacagacaaattttcaacagaaaacatgcttggagaaggggggtttggcccagtgtacaagggccacttaccggatgggcaagagattgctgttaagagactggcagcaaattcagggcaagggttaactgagtttaaaaacgaagtcctcctcatagctaaacttcagcacagcaatttagtccggctgttaggttgctgcattgaagaggaagagatgctattagtgtatgagtacatgccaaacaaaagcttggatttcttcttatttgaagagctttgctagactgggagatgcgcatgaacataatcgaaggggtcgcgcagggtcttatctatctccacaagcattctcggctcagggttatccatagggacctgaaagcaagcaacattttgctggacactgatatgaaccctaagatctcggactttgggatggcgagaatattcgatcccaaaggaacgcaagccaatacgaaaagagttgtaggaacatatggctacatggctcccgagtatgctatggcaggcaatttctccaccaagtccgatgtgtttagctacggagtgttgcttctggagattatcagtggaatgagaaacgctggacctcgaaggcatggcaactccgttagcctccttggttacgcatgggaactatggaacgaaggcaggtgccatgagctcatcgataaaccattacgcggcaggtgtcctgagaacgtagcgttaagatgcatccatgtcagcttgctgtgtgttcaggagcaagctgcggatcggccctccatgactgaggtcatttcaatgattaccaacggaagtgccacgttaccagacccaaagcagcccggtttcctctccatgttggtcccaaacgaaaccgatgtcgctgaagaaacatgctccctgaatggtctctcagtcaccatccttgacggaagatagcactagttcaaatcgccgcctttctttgcttggtccatgcatgcgcgttaccattgcatcactttgcatggtatttcccaaaagttatattacgggagcctgaaagttttgttctcatgcatccaggctaatggtatataagcatcgccgcatcattgagtccttgtccttagaggaacgtatggttgttgatggtgccaacctggcattatgactttctgatttcatcacatattttcatccaggctatatatatgctcgcttttattctgttcggtcaagattcaacacgaggatttaaacgacaatgcaaatgaactggcataaacatttcatcggtggggattgctttctctcttttcctctctctatctacatgatggagacaatgtcagtcgctgcatagtcgcggcatgttcttatgcatggctcgttcatcatgacttttgattggtttggcgagctcaggctggcacacagttgtaaaaaaaagtaagcgttctgatgtgtgacagttgcccaaatcaatctttgtccgttgcgtgacaacgatggtg

SEQ ID NO: 36279 - DNA, 1998 bp, Zea Mays
tttcgctgcgaacagaggacgagggtcttcgccctagtcgcctgtgcgcagcgggcctagaggcagcgactgagatatccattccactcccgtcaataattcgtcatgaccactgaccaggttgccttcacggagccgagctcatctatgacgttactgaaattgaaacttgaacggggatggggatccaaggaagaagatgacggatcgtgcaaataaggagccgctatgcccgcggaagaggaagaagcgaataagcgatatatctgcttccaaaaggctagaagctggaattccattcagacacatgtcacaagcaacatgatttggacatttcaacgaacacgtcgttggacgtagcagcagcagcaggaaaaggaaaacaggatggtcatcactccataatgacttcggatgctatcaaactctgggagggtgagaaaacaagcacttattttgcggtgttttccttttcacaaataagaaatggtacagacaaattttcaacagaaaacatgcttggagaaggggggtttggcccagtgtacaagggccacttaccggatgggcaagagattgctgttaagagactggcagcaaattcagggcaagggttaactgagtttaaaaacgaagtcctcctcatagctaaacttcagcacagcaatttagtccggctgttaggttgctgcattgaagaggaagagatgctattagtgtatgagtacatgccaaacaaaagcttggatttcttcttatttgaagagctttgctagactgggagatgcgcatgaacataatcgaaggggtcgcgcagggtcttatctatctccacaagcattctcggctcagggttatccatagggacctgaaagcaagcaacattttgctggacactgatatgaaccctaagatctcggactttgggatggcgagaatattcgatcccaaaggaacgcaagccaatacgaaaagagttgtaggaacatatggctacatggctcccgagtatgctatggcaggcaatttctccaccaagtccgatgtgtttagctacggagtgttgcttctggagattatcagtggaatgagaaacgctggacctcgaaggcatggcaactccgttagcctccttggttacgcatgggaactatggaacgaaggcaggtgccatgagctcatcgataaaccattacgcggcaggtgtcctgagaacgtagcgttaagatgcatccatgtcagcttgctgtgtgttcaggagcaagctgcggatcggccctccatgactgaggtcatttcaatgattaccaacggaagtgccacgttaccagacccaaagcagcccggtttcctctccatgttggtcccaaacgaaaccgatgtcgctgaagaaacatgctccctgaatggtctctcagtcaccatccttgacggaagatagcactagttcaaatcgccgcctttctttgcttggtccatgcatgcgcgttaccattgcatcactttgcatggtatttcccaaaagttatattacgggagcctgaaagttttgttctcatgcatccaggctaatggtatataagcatcgccgcatcattgagtccttgtccttagaggaacgtatggttgttgatggtgccaacctggcattatgactttctgatttcatcacatattttcatccaggctatatatatgctcgcttttattctgttcggtcaagattcaacacgaggatttaaacgacaatgcaaatgaactggcataaacatttcatcggtggggattgctttctctcttttcctctctctatctacatgatggagacaatgtcagtcgctgcatagtcgcggcatgttcttatgcatggctcgttcatcatgacttttgattggtttggcgagctcaggctggcacacagttgtaaaaaaaagtaagcgttctgatgtgtgacagttgcccaaatcaatctttgtccgttgcgtgacaacgatggtg

SEQ ID NO: 36280 - DNA, 1869 bp, Zea Mays
cacggatggtcggatggacacggatgttgcctagctagactttcgctgcgaacagaggacgagggtcttcgccctagtcgcctgtgcgcagcgggcctagaggcagcgactgagatatccattccactcccgtcaataattcgtcatgaccactgaccaggttgccttcacggagccgagctcatctatgacgttactgaaattgaaacttgaacggggatggggatccaaggaagaagatgacggatcgtgcaaataaggagccgctatgcccgcggaagaggaagaagcgaataagcgatatatctgcttccaaaaggctagaagctggaattccattcagacacatgtcacaagcaacatgatttggacatttcaacgaacacgtcgttggacgtagcagcagcagcagggccacttaccggatgggcaagagattgctgttaagagactggcagcaaattcagggcaagggttaactgagtttaaaaacgaagtcctcctcatagctaaacttcagcacagcaatttagtccggctgttaggttgctgcattgaagaggaagagatgctattagtgtatgagtacatgccaaacaaaagcttggatttcttcttatttgaaaaatcaagaagagctttgctagactgggagatgcgcatgaacataatcgaaggggtcgcgcagggtcttatctatctccacaagcattctcggctcagggttatccatagggacctgaaagcaagcaacattttgctggacactgatatgaaccctaagatctcggactttgggatggcgagaatattcgatcccaaaggaacgcaagccaatacgaaaagagttgtaggaacatatggctacatggctcccgagtatgctatggcaggcaatttctccaccaagtccgatgtgtttagctacggagtgttgcttctggagattatcagtggaatgagaaacgctggacctcgaaggcatggcaactccgttagcctccttggttacgcatgggaactatggaacgaaggcaggtgccatgagctcatcgataaaccattacgcggcaggtgtcctgagaacgtagcgttaagatgcatccatgtcagcttgctgtgtgttcaggagcaagctgcggatcggccctccatgactgaggtcatttcaatgattaccaacggaagtgccacgttaccagacccaaagcagcccggtttcctctccatgttggtcccaaacgaaaccgatgtcgctgaagaaacatgctccctgaatggtctctcagtcaccatccttgacggaagatagcactagttcaaatcgccgcctttctttgcttggtccatgcatgcgcgttaccattgcatcactttgcatggtatttcccaaaagttatattacgggagcctgaaagttttgttctcatgcatccaggctaatggtatataagcatcgccgcatcattgagtccttgtccttagaggaacgtatggttgttgatggtgccaacctggcattatgactttctgatttcatcacatattttcatccaggctatatatatgctcgcttttattctgttcggtcaagattcaacacgaggatttaaacgacaatgcaaatgaactggcataaacatttcatcggtggggattgctttctctcttttcctctctctatctacatgatggagacaatgtcagtcgctgcatagtcgcggcatgttcttatgcatggctcgttcatcatgacttttgattggtttggcgagctcaggctggcacacagttgtaaaaaaaagtaagcgttctgatgtgtgacagttgcccaaatcaatctttgtccgttgcgtgacaacgatggtg

SEQ ID NO: 36281 - DNA, 2975 bp, Zea Mays
ttatgacacggatggtcggatggacacggatgttgcctagctagactttcgctgcgaacagaggacgagggtcttcgccctagtcgcctgtgcgcagcgggcctagaggcagcgactgagatatccattccactcccgtcaataattcgtcatgaccactgaccaggttgccttcacggagccgagctcatctatgacgttactgaaattgaaacttgaacggggatggggatccaaggaagaagatgacggatcgtgcaaataaggagccgctatgcccgcggaagaggaagaagcgaataagcgatatatctgcttccaaaaggctagaagctggaattccattcagacacatgtcacaagcaacatgatttggacatttcaacgaacacgtcgttggacgtagcagcagcagcagatgggaggggcaactcattcacagtggcttatggacggggagtgcaagatgtggaggctgcaatgctggataacggcaatttcatcttaaggagcatcacgaaccaagctaagatcatatggcagagctttgactctcctactgatacatggttccctggaattaatattacacttggtgctaaattgctgacttcatggaagagctatgatgacccagcagtaggggattattcttttggacctggcataactaatgcatctcaactcattatctggtggaaagggatccaattttggaccagtttacgctggaatggtgataccaactctctcattccagagctgacatctcttggtatcatccctgttttatttcaatgtgacaaccttacatgtacatacactgccaatcccagagacacaatgacaaagattgtgttagatccaaatggttcattgaacatagcccaatttagtcctgtaactgagtcatggactctgttatggcgacagcctcctagctgtgaggtatctaacatatgtggtgtttttggtatatgcaacaacaatatgtcacccatatgtcattgtccactaggctttgaacaacaagcaggagatacccggaaagggtgcactaggcaaatccaactgcagtgtaatggtgataggtttgttaatatgtccaatatgcgattccctgactcaagagttaaactttctgttatgggagacggcaaatgccaattggaatgcatgaaaaattgctcctgcactgcatacacttattctgtattggatggttgcagcctatggtatggcaatttaacaaatatgcaggacggatataagagtggagcagggactctttatcttcgtgttgctaatagttcaggtcacaaattactttggatagctggtgtacttccttcaattggatttcttattttttgtctgatcttgtttatttggatcagcagatcaaaaaacaaaggaaaaggaaaacaggatggtcatcactccataatgacttcggatgctatcaaactctgggaggaaaacatgcttggagaaggggggtttggcccagtgtacaagggccacttaccggatgggcaagagattgctgttaagagactggcagcaaattcagggcaagggttaactgagtttaaaaacgaagtcctcctcatagctaaacttcagcacagcaatttagtccggctgttaggttgctgcattgaagaggaagagatgctattagtgtatgagtacatgccaaacaaaagcttggatttcttcttatttgaaaaatcaagaagagctttgctagactgggagatgcgcatgaacataatcgaaggggtcgcgcagggtcttatctatctccacaagcattctcggctcagggttatccatagggacctgaaagcaagcaacattttgctggacactgatatgaaccctaagatctcggactttgggatggcgagaatattcgatcccaaaggaacgcaagccaatacgaaaagagttgtaggaacatatggctacatggctcccgagtatgctatggcaggcaatttctccaccaagtccgatgtgtttagctacggagtgttgcttctggagattatcagtggaatgagaaacgctggacctcgaaggcatggcaactccgttagcctccttggttacgcatgggaactatggaacgaaggcaggtgccatgagctcatcgataaaccattacgcggcaggtgtcctgagaacgtagcgttaagatgcatccatgtcagcttgctgtgtgttcaggagcaagctgcggatcggccctccatgactgaggtcatttcaatgattaccaacggaagtgccacgttaccagacccaaagcagcccggtttcctctccatgttggtcccaaacgaaaccgatgtcgctgaagaaacatgctccctgaatggtctctcagtcaccatccttgacggaagatagcactagttcaaatcgccgcctttctttgcttggtccatgcatgcgcgttaccattgcatcactttgcatggtatttcccaaaagttatattacgggagcctgaaagttttgttctcatgcatccaggctaatggtatataagcatcgccgcatcattgagtccttgtccttagaggaacgtatggttgttgatggtgccaacctggcattatgactttctgatttcatcacatattttcatccaggctatatatatgctcgcttttattctgttcggtcaagattcaacacgaggatttaaacgacaatgcaaatgaactggcataaacatttcatcggtggggattgctttctctcttttcctctctctatctacatgatggagacaatgtcagtcgctgcatagtcgcggcatgttcttatgcatggctcgttcatcatgacttttgattggtttggcgagctcaggctggcacacagttgtaaaaaaaagtaagcgttctgatgtgtgacagttgcccaaatcaatctttgtccgttgcgtgacaacgatggtg

SEQ ID NO: 36282 - DNA, 2054 bp, Zea Mays
ttatgacacggatggtcggatggacacggatgttgcctagctagactttcgctgcgaacagaggacgagggtcttcgccctagtcgcctgtgcgcagcgggcctagaggcagcgactgagatatccattccactcccgtcaataattcgtcatgaccactgaccaggttgccttcacggagccgagctcatctatgacgttactgaaattgaaacttgaacggggatggggatccaaggaagaagatgacggatcgtgcaaataaggagccgctatgcccgcggaagaggaagaagcgaataagcgatatatctgcttccaaaaggctagaagctggaattccattcagacacatgtcacaagcaacatgatttggacatttcaacgaacacgtcgttggacgtagcagcagcagcaggaaaaggaaaacaggatggtcatcactccataatgacttcggatgctatcaaactctgggagggtgagaaaacaagcacttattttgcggtgttttccttttcacaaataagaaatggtacagacaaattttcaacagaaaacatgcttggagaaggggggtttggcccagtgtacaagggccacttaccggatgggcaagagattgctgttaagagactggcagcaaattcagggcaagggttaactgagtttaaaaacgaagtcctcctcatagctaaacttcagcacagcaatttagtccggctgttaggttgctgcattgaagaggaagagatgctattagtgtatgagtacatgccaaacaaaagcttggatttcttcttatttgaaaaatcaagaagagctttgctagactgggagatgcgcatgaacataatcgaaggggtcgcgcagggtcttatctatctccacaagcattctcggctcagggttatccatagggacctgaaagcaagcaacattttgctggacactgatatgaaccctaagatctcggactttgggatggcgagaatattcgatcccaaaggaacgcaagccaatacgaaaagagttgtaggaacatatggctacatggctcccgagtatgctatggcaggcaatttctccaccaagtccgatgtgtttagctacggagtgttgcttctggagattatcagtggaatgagaaacgctggacctcgaaggcatggcaactccgttagcctccttggttacgcatgggaactatggaacgaaggcaggtgccatgagctcatcgataaaccattacgcggcaggtgtcctgagaacgtagcgttaagatgcatccatgtcagcttgctgtgtgttcaggagcaagctgcggatcggccctccatgactgaggtcatttcaatgattaccaacggaagtgccacgttaccagacccaaagcagcccggtttcctctccatgttggtcccaaacgaaaccgatgtcgctgaagaaacatgctccctgaatggtctctcagtcaccatccttgacggaagatagcactagttcaaatcgccgcctttctttgcttggtccatgcatgcgcgttaccattgcatcactttgcatggtatttcccaaaagttatattacgggagcctgaaagttttgttctcatgcatccaggctaatggtatataagcatcgccgcatcattgagtccttgtccttagaggaacgtatggttgttgatggtgccaacctggcattatgactttctgatttcatcacatattttcatccaggctatatatatgctcgcttttattctgttcggtcaagattcaacacgaggatttaaacgacaatgcaaatgaactggcataaacatttcatcggtggggattgctttctctcttttcctctctctatctacatgatggagacaatgtcagtcgctgcatagtcgcggcatgttcttatgcatggctcgttcatcatgacttttgattggtttggcgagctcaggctggcacacagttgtaaaaaaaagtaagcgttctgatgtgtgacagttgcccaaatcaatctttgtccgttgcgtgacaacgatggtg

SEQ ID NO: 36283 - DNA, 2081 bp, Zea Mays
gtcttatgacacggatggtcggatggacacggatgttgcctagctagactttcgctgcgaacagaggacgagggtcttcgccctagtcgcctgtgcgcagcgggcctagaggcagcgactgagatatccattccactcccgtcaataattcgtcatgaccactgaccaggttgccttcacggagccgagctcatctatgacgttactgaaattgaaacttgaacggggatggggatccaaggaagaagatgacggatcgtgcaaataaggagccgctatgcccgcggaagaggaagaagcgaataagcgatatatctgcttccaaaaggctagaagctggaattccattcagacacatgtcacaagcaacatgatttggacatttcaacgaacacgtcgttggacgtagcagcagcagcaggtcacaaattactttggatagctggtgtacttccttcaattggatttcttattttttgtctgatcttgtttatttggatcagcagatcaaaaaacaaaggaaaaggaaaacaggatggtcatcactccataatgacttcggatgctatcaaactctgggaggaaaacatgcttggagaaggggggtttggcccagtgtacaagggccacttaccggatgggcaagagattgctgttaagagactggcagcaaattcagggcaagggttaactgagtttaaaaacgaagtcctcctcatagctaaacttcagcacagcaatttagtccggctgttaggttgctgcattgaagaggaagagatgctattagtgtatgagtacatgccaaacaaaagcttggatttcttcttatttgaaaaatcaagaagagctttgctagactgggagatgcgcatgaacataatcgaaggggtcgcgcagggtcttatctatctccacaagcattctcggctcagggttatccatagggacctgaaagcaagcaacattttgctggacactgatatgaaccctaagatctcggactttgggatggcgagaatattcgatcccaaaggaacgcaagccaatacgaaaagagttgtaggaacatatggctacatggctcccgagtatgctatggcaggcaatttctccaccaagtccgatgtgtttagctacggagtgttgcttctggagattatcagtggaatgagaaacgctggacctcgaaggcatggcaactccgttagcctccttggttacgcatgggaactatggaacgaaggcaggtgccatgagctcatcgataaaccattacgcggcaggtgtcctgagaacgtagcgttaagatgcatccatgtcagcttgctgtgtgttcaggagcaagctgcggatcggccctccatgactgaggtcatttcaatgattaccaacggaagtgccacgttaccagacccaaagcagcccggtttcctctccatgttggtcccaaacgaaaccgatgtcgctgaagaaacatgctccctgaatggtctctcagtcaccatccttgacggaagatagcactagttcaaatcgccgcctttctttgcttggtccatgcatgcgcgttaccattgcatcactttgcatggtatttcccaaaagttatattacgggagcctgaaagttttgttctcatgcatccaggctaatggtatataagcatcgccgcatcattgagtccttgtccttagaggaacgtatggttgttgatggtgccaacctggcattatgactttctgatttcatcacatattttcatccaggctatatatatgctcgcttttattctgttcggtcaagattcaacacgaggatttaaacgacaatgcaaatgaactggcataaacatttcatcggtggggattgctttctctcttttcctctctctatctacatgatggagacaatgtcagtcgctgcatagtcgcggcatgttcttatgcatggctcgttcatcatgacttttgattggtttggcgagctcaggctggcacacagttgtaaaaaaaagtaagcgttctgatgtgtgacagttgcccaaatcaatctttgtccgttgcgtgacaacgatggtg

SEQ ID NO: 36284 - DNA, 1865 bp, Zea Mays
gtcttatgacacggatggtcggatggacacggatgttgcctagctagactttcgctgcgaacagaggacgagggtcttcgccctagtcgcctgtgcgcagcgggcctagaggcagcgactgagatatccattccactcccgtcaataattcgtcatgaccactgaccaggttgccttcacggagccgagctcatctatgacgttactgaaattgaaacttgaacggggatggggatccaaggaagaagatgacggatcgtgcaaataaggagccgctatgcccgcggaagaggaagaagcgaataagcgatatatctgcttccaaaaggctagaagctggaattccattcagacacatgtcacaagcaacatgatttggacatttcaacgaacacgtcgttggacgtagcagcagcagcagggccacttaccggatgggcaagagattgctgttaagagactggcagcaaattcagggcaagggttaactgagtttaaaaacgaagtcctcctcatagctaaacttcagcacagcaatttagtccggctgttaggttgctgcattgaagaggaagagatgctattagtgtatgagtacatgccaaacaaaagcttggatttcttcttatttgagctttgctagactgggagatgcgcatgaacataatcgaaggggtcgcgcagggtcttatctatctccacaagcattctcggctcagggttatccatagggacctgaaagcaagcaacattttgctggacactgatatgaaccctaagatctcggactttgggatggcgagaatattcgatcccaaaggaacgcaagccaatacgaaaagagttgtaggaacatatggctacatggctcccgagtatgctatggcaggcaatttctccaccaagtccgatgtgtttagctacggagtgttgcttctggagattatcagtggaatgagaaacgctggacctcgaaggcatggcaactccgttagcctccttggttacgcatgggaactatggaacgaaggcaggtgccatgagctcatcgataaaccattacgcggcaggtgtcctgagaacgtagcgttaagatgcatccatgtcagcttgctgtgtgttcaggagcaagctgcggatcggccctccatgactgaggtcatttcaatgattaccaacggaagtgccacgttaccagacccaaagcagcccggtttcctctccatgttggtcccaaacgaaaccgatgtcgctgaagaaacatgctccctgaatggtctctcagtcaccatccttgacggaagatagcactagttcaaatcgccgcctttctttgcttggtccatgcatgcgcgttaccattgcatcactttgcatggtatttcccaaaagttatattacgggagcctgaaagttttgttctcatgcatccaggctaatggtatataagcatcgccgcatcattgagtccttgtccttagaggaacgtatggttgttgatggtgccaacctggcattatgactttctgatttcatcacatattttcatccaggctatatatatgctcgcttttattctgttcggtcaagattcaacacgaggatttaaacgacaatgcaaatgaactggcataaacatttcatcggtggggattgctttctctcttttcctctctctatctacatgatggagacaatgtcagtcgctgcatagtcgcggcatgttcttatgcatggctcgttcatcatgacttttgattggtttggcgagctcaggctggcacacagttgtaaaaaaaagtaagcgttctgatgtgtgacagttgcccaaatcaatctttgtccgttgcgtgacaacgatggtg

SEQ ID NO: 36285 - DNA, 2207 bp, Zea Mays
atccgatcctccgactaaccctggcgcatagttggtgacggtcttatgacacggatggtcggatggacacggatgttgcctagctagactttcgctgcgaacagaggacgagggtcttcgccctagtcgcctgtgcgcagcgggcctagaggcagcgactgagatatccattccactcccgtcaataattcgtcatgaccactgaccaggttgccttcacggagccgagctcatctatgacgttactgaaattgaaacttgaacggggatggggatccaaggaagaagatgacggatcgtgcaaataaggagccgctatgcccgcggaagaggaagaagcgaataagcgatatatctgcttccaaaaggctagaagctggaattccattcagacacatgtcacaagcaacatgatttggacatttcaacgaacacgtcgttggacgtagcagcagcagcagcctatggtatggcaatttaacaaatatgcaggacggatataagagtggagcagggactctttatcttcgtgttgctaatagttcaggtcacaaattactttggatagctggtgtacttccttcaattggatttcttattttttgtctgatcttgtttatttggatcagcagatcaaaaaacaaaggaaaaggaaaacaggatggtcatcactccataatgacttcggatgctatcaaactctgggaggaaaacatgcttggagaaggggggtttggcccagtgtacaagggccacttaccggatgggcaagagattgctgttaagagactggcagcaaattcagggcaagggttaactgagtttaaaaacgaagtcctcctcatagctaaacttcagcacagcaatttagtccggctgttaggttgctgcattgaagaggaagagatgctattagtgtatgagtacatgccaaacaaaagcttggatttcttcttatttgaaaaatcaagaagagctttgctagactgggagatgcgcatgaacataatcgaaggggtcgcgcagggtcttatctatctccacaagcattctcggctcagggttatccatagggacctgaaagcaagcaacattttgctggacactgatatgaaccctaagatctcggactttgggatggcgagaatattcgatcccaaaggaacgcaagccaatacgaaaagagttgtaggaacatatggctacatggctcccgagtatgctatggcaggcaatttctccaccaagtccgatgtgtttagctacggagtgttgcttctggagattatcagtggaatgagaaacgctggacctcgaaggcatggcaactccgttagcctccttggttacgcatgggaactatggaacgaaggcaggtgccatgagctcatcgataaaccattacgcggcaggtgtcctgagaacgtagcgttaagatgcatccatgtcagcttgctgtgtgttcaggagcaagctgcggatcggccctccatgactgaggtcatttcaatgattaccaacggaagtgccacgttaccagacccaaagcagcccggtttcctctccatgttggtcccaaacgaaaccgatgtcgctgaagaaacatgctccctgaatggtctctcagtcaccatccttgacggaagatagcactagttcaaatcgccgcctttctttgcttggtccatgcatgcgcgttaccattgcatcactttgcatggtatttcccaaaagttatattacgggagcctgaaagttttgttctcatgcatccaggctaatggtatataagcatcgccgcatcattgagtccttgtccttagaggaacgtatggttgttgatggtgccaacctggcattatgactttctgatttcatcacatattttcatccaggctatatatatgctcgcttttattctgttcggtcaagattcaacacgaggatttaaacgacaatgcaaatgaactggcataaacatttcatcggtggggattgctttctctcttttcctctctctatctacatgatggagacaatgtcagtcgctgcatagtcgcggcatgttcttatgcatggctcgttcatcatgacttttgattggtttggcgagctcaggctggcacacagttgtaaaaaaaagtaagcgttctgatgtgtgacagttgcccaaatcaatctttgtccgttgcgtgacaacgatggtg

SEQ ID NO: 36286 - DNA, 2203 bp, Zea Mays
accaaacacccccttataaaatctatgtaacatactcaatttgtttgcctggaatctagacttgcatggtgtccgttagatgttttgatcccctctacacttctttctctttaagcgtttttagtgttgattattatctggtcaaagtcaagcagatagaaaaagtggagtatgattgcaataactgagagatagtcagttccctgtcaaactatcattctcaagtggacgagctggttgccaatcagtgcttagagtttagtatccattagagacgccaatgttgaccgacgactagaaaattgacctcatagttctatcatggaacttctaaaactcataactctgaatgttcatcccaaaagttttacccgctggcactccccaccacgcattctctctccccacccccaacgcagcgattgcaggaaccatttcacttatctgggagaattcagagaggtacatttcacttatttgggagaattcagagaggtacggagaaattcaatccctttcctcatgattatgtcagtgcatttctctcttgctgctttgatttgattagcctagtttggtaatcggagtaaagcagatagccatgtttgggaaaataagtttctgcagagagtgcacccttgttaatttgttgatcctgtctgtaatagcatcaagatgcttgtcagctcccacagaaagattaggcagtatttttcagaaccaatcaattttagatgggcagacactagtgtccatgagcagaattttcgtgctcggtttctttagccctggagcttcgagcaagcgatatgttggtatatggcacaacgatgtttcagaaagaagagttgtatgggttgccaacaggaacgatccattacaagatacttctggcatacttaagtttgataacagtagcaatctgatcgttttagatgggaggggcaactcattcacagtggcttatggacggggagtgcaagatgtggaggctgcaatgctggataacggcaatttcatcttaaggagcatcacgaaccaagctaagatcatatggcagagctttgactctcctactgatacatggttccctggaattaatattacacttggtgctaaattgctgacttcatggaagagctatgatgacccagcagtaggggattattcttttggacctggcataactaatgcatctcaactcattatctggtggaaagggatccaattttggaccagtttacgctggaatggtgataccaactctctcattccagagctgacatctcttggtatcatccctgttttatttcaatgtgacaaccttacatgtacatacactgccaatcccagagacacaatgacaaagattgtgttagatccaaatggttcattgaacatagcccaatttagtcctgtaactgagtcatggactctgttatggcgacagcctcctagctgtgaggtatctaacatatgtggtgtttttggtatatgcaacaacaatatgtcacccatatgtcattgtccactaggctttgaacaacaagcaggagatacccggaaagggtgcactaggcaaatccaactgcagtgtaatggtgataggtttgttaatatgtccaatatgcgattccctgactcaagagttaaactttctgttatgggagacggcaaatgccaattggaatgcatgaaaaattgctcctgcactgcatacacttattctgtattggatggttgcagcctatggtatggcaatttaacaaatatgcaggacggatataagagtggagcagggactctttatcttcgtgttgctaatagttcaggaaaaggaaaacaggatggtcatcactccataatgacttcggatgctatcaaactctgggagggtgagaaaacaagcacttattttgcggtgttttccttttcacaaataagaaatggtacagacaaattttcaacagaaaacatgcttggagaaggggggtttggcccagtgtacaagggccacttaccggatgggcaagagattgctgttaagagactggcagcaaattcagggcaagggttaactgagtttaaaaacgaagtcctcctcatagctaaacttcagcacagcaatttagtccggctgttaggttgctgcattgaagaggaagagatgctattagtgtatgagtacatgccaaacaaaagc

SEQ ID NO: 36287 - DNA, 643 bp, Zea Mays
atgcactctgggtagtttggaaagctttcaagtgcgaatgggtccaatggcgaaactggatacatcatacatgtcgataatgcaagaggatgaatttcacaaattagcagatgagacaattcatgatttgcttgaaacacttgaggaatatggtgactccattcagatggatggtttcgacatagactatgggaaccaggttttgacattgaggcttggggatttggggacatatgttgtgaacaagcaatcaccaaacagacaaatctggctttcttcacctgtaagtgggccttctaggtttgactgggatgcagcaactaatggttggatatacaagcgaactggatcgaatcttgtgcaacttcttgagaaggagattggtgagctctgtggtactccagtacaactttcataatagtacaggaaatgccacacaactaggttggatggagagcagtgcacttgaggacaaagtaaacatcagacatatatcctttgctttgagatgccctagagacctcaagtagtcaagtgctcatgagaggttgcgtcaaaacctaggatctttggtccagtgggaagccttttcaccactgcgccacaccttttgttagtatcataatatgagtaagtttgtcag

SEQ ID NO: 36288 - DNA, 604 bp, Zea Mays
atgcactctgggtagtttggaaagctttcaagtgcgaatgggtccaatggcgaaactggatacatcatacatgtcgataatgcaagaggatgaatttcacaaattagcagatgagacaattcatgatttgcttgaaacacttgaggaatatggtgactccattcagatggatggtttcgacatagactatggggttttgacattgaggcttggggatttggggacatatgttgtgaacaagcaatcaccaaacagacaaatctggctttcttcacctgtaagtgggccttctaggtttgactgggatgcagcaactaatggttggatatacaagcgaactggatcgaatcttgtgcaacttcttgagaaggagattggtgagctctgtggtactccagtacaactttcataatagtacaggaaatgccacacaactaggttggatggagagcagtgcacttgaggtacagtatgaatgagagtatgagacaaccctcctgtaatatggttattcacaagattttcttctggacatttgcacactgtttgggataaataatttcattcgctgataacaggacaaagtaaacatcagacatatatc

SEQ ID NO: 36289 - DNA, 1489 bp, Zea Mays
cacgctaggcttctactctagtccagtggatgccgacctaccgtctcgttacgtgatccaattgcagcctttacgggcccagtacggggccatcgccgttccagttccagcaccaccgcccgtggccgttgtagcagggctgcgccgccgctctgactgccgtaggctgctgcgtgggcctcctaggcacacacacgggcgtcggcgctggccatggcgtcgccgtcgcgtaaggttctcctaggcgtaaccttcgagaggcggctccggtctcgcactcggcaactcttctgggccgccgatctccctgtagctaccacctctcgctctctcgcggccgccgctgccacgacgctgccgtcgggcgggtctccagcggctcttctgttctctttgaggaccatctcgtcaacgcgcctctcgaaactgtccgccttcagtgacgcgcccggcccatctgtggtggaccacaagtttgtttctcgacctcgcagtctcagcacgttattccatttatttatgcactctgggtagtttggaaagctttcaagtgcgaatgggtccaatggcgaaactggatacatcatacatgtaagatcgttggatgcttgatagagcaatttttgttggaattttttttgcctccacctgtgtcaatcggtagccctaaaccagacactcaaaatgctatgtaattttccaatatagtgacaatggacaaaaggttgttcaggagaggtaagagttgcttgaatcgaatcaacagtctgaaatgtggaaagctgggcttactgatataagtttatcacagtaatttaaaataaaatctgatcgtgagtatgttaactgtttttactttataattgctctagtttggttacgtgagatttgctacatagctttttttcgcatgggttagctgttgattatatgattatgtacattgaataggtcgataatgcaagaggatgaatttcacaaattagcagatgagacaattcatgatttgcttgaaacacttgaggaatatggtgactccattcagatggatggtttcgacatagactatgggaaccaggttttgacattgaggcttggggatttggggacatatgttgtgaacaagcaatcaccaaacagacaaatctggctttcttcacctgtaagtgggccttctaggtttgactgggatgcagcaactaatggttggatatacaagcgaactggatcgaatcttgtgcaacttcttgagaaggagattggtgagctctgtggtactccagtacaactttcataatagtacaggaaatgccacacaactaggttggatggagagcagtgcacttgaggtacagtatgaatgagagtatgagacaaccctcctgtaatatggttattcacaagattttcttctggacatttgcacactgtttgggataaataatttcattcgctgataacaggacaaagtaaacatcagacatatatc

SEQ ID NO: 36290 - DNA, 321 bp, Zea Mays
tttttttttggaagaagtgcgcaaatctcccccgctcgtaattatcgcataaaccaggattcgaaacctcatgagagcaataataagagagattaaaagcagaggaatagcttagggatcgctcgcacgcacgcacgctcgcgcacctggaaaggacgatgtgggggggagaatccgaatcgcttgtgggcgggtggcgcaatggccgaaaaggagagcgccgctttgggggggtcggtcgaggaggcgagccgcgagcggaggaaaggaattggaacgggagggggagggattccctcgcctctctcacctgcgcgtttt

SEQ ID NO: 36291 - DNA, 2692 bp, Zea Mays
acctctttcaaactgccattttagctaaggagaaagtttcttctgtccattttattaaaaaagcatccttcagcctgcctcttatgtgatcaagcagagtcaattaagtatatctttgtatctcgtgtcttctcttggtaggtcaaggactctcatcttgtgtagattgggttcactaactattgctcctcggctggagagtctcgcttttccaattggtgatgccaaccaatctaggggtttgataaaaatatgagaaaagggctgaattctttaatcatcttggtcactcgggaaatatggacttaaattcgcaatgcttgtgtgttcgaaggagctcctccgaatgtccaattggttctacaacctgtggctaacgagagtgctctgtggtgcatggctggagcctctgctcttaatgagatgcttcttcaactgctaagcacacatacctgatgtgagctgttttaatgtgggggtgtttttccttttagttttcttgttttaagtgttggttgtgggagttacttttttttcctcccttatacttggagtctccgtttttctttcttcttaatgaaattacaagtagtgttactgtgttgttcgaaaaaatgagcctaaaccaaaaacatacatctttttggaacaaggaacttacccatactgaagtaattccaaaatcccccacgatatgtataagaatactcctgggaacacgcagagaaaaatattatatggaaaacatggcatagcatagcgtaattcaaaccattttgttttctaataatattgctgacaattaattcctcaagtttcttaagattcattttacaagaatttctcttatgtgataactgtcatttaagaattcaaccagtagacaaaataagtatctattcaggtagataaaacatgactaaaaatacatcatgttctattcaataagttgaaaaggttaatcaatccttatgttctattcaacaagtcgaaaagatgccaactaaatatttgaagttcaagtaatggaatatacatagaataacacaagactacaagcaaagcttgtttgagcaatgatattgttcttgatgcatgatacatgatattcccttttgctatggttcaagatattatctactccctccgctccaacttgtaaattgttttagatttgtcctaaattaaacttgtctaacttcgaccaagtgtatacaaaaatagattaacatatataaatatcagagaaatacactattaggactagtttgggaaccccatttccccagaggaaattagttcattttcccttaggaaaataggaatccctgggaaaatggagttcccaaaccgcccttaaaataaatttagtagtatctaatgaacctactttgctgctgtagatgtttgtacatttttctatgaacttggtcaagagaaatttaacttaggccaaagctaaaacgacttatagtttggaacatagagagtaatttattatcaacatgataattgaatatagcaaagggatcatattctcatgaatgagaaagcaggaaacaacaaccatgtccaaaaagaaaggaaaaaggtagacaaatgcagtaactatgctagcattaatgaaaataaatggtaatgtccagcattgttaccatatcttgtggatctgtctttggcatacgtcgaaatgcatgcaaagaatgaggcaagtcaggaggtgcaattggatcacaaggagaatcttttgggctctccattctcatgacaatgtgccagctgaattcttgtaacggttccaatattagtcaagacccatgtaccatatgaagatttcatacagaaagatagtgaagggtgtaaaagcaaacccacctgtcaatgttcatctctcttgattctcttaccaactgaagaaatgatatgaccgaatcataatctgttccaggatttttctttccctgcatattaattgtttgatattattggcagccagtcacataaagtgtttcccaagcagctagcagcctaacacgaaagctggctccacaaaaggcaacataaagaggagtttactacctaccaccacaagaaacaattgcttatctgaacagatgatgtaaaattacttaaccagaacagctactaaagttcaaaaattacattattagaagagaactacaaaatatttcctgtttgcataacgttgaattcattaaagatctatctatcaagtatatatatcaagggctcaaagcagatcagtgttttaaagacgtcgcctaggcgtctagacgttcaaacaatccgaggcgccttgctcgcctaggcgctgcctaggcatctaggtggtggacaatttcttgtctcaccataccgccttaagaactatggtaaagattgtctaatatgaagaaaaagattgttttgatttttaaactcacccatccaaaagaatatggcaagttatttccagtccccagcggaactgtagctacaggaggtggatgtcctaacttaagatcagatacaactccaagcaaccaacctgccgttccatcacctccagcaacctaattggatttacatgataaaacagaggcatgttaggactattcaaataaacaaacatacaaattaatggtagaaacattagcaggaggtcttggaatatgaaattgccagattgcac

SEQ ID NO: 36292 - DNA, 2530 bp, Zea Mays
atgcccgcgctcctcccgtcgtctttgactctttcccctttcctcaagcctccttccccaacccgaagccccaccgcctcgccgcagccgccaccacgagtcccgagtcacccaacgcggcccccaatcccggcagcgtccgcctccgccgcctcattgcccgtgaggacctcgccggtgtcgcgcacctcgtagagcgctccgtctcccgcgacgggaggcccccgacgtctacctctgcaccaagctcatccgcaacctctgccgccggggccgcactcccgacgccgcccgcgtgctcctcaccgccgagggctccgggtcccccgtcgacgtcttcgcctacaacaccctcgtcacgggttactgtcggtacgaccacctcgacaccgcgcgcaggctcatagggtccgtgcccgtcgcgccagatgcctaaacgtacacgccactgatccgtgggctatgcgacagcggcagaccggtagggtcgccgacgcgctcagcctgctcgacgatatgctcctctgcgggtaccagcccaacgtcgtacgctacattgtgctccaggaggccatgtgcaagaacagtgggttcgagcaggccatggcagtccttgacgagttgcttgcgaagggatgcacacccaacatcgtcatgtacaatgtcatcaccaatgacgtgttcagggaaggctgcgttgatgatgccagggagatcttgaatagattgtcctcttacggttacgggttccagaccaacactgttagctataccaccctcctgaagggcttatgcgcttctaagcggtgggatgacattttggagttctttgtcgagatgatggagaagaactgcatgccaaacgaggtgacatttgacatgctaatcatattcttttgtcgagtaggtatgttcttgaacgaatgacggagcattggtgtgtaccttgtgcaatattgttataaactcaatttgcaaataaggccgggttgacgaggtctttaaattcttaaacaatataggttcctacgggtgcaatccagataccattagctataccacggtcctaaagggctggtgtcatgctgagcgatggaatgatgccaacgaacttttgtaagagatggcatgtaacaattactaccctccaaacgaggtaacattcaatacatttatctgcatcttgtgccaaaaggggttgatcgagcaagctattatggttactgagaaaatgtccgagcatggctatatagtgggtgttgtcacatacaatgctcttgtaaatggattctgtgagcaaggtcatattgacagtgccctagaactgtttcgcagcatgctctgcaaacccaataccatcacacactactttgctgacaggcttgtgcaatgctaaatagttagatgctgctgcagatctcgtagctgaaatgcttcgtaggtattaccctccgagtgactttcaatatgatgtacttgcgagttttttctgccaaaaaggatttcttgagcaagcatttgagctcgttgagcagatgatggagcatggtcgcaccccctaacctgatcagatataatacatcacttgatgggattaccaagggttgtagttcagaagataccttggagttgttgcatggcttggtcatcaagggagtatcgccagatgtcaacattttcttcaatcatcggtatcctctcaaaagaagatagagtggaagaggtcattcaaatgttatctctcaaaagaagatagagtcgaagaggtcattcaaatgtttcacgtagtgcaagatattggaatgagacacaaagttgtggtgtataacaggatactacatggtctctatagaagatgtgaaatagataatgctatcaacttttttcctatatggtattcaatggatgcatgcccaatgaatcaacctatattatacttattgaaggccttgatcatgagggtttgttgaaggaggcccaagatctactgagcgtgttgtgttcaagaggagttgtaagcaaagacttaatagaagagtaacactaaggttgacgaccaaactgtgcataccctttgggtcctgaaaatcctggcattaaatgcttattcgttattcacagtgagtcgattgatagcctcgtgtcattcaaggtgcagtgtttcatgtagatggttgtttgagggcccataacatctcgtacgaaggaatcttgacaattggtggctgattatcaactttggtggagatgttacaagtacgacactaatcaacaattcaagatgaaacaaacccaatgaaatcatgatgtgcaataacctttcctccaggttagggcattcaggtttccctagctagcctggctctggctcgcatatgaagaccaggctgcacggagccaagttgagaaggtgcacatgtgtttgtttggttcacttccctagctaggctagatgttgtttggttgttttgtatgagtacttactacatgggctaaaaagttattagataaattaaaaatctgtaaatag

SEQ ID NO: 36293 - DNA, 1183 bp, Zea Mays
ctcgccaccatgcccgcgctcctcccgtcgtctttgactctttcccctttcctcaagcctccttccccaacccgaagccccaccgcctcgccgcagccgccaccacgagtcccgagtcacccaacgcggcccccaatcccggcagcgtccgcctccgccgcctcattgcccgtgaggacctcgccggtgtcgcgcacctcgtagagcgctccgtctcccgcgacgggaggcccccgacgtctacctctgcaccaagctcatccgcaacctctgccgccggggccgcactcccgacgccgcccgcgtgctcctcaccgccgagggctccgggtcccccgtcgacgtcttcgcctacaacaccctcgtcacgggttactgtcggtttctttttcttaaaatcgtcttgccaaagagtactacaatttagaatataacatcatctagatgccttttttggctttataaacaagatggtgtgctttaccatcttcatcaccaagaaagaatgtctatgcttggtggctgattatcaactttggtggagatgttacaagtacgacactaatcaacaattcaagatgaaacaaacccaatgaaatcatgatgtgcaataacctttcctccaggttagggcattcagataagctgggttctggcccttctggatgtacaccggctttgacaaaattttcagtactgtcccaggaagagtgacaagtggcttatgacttggtcaagcatggcatggctctagagacaggcgatgagagtacctggaatagtatttgtagggtttgtacagaacctggtggctagatattttcctagtacaccagtggaatgaaaattcactttcatttacattccttttagaaaatagtcaaaccattatatattgttacttcctcctatcgtaagacaagtccatctcaatttatcataagtctgacgttgtaactttgaccatcaaaccatcaatgtctgaaactttaataggtttccctagctagcctggctctggctcgcatatgaagaccaggctgcacggagccaagttgagaaggtgcacatgtgtttgtttggttcacttccctagctaggctagatgttgtttggttgttttgtatgagtacttactacatgggctaaaaagttattagataaattaaaaatctgtaaatag

SEQ ID NO: 36294 - DNA, 3019 bp, Zea Mays
cgccaactcgccaccatgcccgcgctcctcccgtcgtctttgactctttcccctttcctcaagcctccttccccaacccgaagccccaccgcctcgccgcagccgccaccacgagtcccgagtcacccaacgcggcccccaatcccggcagcgtccgcctccgccgcctcattgcccgtgaggacctcgccggtgtcgcgcacctcgtagagcgctccgtctcccgcgacgggaggcccccgacgtctacctctgcaccaagctcatccgcaacctctgccgccggggccgcactcccgacgccgcccgcgtgctcctcaccgccgagggctccgggtcccccgtcgacgtcttcgcctacaacaccctcgtcacgggttactgtcggtacgaccacctcgacaccgcgcgcaggctcatagggtccgtgcccgtcgcgccagatgcctaaacgtacacgccactgatccgtgggctatgcgacagcggcagaccggtagggtcgccgacgcgctcagcctgctcgacgatatgctcctctgcgggtaccagcccaacgtcgtacgctacattgtgctccaggaggccatgtgcaagaacagtgggttcgagcaggccatggcagtccttgacgagttgcttgcgaagggatgcacacccaacatcgtcatgtacaatgtcatcaccaatgacgtgttcagggaaggctgcgttgatgatgccagggagatcttgaatagattgtcctcttacggttacgggttccagaccaacactgttagctataccaccctcctgaagggcttatgcgcttctaagcggtgggatgacattttggagttctttgtcgagatgatggagaagaactgcatgccaaacgaggtgacatttgacatgctaatcatattcttttgtcgagtaggtatgttcttgaacgaatgacggagcattggtgtgtaccttgtgcaatattgttataaactcaatttgcaaataaggccgggttgacgaggtctttaaattcttaaacaatataggttcctacgggtgcaatccagataccattagctataccacggtcctaaagggctggtgtcatgctgagcgatggaatgatgccaacgaacttttgtaagagatggcatgtaacaattactaccctccaaacgaggtaacattcaatacatttatctgcatcttgtgccaaaaggggttgatcgagcaagctattatggttactgagaaaatgtccgagcatggctatatagtgggtgttgtcacatacaatgctcttgtaaatggattctgtgagcaaggtcatattgacagtgccctagaactgtttcgcagcatgctctgcaaacccaataccatcacacactactttgctgacaggcttgtgcaatgctaaatagttagatgctgctgcagatctcgtagctgaaatgcttcgtaggtattaccctccgagtgactttcaatatgatgtacttgcgagttttttctgccaaaaaggatttcttgagcaagcatttgagctcgttgagcagatgatggagcatggtcgcaccccctaacctgatcagatataatacatcacttgatgggattaccaagggttgtagttcagaagataccttggagttgttgcatggcttggtcatcaagggagtatcgccagataagatagagtggaagaggtcattcaaatgttatctctcaaaagaagatagagtcgaagaggtcattcaaatgtttcacgtagtgcaagatattggaatgagacacaaagttgtggtgtataacaggatactacatggtctctatagaagatgtgaaatagataatgctatcaacttttttcctatatggtattcaatggatgcatgcccaatgaatcaacctatattatacttattgaaggccttgatcatgagggtttgttgaaggaggcccaagatctactgagcgtgttgtgttcaagaggagttgtaagcaaagacttaatagaagagtaacactaaggttgacgaccaaactgtgcataccctttgggtcctgaaaatcctggcattaaatgcttattcgttattcacagtgagtcgattgatagcctcgtgtcattcaaggtgcagtgtttcatgtagatggttgtttgagggcccataacatctcgtacgaaggaatcttgacaatgtttctttttcttaaaatcgtcttgccaaagagtactacaatttagaatataacatcatctagatgccttttttggctttataaacaagatggtgtgctttaccatcttcatcaccaagaaagaatgtctatgcttggtggctgattatcaactttggtggagatgttacaagtacgacactaatcaacaattcaagatgaaacaaacccaatgaaatcatgatgtgcaataacctttcctccaggttagggcattcagtatcaatgccgtgattttcagataagctgggttctggcccttctggatgtacaccggctttgacaaaattttcagtactgtcccaggaagagtgacaagtggcttatgacttggtcaagcatggcatggctctagagacaggcgatgagagtacctggaatagtatttgtagggtttgtacagaacctggtggctagatattttcctagtacaccagtggaatgaaaattcactttcatttacattccttttagaaaatagtcaaaccattatatattgttacttcctcctatcgtaagacaagtccatctcaatttatcataagtctgacgttgtaactttgaccatcaaaccatcaatgtctgaaactttaataggtttccctagctagcctggctctggctcgcatatgaagaccaggctgcacggagccaagttgagaaggtgcacatgtgtttgtttggttcacttccctagctaggctagatgttgtttggttgttttgtatgagtacttactacatgggctaaaaagttattagataaattaaaaatctgtaaatag

SEQ ID NO: 36295 - DNA, 2785 bp, Zea Mays
cccaccccgacccggtcgccaactcgccaccatgcccgcgctcctcccgtcgtctttgactctttcccctttcctcaagcctccttccccaacccgaagccccaccgcctcgccgcagccgccaccacgagtcccgagtcacccaacgcggcccccaatcccggcagcgtccgcctccgccgcctcattgcccgtgaggacctcgccggtgtcgcgcacctcgtagagcgctccgtctcccgcgacgggaggcccccgacgtctacctctgcaccaagctcatccgcaacctctgccgccggggccgcactcccgacgccgcccgcgtgctcctcaccgccgagggctccgggtcccccgtcgacgtcttcgcctacaacaccctcgtcacgggttactgtcggtacgaccacctcgacaccgcgcgcaggctcatagggtccgtgcccgtcgcgccagatgcctaaacgtacacgccactgatccgtgggctatgcgacagcggcagaccggtagggtcgccgacgcgctcagcctgctcgacgatatgctcctctgcgggtaccagcccaacgtcgtacgctacattgtgctccaggaggccatgtgcaagaacagtgggttcgagcaggccatggcagtccttgacgagttgcttgcgaagggatgcacacccaacatcgtcatgtacaatgtcatcaccaatgacgtgttcagggaaggctgcgttgatgatgccagggagatcttgaatagattgtcctcttacggttacgggttccagaccaacactgttagctataccaccctcctgaagggcttatgcgcttctaagcggtgggatgacattttggagttctttgtcgagatgatggagaagaactgcatgccaaacgaggtgacatttgacatgctaatcatattcttttgtcgagtaggttcctacgggtgcaatccagataccattagctataccacggtcctaaagggctggtgtcatgctgagcgatggaatgatgccaacgaacttttgtaagagatggcatgtaacaattactaccctccaaacgaggtaacattcaatacatttatctgcatcttgtgccaaaaggggttgatcgagcaagctattatggttactgagaaaatgtccgagcatggctatatagtgggtgttgtcacatacaatgctcttgtaaatggattctgtgagcaaggtcatattgacagtgccctagaactgtttcgcagcatgctctgcaaacccaataccatcacacactactttgctgacaggcttgtgcaatgctaaatagttagatgctgctgcagatctcgtagctgaaatgcttcgtaggtattaccctccgagtgactttcaatatgatgtacttgcgagttttttctgccaaaaaggatttcttgagcaagcatttgagctcgttgagcagatgatggagcatggtcgcaccccctaacctgatcagatataatacatcacttgatgggattaccaagggttgtagttcagaagataccttggagttgttgcatggcttggtcatcaagggagtatcgccagataagatagagtggaagaggtcattcaaatgttatctctcaaaagaagatagagtcgaagaggtcattcaaatgtttcacgtagtgcaagatattggaatgagacacaaagttgtggtgtataacaggatactacatggtctctatagaagatgtgaaatagataatgctatcaacttttttcctatatggtattcaatggatgcatgcccaatgaatcaacctatattatacttattgaaggccttgatcatgagggtttgttgaaggaggcccaagatctactgagcgtgttgtgttcaagaggagttgtaagcaaagacttaatagaagagtaacactaaggttgacgaccaaactgtgcataccctttgggtcctgaaaatcctggcattaaatgcttattcgttattcacagtgagtcgattgatagcctcgtgtcattcaaggtgcagtgtttcatgtagatggttgtttgagggcccataacatctcgtacgaaggaatcttgacaattggtggctgattatcaactttggtggagatgttacaagtacgacactaatcaacaattcaagatgaaacaaacccaatgaaatcatgatgtgcaataacctttcctccaggttagggcattcagtatcaatgccgtgattttcagataagctgggttctggcccttctggatgtacaccggctttgacaaaattttcagtactgtcccaggaagagtgacaagtggcttatgacttggtcaagcatggcatggctctagagacaggcgatgagagtacctggaatagtatttgtagggtttgtacagaacctggtggctagatattttcctagtacaccagtggaatgaaaattcactttcatttacattccttttagaaaatagtcaaaccattatatattgttacttcctcctatcgtaagacaagtccatctcaatttatcataagtctgacgttgtaactttgaccatcaaaccatcaatgtctgaaactttaataggtttccctagctagcctggctctggctcgcatatgaagaccaggctgcacggagccaagttgagaaggtgcacatgtgtttgtttggttcacttccctagctaggctagatgttgtttggttgttttgtatgagtacttactacatgggctaaaaagttattagataaattaaaaatctgtaaatag

SEQ ID NO: 36296 - DNA, 2340 bp, Zea Mays
gccaccatgcccgcgctcctcccgtcgtctttgactctttcccctttcctcaagcctccttccccaacccgaagccccaccgcctcgccgcagccgccaccacgagtcccgagtcacccaacgcggcccccaatcccggcagcgtccgcctccgccgcctcattgcccgtgaggacctcgccggtgtcgcgcacctcgtagagcgctccgtctcccgcgacgggaggcccccgacgtctacctctgcaccaagctcatccgcaacctctgccgccggggccgcactcccgacgccgcccgcgtgctcctcaccgccgagggctccgggtcccccgtcgacgtcttcgcctacaacaccctcgtcacgggttactgtcggtacgaccacctcgacaccgcgcgcaggctcatagggtccgtgcccgtcgcgccagatgcctaaacgtacacgccactgatccgtgggctatgcgacagcggcagaccggtagggtcgccgacgcgctcagcctgctcgacgatatgctcctctgcgggtaccagcccaacgtcgtacgctacattgtgctccaggaggccatgtgcaagaacagtgggttcgagcaggccatggcagtccttgacgagttgcttgcgaagggatgcacacccaacatcgtcatgtacaatgtcatcaccaatgacgtgttcagggaaggctgcgttgatgatgccagggagatcttgaatagattgtcctcttacggttacgggttccagaccaacactgttagctataccaccctcctgaagggcttatgcgcttctaagcggtgggatgacattttggagttctttgtcgagatgatggagaagaactgcatgccaaacgaggtgacatttgacatgctaatcatattcttttgtcgagtaggttcctacgggtgcaatccagataccattagctataccacggtcctaaagggctggtgtcatgctgagcgatggaatgatgccaacgaacttttgtaagagatggcatgtaacaattactaccctccaaacgaggtaacattcaatacatttatctgcatcttgtgccaaaaggggttgatcgagcaagctattatggttactgagaaaatgtccgagcatggctatatagtgggtgttgtcacatacaatgctcttgtaaatggattctgtgagcaaggtcatattgacagtgccctagaactgtttcgcagcatgctctgcaaacccaataccatcacacactactttgctgacaggcttgtgcaatgctaaatagttagatgctgctgcagatctcgtagctgaaatgcttcgtaggtattaccctccgagtgactttcaatatgatgtacttgcgagttttttctgccaaaaaggatttcttgagcaagcatttgagctcgttgagcagatgatggagcatggtcgcaccccctaacctgatcagatataatacatcacttgatgggattaccaagggttgtagttcagaagataccttggagttgttgcatggcttggtcatcaagggagtatcgccagataagatagagtggaagaggtcattcaaatgttatctctcaaaagaagatagagtcgaagaggtcattcaaatgtttcacgtagtgcaagatattggaatgagacacaaagttgtggtgtataacaggatactacatggtctctatagaagatgtgaaatagataatgctatcaacttttttcctatatggtattcaatggatgcatgcccaatgaatcaacctatattatacttattgaaggccttgatcatgagggtttgttgaaggaggcccaagatctactgagcgtgttgtgttcaagaggagttgtaagcaaagacttaatagaagagtaacactaaggttgacgaccaaactgtgcataccctttgggtcctgaaaatcctggcattaaatgcttattcgttattcacagtgagtcgattgatagcctcgtgtcattcaaggtgcagtgtttcatgtagatggttgtttgagggcccataacatctcgtacgaaggaatcttgacaatgaacctcatttagaagagtcgaccaatgagaccaagagacaaatctggagtgaagcacaagaaaacaagattggtgctcatcatggttattaaaacggtaaaaccttaaaacgttatgaaccaactttttaacatttaaacgtttaaacgaacgttgaaacgtcttttcagacttcacatagaagttcaaatataaaataagttcatacataagttgagtacttgagttcacaaaccaaattgaaattcactgtgagcaatatggttg

SEQ ID NO: 36297 - DNA, 1501 bp, Zea Mays
agtgaacgcagaacaatcgcgtcgttgtcgtccagtttacacgtaacccctcgcgcttattcagaattctgaaattccaagcccgatctcctctcctcttccccgaatctcgggcgccgccgtaaccctagcccccgcgatccgctcgccggagggaaggagggatctccgcaggcgcccatggaggtgaagttgtggaacgacaagcgcgagcgggagctcctggagagctacgcggacctgtacgcgatcatcaaggccgtggagaagctggaacgggcctacgtccgggacctcgtctcagccgccgactacgaggcggagtgcctcaagcttatctcccagttcaactccctctcctcctcgctcgccggcgccgtcaccgtccctcgcttcgtccaggcgtaccgcctcgattgccccgccgcgctcaaccgcctcctccagtcgggcgtcccggccaccgtcgagctccgcgccgcgtccgcctcatccgcgccggccgccaccgccgcctccgcgtcagccatcgcgcactgcgtgcagaccttcatcaccgccatggacgccgtcaagctcaacatgcttgccaacgatcaggtccgccccctgctgcaggacgtcgccacatccatggccaggctcggttccttgctgccgcccgactttgaggggaaggtcaaggttaacgagtggcttgccaagctgcataaaatgggcgccgcggatgaactcaccgagcagcaggccaggcagctcaacttcgacctcgactcggcctacagtgcctttttggctgcgctgcccgccgctggtctgtaaccgggcgtggacctggcgaagggccgtcttcacaggtgggactttgagactgaagaggagtgggccaagtacaacgatcagaaagaagccatgccgaaggctgccttccagttcggggtgaagatgcaggacgacaggaaaaccaggaagcagaacaaggaccagaagctgacgaatgacctccacaagatcaacaagattctggctaggaagaagggcgagaaagatggggtggaagatggcggtcactacgatgatgatttacctagctcaaagaaacagcgtggctgaagctgtcatttttttgttttgtttctcctgctcgtactgtaggcaggcgaacattctatgaagagtcacagtgtcatgtttagttggcagttgtatcctgttgcgtttgtttaaggtgtcctggtaggaaatatgtttatgctgttgagccaaaaccatggaagaaatgtggttgtatatgtatatatatttttttcttagaaagaaaagccagatctttatgttacaattacagtgatgaacctgcaagtatttgatttgtcatattgggaggcttttgcaatgtggttagagctgagaatatccaggagtgtggctcagtgcttagccttggctatgacttactgtttgatgaaattcttgcagcgtggtgctgaatcccctttgg

SEQ ID NO: 36298 - DNA, 941 bp, Zea Mays
ctggagttgacttgtctaacagaccatatttgaagccagaaatcatatgatgctggtattgtcattgaagataagaattggccaccctttatgcccattattcatcatgacatttcgaacgagataccaattcacctgcaaaggatgcagtacctggcgttttcttcactattgggattgacagcttgcctcttttggaacatcattgcaactacagcagcatggattaaatcagaaggtgtcatgatctggttgctagcaatcatctacttcatctctggtgtccctggggcctatgtgctttggtatcgcccgctttacaatgcgatgaggactgaaagtgctttgaagtttgggtggtttttcttgttttaccttctccatatcttattctgtgtctggtcagctgtggctcctccatttccattcaaaggaaaatccttggcatattttacttcattggatttggaatgttctgccttgaatcactgctcagcatcgttgtcattcagcaagtatacatgtacttccgtggaagtggaaaagctgcagagatgaagcgagaggcggcccgtggtgctatgaggaatgccttttgatagagcgacctaggcgactggaagagacacggtgtgacaatgggtaactacgttatgtacatatgctgttcgtctctgagattacttatactagcttatagccttcttgccttcatgcaatgtataccacctaccaccggagcttgatctcttacctaggttcagatgtgcttataggtaactagttttttttatacatttcctacatgatttgtactcttaactcgcgagacaattgttgttgttctttggatctcgagtgattctttgcacggcctgaaaccacttggtcttgaactttgtcagattcttgctgaagtggatattcaggtcatctttttt

SEQ ID NO: 36299 - DNA, 1517 bp, Zea Mays
cgcaaatgcaacgcaacaagcacacctgcaccgcatgagcagcacccgaaattccaaacccacttcgtcaagcaacaacaccggctaaaaattaaaggaggcagcgcgtagcagttggtcgccaccgtcacgtacacacgctcacgttggaggctggactccgcccccgtgctgctcttcgccttgcctttctccgccggagaccccgccgcctcagctgccacaggaggaggaggcaaccatggcggggaggtacgaccgcaatccgttcgaggaggatgacgtcaacccctttgcgggaggaagtgtacctcctgcttctaattctcggatgtcagcacttcctcatgaaccagctggcttctacaatgatcgtggtgcaacagtggacatacctcttgattcaacgaaggacctaagtaaaaaggagaaagaactgcaggcaaaggaagctgagctaaacaaacgggaaagggagctgaaaagaaaggaggaagctgcagccagaggtagattattagttatatctggagttgacttgtctaacagaccatatttgaagccagaaatcatatgatgctggtattgtcattgaagataagaattggccaccctttatgcccattattcatcatgacatttcgaacgagataccaattcacctgcaaaggatgcagtacctggcgttttcttcactattgggattgacagcttgcctcttttggaacatcattgcaactacagcagcatggattaaatcagaaggtgtcatgatctggttgctagcaatcatctacttcatctctggtgtccctggggcctatgtgctttggtatcgcccgctttacaatgcgatgaggactgaaagtgctttgaagtttgggtggtttttcttgttttaccttctccatatcttattctgtgtctggtcagctgtggctcctccatttccattcaaaggaaaatccttggctgggattttgccggctattgatatcataggcaggagtgctattgtggggatattttacttcattggatttggaatgttctgccttgaatcactgctcagcatcgttgtcattcagcaagtatacatgtacttccgtggaagtggaaaagctgcagagatgaagcgagaggcggcccgtggtgctatgaggaatgccttttgatagagcgacctaggcgactggaagagacacggtgtgacaatgggtaactacgttatgtacatatgctgttcgtctctgagattacttatactagcttatagccttcttgccttcatgcaatgtataccacctaccaccggagcttgatctcttacctaggttcagatgtgcttataggtaactagttttttttatacatttcctacatgatttgtactcttaactcgcgagacaattgttgttgttctttggatctcgagtgattctttgcacggcctgaaaccacttggtcttgaactttgtcagattcttgctgaagtggatattcaggtcatctttttt

SEQ ID NO: 36300 - DNA, 925 bp, Zea Mays
attacttccatcttcccgcagcttctttgctacttcgcggcagcgtttcttatcctctcgtttcaccgggcaagtggcgtggttggcccggggcctccggcttgcaaattggcctcctccaactccttatcctccaccatatgttgaagccttgattctgcagcttcccagtccctgacacaggattgtaattgtcgtgcaactccattcctccgtttttcctattcccgtattttaccaatcctgcattctaaaggggacctcagtctctgctgccgttcctcgacgatcctaccaattgtgccgaagaagctaatttcgtggtagaagaccaaattacgtttgaagatgatccacaggacacctttgagcaagaagctcatgaggaagactgtgatgatggtgatgacgagtactgagtccaacgatacgcctgtcatcttcctgtggaagattacccatgctatttccattgtactttgatgatggtactatttaagacttttatgtcttgatgatgtaataaagttattatactctctttacgcctttattgcattgtcttttgatatattacacttgtgatgtcaacatatgtgtggaaaatggatcctggcacacatatgatatgcattcggttttgcccctaaaaccgggtgtgacacatacttttgttgcttcttatgtgctcacacataaatctgacaacgtttgccacatttgttggcctgaggcccaagaacaccaaatctagtggctgggttcgtaaggtgcttgttactaatgtgaaaggacccacattagtttaggtacttaagaacaagacctaaatctgtgttgtagatttatgcatccataggcacaagttaggtaatcggtagtggatgcacaaaccatatgacgggtgagaagaagaatgttctca

SEQ ID NO: 36301 - DNA, 2496 bp, Zea Mays
gccgggccaagacagataggacaagatggtactccagaacacaactgcacaagcacgtattacttccatcttcccgcagcttctttgctacttcgcggcagcgtttcttatcctctcgtttcaccgggcaagtggcgtggttggcccggggcctccggcttgcaaattggcctcctccaactccttatcctccaccatatgttgaagccttgattctgcagcttcccagtccctgacacaggattgtaattgtcgtgcaactccattcctccgtttttcctattcccgtattttaccaatcctgcattctaaaggggacctcagtctctgctgccgttcctcgacgatcctaccaattgtgccgaaggtaaactatgaagaaatggttgaaacaggtatgattaaaatgtatttatcaagtattgaaaggacgggtaagttactttgtgtttatgacactagtccgtgatgttgaactcctcatctaactgggtgactatgtagagctattgtcggatgaaattggttgaatgatataatttattaaatatgatgtcaatggttcatttgggagactcgagagacaaatttatttgggggccccatacagatgggcttttctcagtgcactcaatgtacactcttttaatgaatactcctcctgtaaatcataatttactttagagtctaaagtttcctcttaaaattaaaattttattgtggtatttaggcaagggactctcacaaaagacaacttagctaagcgtggttggaaaggtaggttgaaatgcaacttttgtaatcaaaatgagactattcaacatctgttatttgattgttaccttgctagaaatatttagatattatttactttgtcttaaatttagagaggcccaatagtattaatcatataattgggtcttggaatgctaacaaaggaactgcgcataggaaaaaaactcctaattggagtggcggcaatgttttggtttatttggctatgtcgctatgatgttgtctttaactttaagccaaaaaaccatcaattacgcagattcttttaaggagaacatactggctcagattctagagattgttgcgaaaagaacaatctcaacatgaggtccttgcgatatgttgatctttagaggtggtggatatggagatctttgcaaaccatggatggaggtctaacgctaggctagagggagcttgattcatggatgttttttttctgagaatctttatgatggatgtttgtcattttttgatttgtaggccgtatgcaagagattgcaaaaggcgggaacattttgtttccataataaaaaatgtcacggtctagataggttgcaagtttagaactaccaccactgctagaagcagaacttgttgcctgtagaaggtagcggtaggaaagtaggaacaatccaagaaaaatcaagattaggaggaaaggtcgaacaactacctccaagcataccagtatcatcgtcatcatcaaaaaaatcatcccaagctattctttcttattagaaagggttggagggacaacctttttcaacctgacaaaaccatatactacatcatttttattgtatagtttaaaaaggagagttatagtatctatcaacttattattataatctatatccatgagagaagttaacttcctggctcttggtcatagagtctttgttatggcatggcctacatatgcagtggtttatggagctcatgtggtgagctacatgcagtgtgaatggttggcaagttcacatagctttgagggagttgttgtgttggccgcacacatcggtttataaccatgcatcttggtgcttgtaggaccgtccgatgtttggtgtgtggcttctttatgaggaggaacgtttggcgaaagccctggatggcattaggtggagctaatggtggtgacactttggaagctcatgaggaagactgtgatgatggtgatgacgagtactgagtccaacgatacgcctgtcatcttcctgtggaagattacccatgctatttccattgtactttgatgatggtactatttaagacttttatgtcttgatgatgtaataaagttattatactctctttacgcctttattgcattgtcttttgatatattacacttgtgatgtcaacatatgtgtggaaaatggatcctggcacacatatgatatgcattcggttttgcccctaaaaccgggtgtgacacatacttttgttgcttcttatgtgctcacacataaatctgacaacgtttgccacatttgttggcctgaggcccaagaacaccaaatctagtggctgggttcgtaaggtgcttgttactaatgtgaaaggacccacattagtttaggtacttaagaacaagacctaaatctgtgttgtagatttatgcatccataggcacaagttaggtaatcggtagtggatgcacaaaccatatgacgggtgagaagaagaatgttctca

SEQ ID NO: 36302 - DNA, 998 bp, Zea Mays
ctttggttcttctggcttctctcacggtgatttgctttggttcttctggcttctctcacggtccacgcgaccggggcgcgtgccgggccaagacagataggacaagatggtactccagaacacaactgcacaagcacgtattacttccatcttcccgcagcttctttgctacttcgcggcagcgtttcttatcctctcgtttcaccgggcaagtggcgtggttggcccggggcctccggcttgcaaattggcctcctccaactccttatcctccaccatatgttgaagccttgattctgcagcttcccagtccctgacacaggattgtaattgtcgtgcaactccattcctccgtttttcctattcccgtattttaccaatcctgcattctaaaggggacctcagtctctgctgccgttcctcgacgatcctaccaattgtgccgaagaagctcatgaggaagactgtgatgatggtgatgacgagtactgagtccaacgatacgcctgtcatcttcctgtggaagattacccatgctatttccattgtactttgatgatggtactatttaagacttttatgtcttgatgatgtaataaagttattatactctctttacgcctttattgcattgtcttttgatatattacacttgtgatgtcaacatatgtgtggaaaatggatcctggcacacatatgatatgcattcggttttgcccctaaaaccgggtgtgacacatacttttgttgcttcttatgtgctcacacataaatctgacaacgtttgccacatttgttggcctgaggcccaagaacaccaaatctagtggctgggttcgtaaggtgcttgttactaatgtgaaaggacccacattagtttaggtacttaagaacaagacctaaatctgtgttgtagatttatgcatccataggcacaagttaggtaatcggtagtggatgcacaaaccatatgacgggtgagaagaagaatgttctca

SEQ ID NO: 36303 - DNA, 678 bp, Zea Mays
aactgatatatcagtcgtgctcacggttaagagcaacctggaccctcacatgataaatgaacttaaagatggagaataaatcgtgatccgatgatttataaatggtttgcttaagtggtttcacttaagtgtttttgatttaatcatatgcttatgattaattgggatattttgggatacacttacaattagtaagttaggcgttgttaataaaatattgaccaactaaaatgcttaccacttaaccatagcataccttgttaatcttgcattactcctcccacttgctgagcccccaccataagtgagctcacccttgctaatattttgatcagaagctcatgaggaagactgtgatgatggtgatgacgagtactgagtccaacgatacgcctgtcatcttcctgtggaagattacccatgctatttccattgtactttgatgatggtactatttaagacttttatgtcttgatgatgtaataaagttattatactctctttacgcctttattgcattgtcttttgatatattacacttgtgatgtcaacatatgtgtggaaaatggatcctggcacacatatgatatgcattcggttttgcccctaaaaccgggtgtgacacatacttttgttgcttcttatgtgctcacacataaatctgacaacgtttgccac

SEQ ID NO: 36304 - DNA, 5201 bp, Zea Mays
attacttccatcttcccgcagcttctttgctacttcgcggcagcgtttcttatcctctcgtttcaccgggcaagtggcgtggttggcccggggcctccggcttgcaaattggcctcctccaactccttatcctccaccatatgttgaagccttgattctgcagcttcccagtccctgacacaggattgtaattgtcgtgcaactccattcctccgtttttcctattcccgtattttaccaatcctgcattctaaaggggacctcagtctctgctgccgttcctcgacgatcctaccaattgtgccgaaggttaattttatcttgttaattgagagactctttgtaccattgtatgaaaaagctaaatctagctcaggatacagacatggacgtattatcacttgaccaactatagagcacaagtacgttactctcttcgttctattctaaattataagttgtttttaatttttttacatgaaatttcccaaatttgatacgcatctacacatgtataatagcaaaatctatgtaaaaagttgtaatgacttataattttgaacaatttgctagacattttttctttcgaaagaaaagaaatcaccgaacattccatggtgactttggccttacatccacaagtttaattcacataattttagctggtagtgaaacactattgagtagagatgtgcatccaaaaaatactgcaacacaacacaatataaccaaacaaaaagcgttcaaataggtacaacagtacaattcaaagggaacatgagaaaagagagaatggaaaatagatgctataattttgagaaaacatactctaaattcttttataggcacacaaaaagttataaaaattaattaataatttctaaatattataatacaaactcgatctaattaatatactatccaactatcatgaatttgtaaatataaacaatatagaacaaaataactaaaatataaaaataaaattaagaaactatggcacatcaagcaacgccttattaaaagaatctaaaaaatattagcctcaaaagtagagaaacaccttattaaaatcccaaaaatgaagatattagttcagaaaacccttgaggaaaaaacaaaatgaagatattagttccaaaagtagagaaaaccctcgaggagctattttatggtgttatgatgattatggaacacaaactaccaaagaagaagtgtatatcatggctgcaggaattgtttgattatgtcatggttatggaacttagaaaccaccaaagtgaagtgcatgccatatctaccagagtgattcaaatattgctgcctcaaacttaaaaattatgataaaagaacaaagagataaagcgcccttaggagaaaagcacaaagagaaggtcgaggaatccacaagtacgggttccaagttataccgatcctataagaggaaggatgaaaaggataagaagatgaagaaggtggtctactacaaaaccggatcatcaacgacaccatagaccttaagtagcgatgaatccacctccaagaaacgccatcaacaaaattcgattaaatcagactttacttgtaccccattcaattattttcacattcctttaaataatactactcccttgctttcggttccactcagaaaactaggacactttgatggtgctcttagtggagtgacaaaacgaaaagtcggagcaaatcatccaccgcaactcacaaggcaccacaatacttcttgcttctttgtgtagggatgagtacaacaaggtgaatgggttggaaagcgtcaaggagatttgggatacactcaaaatggtgtacaaaggtgacaagatcaccaagatcacgaagatggagctcctagaggtggagcttgggaggttcgccatgaacacaggagaatgggccttaataaatgtacaaccgactcatgtccatggtgaacgagatcaggaactacagaagtaagaagtggatggacaacgaagttgttaacctcatgctaaggttgtttacttcttgtaatgctactcttgttaccttaatccatgagaatcctaggtacgagaagatgactctagaggaggtgcttgaaagttccttggccatgagatgatggttaaggactccaagcacattgaggatttggctcaaggaaacgtgaccaccatggagccacaaccgaccgccttgaaggccacaagtaaaaaggaggagccccaagaaacaaggaaactattgaagatttggggctcgacgatgaggagatagccctcatcatcaaaagctttcgacaaatcctatggaaccagaaggacaaggactacaagccatgtgtcaagagagcgtgctacaaatgtggtaagaccgatcatttcatcactaattgtccatatgcaaaggatgatgatgacaaggaagtggacaagagaggaaagaaggttgagaaaaagaaattcttcgtcaacaaaaagaagggaggtgaagaccagatcggcatggaatgggactcggacgaggactcctttgacgacgatgaaggcatcgccacactcgcctttaacaaaagcaccattttccccaaggtcgaccacacatgcctaatggcaaagaagagtaagaaaaaggcacgacctacaacttctcctaaatacacttcctcggatgatgaatctagtgatgagaagatatgaacaaatttttcaagggccttagtagggataaagttgctaaaataaatgaattgattaaggttgtcaatgagaaggatggattcctagaaaagcaggaggatctactcattgatgagacagaaaattgaggaacttgagaaggcactggctcatgagaaagaaaagaataaaattttgacccatgagctaaaagtttgcaatagtttaatttctagtatcaaatgttcaaatgatgatcttaattctaagattgataaatttaatatttgtcatgcttctacatcttccattgaacatgtttccatttgcactagatgtagagattttaatgttgatgcttttgttaagggtaagactcaaattattaatcatgatcatgcccatgtttctcatgctcatacttctcgggctagaaatgttcatgccaaaaatgcttcacacgctcatcatgctcttgttcatatgcaagaacatctcatgttaggcgcaatgattcatatgctaaaacttgttcatgtgcctaagactaaggttaagaatgcattaaatggtccttatatttcatatcatattgtaacaccacaaatccatcaattaaaataatacatttaaaacttagtagagagtaaagtaaaaaaaattaatcaaatgtttgattttatttgtctttagagaatgatttttgttttcataattgattgatgattttataaaatcccttttatgtgaaaaccatttaattaaaataggaactttggtccaaaaataaatgctttaatggtaaatatttttggtatgattattatgaatttttagaaatatttaaaaatatatttatttatattttatgggatataaaaataaaagaaaaaatgaaacctaagctagccgcccaaccggcccattagggaagcccaacccgttgccgccactccccttttccccctctcacttccacgtggggcccgcccagtcccttcgtctccttcgcatcgcgcccgcgcgcatcccgcgtcgtcgtcctggccctcagccggactgtccgcgtcggaccgtctatgccccgtcgtgcccctctgtgccccttccccttccctggtcgctccccttcccatgccggaaacaaccgtccctcccacttcctctcccccattcccctctctccatcaatggaggtaactgacgccatcaatggccatcggctctccctctcccctggcgcccttcctctccttcttcctctataaaacctgaggttgtgtgagagcacctagaggggggtgaataggtgatctcgtgaaacttgaaacttaatgccacaaaatttgattaggagttagcacaataaagccaaatggctagagaggagttctttgcaagacacgatgaccacaagaagatcaacacagataggcacagtggtttatcccgtggtttggccaagtccaacacttgcctactccacgttgtggcgtcccaacggacgagggttgcaatcaacccctctcaagcggtccaaagacccacttgaataccacggtgttttgctttgtttcactatatcccgcttgcgaggaatctccacaacttggagcctctcgcccttacactttgatgttcacaaagaagcacggaagtaaggctgggatgagcaacgcacacaagacacaaaatcagagcacaaacacgcacacaagtcacaactcaagctcacaacacaacccaaagagttctctactcaaatggagctctagttgctatcacaaggaatcgaatgcgcggaattggagtcttggtgcttaggaatgcttagagaatgcttgatatcttcatccatgcgcctaggggtcccttttatagccccaaggcagctaggagccgttgagagcattccaggaaggcaattcttgccttctgtcgcctggcgcaccggacagtccggtgcatcaccggacactgtccggtgcatatttctttccttctttggcgaagccaaccattggagattcagagtcgttggcgcatcggacactgtccggtgcacaccggacagtccggtgcccccttctgaccgttggctctgccacgcgtcgcgcgcggattacgcggccgactgttggctcaccggacagtccggtgcaccaccggacagtccggtgatttatagccgtacgccgccgacgaaacccgagagcagccagttcgctagagccagcctggcgcaccggacactgtccggtgcaccaccggacagtccggtgcacccagactgcgcagagtcttggctgctcagccaagtcttttccaaattggtcttttcctgtttctagcacttagacacaatacattagtctccaaaacaatgtactaagtcttagaaacatacctttactcttgatttgcacttcttaagtctttgacacaaatattactcaaagcatttgtgtggagcacttaatcaccaaaatcttatagaaatgtcccaagggtacattt

SEQ ID NO: 36305 - DNA, 6794 bp, Zea Mays
aagacagataggacaagatggtactccagaacacaactgcacaagcacgtattacttccatcttcccgcagcttctttgctacttcgcggcagcgtttcttatcctctcgtttcaccgggcaagtggcgtggttggcccggggcctccggcttgcaaattggcctcctccaactccttatcctccaccatatgttgaagccttgattctgcagcttcccagtccctgacacaggattgtaattgtcgtgcaactccattcctccgtttttcctattcccgtattttaccaatcctgcattctaaaggggacctcagtctctgctgccgttcctcgacgatcctaccaattgtgccgaagattcttttaaggagaacatactggctcagattctagagattgttgcgaaaagaacaatctcaacatgaggtccttgcgatatgttgatctttagaggtggtggatatggagatctttgcaaaccatggatggaggtctaacgctaggctagagggagcttgattcatggatgttttttttctgagaatctttatgatggatgtttgtcattttttgatttgtaggccgtatgcaagagattgcaaaaggcgggaacattttgtttccataataaaaaatgtcacggtctagataggttgcaagtttagaactaccaccactgctagaagcagaacttgttgcctgtagaaggtagcggtaggaaagtaggaacaatccaagaaaaatcaagattaggaggaaaggtcgaacaactacctccaagcataccagtatcatcgtcatcatcaaaaaaatcatcccaagctattctttcttattagaaagggttggagggacaacctttttcaacctgacaaaaccatatactacatcatttttattgtatagtttaaaaaggagagttatagtatctatcaacttattattataatctatatccatgagagaagttaacttcctggctcttggtcatagagtctttgttatggcatggcctacatatgcagtggtttatggagctcatgtggtgagctacatgcagtgtgaatggttggcaagttcacatagctttgagggagttgttgtgttggccgcacacatcggtttataaccatgcatcttggtgcttgtaggaccgtccgatgtttggtgtgtggcttctttatgaggaggaacgtttggcgaaagccctggatggcattaggtggagctaatggtggtgacactttgggtattgttcccttccttgaaagtgtcatccaaatgcatctcctcatccttctagattcttttgagtaaactctacctatggttcctagatagatgacagtgacgatcaacattgtttccttacttaaggtgtcacctagaggccatgcaccatcttattggatgttgtttcgcatgatacattgaatgctaaactacaagcctctagtttttggcaagccatcctttttcgggtttgcgacttgcttgtggtcctacgatgcatctctgactctcataggggtgatatgtagtgatgaagtcggaggtacttatgttctaggtgcaacaaatcttggcaacgatgacacaatgctttcactttattgtgaggtcaaggcttggtgctagtatgtgacgacgtgtcaaggtcgtgtcaaggtcattggctaatggttaccgtgggaaatgtggagttgctttactatgtgtggtaagctcaacaacgatgatgtgtgatgggctcccttgggtgtgtgttttctttgtgtgcatgtgggttgcttaggatttgttgtcttggctgtccttttctgaattttccccaaactttatgccttactaataaatcgtgtgtctataaggtttgtaagcctaatcttttataaatcaggttaattttatcttgttaattgagagactctttgtaccattgtatgaaaaagctaaatctagctcaggatacagacatggacgtattatcacttgaccaactatagagcacaagtacgttactctcttcgttctattctaaattataagttgtttttaatttttttacatgaaatttcccaaatttgatacgcatctacacatgtataatagcaaaatctatgtaaaaagttgtaatgacttataattttgaacaatttgctagacattttttctttcgaaagaaaagaaatcaccgaacattccatggtgactttggccttacatccacaagtttaattcacataattttagctggtagtgaaacactattgagtagagatgtgcatccaaaaaatactgcaacacaacacaatataaccaaacaaaaagcgttcaaataggtacaacagtacaattcaaagggaacatgagaaaagagagaatggaaaatagatgctataattttgagaaaacatactctaaattcttttataggcacacaaaaagttataaaaattaattaataatttctaaatattataatacaaactcgatctaattaatatactatccaactatcatgaatttgtaaatataaacaatatagaacaaaataactaaaatataaaaataaaattaagaaactatggcacatcaagcaacgccttattaaaagaatctaaaaaatattagcctcaaaagtagagaaacaccttattaaaatcccaaaaatgaagatattagttcagaaaacccttgaggaaaaaacaaaatgaagatattagttccaaaagtagagaaaaccctcgaggagctattttatggtgttatgatgattatggaacacaaactaccaaagaagaagtgtatatcatggctgcaggaattgtttgattatgtcatggttatggaacttagaaaccaccaaagtgaagtgcatgccatatctaccagagtgattcaaatattgctgcctcaaacttaaaaattatgataaaagaacaaagagataaagcgcccttaggagaaaagcacaaagagaaggtcgaggaatccacaagtacgggttccaagttataccgatcctataagaggaaggatgaaaaggataagaagatgaagaaggtggtctactacaaaaccggatcatcaacgacaccatagaccttaagtagcgatgaatccacctccaagaaacgccatcaacaaaattcgattaaatcagactttacttgtaccccattcaattattttcacattcctttaaataatactactcccttgctttcggttccactcagaaaactaggacactttgatggtgctcttagtggagtgacaaaacgaaaagtcggagcaaatcatccaccgcaactcacaaggcaccacaatacttcttgcttctttgtgtagggatgagtacaacaaggtgaatgggttggaaagcgtcaaggagatttgggatacactcaaaatggtgtacaaaggtgacaagatcaccaagatcacgaagatggagctcctagaggtggagcttgggaggttcgccatgaacacaggagaatgggccttaataaatgtacaaccgactcatgtccatggtgaacgagatcaggaactacagaagtaagaagtggatggacaacgaagttgttaacctcatgctaaggttgtttacttcttgtaatgctactcttgttaccttaatccatgagaatcctaggtacgagaagatgactctagaggaggtgcttgaaagttccttggccatgagatgatggttaaggactccaagcacattgaggatttggctcaaggaaacgtgaccaccatggagccacaaccgaccgccttgaaggccacaagtaaaaaggaggagccccaagaaacaaggaaactattgaagatttggggctcgacgatgaggagatagccctcatcatcaaaagctttcgacaaatcctatggaaccagaaggacaaggactacaagccatgtgtcaagagagcgtgctacaaatgtggtaagaccgatcatttcatcactaattgtccatatgcaaaggatgatgatgacaaggaagtggacaagagaggaaagaaggttgagaaaaagaaattcttcgtcaacaaaaagaagggaggtgaagaccagatcggcatggaatgggactcggacgaggactcctttgacgacgatgaaggcatcgccacactcgcctttaacaaaagcaccattttccccaaggtcgaccacacatgcctaatggcaaagaagagtaagaaaaaggcacgacctacaacttctcctaaatacacttcctcggatgatgaatctagtgatgagaagatatgaacaaatttttcaagggccttagtagggataaagttgctaaaataaatgaattgattaaggttgtcaatgagaaggatggattcctagaaaagcaggaggatctactcattgatgagacagaaaattgaggaacttgagaaggcactggctcatgagaaagaaaagaataaaattttgacccatgagctaaaagtttgcaatagtttaatttctagtatcaaatgttcaaatgatgatcttaattctaagattgataaatttaatatttgtcatgcttctacatcttccattgaacatgtttccatttgcactagatgtagagattttaatgttgatgcttttgttaagggtaagactcaaattattaatcatgatcatgcccatgtttctcatgctcatacttctcgggctagaaatgttcatgccaaaaatgcttcacacgctcatcatgctcttgttcatatgcaagaacatctcatgttaggcgcaatgattcatatgctaaaacttgttcatgtgcctaagactaaggttaagaatgcattaaatggtccttatatttcatatcatattgtaacaccacaaatccatcaattaaaataatacatttaaaacttagtagagagtaaagtaaaaaaaattaatcaaatgtttgattttatttgtctttagagaatgatttttgttttcataattgattgatgattttataaaatcccttttatgtgaaaaccatttaattaaaataggaactttggtccaaaaataaatgctttaatggtaaatatttttggtatgattattatgaatttttagaaatatttaaaaatatatttatttatattttatgggatataaaaataaaagaaaaaatgaaacctaagctagccgcccaaccggcccattagggaagcccaacccgttgccgccactccccttttccccctctcacttccacgtggggcccgcccagtcccttcgtctccttcgcatcgcgcccgcgcgcatcccgcgtcgtcgtcctggccctcagccggactgtccgcgtcggaccgtctatgccccgtcgtgcccctctgtgccccttccccttccctggtcgctccccttcccatgccggaaacaaccgtccctcccacttcctctcccccattcccctctctccatcaatggaggtaactgacgccatcaatggccatcggctctccctctcccctggcgcccttcctctccttcttcctctataaaacctgaggttgtgtgagagcacctagaggggggtgaataggtgatctcgtgaaacttgaaacttaatgccacaaaatttgattaggagttagcacaataaagccaaatggctagagaggagttctttgcaagacacgatgaccacaagaagatcaacacagataggcacagtggtttatcccgtggtttggccaagtccaacacttgcctactccacgttgtggcgtcccaacggacgagggttgcaatcaacccctctcaagcggtccaaagacccacttgaataccacggtgttttgctttgtttcactatatcccgcttgcgaggaatctccacaacttggagcctctcgcccttacactttgatgttcacaaagaagcacggaagtaaggctgggatgagcaacgcacacaagacacaaaatcagagcacaaacacgcacacaagtcacaactcaagctcacaacacaacccaaagagttctctactcaaatggagctctagttgctatcacaaggaatcgaatgcgcggaattggagtcttggtgcttaggaatgcttagagaatgcttgatatcttcatccatgcgcctaggggtcccttttatagccccaaggcagctaggagccgttgagagcattccaggaaggcaattcttgccttctgtcgcctggcgcaccggacagtccggtgcatcaccggacactgtccggtgcatatttctttccttctttggcgaagccaaccattggagattcagagtcgttggcgcatcggacactgtccggtgcacaccggacagtccggtgcccccttctgaccgttggctctgccacgcgtcgcgcgcggattacgcggccgactgttggctcaccggacagtccggtgcaccaccggacagtccggtgatttatagccgtacgccgccgacgaaacccgagagcagccagttcgctagagccagcctggcgcaccggacactgtccggtgcaccaccggacagtccggtgcacccagactgcgcagagtcttggctgctcagccaagtcttttccaaattggtcttttcctgtttctagcacttagacacaatacattagtctccaaaacaatgtactaagtcttagaaacatacctttactcttgatttgcacttcttaagtctttgacacaaatattactcaaagcatttgtgtggagcacttaatcaccaaaatcttatagaaatgtcccaagggtacattt

SEQ ID NO: 36306 - DNA, 7476 bp, Zea Mays
ctggcttctctcacggtgatttgctttggttcttctggcttctctcacggtccacgcgaccggggcgcgtgccgggccaagacagataggacaagatggtactccagaacacaactgcacaagcacgtattacttccatcttcccgcagcttctttgctacttcgcggcagcgtttcttatcctctcgtttcaccgggcaagtggcgtggttggcccggggcctccggcttgcaaattggcctcctccaactccttatcctccaccatatgttgaagccttgattctgcagcttcccagtccctgacacaggattgtaattgtcgtgcaactccattcctccgtttttcctattcccgtattttaccaatcctgcattctaaaggggacctcagtctctgctgccgttcctcgacgatcctaccaattgtgccgaaggtaaactatgaagaaatggttgaaacaggtatgattaaaatgtatttatcaagtattgaaaggacgggtaagttactttgtgtttatgacactagtccgtgatgttgaactcctcatctaactgggtgactatgtagagctattgtcggatgaaattggttgaatgatataatttattaaatatgatgtcaatggttcatttgggagactcgagagacaaatttatttgggggccccatacagatgggcttttctcagtgcactcaatgtacactcttttaatgaatactcctcctgtaaatcataatttactttagagtctaaagtttcctcttaaaattaaaattttattgtggtatttaggcaagggactctcacaaaagacaacttagctaagcgtggttggaaaggtaggttgaaatgcaacttttgtaatcaaaatgagactattcaacatctgttatttgattgttaccttgctagaaatatttagatattatttactttgtcttaaatttagagaggcccaatagtattaatcatataattgggtcttggaatgctaacaaaggaactgcgcataggaaaaaaactcctaattggagtggcggcaatgttttggtttatttggctatgtcgctatgatgttgtctttaactttaagccaaaaaaccatcaattacgcagattcttttaaggagaacatactggctcagattctagagattgttgcgaaaagaacaatctcaacatgaggtccttgcgatatgttgatctttagaggtggtggatatggagatctttgcaaaccatggatggaggtctaacgctaggctagagggagcttgattcatggatgttttttttctgagaatctttatgatggatgtttgtcattttttgatttgtaggccgtatgcaagagattgcaaaaggcgggaacattttgtttccataataaaaaatgtcacggtctagataggttgcaagtttagaactaccaccactgctagaagcagaacttgttgcctgtagaaggtagcggtaggaaagtaggaacaatccaagaaaaatcaagattaggaggaaaggtcgaacaactacctccaagcataccagtatcatcgtcatcatcaaaaaaatcatcccaagctattctttcttattagaaagggttggagggacaacctttttcaacctgacaaaaccatatactacatcatttttattgtatagtttaaaaaggagagttatagtatctatcaacttattattataatctatatccatgagagaagttaacttcctggctcttggtcatagagtctttgttatggcatggcctacatatgcagtggtttatggagctcatgtggtgagctacatgcagtgtgaatggaccgtccgatgtttggtgtgtggcttctttatgaggaggaacgtttggcgaaagccctggatggcattaggtggagctaatggtggtgacactttgggtattgttcccttccttgaaagtgtcatccaaatgcatctcctcatccttctagattcttttgagtaaactctacctatggttcctagatagatgacagtgacgatcaacattgtttccttacttaaggtgtcacctagaggccatgcaccatcttattggatgttgtttcgcatgatacattgaatgctaaactacaagcctctagtttttggcaagccatcctttttcgggtttgcgacttgcttgtggtcctacgatgcatctctgactctcataggggtgatatgtagtgatgaagtcggaggtacttatgttctaggtgcaacaaatcttggcaacgatgacacaatgctttcactttattgtgaggtcaaggcttggtgctagtatgtgacgacgtgtcaaggtcgtgtcaaggtcattggctaatggttaccgtgggaaatgtggagttgctttactatgtgtggtaagctcaacaacgatgatgtgtgatgggctcccttgggtgtgtgttttctttgtgtgcatgtgggttgcttaggatttgttgtcttggctgtccttttctgaattttccccaaactttatgccttactaataaatcgtgtgtctataaggtttgtaagcctaatcttttataaatcaggttaattttatcttgttaattgagagactctttgtaccattgtatgaaaaagctaaatctagctcaggatacagacatggacgtattatcacttgaccaactatagagcacaagtacgttactctcttcgttctattctaaattataagttgtttttaatttttttacatgaaatttcccaaatttgatacgcatctacacatgtataatagcaaaatctatgtaaaaagttgtaatgacttataattttgaacaatttgctagacattttttctttcgaaagaaaagaaatcaccgaacattccatggtgactttggccttacatccacaagtttaattcacataattttagctggtagtgaaacactattgagtagagatgtgcatccaaaaaatactgcaacacaacacaatataaccaaacaaaaagcgttcaaataggtacaacagtacaattcaaagggaacatgagaaaagagagaatggaaaatagatgctataattttgagaaaacatactctaaattcttttataggcacacaaaaagttataaaaattaattaataatttctaaatattataatacaaactcgatctaattaatatactatccaactatcatgaatttgtaaatataaacaatatagaacaaaataactaaaatataaaaataaaattaagaaactatggcacatcaagcaacgccttattaaaagaatctaaaaaatattagcctcaaaagtagagaaacaccttattaaaatcccaaaaatgaagatattagttcagaaaacccttgaggaaaaaacaaaatgaagatattagttccaaaagtagagaaaaccctcgaggagctattttatggtgttatgatgattatggaacacaaactaccaaagaagaagtgtatatcatggctgcaggaattgtttgattatgtcatggttatggaacttagaaaccaccaaagtgaagtgcatgccatatctaccagagtgattcaaatattgctgcctcaaacttaaaaattatgataaaagaacaaagagataaagcgcccttaggagaaaagcacaaagagaaggtcgaggaatccacaagtacgggttccaagttataccgatcctataagaggaaggatgaaaaggataagaagatgaagaaggtggtctactacaaaaccggatcatcaacgacaccatagaccttaagtagcgatgaatccacctccaagaaacgccatcaacaaaattcgattaaatcagactttacttgtaccccattcaattattttcacattcctttaaataatactactcccttgctttcggttccactcagaaaactaggacactttgatggtgctcttagtggagtgacaaaacgaaaagtcggagcaaatcatccaccgcaactcacaaggcaccacaatacttcttgcttctttgtgtagggatgagtacaacaaggtgaatgggttggaaagcgtcaaggagatttgggatacactcaaaatggtgtacaaaggtgacaagatcaccaagatcacgaagatggagctcctagaggtggagcttgggaggttcgccatgaacacaggagaatgggccttaataaatgtacaaccgactcatgtccatggtgaacgagatcaggaactacagaagtaagaagtggatggacaacgaagttgttaacctcatgctaaggttgtttacttcttgtaatgctactcttgttaccttaatccatgagaatcctaggtacgagaagatgactctagaggaggtgcttgaaagttccttggccatgagatgatggttaaggactccaagcacattgaggatttggctcaaggaaacgtgaccaccatggagccacaaccgaccgccttgaaggccacaagtaaaaaggaggagccccaagaaacaaggaaactattgaagatttggggctcgacgatgaggagatagccctcatcatcaaaagctttcgacaaatcctatggaaccagaaggacaaggactacaagccatgtgtcaagagagcgtgctacaaatgtggtaagaccgatcatttcatcactaattgtccatatgcaaaggatgatgatgacaaggaagtggacaagagaggaaagaaggttgagaaaaagaaattcttcgtcaacaaaaagaagggaggtgaagaccagatcggcatggaatgggactcggacgaggactcctttgacgacgatgaaggcatcgccacactcgcctttaacaaaagcaccattttccccaaggtcgaccacacatgcctaatggcaaagaagagtaagaaaaaggcacgacctacaacttctcctaaatacacttcctcggatgatgaatctagtgatgagaagatatgaacaaatttttcaagggccttagtagggataaagttgctaaaataaatgaattgattaaggttgtcaatgagaaggatggattcctagaaaagcaggaggatctactcattgatgagacagaaaattgaggaacttgagaaggcactggctcatgagaaagaaaagaataaaattttgacccatgagctaaaagtttgcaatagtttaatttctagtatcaaatgttcaaatgatgatcttaattctaagattgataaatttaatatttgtcatgcttctacatcttccattgaacatgtttccatttgcactagatgtagagattttaatgttgatgcttttgttaagggtaagactcaaattattaatcatgatcatgcccatgtttctcatgctcatacttctcgggctagaaatgttcatgccaaaaatgcttcacacgctcatcatgctcttgttcatatgcaagaacatctcatgttaggcgcaatgattcatatgctaaaacttgttcatgtgcctaagactaaggttaagaatgcattaaatggtccttatatttcatatcatattgtaacaccacaaatccatcaattaaaataatacatttaaaacttagtagagagtaaagtaaaaaaaattaatcaaatgtttgattttatttgtctttagagaatgatttttgttttcataattgattgatgattttataaaatcccttttatgtgaaaaccatttaattaaaataggaactttggtccaaaaataaatgctttaatggtaaatatttttggtatgattattatgaatttttagaaatatttaaaaatatatttatttatattttatgggatataaaaataaaagaaaaaatgaaacctaagctagccgcccaaccggcccattagggaagcccaacccgttgccgccactccccttttccccctctcacttccacgtggggcccgcccagtcccttcgtctccttcgcatcgcgcccgcgcgcatcccgcgtcgtcgtcctggccctcagccggactgtccgcgtcggaccgtctatgccccgtcgtgcccctctgtgccccttccccttccctggtcgctccccttcccatgccggaaacaaccgtccctcccacttcctctcccccattcccctctctccatcaatggaggtaactgacgccatcaatggccatcggctctccctctcccctggcgcccttcctctccttcttcctctataaaacctgaggttgtgtgagagcacctagaggggggtgaataggtgatctcgtgaaacttgaaacttaatgccacaaaatttgattaggagttagcacaataaagccaaatggctagagaggagttctttgcaagacacgatgaccacaagaagatcaacacagataggcacagtggtttatcccgtggtttggccaagtccaacacttgcctactccacgttgtggcgtcccaacggacgagggttgcaatcaacccctctcaagcggtccaaagacccacttgaataccacggtgttttgctttgtttcactatatcccgcttgcgaggaatctccacaacttggagcctctcgcccttacactttgatgttcacaaagaagcacggaagtaaggctgggatgagcaacgcacacaagacacaaaatcagagcacaaacacgcacacaagtcacaactcaagctcacaacacaacccaaagagttctctactcaaatggagctctagttgctatcacaaggaatcgaatgcgcggaattggagtcttggtgcttaggaatgcttagagaatgcttgatatcttcatccatgcgcctaggggtcccttttatagccccaaggcagctaggagccgttgagagcattccaggaaggcaattcttgccttctgtcgcctggcgcaccggacagtccggtgcatcaccggacactgtccggtgcatatttctttccttctttggcgaagccaaccattggagattcagagtcgttggcgcatcggacactgtccggtgcacaccggacagtccggtgcccccttctgaccgttggctctgccacgcgtcgcgcgcggattacgcggccgactgttggctcaccggacagtccggtgcaccaccggacagtccggtgatttatagccgtacgccgccgacgaaacccgagagcagccagttcgctagagccagcctggcgcaccggacactgtccggtgcaccaccggacagtccggtgcacccagactgcgcagagtcttggctgctcagccaagtcttttccaaattggtcttttcctgtttctagcacttagacacaatacattagtctccaaaacaatgtactaagtcttagaaacatacctttactcttgatttgcacttcttaagtctttgacacaaatattactcaaagcatttgtgtggagcacttaatcaccaaaatcttatagaaatgtcccaagggtacattt

SEQ ID NO: 36307 - DNA, 6078 bp, Zea Mays
ctggcttctctcacggtgatttgctttggttcttctggcttctctcacggtccacgcgaccggggcgcgtgccgggccaagacagataggacaagatggtactccagaacacaactgcacaagcacgtattacttccatcttcccgcagcttctttgctacttcgcggcagcgtttcttatcctctcgtttcaccgggcaagtggcgtggttggcccggggcctccggcttgcaaattggcctcctccaactccttatcctccaccatatgttgaagccttgattctgcagcttcccagtccctgacacaggattgtaattgtcgtgcaactccattcctccgtttttcctattcccgtattttaccaatcctgcattctaaaggggacctcagtctctgctgccgttcctcgacgatcctaccaattgtgccgaaggaccgtccgatgtttggtgtgtggcttctttatgaggaggaacgtttggcgaaagccctggatggcattaggtggagctaatggtggtgacactttgggtattgttcccttccttgaaagtgtcatccaaatgcatctcctcatccttctagattcttttgagtaaactctacctatggttcctagatagatgacagtgacgatcaacattgtttccttacttaaggtgtcacctagaggccatgcaccatcttattggatgttgtttcgcatgatacattgaatgctaaactacaagcctctagtttttggcaagccatcctttttcgggtttgcgacttgcttgtggtcctacgatgcatctctgactctcataggggtgatatgtagtgatgaagtcggaggtacttatgttctaggtgcaacaaatcttggcaacgatgacacaatgctttcactttattgtgaggtcaaggcttggtgctagtatgtgacgacgtgtcaaggtcgtgtcaaggtcattggctaatggttaccgtgggaaatgtggagttgctttactatgtgtggtaagctcaacaacgatgatgtgtgatgggctcccttgggtgtgtgttttctttgtgtgcatgtgggttgcttaggatttgttgtcttggctgtccttttctgaattttccccaaactttatgccttactaataaatcgtgtgtctataaggtttgtaagcctaatcttttataaatcaggttaattttatcttgttaattgagagactctttgtaccattgtatgaaaaagctaaatctagctcaggatacagacatggacgtattatcacttgaccaactatagagcacaagtacgttactctcttcgttctattctaaattataagttgtttttaatttttttacatgaaatttcccaaatttgatacgcatctacacatgtataatagcaaaatctatgtaaaaagttgtaatgacttataattttgaacaatttgctagacattttttctttcgaaagaaaagaaatcaccgaacattccatggtgactttggccttacatccacaagtttaattcacataattttagctggtagtgaaacactattgagtagagatgtgcatccaaaaaatactgcaacacaacacaatataaccaaacaaaaagcgttcaaataggtacaacagtacaattcaaagggaacatgagaaaagagagaatggaaaatagatgctataattttgagaaaacatactctaaattcttttataggcacacaaaaagttataaaaattaattaataatttctaaatattataatacaaactcgatctaattaatatactatccaactatcatgaatttgtaaatataaacaatatagaacaaaataactaaaatataaaaataaaattaagaaactatggcacatcaagcaacgccttattaaaagaatctaaaaaatattagcctcaaaagtagagaaacaccttattaaaatcccaaaaatgaagatattagttcagaaaacccttgaggaaaaaacaaaatgaagatattagttccaaaagtagagaaaaccctcgaggagctattttatggtgttatgatgattatggaacacaaactaccaaagaagaagtgtatatcatggctgcaggaattgtttgattatgtcatggttatggaacttagaaaccaccaaagtgaagtgcatgccatatctaccagagtgattcaaatattgctgcctcaaacttaaaaattatgataaaagaacaaagagataaagcgcccttaggagaaaagcacaaagagaaggtcgaggaatccacaagtacgggttccaagttataccgatcctataagaggaaggatgaaaaggataagaagatgaagaaggtggtctactacaaaaccggatcatcaacgacaccatagaccttaagtagcgatgaatccacctccaagaaacgccatcaacaaaattcgattaaatcagactttacttgtaccccattcaattattttcacattcctttaaataatactactcccttgctttcggttccactcagaaaactaggacactttgatggtgctcttagtggagtgacaaaacgaaaagtcggagcaaatcatccaccgcaactcacaaggcaccacaatacttcttgcttctttgtgtagggatgagtacaacaaggtgaatgggttggaaagcgtcaaggagatttgggatacactcaaaatggtgtacaaaggtgacaagatcaccaagatcacgaagatggagctcctagaggtggagcttgggaggttcgccatgaacacaggagaatgggccttaataaatgtacaaccgactcatgtccatggtgaacgagatcaggaactacagaagtaagaagtggatggacaacgaagttgttaacctcatgctaaggttgtttacttcttgtaatgctactcttgttaccttaatccatgagaatcctaggtacgagaagatgactctagaggaggtgcttgaaagttccttggccatgagatgatggttaaggactccaagcacattgaggatttggctcaaggaaacgtgaccaccatggagccacaaccgaccgccttgaaggccacaagtaaaaaggaggagccccaagaaacaaggaaactattgaagatttggggctcgacgatgaggagatagccctcatcatcaaaagctttcgacaaatcctatggaaccagaaggacaaggactacaagccatgtgtcaagagagcgtgctacaaatgtggtaagaccgatcatttcatcactaattgtccatatgcaaaggatgatgatgacaaggaagtggacaagagaggaaagaaggttgagaaaaagaaattcttcgtcaacaaaaagaagggaggtgaagaccagatcggcatggaatgggactcggacgaggactcctttgacgacgatgaaggcatcgccacactcgcctttaacaaaagcaccattttccccaaggtcgaccacacatgcctaatggcaaagaagagtaagaaaaaggcacgacctacaacttctcctaaatacacttcctcggatgatgaatctagtgatgagaagatatgaacaaatttttcaagggccttagtagggataaagttgctaaaataaatgaattgattaaggttgtcaatgagaaggatggattcctagaaaagcaggaggatctactcattgatgagacagaaaattgaggaacttgagaaggcactggctcatgagaaagaaaagaataaaattttgacccatgagctaaaagtttgcaatagtttaatttctagtatcaaatgttcaaatgatgatcttaattctaagattgataaatttaatatttgtcatgcttctacatcttccattgaacatgtttccatttgcactagatgtagagattttaatgttgatgcttttgttaagggtaagactcaaattattaatcatgatcatgcccatgtttctcatgctcatacttctcgggctagaaatgttcatgccaaaaatgcttcacacgctcatcatgctcttgttcatatgcaagaacatctcatgttaggcgcaatgattcatatgctaaaacttgttcatgtgcctaagactaaggttaagaatgcattaaatggtccttatatttcatatcatattgtaacaccacaaatccatcaattaaaataatacatttaaaacttagtagagagtaaagtaaaaaaaattaatcaaatgtttgattttatttgtctttagagaatgatttttgttttcataattgattgatgattttataaaatcccttttatgtgaaaaccatttaattaaaataggaactttggtccaaaaataaatgctttaatggtaaatatttttggtatgattattatgaatttttagaaatatttaaaaatatatttatttatattttatgggatataaaaataaaagaaaaaatgaaacctaagctagccgcccaaccggcccattagggaagcccaacccgttgccgccactccccttttccccctctcacttccacgtggggcccgcccagtcccttcgtctccttcgcatcgcgcccgcgcgcatcccgcgtcgtcgtcctggccctcagccggactgtccgcgtcggaccgtctatgccccgtcgtgcccctctgtgccccttccccttccctggtcgctccccttcccatgccggaaacaaccgtccctcccacttcctctcccccattcccctctctccatcaatggaggtaactgacgccatcaatggccatcggctctccctctcccctggcgcccttcctctccttcttcctctataaaacctgaggttgtgtgagagcacctagaggggggtgaataggtgatctcgtgaaacttgaaacttaatgccacaaaatttgattaggagttagcacaataaagccaaatggctagagaggagttctttgcaagacacgatgaccacaagaagatcaacacagataggcacagtggtttatcccgtggtttggccaagtccaacacttgcctactccacgttgtggcgtcccaacggacgagggttgcaatcaacccctctcaagcggtccaaagacccacttgaataccacggtgttttgctttgtttcactatatcccgcttgcgaggaatctccacaacttggagcctctcgcccttacactttgatgttcacaaagaagcacggaagtaaggctgggatgagcaacgcacacaagacacaaaatcagagcacaaacacgcacacaagtcacaactcaagctcacaacacaacccaaagagttctctactcaaatggagctctagttgctatcacaaggaatcgaatgcgcggaattggagtcttggtgcttaggaatgcttagagaatgcttgatatcttcatccatgcgcctaggggtcccttttatagccccaaggcagctaggagccgttgagagcattccaggaaggcaattcttgccttctgtcgcctggcgcaccggacagtccggtgcatcaccggacactgtccggtgcatatttctttccttctttggcgaagccaaccattggagattcagagtcgttggcgcatcggacactgtccggtgcacaccggacagtccggtgcccccttctgaccgttggctctgccacgcgtcgcgcgcggattacgcggccgactgttggctcaccggacagtccggtgcaccaccggacagtccggtgatttatagccgtacgccgccgacgaaacccgagagcagccagttcgctagagccagcctggcgcaccggacactgtccggtgcaccaccggacagtccggtgcacccagactgcgcagagtcttggctgctcagccaagtcttttccaaattggtcttttcctgtttctagcacttagacacaatacattagtctccaaaacaatgtactaagtcttagaaacatacctttactcttgatttgcacttcttaagtctttgacacaaatattactcaaagcatttgtgtggagcacttaatcaccaaaatcttatagaaatgtcccaagggtacattt

SEQ ID NO: 36308 - DNA, 1925 bp, Zea Mays
ggctgcagaagactgatgccagcaggccttggagggacctggaccttcccattcacccgcaggaaacttctgtcaaggactaccagaatttcaatttccgacaaccttattctcaagcgtcatactatgtctctttgatattgggagataaaaaatggcctgtagctgagaaacttgaagctctttctaagcttgaatcagattattttgcaaagttcgtaccacacctactgtcaaaaacatttttggaatgttatgttcaagggaacattgaaccaagtgaagcaaaatctatcgtagaagaaatcgaaaacactatatttactacgcccaattctttgttcaaatccatgtctccatcagaatatctgattaaaagggtcatcatgcttgaaaatgacttgaaatgctactaccaaactgagggattaaaccagaagaatgagaattcatcagttatccaatatattcaggtgcatcaagatgacgccattttgaatatcaaacttgagctgttctctctaatagcaaaacagccagccttcaaccagctacgaactgttgaacaacttgggtatataacaagtctttctctgagatccgactatggagtcctggcactccaggttgttatccagtccacagtaaaggatccttcatacctcgatgttagagttgatgagttctttaagatgtttgaaagcaaaatctatgaactctccgacaaggatttcaagagaaatgtgaaatcattaattgattctaaactggagaagtttaaaaacttatgggaggaatctcatttctactggggagagattgaggcaggaactctgaagtttgatagggtcgagtctgaggtcgctatgctaagagagctcaagaaagaagaattcatcgagtacttcaaccagtatataaaagtggacgcgcctcaaaggaggacactaagcgtgcaagtcttcggcggcaaccatttggtagagttcaagaaggcaatcaacgaagccaacccgcccaaaatgtacagaattacagacatattcggcttcaaacgatcgaggccgctgtacagctcactcaagggaggtccgggcaggatcaccatggactgacagccggcaatagcatgccttgtttttcatgtatgtagtgtaatggccagtgcatacgaatgatgaattcgattctgaatcctgctcctgcatcagattcggttgcatgattgatctatacttcactgtgggtttcacgaccagcgtgtcactttctgggcaaaatctagggagctgtataaagtcatgtatgttcacatgtttgtttgcgtttcttctcacagctatgcagtttgtacagttacatatccacagtgaactagaactagaagcgcgtcttctacacaccaatatacagcttgagcctggctgaccgtgcccgacgccggccgagaaccgtcaaggtgccgtcatgcgcacatgcaccaccggccgtccggtttcagcacgccccggcgtgttcgcaaacgcccgccggcgcccccactcgaagccgttgcggtgccaccggcacctgaacgagccccggtgcgtcgtgggcgagcacacgcagtagtagtgcggcgacgcctggcgcgcccgtggcacagatggtgggggcgacggtgccacggtcgcctgctgctcccgccgcctgactgcgcagtccggcggcagaggcggcagccctggatggcacatgcttctaggctacaaaagggtgatgcgatcggcagctccaccagctataaaacagatggcgccgaagaatggaatcgggttctggcgttttcggatggtgggagatgactagacgtggggaaagggcggggaatatgtgtgggctagggtggtaatgtatggtatggtagcccgcaggcgatggttttt

SEQ ID NO: 36309 - DNA, 2143 bp, Zea Mays
gtggctttggctgcagaagactgatgccagcaggccttggagggacctggaccttcccattcacccgcaggaaacttctgtcaaggactaccagaatttcaatttccgacaaccttattctcaagcgtcatactatgtctctttgatattgggagataaaaaatggcctgtagctgagaaacttgaagctctttctaagcttgaatcagattattttgcaaagttcgtaccacacctactgtcaaaaacatttttggaatgttatgttcaagggaacattgaaccaagtgaagcaaaatctatcgtagaagaaatcgaaaacactatatttactacgcccaattctttgttcaaatccatgtctccatcagaatatctgattaaaagggtcatcatgcttgaaaatgacttgaaatgctactaccaaactgagggattaaaccagaagaatgagaattcatcagttatccaatatattcaggtgcatcaagatgacgccattttgaatatcaaacttgagctgttctctctaatagcaaaacagccagccttcaaccagctacgaactgttgaacaacttgggtatataacaagtctttctctgagatccgactatggagtcctggcactccaggttgttatccagtccacagtaaaggatccttcatacctcgatgttagagttgatgagttctttaagatgtttgaaagcaaaatctatgaactctccgacaaggatttcaagagaaatgtgaaatcattaattgattctaaactggagaagtttaaaaacttatgggaggaatctcatttctactggggagagattgaggcaggaactctgaagtttgatagggtcgagtctgaggtaagtgttctcctttcagcaacaatgcgtgtaaaggaaattgtatctagtataaagcaagcagactgtagccttttagtaaacagataatagtgtaatagttgaaaatattcacaaaattttaattgtcactcccttatattcagaggaaacagaaatgagaaggttgtgccagtaattgccaagatgctttgctaacaaatgtaacaggtcgctatgctaagagagctcaagaaagaagaattcatcgagtacttcaaccagtatataaaagtggacgcgcctcaaaggaggacactaagcgtgcaagtcttcggcggcaaccatttggtagagttcaagaaggcaatcaacgaagccaacccgcccaaaatgtacagaattacagacatattcggcttcaaacgatcgaggccgctgtacagctcactcaagggaggtccgggcaggatcaccatggactgacagccggcaatagcatgccttgtttttcatgtatgtagtgtaatggccagtgcatacgaatgatgaattcgattctgaatcctgctcctgcatcagattcggttgcatgattgatctatacttcactgtgggtttcacgaccagcgtgtcactttctgggcaaaatctagggagctgtataaagtcatgtatgttcacatgtttgtttgcgtttcttctcacagctatgcagtttgtacagttacatatccacagtgaactagaactagaagcgcgtcttctacacaccaatatacagcttgagcctggctgaccgtgcccgacgccggccgagaaccgtcaaggtgccgtcatgcgcacatgcaccaccggccgtccggtttcagcacgccccggcgtgttcgcaaacgcccgccggcgcccccactcgaagccgttgcggtgccaccggcacctgaacgagccccggtgcgtcgtgggcgagcacacgcagtagtagtgcggcgacgcctggcgcgcccgtggcacagatggtgggggcgacggtgccacggtcgcctgctgctcccgccgcctgactgcgcagtccggcggcagaggcggcagccctggatggcacatgcttctaggctacaaaagggtgatgcgatcggcagctccaccagctataaaacagatggcgccgaagaatggaatcgggttctggcgttttcggatggtgggagatgactagacgtggggaaagggcggggaatatgtgtgggctagggtggtaatgtatggtatggtagcccgcaggcgatggttttt

SEQ ID NO: 36310 - DNA, 2483 bp, Zea Mays
ctctcagattttgagctgcagcccgacacggaagacaaccatattttcggcttagcgtcagatgaatattctgggagtccaaaaaatttgaaggatctacgagttctgctgagccctggtataacacaccattttcagttgaaaatgtcactccttcagttatacaggaatggattgaaaaagctcctactgaaaaactccatcttccaaaacctaatattttcataccaaaggatttatctcttaaagaagtgcatgaaaaggttacttttccaacagtgttaaggaagagcccactttcacagttgtggtataagcctgatatgctgttctccacaccaaaggttcacattatcattgatttccactgtccattatccagccactcccctgaagcagttgttgctactgagctctttgttgatttgttagtagattatttgaatgcttatgcttatgatgctcaaattgctggtttattctattcaatatatgttacttcagctggattccaggtttctttaggtggttacaatgacaagatgagagttctcttaaatgccatactagtgcaaattgtgaaatttgaagttaagccaaacagattttctgcactgaaggaaacttctgtcaaggactaccagaatttcaatttccgacaaccttattctcaagcgtcatactatgtctctttgatattgggagataaaaaatggcctgtagctgagaaacttgaagctctttctaagcttgaatcagattattttgcaaagttcgtaccacacctactgtcaaaaacatttttggaatgttatgttcaagggaacattgaaccaagtgaagcaaaatctatcgtagaagaaatcgaaaacactatatttactacgcccaattctttgttcaaatccatgtctccatcagaatatctgattaaaagggtcatcatgcttgaaaatgacttgaaatgctactaccaaactgagggattaaaccagaagaatgagaattcatcagttatccaatatattcaggtgcatcaagatgacgccattttgaatatcaaacttgagctgttctctctaatagcaaaacagccagccttcaaccagctacgaactgttgaacaacttgggtatataacaagtctttctctgagatccgactatggagtcctggcactccaggttgttatccagtccacagtaaaggatccttcatacctcgatgttagagttgatgagttctttaagatgtttgaaagcaaaatctatgaactctccgacaaggatttcaagagaaatgtgaaatcattaattgattctaaactggagaagtttaaaaacttatgggaggaatctcatttctactggggagagattgaggcaggaactctgaagtttgatagggtcgagtctgaggtcgctatgctaagagagctcaagaaagaagaattcatcgagtacttcaaccagtatataaaagtggacgcgcctcaaaggaggacactaagcgtgcaagtcttcggcggcaaccatttggtagagttcaagaaggcaatcaacgaagccaacccgcccaaaatgtacagaattacagacatattcggcttcaaacgatcgaggccgctgtacagctcactcaagggaggtccgggcaggatcaccatggactgacagccggcaatagcatgccttgtttttcatgtatgtagtgtaatggccagtgcatacgaatgatgaattcgattctgaatcctgctcctgcatcagattcggttgcatgattgatctatacttcactgtgggtttcacgaccagcgtgtcactttctgggcaaaatctagggagctgtataaagtcatgtatgttcacatgtttgtttgcgtttcttctcacagctatgcagtttgtacagttacatatccacagtgaactagaactagaagcgcgtcttctacacaccaatatacagcttgagcctggctgaccgtgcccgacgccggccgagaaccgtcaaggtgccgtcatgcgcacatgcaccaccggccgtccggtttcagcacgccccggcgtgttcgcaaacgcccgccggcgcccccactcgaagccgttgcggtgccaccggcacctgaacgagccccggtgcgtcgtgggcgagcacacgcagtagtagtgcggcgacgcctggcgcgcccgtggcacagatggtgggggcgacggtgccacggtcgcctgctgctcccgccgcctgactgcgcagtccggcggcagaggcggcagccctggatggcacatgcttctaggctacaaaagggtgatgcgatcggcagctccaccagctataaaacagatggcgccgaagaatggaatcgggttctggcgttttcggatggtgggagatgactagacgtggggaaagggcggggaatatgtgtgggctagggtggtaatgtatggtatggtagcccgcaggcgatggttttt

SEQ ID NO: 36311 - DNA, 3523 bp, Zea Mays
tgagaacacaagaaaaatttgttgtctgatggctggaggatgtatcagcttcaatttcattcttttttcctctcagcttcaaaagcattttgcttcaaaggatcacccttaccacaaattcagtacaggaagttgggaaacactagaaactaaaccaaaagcgaggggcctggatatcagacttgaacttctgaagttttacaagaattattcagcaaacgttatgcaccttgttgtttatggaaaggagaacctcgattgcattcagggcttggttgagcgtatgtttagtgacataaaaaacactgatcagagaagcttgaaatgtccaagtcatcctctttcagaggaacatttacagcttcttgtcaaagcactgccaatagtagaaggggactatctaagaattatatggccaataacacctagcatccagttttacaaagaagctccttgccattatctgagtcacctcattggacatgaaggcgaggggtccatcttccatattataaaggaactaggatgggccatgaacttaatggctggagagtgcagtgacagtaatgagtattcctttttctcagtaagcatgaggctcactgatgctggccatgaacgcatggaggatattgttgggttgatcttcaaatatcttcatctattaaaagaagacggagtccatgagtggatatttaatgagcttgcggcgataaatgaaatggagttccattatcaagacaaagtccgcccaatcaactatgtgatgcgcactgtctcaactatgcggttgttcccaccagaagaatggttggttggagcagcattaccatcaaagtatgcatcacagagaataaatatgatactcaatcaactaatacctgaaacagtaagaatattctgggagtccaaaaaatttgaaggatctacgagttctgctgagccctggtataacacaccattttcagttgaaaatgtcactccttcagttatacaggaatggattgaaaaagctcctactgaaaaactccatcttccaaaacctaatattttcataccaaaggatttatctcttaaagaagtgcatgaaaaggttacttttccaacagtgttaaggaagagcccactttcacagttgtggtataagcctgatatgctgttctccacaccaaaggttcacattatcattgatttccactgtccattatccagccactcccctgaagcagttgttgctactgagctctttgttgatttgttagtagattatttgaatgcttatgcttatgatgctcaaattgctggtttattctattcaatatatgttacttcagctggattccaggtttctttaggtggttacaatgacaagatgagagttctcttaaatgccatactagtgcaaattgtgaaatttgaagttaagccaaacagattttctgcactgaaggaaacttctgtcaaggactaccagaatttcaatttccgacaaccttattctcaagcgtcatactatgtctctttgatattgggagataaaaaatggcctgtagctgagaaacttgaagctctttctaagcttgaatcagattattttgcaaagttcgtaccacacctactgtcaaaaacatttttggaatgttatgttcaagggaacattgaaccaagtgaagcaaaatctatcgtagaagaaatcgaaaacactatatttactacgcccaattctttgttcaaatccatgtctccatcagaatatctgattaaaagggtcatcatgcttgaaaatgacttgaaatgctactaccaaactgagggattaaaccagaagaatgagaattcatcagttatccaatatattcaggtgcatcaagatgacgccattttgaatatcaaacttgagctgttctctctaatagcaaaacagccagccttcaaccagctacgaactgttgaacaacttgggtatataacaagtctttctctgagatccgactatggagtcctggcactccaggttgttatccagtccacagtaaaggatccttcatacctcgatgttagagttgatgagttctttaagatgtttgaaagcaaaatctatgaactctccgacaaggatttcaagagaaatgtgaaatcattaattgattctaaactggagaagtttaaaaacttatgggaggaatctcatttctactggggagagattgaggcaggaactctgaagtttgatagggtcgagtctgaggtaagtgttctcctttcagcaacaatgcgtgtaaaggaaattgtatctagtataaagcaagcagactgtagccttttagtaaacagataatagtgtaatagttgaaaatattcacaaaattttaattgtcactcccttatattcagaggaaacagaaatgagaaggttgtgccagtaattgccaagatgctttgctaacaaatgtaacaggtcgctatgctaagagagctcaagaaagaagaattcatcgagtacttcaaccagtatataaaagtggacgcgcctcaaaggaggacactaagcgtgcaagtcttcggcggcaaccatttggtagagttcaagaaggcaatcaacgaagccaacccgcccaaaatgtacagaattacagacatattcggcttcaaacgatcgaggccgctgtacagctcactcaagggaggtccgggcaggatcaccatggactgacagccggcaatagcatgccttgtttttcatgtatgtagtgtaatggccagtgcatacgaatgatgaattcgattctgaatcctgctcctgcatcagattcggttgcatgattgatctatacttcactgtgggtttcacgaccagcgtgtcactttctgggcaaaatctagggagctgtataaagtcatgtatgttcacatgtttgtttgcgtttcttctcacagctatgcagtttgtacagttacatatccacagtgaactagaactagaagcgcgtcttctacacaccaatatacagcttgagcctggctgaccgtgcccgacgccggccgagaaccgtcaaggtgccgtcatgcgcacatgcaccaccggccgtccggtttcagcacgccccggcgtgttcgcaaacgcccgccggcgcccccactcgaagccgttgcggtgccaccggcacctgaacgagccccggtgcgtcgtgggcgagcacacgcagtagtagtgcggcgacgcctggcgcgcccgtggcacagatggtgggggcgacggtgccacggtcgcctgctgctcccgccgcctgactgcgcagtccggcggcagaggcggcagccctggatggcacatgcttctaggctacaaaagggtgatgcgatcggcagctccaccagctataaaacagatggcgccgaagaatggaatcgggttctggcgttttcggatggtgggagatgactagacgtggggaaagggcggggaatatgtgtgggctagggtggtaatgtatggtatggtagcccgcaggcgatggttttt

SEQ ID NO: 36312 - DNA, 3312 bp, Zea Mays
attctgagaacacaagaaaaatttgttgtctgatggctggaggatgtatcagcttcaatttcattcttttttcctctcagcttcaaaagcattttgcttcaaaggatcacccttaccacaaattcagtacaggaagttgggaaacactagaaactaaaccaaaagcgaggggcctggatatcagacttgaacttctgaagttttacaagaattattcagcaaacgttatgcaccttgttgtttatggaaaggagaacctcgattgcattcagggcttggttgagcgtatgtttagtgacataaaaaacactgatcagagaagcttgaaatgtccaagtcatcctctttcagaggaacatttacagcttcttgtcaaagcactgccaatagtagaaggggactatctaagaattatatggccaataacacctagcatccagttttacaaagaagctccttgccattatctgagtcacctcattggacatgaaggcgaggggtccatcttccatattataaaggaactaggatgggccatgaacttaatggctggagagtgcagtgacagtaatgagtattcctttttctcagtaagcatgaggctcactgatgctggccatgaacgcatggaggatattgttgggttgatcttcaaatatcttcatctattaaaagaagacggagtccatgagtggatatttaatgagcttgcggcgataaatgaaatggagttccattatcaagacaaagtccgcccaatcaactatgtgatgcgcactgtctcaactatgcggttgttcccaccagaagaatggttggttggagcagcattaccatcaaagtatgcatcacagagaataaatatgatactcaatcaactaatacctgaaacaaatattctgggagtccaaaaaatttgaaggatctacgagttctgctgagccctggtataacacaccattttcagttgaaaatgtcactccttcagttatacaggaatggattgaaaaagctcctactgaaaaactccatcttccaaaacctaatattttcataccaaaggatttatctcttaaagaagtgcatgaaaaggttacttttccaacagtgttaaggaagagcccactttcacagttgtggtataagcctgatatgctgttctccacaccaaaggttcacattatcattgatttccactgtccattatccagccactcccctgaagcagttgttgctactgagctctttgttgatttgttagtagattatttgaatgcttatgcttatgatgctcaaattgctggtttattctattcaatatatgttacttcagctggattccaggtttctttaggtggttacaatgacaagatgagagttctcttaaatgccatactagtgcaaattgtgaaatttgaagttaagccaaacagattttctgcactgaaggaaacttctgtcaaggactaccagaatttcaatttccgacaaccttattctcaagcgtcatactatgtctctttgatattgggagataaaaaatggcctgtagctgagaaacttgaagctctttctaagcttgaatcagattattttgcaaagttcgtaccacacctactgtcaaaaacatttttggaatgttatgttcaagggaacattgaaccaagtgaagcaaaatctatcgtagaagaaatcgaaaacactatatttactacgcccaattctttgttcaaatccatgtctccatcagaatatctgattaaaagggtcatcatgcttgaaaatgacttgaaatgctactaccaaactgagggattaaaccagaagaatgagaattcatcagttatccaatatattcaggtgcatcaagatgacgccattttgaatatcaaacttgagctgttctctctaatagcaaaacagccagccttcaaccagctacgaactgttgaacaacttgggtatataacaagtctttctctgagatccgactatggagtcctggcactccaggttgttatccagtccacagtaaaggatccttcatacctcgatgttagagttgatgagttctttaagatgtttgaaagcaaaatctatgaactctccgacaaggatttcaagagaaatgtgaaatcattaattgattctaaactggagaagtttaaaaacttatgggaggaatctcatttctactggggagagattgaggcaggaactctgaagtttgatagggtcgagtctgaggtcgctatgctaagagagctcaagaaagaagaattcatcgagtacttcaaccagtatataaaagtggacgcgcctcaaaggaggacactaagcgtgcaagtcttcggcggcaaccatttggtagagttcaagaaggcaatcaacgaagccaacccgcccaaaatgtacagaattacagacatattcggcttcaaacgatcgaggccgctgtacagctcactcaagggaggtccgggcaggatcaccatggactgacagccggcaatagcatgccttgtttttcatgtatgtagtgtaatggccagtgcatacgaatgatgaattcgattctgaatcctgctcctgcatcagattcggttgcatgattgatctatacttcactgtgggtttcacgaccagcgtgtcactttctgggcaaaatctagggagctgtataaagtcatgtatgttcacatgtttgtttgcgtttcttctcacagctatgcagtttgtacagttacatatccacagtgaactagaactagaagcgcgtcttctacacaccaatatacagcttgagcctggctgaccgtgcccgacgccggccgagaaccgtcaaggtgccgtcatgcgcacatgcaccaccggccgtccggtttcagcacgccccggcgtgttcgcaaacgcccgccggcgcccccactcgaagccgttgcggtgccaccggcacctgaacgagccccggtgcgtcgtgggcgagcacacgcagtagtagtgcggcgacgcctggcgcgcccgtggcacagatggtgggggcgacggtgccacggtcgcctgctgctcccgccgcctgactgcgcagtccggcggcagaggcggcagccctggatggcacatgcttctaggctacaaaagggtgatgcgatcggcagctccaccagctataaaacagatggcgccgaagaatggaatcgggttctggcgttttcggatggtgggagatgactagacgtggggaaagggcggggaatatgtgtgggctagggtggtaatgtatggtatggtagcccgcaggcgatggttttt

SEQ ID NO: 36313 - DNA, 3563 bp, Zea Mays
agttcgttggtgcctgagaatccatggtcgatcgtctccagtcgaagcgaaaagcgaaaaggagaaggggcgggggattgcgagcctgtgctgatggcggcggcggcggtggccgcggcggggagcagcaatgtcgagttcatccgcgcgcgcagcgacaagcgggagtaccgccgcgtggtgctcgccaacgcgctcgagatcctactaatcagcgaccccgacaccgacaaggcggcggcgtgcatggaggtcgaggtgggctcgttcagcgatccggagggacttgagggcctcgcgcacttcctcgagcacatgctattttatgccagcgagaagtatcctggagaacatgaatatacgaaatatatcatagaggaagttgggaaacactagaaactaaaccaaaagcgaggggcctggatatcagacttgaacttctgaagttttacaagaattattcagcaaacgttatgcaccttgttgtttatggaaaggagaacctcgattgcattcagggcttggttgagcgtatgtttagtgacataaaaaacactgatcagagaagcttgaaatgtccaagtcatcctctttcagaggaacatttacagcttcttgtcaaagcactgccaatagtagaaggggactatctaagaattatatggccaataacacctagcatccagttttacaaagaagctccttgccattatctgagtcacctcattggacatgaaggcgaggggtccatcttccatattataaaggaactaggatgggccatgaacttaatggctggagagtgcagtgacagtaatgagtattcctttttctcagtaagcatgaggctcactgatgctggccatgaacgcatggaggatattgttgggttgatcttcaaatatcttcatctattaaaagaagacggagtccatgagtggatatttaatgagcttgcggcgataaatgaaatggagttccattatcaagacaaagtccgcccaatcaactatgtgatgcgcactgtctcaactatgcggttgttcccaccagaagaatggttggttggagcagcattaccatcaaagtatgcatcacagagaataaatatgatactcaatcaactaatacctgaaacagtaagaatattctgggagtccaaaaaatttgaaggatctacgagttctgctgagccctggtataacacaccattttcagttgaaaatgtcactccttcagttatacaggaatggattgaaaaagctcctactgaaaaactccatcttccaaaacctaatattttcataccaaaggatttatctcttaaagaagtgcatgaaaaggttacttttccaacagtgttaaggaagagcccactttcacagttgtggtataagcctgatatgctgttctccacaccaaaggttcacattatcattgatttccactgtccattatccagccactcccctgaagcagttgttgctactgagctctttgttgatttgttagtagattatttgaatgcttatgcttatgatgctcaaattgctggtttattctattcaatatatgttacttcagctggattccaggtttctttaggtggttacaatgacaagatgagagttctcttaaatgccatactagtgcaaattgtgaaatttgaagttaagccaaacagattttctgcactgaaggaaacttctgtcaaggactaccagaatttcaatttccgacaaccttattctcaagcgtcatactatgtctctttgatattgggagataaaaaatggcctgtagctgagaaacttgaagctctttctaagcttgaatcagattattttgcaaagttcgtaccacacctactgtcaaaaacatttttggaatgttatgttcaagggaacattgaaccaagtgaagcaaaatctatcgtagaagaaatcgaaaacactatatttactacgcccaattctttgttcaaatccatgtctccatcagaatatctgattaaaagggtcatcatgcttgaaaatgacttgaaatgctactaccaaactgagggattaaaccagaagaatgagaattcatcagttatccaatatattcaggtgcatcaagatgacgccattttgaatatcaaacttgagctgttctctctaatagcaaaacagccagccttcaaccagctacgaactgttgaacaacttgggtatataacaagtctttctctgagatccgactatggagtcctggcactccaggttgttatccagtccacagtaaaggatccttcatacctcgatgttagagttgatgagttctttaagatgtttgaaagcaaaatctatgaactctccgacaaggatttcaagagaaatgtgaaatcattaattgattctaaactggagaagtttaaaaacttatgggaggaatctcatttctactggggagagattgaggcaggaactctgaagtttgatagggtcgagtctgaggtcgctatgctaagagagctcaagaaagaagaattcatcgagtacttcaaccagtatataaaagtggacgcgcctcaaaggaggacactaagcgtgcaagtcttcggcggcaaccatttggtagagttcaagaaggcaatcaacgaagccaacccgcccaaaatgtacagaattacagacatattcggcttcaaacgatcgaggccgctgtacagctcactcaagggaggtccgggcaggatcaccatggactgacagccggcaatagcatgccttgtttttcatgtatgtagtgtaatggccagtgcatacgaatgatgaattcgattctgaatcctgctcctgcatcagattcggttgcatgattgatctatacttcactgtgggtttcacgaccagcgtgtcactttctgggcaaaatctagggagctgtataaagtcatgtatgttcacatgtttgtttgcgtttcttctcacagctatgcagtttgtacagttacatatccacagtgaactagaactagaagcgcgtcttctacacaccaatatacagcttgagcctggctgaccgtgcccgacgccggccgagaaccgtcaaggtgccgtcatgcgcacatgcaccaccggccgtccggtttcagcacgccccggcgtgttcgcaaacgcccgccggcgcccccactcgaagccgttgcggtgccaccggcacctgaacgagccccggtgcgtcgtgggcgagcacacgcagtagtagtgcggcgacgcctggcgcgcccgtggcacagatggtgggggcgacggtgccacggtcgcctgctgctcccgccgcctgactgcgcagtccggcggcagaggcggcagccctggatggcacatgcttctaggctacaaaagggtgatgcgatcggcagctccaccagctataaaacagatggcgccgaagaatggaatcgggttctggcgttttcggatggtgggagatgactagacgtggggaaagggcggggaatatgtgtgggctagggtggtaatgtatggtatggtagcccgcaggcgatggttttt

SEQ ID NO: 36314 - DNA, 3722 bp, Zea Mays
agttcgttggtgcctgagaatccatggtcgatcgtctccagtcgaagcgaaaagcgaaaaggagaaggggcgggggattgcgagcctgtgctgatggcggcggcggcggtggccgcggcggggagcagcaatgtcgagttcatccgcgcgcgcagcgacaagcgggagtaccgccgcgtggtgctcgccaacgcgctcgagatcctactaatcagcgaccccgacaccgacaaggcggcggcgtgcatggaggtcgaggtgggctcgttcagcgatccggagggacttgagggcctcgcgcacttcctcgagcacatgctattttatgccagcgagaagtatcctggagaacatgaatatacgaaatatatcatagagcatggtggctcttacaatgcatatacaagctccgagacaacgaatttctttttcgatgtcaatgtggacaattttgaagaagccttagatagatttgctcagttcttcattaagccattgatgtcacaggatgctgttcttagagagataaaagctgtggattctgaacacaagaaaaatttgttgtctgatggctggaggatgtatcagcttcaaaagcattttgcttcaaaggatcacccttaccacaaattcagtacaggaagttgggaaacactagaaactaaaccaaaagcgaggggcctggatatcagacttgaacttctgaagttttacaagaattattcagcaaacgttatgcaccttgttgtttatggaaaggagaacctcgattgcattcagggcttggttgagcgtatgtttagtgacataaaaaacactgatcagagaagcttgaaatgtccaagtcatcctctttcagaggaacatttacagcttcttgtcaaagcactgccaatagtagaaggggactatctaagaattatatggccaataacacctagcatccagttttacaaagaagctccttgccattatctgagtcacctcattggacatgaaggcgaggggtccatcttccatattataaaggaactaggatgggccatgaacttaatggctggagagtgcagtgacagtaatgagtattcctttttctcagtaagcatgaggctcactgatgctggccatgaacgcatggaggatattgttgggttgatcttcaaatatcttcatctattaaaagaagacggagtccatgagtggatatttaatgagcttgcggcgataaatgaaatggagttccattatcaagacaaagtccgcccaatcaactatgtgatgcgcactgtctcaactatgcggttgttcccaccagaagaatggttggttggagcagcattaccatcaaagtatgcatcacagagaataaatatgatactcaatcaactaatacctgaaacagtaaggaatggattgaaaaagctcctactgaaaaactccatcttccaaaacctaatattttcataccaaaggatttatctcttaaagaagtgcatgaaaaggttacttttccaacagtgttaaggaagagcccactttcacagttgtggtataagcctgatatgctgttctccacaccaaaggttcacattatcattgatttccactgtccattatccagccactcccctgaagcagttgttgctactgagctctttgttgatttgttagtagattatttgaatgcttatgcttatgatgctcaaattgctggtttattctattcaatatatgttacttcagctggattccaggtttctttaggtggttacaatgacaagatgagagttctcttaaatgccatactagtgcaaattgtgaaatttgaagttaagccaaacagattttctgcactgaaggaaacttctgtcaaggactaccagaatttcaatttccgacaaccttattctcaagcgtcatactatgtctctttgatattgggagataaaaaatggcctgtagctgagaaacttgaagctctttctaagcttgaatcagattattttgcaaagttcgtaccacacctactgtcaaaaacatttttggaatgttatgttcaagggaacattgaaccaagtgaagcaaaatctatcgtagaagaaatcgaaaacactatatttactacgcccaattctttgttcaaatccatgtctccatcagaatatctgattaaaagggtcatcatgcttgaaaatgacttgaaatgctactaccaaactgagggattaaaccagaagaatgagaattcatcagttatccaatatattcaggtgcatcaagatgacgccattttgaatatcaaacttgagctgttctctctaatagcaaaacagccagccttcaaccagctacgaactgttgaacaacttgggtatataacaagtctttctctgagatccgactatggagtcctggcactccaggttgttatccagtccacagtaaaggatccttcatacctcgatgttagagttgatgagttctttaagatgtttgaaagcaaaatctatgaactctccgacaaggatttcaagagaaatgtgaaatcattaattgattctaaactggagaagtttaaaaacttatgggaggaatctcatttctactggggagagattgaggcaggaactctgaagtttgatagggtcgagtctgaggtcgctatgctaagagagctcaagaaagaagaattcatcgagtacttcaaccagtatataaaagtggacgcgcctcaaaggaggacactaagcgtgcaagtcttcggcggcaaccatttggtagagttcaagaaggcaatcaacgaagccaacccgcccaaaatgtacagaattacagacatattcggcttcaaacgatcgaggccgctgtacagctcactcaagggaggtccgggcaggatcaccatggactgacagccggcaatagcatgccttgtttttcatgtatgtagtgtaatggccagtgcatacgaatgatgaattcgattctgaatcctgctcctgcatcagattcggttgcatgattgatctatacttcactgtgggtttcacgaccagcgtgtcactttctgggcaaaatctagggagctgtataaagtcatgtatgttcacatgtttgtttgcgtttcttctcacagctatgcagtttgtacagttacatatccacagtgaactagaactagaagcgcgtcttctacacaccaatatacagcttgagcctggctgaccgtgcccgacgccggccgagaaccgtcaaggtgccgtcatgcgcacatgcaccaccggccgtccggtttcagcacgccccggcgtgttcgcaaacgcccgccggcgcccccactcgaagccgttgcggtgccaccggcacctgaacgagccccggtgcgtcgtgggcgagcacacgcagtagtagtgcggcgacgcctggcgcgcccgtggcacagatggtgggggcgacggtgccacggtcgcctgctgctcccgccgcctgactgcgcagtccggcggcagaggcggcagccctggatggcacatgcttctaggctacaaaagggtgatgcgatcggcagctccaccagctataaaacagatggcgccgaagaatggaatcgggttctggcgttttcggatggtgggagatgactagacgtggggaaagggcggggaatatgtgtgggctagggtggtaatgtatggtatggtagcccgcaggcgatggttttt

SEQ ID NO: 36315 - DNA, 3773 bp, Zea Mays
agttcgttggtgcctgagaatccatggtcgatcgtctccagtcgaagcgaaaagcgaaaaggagaaggggcgggggattgcgagcctgtgctgatggcggcggcggcggtggccgcggcggggagcagcaatgtcgagttcatccgcgcgcgcagcgacaagcgggagtaccgccgcgtggtgctcgccaacgcgctcgagatcctactaatcagcgaccccgacaccgacaaggcggcggcgtgcatggaggtcgaggtgggctcgttcagcgatccggagggacttgagggcctcgcgcacttcctcgagcacatgctattttatgccagcgagaagtatcctggagaacatgaatatacgaaatatatcatagagcatggtggctcttacaatgcatatacaagctccgagacaacgaatttctttttcgatgtcaatgtggacaattttgaagaagccttagatagatttgctcagttcttcattaagccattgatgtcacaggatgctgttcttagagagataaaagctgtggattctgaacacaagaaaaatttgttgtctgatggctggaggatgtatcaggaagttgggaaacactagaaactaaaccaaaagcgaggggcctggatatcagacttgaacttctgaagttttacaagaattattcagcaaacgttatgcaccttgttgtttatggaaaggagaacctcgattgcattcagggcttggttgagcgtatgtttagtgacataaaaaacactgatcagagaagcttgaaatgtccaagtcatcctctttcagaggaacatttacagcttcttgtcaaagcactgccaatagtagaaggggactatctaagaattatatggccaataacacctagcatccagttttacaaagaagctccttgccattatctgagtcacctcattggacatgaaggcgaggggtccatcttccatattataaaggaactaggatgggccatgaacttaatggctggagagtgcagtgacagtaatgagtattcctttttctcagtaagcatgaggctcactgatgctggccatgaacgcatggaggatattgttgggttgatcttcaaatatcttcatctattaaaagaagacggagtccatgagtggatatttaatgagcttgcggcgataaatgaaatggagttccattatcaagacaaagtccgcccaatcaactatgtgatgcgcactgtctcaactatgcggttgttcccaccagaagaatggttggttggagcagcattaccatcaaagtatgcatcacagagaataaatatgatactcaatcaactaatacctgaaacagtaagaatattctgggagtccaaaaaatttgaaggatctacgagttctgctgagccctggtataacacaccattttcagttgaaaatgtcactccttcagttatacaggaatggattgaaaaagctcctactgaaaaactccatcttccaaaacctaatattttcataccaaaggatttatctcttaaagaagtgcatgaaaaggttacttttccaacagtgttaaggaagagcccactttcacagttgtggtataagcctgatatgctgttctccacaccaaaggttcacattatcattgatttccactgtccattatccagccactcccctgaagcagttgttgctactgagctctttgttgatttgttagtagattatttgaatgcttatgcttatgatgctcaaattgctggtttattctattcaatatatgttacttcagctggattccaggtttctttaggtggttacaatgacaagatgagagttctcttaaatgccatactagtgcaaattgtgaaatttgaagttaagccaaacagattttctgcactgaaggaaacttctgtcaaggactaccagaatttcaatttccgacaaccttattctcaagcgtcatactatgtctctttgatattgggagataaaaaatggcctgtagctgagaaacttgaagctctttctaagcttgaatcagattattttgcaaagttcgtaccacacctactgtcaaaaacatttttggaatgttatgttcaagggaacattgaaccaagtgaagcaaaatctatcgtagaagaaatcgaaaacactatatttactacgcccaattctttgttcaaatccatgtctccatcagaatatctgattaaaagggtcatcatgcttgaaaatgacttgaaatgctactaccaaactgagggattaaaccagaagaatgagaattcatcagttatccaatatattcaggtgcatcaagatgacgccattttgaatatcaaacttgagctgttctctctaatagcaaaacagccagccttcaaccagctacgaactgttgaacaacttgggtatataacaagtctttctctgagatccgactatggagtcctggcactccaggttgttatccagtccacagtaaaggatccttcatacctcgatgttagagttgatgagttctttaagatgtttgaaagcaaaatctatgaactctccgacaaggatttcaagagaaatgtgaaatcattaattgattctaaactggagaagtttaaaaacttatgggaggaatctcatttctactggggagagattgaggcaggaactctgaagtttgatagggtcgagtctgaggtcgctatgctaagagagctcaagaaagaagaattcatcgagtacttcaaccagtatataaaagtggacgcgcctcaaaggaggacactaagcgtgcaagtcttcggcggcaaccatttggtagagttcaagaaggcaatcaacgaagccaacccgcccaaaatgtacagaattacagacatattcggcttcaaacgatcgaggccgctgtacagctcactcaagggaggtccgggcaggatcaccatggactgacagccggcaatagcatgccttgtttttcatgtatgtagtgtaatggccagtgcatacgaatgatgaattcgattctgaatcctgctcctgcatcagattcggttgcatgattgatctatacttcactgtgggtttcacgaccagcgtgtcactttctgggcaaaatctagggagctgtataaagtcatgtatgttcacatgtttgtttgcgtttcttctcacagctatgcagtttgtacagttacatatccacagtgaactagaactagaagcgcgtcttctacacaccaatatacagcttgagcctggctgaccgtgcccgacgccggccgagaaccgtcaaggtgccgtcatgcgcacatgcaccaccggccgtccggtttcagcacgccccggcgtgttcgcaaacgcccgccggcgcccccactcgaagccgttgcggtgccaccggcacctgaacgagccccggtgcgtcgtgggcgagcacacgcagtagtagtgcggcgacgcctggcgcgcccgtggcacagatggtgggggcgacggtgccacggtcgcctgctgctcccgccgcctgactgcgcagtccggcggcagaggcggcagccctggatggcacatgcttctaggctacaaaagggtgatgcgatcggcagctccaccagctataaaacagatggcgccgaagaatggaatcgggttctggcgttttcggatggtgggagatgactagacgtggggaaagggcggggaatatgtgtgggctagggtggtaatgtatggtatggtagcccgcaggcgatggttttt

SEQ ID NO: 36316 - DNA, 3608 bp, Zea Mays
agttcgttggtgcctgagaatccatggtcgatcgtctccagtcgaagcgaaaagcgaaaaggagaaggggcgggggattgcgagcctgtgctgatggcggcggcggcggtggccgcggcggggagcagcaatgtcgagttcatccgcgcgcgcagcgacaagcgggagtaccgccgcgtggtgctcgccaacgcgctcgagatcctactaatcagcgaccccgacaccgacaaggcggcggcgtgcatggaggtcgaggtgggctcgttcagcgatccggagggacttgagggcctcgcgcacttcctcgagcacatgctattttatgccagcgagaagtatcctggagaacatgaatatacgaaatatatcatagagcatggtggctcttacaatgcatatacaagctccgagacaacgaatttctttttcgatgtcaatgtggacaattttgaagaagccttagatagatttgctcagttcttcattaagccattgatgtcacaggatgctgttcttagagagataaaagctgtggattctgaacacaagaaaaatttgttgtctgatggctggaggatgtatcagcttcaaaagcattttgcttcaaaggatcacccttaccacaaattcagtacaggaagttgggaaacactagaaactaaaccaaaagcgaggggcctggatatcagacttgaacttctgaagttttacaagaattattcagcaaacgttatgcaccttgttgtttatggaaaggagaacctcgattgcattcagggcttggttgagcgtatgtttagtgacataaaaaacactgatcagagaagcttgaaatgtccaagtcatcctctttcagaggaacatttacagcttcttgtcaaagcactgccaatagtagaaggggactatctaagaattatatggccaataacacctagcatccagttttacaaagaagctccttgccattatctgagtcacctcattggacatgaaggcgaggggtccatcttccatattataaaggaactaggatgggccatgaacttaatggctggagagtgcagtgacagtaatgagtattcctttttctcagtaagcatgaggctcactgatgctggccatgaacgcatggaggatattgttgggttgatcttcaaatatcttcatctattaaaagaagacggagtccatgagtggatatttaatgagcttgcggcgataaatgaaatggagttccattatcaagacaaagtccgcccaatcaactatgtgatgcgcactgtctcaactatgcgggaatggattgaaaaagctcctactgaaaaactccatcttccaaaacctaatattttcataccaaaggatttatctcttaaagaagtgcatgaaaaggttacttttccaacagtgttaaggaagagcccactttcacagttgtggtataagcctgatatgctgttctccacaccaaaggttcacattatcattgatttccactgtccattatccagccactcccctgaagcagttgttgctactgagctctttgttgatttgttagtagattatttgaatgcttatgcttatgatgctcaaattgctggtttattctattcaatatatgttacttcagctggattccaggtggttacaatgacaagatgagagttctcttaaatgccatactagtgcaaattgtgaaatttgaagttaagccaaacagattttctgcactgaaggaaacttctgtcaaggactaccagaatttcaatttccgacaaccttattctcaagcgtcatactatgtctctttgatattgggagataaaaaatggcctgtagctgagaaacttgaagctctttctaagcttgaatcagattattttgcaaagttcgtaccacacctactgtcaaaaacatttttggaatgttatgttcaagggaacattgaaccaagtgaagcaaaatctatcgtagaagaaatcgaaaacactatatttactacgcccaattctttgttcaaatccatgtctccatcagaatatctgattaaaagggtcatcatgcttgaaaatgacttgaaatgctactaccaaactgagggattaaaccagaagaatgagaattcatcagttatccaatatattcaggtgcatcaagatgacgccattttgaatatcaaacttgagctgttctctctaatagcaaaacagccagccttcaaccagctacgaactgttgaacaacttgggtatataacaagtctttctctgagatccgactatggagtcctggcactccaggttgttatccagtccacagtaaaggatccttcatacctcgatgttagagttgatgagttctttaagatgtttgaaagcaaaatctatgaactctccgacaaggatttcaagagaaatgtgaaatcattaattgattctaaactggagaagtttaaaaacttatgggaggaatctcatttctactggggagagattgaggcaggaactctgaagtttgatagggtcgagtctgaggtcgctatgctaagagagctcaagaaagaagaattcatcgagtacttcaaccagtatataaaagtggacgcgcctcaaaggaggacactaagcgtgcaagtcttcggcggcaaccatttggtagagttcaagaaggcaatcaacgaagccaacccgcccaaaatgtacagaattacagacatattcggcttcaaacgatcgaggccgctgtacagctcactcaagggaggtccgggcaggatcaccatggactgacagccggcaatagcatgccttgtttttcatgtatgtagtgtaatggccagtgcatacgaatgatgaattcgattctgaatcctgctcctgcatcagattcggttgcatgattgatctatacttcactgtgggtttcacgaccagcgtgtcactttctgggcaaaatctagggagctgtataaagtcatgtatgttcacatgtttgtttgcgtttcttctcacagctatgcagtttgtacagttacatatccacagtgaactagaactagaagcgcgtcttctacacaccaatatacagcttgagcctggctgaccgtgcccgacgccggccgagaaccgtcaaggtgccgtcatgcgcacatgcaccaccggccgtccggtttcagcacgccccggcgtgttcgcaaacgcccgccggcgcccccactcgaagccgttgcggtgccaccggcacctgaacgagccccggtgcgtcgtgggcgagcacacgcagtagtagtgcggcgacgcctggcgcgcccgtggcacagatggtgggggcgacggtgccacggtcgcctgctgctcccgccgcctgactgcgcagtccggcggcagaggcggcagccctggatggcacatgcttctaggctacaaaagggtgatgcgatcggcagctccaccagctataaaacagatggcgccgaagaatggaatcgggttctggcgttttcggatggtgggagatgactagacgtggggaaagggcggggaatatgtgtgggctagggtggtaatgtatggtatggtagcccgcaggcgatggttttt

SEQ ID NO: 36317 - DNA, 3732 bp, Zea Mays
agttcgttggtgcctgagaatccatggtcgatcgtctccagtcgaagcgaaaagcgaaaaggagaaggggcgggggattgcgagcctgtgctgatggcggcggcggcggtggccgcggcggggagcagcaatgtcgagttcatccgcgcgcgcagcgacaagcgggagtaccgccgcgtggtgctcgccaacgcgctcgagatcctactaatcagcgaccccgacaccgacaaggcggcggcgtgcatggaggtcgaggtgggctcgttcagcgatccggagggacttgagggcctcgcgcacttcctcgagcacatgctattttatgccagcgagaagtatcctggagaacatgaatatacgaaatatatcatagagcatggtggctcttacaatgcatatacaagctccgagacaacgaatttctttttcgatgtcaatgtggacaattttgaagaagccttagatagatttgctcagttcttcattaagccattgatgtcacaggatgctgttcttagagagataaaagctgtggattctgaacacaagaaaaatttgttgtctgatggctggaggatgtatcagcttcaaaagcattttgcttcaaaggatcacccttaccacaaattcagtacaggaagttgggaaacactagaaactaaaccaaaagcgaggggcctggatatcagacttgaacttctgaagttttacaagaattattcagcaaacgttatgcaccttgttgtttatggaaaggagaacctcgattgcattcagggcttggttgagcgtatgtttagtgacataaaaaacactgatcagagaagcttgaaatgtccaagtcatcctctttcagaggaacatttacagcttcttgtcaaagcactgccaatagtagaaggggactatctaagaattatatggccaataacacctagcatccagttttacaaagaagctccttgccattatctgagtcacctcattggacatgaaggcgaggggtccatcttccatattataaaggaactagaacgcatggaggatattgttgggttgatcttcaaatatcttcatctattaaaagaagacggagtccatgagtggatatttaatgagcttgcggcgataaatgaaatggagttccattatcaagacaaagtccgcccaatcaactatgtgatgcgcactgtctcaactatgcggttgttcccaccagaagaatggttggttggagcagcattaccatcaaagtatgcatcacagagaataaatatgatactcaatcaactaatacctgaaacagtaagaatattctgggagtccaaaaaatttgaaggatctacgagttctgctgagccctggtataacacaccattttcagttgaaaatgtcactccttcagttatacaggaatggattgaaaaagctcctactgaaaaactccatcttccaaaacctaatattttcataccaaaggatttatctcttaaagaagtgcatgaaaaggttacttttccaacagtgttaaggaagagcccactttcacagttgtggtataagcctgatatgctgttctccacaccaaaggttcacattatcattgatttccactgtccattatccagccactcccctgaagcagttgttgctactgagctctttgttgatttgttagtagattatttgaatgcttatgcttatgatgctcaaattgctggtttattctattcaatatatgttacttcagctggattccaggtttctttaggtggttacaatgacaagatgagagttctcttaaatgccatactagtgcaaattgtgaaatttgaagttaagccaaacagattttctgcactgaaggaaacttctgtcaaggactaccagaatttcaatttccgacaaccttattctcaagcgtcatactatgtctctttgatattgggagataaaaaatggcctgtagctgagaaacttgaagctctttctaagcttgaatcagattattttgcaaagttcgtaccacacctactgtcaaaaacatttttggaatgttatgttcaagggaacattgaaccaagtgaagcaaaatctatcgtagaagaaatcgaaaacactatatttactacgcccaattctttgttcaaatccatgtctccatcagaatatctgattaaaagggtcatcatgcttgaaaatgacttgaaatgctactaccaaactgagggattaaaccagaagaatgagaattcatcagttatccaatatattcaggtgcatcaagatgacgccattttgaatatcaaacttgagctgttctctctaatagcaaaacagccagccttcaaccagctacgaactgttgaacaacttgggtatataacaagtctttctctgagatccgactatggagtcctggcactccaggttgttatccagtccacagtaaaggatccttcatacctcgatgttagagttgatgagttctttaagatgtttgaaagcaaaatctatgaactctccgacaaggatttcaagagaaatgtgaaatcattaattgattctaaactggagaagtttaaaaacttatgggaggaatctcatttctactggggagagattgaggcaggaactctgaagtttgatagggtcgagtctgaggtcgctatgctaagagagctcaagaaagaagaattcatcgagtacttcaaccagtatataaaagtggacgcgcctcaaaggaggacactaagcgtgcaagtcttcggcggcaaccatttggtagagttcaagaaggcaatcaacgaagccaacccgcccaaaatgtacagaattacagacatattcggcttcaaacgatcgaggccgctgtacagctcactcaagggaggtccgggcaggatcaccatggactgacagccggcaatagcatgccttgtttttcatgtatgtagtgtaatggccagtgcatacgaatgatgaattcgattctgaatcctgctcctgcatcagattcggttgcatgattgatctatacttcactgtgggtttcacgaccagcgtgtcactttctgggcaaaatctagggagctgtataaagtcatgtatgttcacatgtttgtttgcgtttcttctcacagctatgcagtttgtacagttacatatccacagtgaactagaactagaagcgcgtcttctacacaccaatatacagcttgagcctggctgaccgtgcccgacgccggccgagaaccgtcaaggtgccgtcatgcgcacatgcaccaccggccgtccggtttcagcacgccccggcgtgttcgcaaacgcccgccggcgcccccactcgaagccgttgcggtgccaccggcacctgaacgagccccggtgcgtcgtgggcgagcacacgcagtagtagtgcggcgacgcctggcgcgcccgtggcacagatggtgggggcgacggtgccacggtcgcctgctgctcccgccgcctgactgcgcagtccggcggcagaggcggcagccctggatggcacatgcttctaggctacaaaagggtgatgcgatcggcagctccaccagctataaaacagatggcgccgaagaatggaatcgggttctggcgttttcggatggtgggagatgactagacgtggggaaagggcggggaatatgtgtgggctagggtggtaatgtatggtatggtagcccgcaggcgatggttttt

SEQ ID NO: 36318 - DNA, 3775 bp, Zea Mays
agttcgttggtgcctgagaatccatggtcgatcgtctccagtcgaagcgaaaagcgaaaaggagaaggggcgggggattgcgagcctgtgctgatggcggcggcggcggtggccgcggcggggagcagcaatgtcgagttcatccgcgcgcgcagcgacaagcgggagtaccgccgcgtggtgctcgccaacgcgctcgagatcctactaatcagcgaccccgacaccgacaaggcggcggcgtgcatggaggtcgaggtgggctcgttcagcgatccggagggacttgagggcctcgcgcacttcctcgagcacatgctattttatgccagcgagaagtatcctggagaacatgaatatacgaaatatatcatagagcatggtggctcttacaatgcatatacaagctccgagacaacgaatttctttttcgatgtcaatgtggacaattttgaagaagccttagatagatttgctcagttcttcattaagccattgatgtcacaggatgctgttcttagagagataaaagctgtggattctgagaacacaagaaaaatttgttgtctgatggctggaggatgtatcaggaagttgggaaacactagaaactaaaccaaaagcgaggggcctggatatcagacttgaacttctgaagttttacaagaattattcagcaaacgttatgcaccttgttgtttatggaaaggagaacctcgattgcattcagggcttggttgagcgtatgtttagtgacataaaaaacactgatcagagaagcttgaaatgtccaagtcatcctctttcagaggaacatttacagcttcttgtcaaagcactgccaatagtagaaggggactatctaagaattatatggccaataacacctagcatccagttttacaaagaagctccttgccattatctgagtcacctcattggacatgaaggcgaggggtccatcttccatattataaaggaactaggatgggccatgaacttaatggctggagagtgcagtgacagtaatgagtattcctttttctcagtaagcatgaggctcactgatgctggccatgaacgcatggaggatattgttgggttgatcttcaaatatcttcatctattaaaagaagacggagtccatgagtggatatttaatgagcttgcggcgataaatgaaatggagttccattatcaagacaaagtccgcccaatcaactatgtgatgcgcactgtctcaactatgcggttgttcccaccagaagaatggttggttggagcagcattaccatcaaagtatgcatcacagagaataaatatgatactcaatcaactaatacctgaaacagtaagaatattctgggagtccaaaaaatttgaaggatctacgagttctgctgagccctggtataacacaccattttcagttgaaaatgtcactccttcagttatacaggaatggattgaaaaagctcctactgaaaaactccatcttccaaaacctaatattttcataccaaaggatttatctcttaaagaagtgcatgaaaaggttacttttccaacagtgttaaggaagagcccactttcacagttgtggtataagcctgatatgctgttctccacaccaaaggttcacattatcattgatttccactgtccattatccagccactcccctgaagcagttgttgctactgagctctttgttgatttgttagtagattatttgaatgcttatgcttatgatgctcaaattgctggtttattctattcaatatatgttacttcagctggattccaggtttctttaggtggttacaatgacaagatgagagttctcttaaatgccatactagtgcaaattgtgaaatttgaagttaagccaaacagattttctgcactgaaggaaacttctgtcaaggactaccagaatttcaatttccgacaaccttattctcaagcgtcatactatgtctctttgatattgggagataaaaaatggcctgtagctgagaaacttgaagctctttctaagcttgaatcagattattttgcaaagttcgtaccacacctactgtcaaaaacatttttggaatgttatgttcaagggaacattgaaccaagtgaagcaaaatctatcgtagaagaaatcgaaaacactatatttactacgcccaattctttgttcaaatccatgtctccatcagaatatctgattaaaagggtcatcatgcttgaaaatgacttgaaatgctactaccaaactgagggattaaaccagaagaatgagaattcatcagttatccaatatattcaggtgcatcaagatgacgccattttgaatatcaaacttgagctgttctctctaatagcaaaacagccagccttcaaccagctacgaactgttgaacaacttgggtatataacaagtctttctctgagatccgactatggagtcctggcactccaggttgttatccagtccacagtaaaggatccttcatacctcgatgttagagttgatgagttctttaagatgtttgaaagcaaaatctatgaactctccgacaaggatttcaagagaaatgtgaaatcattaattgattctaaactggagaagtttaaaaacttatgggaggaatctcatttctactggggagagattgaggcaggaactctgaagtttgatagggtcgagtctgaggtcgctatgctaagagagctcaagaaagaagaattcatcgagtacttcaaccagtatataaaagtggacgcgcctcaaaggaggacactaagcgtgcaagtcttcggcggcaaccatttggtagagttcaagaaggcaatcaacgaagccaacccgcccaaaatgtacagaattacagacatattcggcttcaaacgatcgaggccgctgtacagctcactcaagggaggtccgggcaggatcaccatggactgacagccggcaatagcatgccttgtttttcatgtatgtagtgtaatggccagtgcatacgaatgatgaattcgattctgaatcctgctcctgcatcagattcggttgcatgattgatctatacttcactgtgggtttcacgaccagcgtgtcactttctgggcaaaatctagggagctgtataaagtcatgtatgttcacatgtttgtttgcgtttcttctcacagctatgcagtttgtacagttacatatccacagtgaactagaactagaagcgcgtcttctacacaccaatatacagcttgagcctggctgaccgtgcccgacgccggccgagaaccgtcaaggtgccgtcatgcgcacatgcaccaccggccgtccggtttcagcacgccccggcgtgttcgcaaacgcccgccggcgcccccactcgaagccgttgcggtgccaccggcacctgaacgagccccggtgcgtcgtgggcgagcacacgcagtagtagtgcggcgacgcctggcgcgcccgtggcacagatggtgggggcgacggtgccacggtcgcctgctgctcccgccgcctgactgcgcagtccggcggcagaggcggcagccctggatggcacatgcttctaggctacaaaagggtgatgcgatcggcagctccaccagctataaaacagatggcgccgaagaatggaatcgggttctggcgttttcggatggtgggagatgactagacgtggggaaagggcggggaatatgtgtgggctagggtggtaatgtatggtatggtagcccgcaggcgatggttttt

SEQ ID NO: 36319 - DNA, 3776 bp, Zea Mays
agttcgttggtgcctgagaatccatggtcgatcgtctccagtcgaagcgaaaagcgaaaaggagaaggggcgggggattgcgagcctgtgctgatggcggcggcggcggtggccgcggcggggagcagcaatgtcgagttcatccgcgcgcgcagcgacaagcgggagtaccgccgcgtggtgctcgccaacgcgctcgagatcctactaatcagcgaccccgacaccgacaaggcggcggcgtgcatggaggtcgaggtgggctcgttcagcgatccggagggacttgagggcctcgcgcacttcctcgagcacatgctattttatgccagcgagaagtatcctggagaacatgaatatacgaaatatatcatagagcatggtggctcttacaatgcatatacaagctccgagacaacgaatttctttttcgatgtcaatgtggacaattttgaagaagccttagatagatttgctcagttcttcattaagccattgatgtcacaggatgctgttcttagagagataaaagctgtggattctgaacacaagaaaaatttgttgtctgatggctggaggatgtatcagcttcaaaagcattttgcttcaaaggatcacccttaccacaaattcagtacaggaagttgggaaacactagaaactaaaccaaaagcgaggggcctggatatcagacttgaacttctgaagttttacaagaattattcagcaaacgttatgcaccttgttgtttatggaaaggagaacctcgattgcattcagggcttggttgagcgtatgtttagtgacataaaaaacactgatcagagaagcttgaaatgtccaagtcatcctctttcagaggaacatttacagcttcttgtcaaagcactgccaatagtagaaggggactatctaagaattatatggccaataacacctagcatccagttttacaaagaagctccttgccattatctgagtcacctcattggacatgaaggcgaggggtccatcttccatattataaaggaactaggatgggccatgaacttaatggctggagagtgcagtgacagtaatgagtattcctttttctcagtaagcatgaggctcactgatgctggccatgaacgcatggaggatattgttgggttgatcttcaaatatcttcatctattaaaagaagacggagtccatgagtggatatttaatgagcttgcggcgataaatgaaatggagttccattatcaagacaaagtccgcccaatcaactatgtgatgcgcactgtctcaactatgcggttgttcccaccagaagaatggttggttggagcagcattaccatcaaagtatgcatcacagagaataaatatgatactcaatcaactaatacctgaaacagtaagaatattctgggagtccaaaaaatttgaaggatctacgagttctgctgagccctggtataacacaccattttcagttgaaaatgtcactccttcagttatacaggaatggattgaaaaagctcctactgaaaaactccatcttccaaaacctaatattttcataccaaaggatttatctcttaaagaagtgcatgaaaaggttacttttccaacagtgttaaggaagagcccactttcacagttgtgccactcccctgaagcagttgttgctactgagctctttgttgatttgttagtagattatttgaatgcttatgcttatgatgctcaaattgctggtttattctattcaatatatgttacttcagctggattccaggtggttacaatgacaagatgagagttctcttaaatgccatactagtgcaaattgtgaaatttgaagttaagccaaacagattttctgcactgaaggaaacttctgtcaaggactaccagaatttcaatttccgacaaccttattctcaagcgtcatactatgtctctttgatattgggagataaaaaatggcctgtagctgagaaacttgaagctctttctaagcttgaatcagattattttgcaaagttcgtaccacacctactgtcaaaaacatttttggaatgttatgttcaagggaacattgaaccaagtgaagcaaaatctatcgtagaagaaatcgaaaacactatatttactacgcccaattctttgttcaaatccatgtctccatcagaatatctgattaaaagggtcatcatgcttgaaaatgacttgaaatgctactaccaaactgagggattaaaccagaagaatgagaattcatcagttatccaatatattcaggtgcatcaagatgacgccattttgaatatcaaacttgagctgttctctctaatagcaaaacagccagccttcaaccagctacgaactgttgaacaacttgggtatataacaagtctttctctgagatcttagcttgcaatgattgccacattctacagatccgactatggagtcctggcactccaggttgttatccagtccacagtaaaggatccttcatacctcgatgttagagttgatgagttctttaagatgtttgaaagcaaaatctatgaactctccgacaaggatttcaagagaaatgtgaaatcattaattgattctaaactggagaagtttaaaaacttatgggaggaatctcatttctactggggagagattgaggcaggaactctgaagtttgatagggtcgagtctgaggtcgctatgctaagagagctcaagaaagaagaattcatcgagtacttcaaccagtatataaaagtggacgcgcctcaaaggaggacactaagcgtgcaagtcttcggcggcaaccatttggtagagttcaagaaggcaatcaacgaagccaacccgcccaaaatgtacagaattacagacatattcggcttcaaacgatcgaggccgctgtacagctcactcaagggaggtccgggcaggatcaccatggactgacagccggcaatagcatgccttgtttttcatgtatgtagtgtaatggccagtgcatacgaatgatgaattcgattctgaatcctgctcctgcatcagattcggttgcatgattgatctatacttcactgtgggtttcacgaccagcgtgtcactttctgggcaaaatctagggagctgtataaagtcatgtatgttcacatgtttgtttgcgtttcttctcacagctatgcagtttgtacagttacatatccacagtgaactagaactagaagcgcgtcttctacacaccaatatacagcttgagcctggctgaccgtgcccgacgccggccgagaaccgtcaaggtgccgtcatgcgcacatgcaccaccggccgtccggtttcagcacgccccggcgtgttcgcaaacgcccgccggcgcccccactcgaagccgttgcggtgccaccggcacctgaacgagccccggtgcgtcgtgggcgagcacacgcagtagtagtgcggcgacgcctggcgcgcccgtggcacagatggtgggggcgacggtgccacggtcgcctgctgctcccgccgcctgactgcgcagtccggcggcagaggcggcagccctggatggcacatgcttctaggctacaaaagggtgatgcgatcggcagctccaccagctataaaacagatggcgccgaagaatggaatcgggttctggcgttttcggatggtgggagatgactagacgtggggaaagggcggggaatatgtgtgggctagggtggtaatgtatggtatggtagcccgcaggcgatggttttt

SEQ ID NO: 36320 - DNA, 3957 bp, Zea Mays
agttcgttggtgcctgagaatccatggtcgatcgtctccagtcgaagcgaaaagcgaaaaggagaaggggcgggggattgcgagcctgtgctgatggcggcggcggcggtggccgcggcggggagcagcaatgtcgagttcatccgcgcgcgcagcgacaagcgggagtaccgccgcgtggtgctcgccaacgcgctcgagatcctactaatcagcgaccccgacaccgacaaggcggcggcgtgcatggaggtcgaggtgggctcgttcagcgatccggagggacttgagggcctcgcgcacttcctcgagcacatgctattttatgccagcgagaagtatcctggagaacatgaatatacgaaatatatcatagagcatggtggctcttacaatgcatatacaagctccgagacaacgaatttctttttcgatgtcaatgtggacaattttgaagaagccttagatagatttgctcagttcttcattaagccattgatgtcacaggatgctgttcttagagagataaaagctgtggattctgaacacaagaaaaatttgttgtctgatggctggaggatgtatcagcttcaaaagcattttgcttcaaaggatcacccttaccacaaattcagtacaggaagttgggaaacactagaaactaaaccaaaagcgaggggcctggatatcagacttgaacttctgaagttttacaagaattattcagcaaacgttatgcaccttgttgtttatggaaaggagaacctcgattgcattcagggcttggttgagcgtatgtttagtgacataaaaaacactgatcagagaagcttgaaatgtccaagtcatcctctttcagaggaacatttacagcttcttgtcaaagcactgccaatagtagaaggggactatctaagaattatatggccaataacacctagcatccagttttacaaagaagctccttgccattatctgagtcacctcattggacatgaaggcgaggggtccatcttccatattataaaggaactaggatgggccatgaacttaatggctggagagtgcagtgacagtaatgagtattcctttttctcagtaagcatgaggctcactgatgctggccatgaacgcatggaggatattgttgggttgatcttcaaatatcttcatctattaaaagaagacggagtccatgagtggatatttaatgagcttgcggcgataaatgaaatggagttccattatcaagacaaagtccgcccaatcaactatgtgatgcgcactgtctcaactatgcggttgttcccaccagaagaatggttggttggagcagcattaccatcaaagtatgcatcacagagaataaatatgatactcaatcaactaatacctgaaacagtaagaatattctgggagtccaaaaaatttgaaggatctacgagttctgctgagccctggtataacacaccattttcagttgaaaatgtcactccttcagttatacaggaatggattgaaaaagctcctactgaaaaactccatcttccaaaacctaatattttcataccaaaggatttatctcttaaagaagtgcatgaaaaggttacttttccaacagtgttaaggaagagcccactttcacagttgtggtataagcctgatatgctgttctccacaccaaaggttcacattatcattgatttccactgtccattatccagccactcccctgaagcagttgttgctactgagctctttgttgatttgttagtagattatttgaatgcttatgcttatgatgctcaaattgctggtttattctattcaatatatgttacttcagctggattccaggtggttacaatgacaagatgagagttctcttaaatgccatactagtgcaaattgtgaaatttgaagttaagccaaacagattttctgcactgaaggaaacttctgtcaaggactaccagaatttcaatttccgacaaccttattctcaagcgtcatactatgtctctttgatattgggagataaaaaatggcctgtagctgagaaacttgaagctctttctaagcttgaatcagattattttgcaaagttcgtaccacacctactgtcaaaaacatttttggaatgttatgttcaagggaacattgaaccaagtgaagcaaaatctatcgtagaagaaatcgaaaacactatatttactacgcccaattctttgttcaaatccatgtctccatcagaatatctgattaaaagggtcatcatgcttgaaaatgacttgaaatgctactaccaaactgagggattaaaccagaagaatgagaattcatcagttatccaatatattcaggtgcatcaagatgacgccattttgaatatcaaacttgagctgttctctctaatagcaaaacagccagccttcaaccagctacgaactgttgaacaacttgggtatataacaagtctttctctgagatcttagcttgcaatgattgccacattctacagatccgactatggagtcctggcactccaggttgttatccagtccacagtaaaggatccttcatacctcgatgttagagttgatgagttctttaagatgtttgaaagcaaaatctatgaactctccgacaaggatttcaaggacttgctggatcaaaaggatgggaaactatgggttaaaaaatgagaaatacgacatgatattctaagtttatcctcattttttattttactgtaatattgaactattgagaaatgtgaaatcattaattgattctaaactggagaagtttaaaaacttatgggaggaatctcatttctactggggagagattgaggcaggaactctgaagtttgatagggtcgagtctgaggtcgctatgctaagagagctcaagaaagaagaattcatcgagtacttcaaccagtatataaaagtggacgcgcctcaaaggaggacactaagcgtgcaagtcttcggcggcaaccatttggtagagttcaagaaggcaatcaacgaagccaacccgcccaaaatgtacagaattacagacatattcggcttcaaacgatcgaggccgctgtacagctcactcaagggaggtccgggcaggatcaccatggactgacagccggcaatagcatgccttgtttttcatgtatgtagtgtaatggccagtgcatacgaatgatgaattcgattctgaatcctgctcctgcatcagattcggttgcatgattgatctatacttcactgtgggtttcacgaccagcgtgtcactttctgggcaaaatctagggagctgtataaagtcatgtatgttcacatgtttgtttgcgtttcttctcacagctatgcagtttgtacagttacatatccacagtgaactagaactagaagcgcgtcttctacacaccaatatacagcttgagcctggctgaccgtgcccgacgccggccgagaaccgtcaaggtgccgtcatgcgcacatgcaccaccggccgtccggtttcagcacgccccggcgtgttcgcaaacgcccgccggcgcccccactcgaagccgttgcggtgccaccggcacctgaacgagccccggtgcgtcgtgggcgagcacacgcagtagtagtgcggcgacgcctggcgcgcccgtggcacagatggtgggggcgacggtgccacggtcgcctgctgctcccgccgcctgactgcgcagtccggcggcagaggcggcagccctggatggcacatgcttctaggctacaaaagggtgatgcgatcggcagctccaccagctataaaacagatggcgccgaagaatggaatcgggttctggcgttttcggatggtgggagatgactagacgtggggaaagggcggggaatatgtgtgggctagggtggtaatgtatggtatggtagcccgcaggcgatggttttt

SEQ ID NO: 36321 - DNA, 3753 bp, Zea Mays
agttcgttggtgcctgagaatccatggtcgatcgtctccagtcgaagcgaaaagcgaaaaggagaaggggcgggggattgcgagcctgtgctgatggcggcggcggcggtggccgcggcggggagcagcaatgtcgagttcatccgcgcgcgcagcgacaagcgggagtaccgccgcgtggtgctcgccaacgcgctcgagatcctactaatcagcgaccccgacaccgacaaggcggcggcgtgcatggaggtcgaggtgggctcgttcagcgatccggagggacttgagggcctcgcgcacttcctcgagcacatgctattttatgccagcgagaagtatcctggagaacatgaatatacgaaatatatcatagagcatggtggctcttacaatgcatatacaagctccgagacaacgaatttctttttcgatgtcaatgtggacaattttgaagaagccttagatagatttgctcagttcttcattaagccattgatgtcacaggatgctgttcttagagagataaaagctgtggattctgaacacaagaaaaatttgttgtctgatggctggaggatgtatcagcttcaaaagcattttgcttcaaaggatcacccttaccacaaattcagtacaggaagttgggaaacactagaaactaaaccaaaagcgaggggcctggatatcagacttgaacttctgaagttttacaagaattattcagcaaacgttatgcaccttgttgtttatggaaaggagaacctcgattgcattcagggcttggttgagcgtatgtttagtgacataaaaaacactgatcagagaagcttgaaatgtccaagtcatcctctttcagaggaacatttacagcttcttgtcaaagcactgccaatagtagaaggggactatctaagaattatatggccaataacacctagcatccagttttacaaagaagctccttgccattatctgagtcacctcattggacatgaaggcgaggggtccatcttccatattataaaggaactaggatgggccatgaacttaatggctggagagtgcagtgacagtaatgagtattcctttttctcagtaagcatgaggctcactgatgctggccatgaacgcatggaggatattgttgggttgatcttcaaatatcttcatctattaaaagaagacggagtccatgagtggatatttaatgagcttgcggcgataaatgaaatggagttccattatcaagacaaagtccgcccaatcaactatgtgatgcgcactgtctcaactatgcggttgttcccaccagaagaatggttggttggagcagcattaccatcaaagtatgcatcacagagaataaatatgatactcaatcaactaatacctgaaacagtaagaatattctgggagtccaaaaaatttgaaggatctacgagttctgctgagccctggtataacacaccattttcagttgaaaatgtcactccttcagttatacaggaatggattgaaaaagctcctactgaaaaactccatcttccaaaacctaatattttcataccaaaggatttatctcttaaagaagtgcatgaaaaggttacttttccaacagtgttaaggaagagcccactttcacagttgtgccactcccctgaagcagttgttgctactgagctctttgttgatttgttagtagattatttgaatgcttatgcttatgatgctcaaattgctggtttattctattcaatatatgttacttcagctggattccaggtttctttaggtggttacaatgacaagatgagagttctcttaaatgccatactagtgcaaattgtgaaatttgaagttaagccaaacagattttctgcactgaaggaaacttctgtcaaggactaccagaatttcaatttccgacaaccttattctcaagcgtcatactatgtctctttgatattgggagataaaaaatggcctgtagctgagaaacttgaagctctttctaagcttgaatcagattattttgcaaagttcgtaccacacctactgtcaaaaacatttttggaatgttatgttcaagggaacattgaaccaagtgaagcaaaatctatcgtagaagaaatcgaaaacactatatttactacgcccaattctttgttcaaatccatgtctccatcagaatatctgattaaaagggtcatcatgcttgaaaatgacttgaaatgctactaccaaactgagggattaaaccagaagaatgagaattcatcagttatccaatatattcaggtgcatcaagatgacgccattttgaatatcaaacttgagctgttctctctaatagcaaaacagccagccttcaaccagctacgaactgttgaacaacttgggtatataacaagtctttctctgagatccgactatggagtcctggcactccaggttgttatccagtccacagtaaaggatccttcatacctcgatgttagagttgatgagttctttaagatgtttgaaagcaaaatctatgaactctccgacaaggatttcaagagaaatgtgaaatcattaattgattctaaactggagaagtttaaaaacttatgggaggaatctcatttctactggggagagattgaggcaggaactctgaagtttgatagggtcgagtctgaggtcgctatgctaagagagctcaagaaagaagaattcatcgagtacttcaaccagtatataaaagtggacgcgcctcaaaggaggacactaagcgtgcaagtcttcggcggcaaccatttggtagagttcaagaaggcaatcaacgaagccaacccgcccaaaatgtacagaattacagacatattcggcttcaaacgatcgaggccgctgtacagctcactcaagggaggtccgggcaggatcaccatggactgacagccggcaatagcatgccttgtttttcatgtatgtagtgtaatggccagtgcatacgaatgatgaattcgattctgaatcctgctcctgcatcagattcggttgcatgattgatctatacttcactgtgggtttcacgaccagcgtgtcactttctgggcaaaatctagggagctgtataaagtcatgtatgttcacatgtttgtttgcgtttcttctcacagctatgcagtttgtacagttacatatccacagtgaactagaactagaagcgcgtcttctacacaccaatatacagcttgagcctggctgaccgtgcccgacgccggccgagaaccgtcaaggtgccgtcatgcgcacatgcaccaccggccgtccggtttcagcacgccccggcgtgttcgcaaacgcccgccggcgcccccactcgaagccgttgcggtgccaccggcacctgaacgagccccggtgcgtcgtgggcgagcacacgcagtagtagtgcggcgacgcctggcgcgcccgtggcacagatggtgggggcgacggtgccacggtcgcctgctgctcccgccgcctgactgcgcagtccggcggcagaggcggcagccctggatggcacatgcttctaggctacaaaagggtgatgcgatcggcagctccaccagctataaaacagatggcgccgaagaatggaatcgggttctggcgttttcggatggtgggagatgactagacgtggggaaagggcggggaatatgtgtgggctagggtggtaatgtatggtatggtagcccgcaggcgatggttttt

SEQ ID NO: 36322 - DNA, 3460 bp, Zea Mays
agttcgttggtgcctgagaatccatggtcgatcgtctccagtcgaagcgaaaagcgaaaaggagaaggggcgggggattgcgagcctgtgctgatggcggcggcggcggtggccgcggcggggagcagcaatgtcgagttcatccgcgcgcgcagcgacaagcgggagtaccgccgcgtggtgctcgccaacgcgctcgagatcctactaatcagcgaccccgacaccgacaaggcggcggcgtgcatggaggtcgaggtgggctcgttcagcgatccggagggacttgagggcctcgcgcacttcctcgagcacatgctattttatgccagcgagaagtatcctggagaacatgaatatacgaaatatatcatagaggaagttgggaaacactagaaactaaaccaaaagcgaggggcctggatatcagacttgaacttctgaagttttacaagaattattcagcaaacgttatgcaccttgttgtttatggaaaggagaacctcgattgcattcagggcttggttgagcgtatgtttagtgacataaaaaacactgatcagagaagcttgaaatgtccaagtcatcctctttcagaggaacatttacagcttcttgtcaaagcactgccaatagtagaaggggactatctaagaattatatggccaataacacctagcatccagttttacaaagaagctccttgccattatctgagtcacctcattggacatgaaggcgaggggtccatcttccatattataaaggaactaggatgggccatgaacttaatggctggagagtgcagtgacagtaatgagtattcctttttctcagtaagcatgaggctcactgatgctggccatgaacgcatggaggatattgttgggttgatcttcaaatatcttcatctattaaaagaagacggagtccatgagtggatatttaatgagcttgcggcgataaatgaaatggagttccattatcaagacaaagtccgcccaatcaactatgtgatgcgcactgtctcaactatgcggttgttcccaccagaagaatggttggttggagcagcattaccatcaaagtatgcatcacagagaataaatatgatactcaatcaactaatacctgaaacagtaaggaatggattgaaaaagctcctactgaaaaactccatcttccaaaacctaatattttcataccaaaggatttatctcttaaagaagtgcatgaaaaggttacttttccaacagtgttaaggaagagcccactttcacagttgtggtataagcctgatatgctgttctccacaccaaaggttcacattatcattgatttccactgtccattatccagccactcccctgaagcagttgttgctactgagctctttgttgatttgttagtagattatttgaatgcttatgcttatgatgctcaaattgctggtttattctattcaatatatgttacttcagctggattccaggtttctttaggtggttacaatgacaagatgagagttctcttaaatgccatactagtgcaaattgtgaaatttgaagttaagccaaacagattttctgcactgaaggaaacttctgtcaaggactaccagaatttcaatttccgacaaccttattctcaagcgtcatactatgtctctttgatattgggagataaaaaatggcctgtagctgagaaacttgaagctctttctaagcttgaatcagattattttgcaaagttcgtaccacacctactgtcaaaaacatttttggaatgttatgttcaagggaacattgaaccaagtgaagcaaaatctatcgtagaagaaatcgaaaacactatatttactacgcccaattctttgttcaaatccatgtctccatcagaatatctgattaaaagggtcatcatgcttgaaaatgacttgaaatgctactaccaaactgagggattaaaccagaagaatgagaattcatcagttatccaatatattcaggtgcatcaagatgacgccattttgaatatcaaacttgagctgttctctctaatagcaaaacagccagccttcaaccagctacgaactgttgaacaacttgggtatataacaagtctttctctgagatccgactatggagtcctggcactccaggttgttatccagtccacagtaaaggatccttcatacctcgatgttagagttgatgagttctttaagatgtttgaaagcaaaatctatgaactctccgacaaggatttcaagagaaatgtgaaatcattaattgattctaaactggagaagtttaaaaacttatgggaggaatctcatttctactggggagagattgaggcaggaactctgaagtttgatagggtcgagtctgaggtcgctatgctaagagagctcaagaaagaagaattcatcgagtacttcaaccagtatataaaagtggacgcgcctcaaaggaggacactaagcgtgcaagtcttcggcggcaaccatttggtagagttcaagaaggcaatcaacgaagccaacccgcccaaaatgtacagaattacagacatattcggcttcaaacgatcgaggccgctgtacagctcactcaagggaggtccgggcaggatcaccatggactgacagccggcaatagcatgccttgtttttcatgtatgtagtgtaatggccagtgcatacgaatgatgaattcgattctgaatcctgctcctgcatcagattcggttgcatgattgatctatacttcactgtgggtttcacgaccagcgtgtcactttctgggcaaaatctagggagctgtataaagtcatgtatgttcacatgtttgtttgcgtttcttctcacagctatgcagtttgtacagttacatatccacagtgaactagaactagaagcgcgtcttctacacaccaatatacagcttgagcctggctgaccgtgcccgacgccggccgagaaccgtcaaggtgccgtcatgcgcacatgcaccaccggccgtccggtttcagcacgccccggcgtgttcgcaaacgcccgccggcgcccccactcgaagccgttgcggtgccaccggcacctgaacgagccccggtgcgtcgtgggcgagcacacgcagtagtagtgcggcgacgcctggcgcgcccgtggcacagatggtgggggcgacggtgccacggtcgcctgctgctcccgccgcctgactgcgcagtccggcggcagaggcggcagccctggatggcacatgcttctaggctacaaaagggtgatgcgatcggcagctccaccagctataaaacagatggcgccgaagaatggaatcgggttctggcgttttcggatggtgggagatgactagacgtggggaaagggcggggaatatgtgtgggctagggtggtaatgtatggtatggtagcccgcaggcgatggttttt

SEQ ID NO: 36323 - DNA, 877 bp, Zea Mays
gatcactgagatcattgctttcctgtcagacactatttatcgtgtccctgtgcaacaatcagctcttgtatcttattgaaaaggagttaatctggatatttggtcacgttcctgggttttctgccacccttccgtctgtgattgccagactccatgctgccaaggacaagtatctatcaccaccagccccagtctcaccgtcatcacaaatgggggagaaacagtggaatttctcttttacatctgtctggaactctatagtgtggcttgtgcttttgaacttcttcattaagatagtcacgtcaacagcacaggattatctcaaaaagcagcaggatacggagatggaacttatttcggattccccgatccaggaccattctaaaactaactagtggcgcagctagtggtgtttatacacagctgctagcagcaaagattctcctctgtagcttaagcccctgcagatgatttcaagttccaacaattagtattagtagttattcatctgcgcagtggacaaaaacatggacacatggtcttggttaacttgtcagttgacgaccttttgtcattgagcctgtacctgtactggcagctcctgttggagtcattctgtttattttcggacatctacacggataaacagtaggaattgtttatggagcacggttggctttttttgaagtgaagagcacggttggctttgtgagatgtatcattcatacctgttcctatgtattctgggaacttgaaatgcaatagaaacctgggaggatttaacaaggatacatcattgtgtcattactatgtgcatgtggtttgcaatttgcacctcttccggaacaggtggtgaatagtctctggcagaacaata

SEQ ID NO: 36324 - DNA, 1218 bp, Zea Mays
tcaggtttgaaccagcctcgatgcaatattggcaagggagctgtctataaaccttctccaaaccctacctttgtgtgaactttcatcagtgggtgctcgcttatcaggaagcgagtcaaaagctgttcaggagcttgatgcagctacttccaaagaagatgggccagtagcatcatcccttaatcgaaccaagcgttggcttctctctcactcccaacatctcaacttcttctctatcttgattcttgcttcggttccaaatccactctttgaccttgctggtattatgtgtgggcaatttggtgtgcctttctgggagttcttgtttgctactttgattgggaaagccatcatcaagactcatattcagacactatttatcgtgtccctgtgcaacaatcagctcttgtatcttattgaaaaggagttaatctggatatttggtcacgttcctgggttttctgccacccttccgtctgtgattgccagactccatgctgccaaggacaagtatctatcaccaccagccccagtctcaccgtcatcacaaatgggggagaaacagtggaatttctcttttacatctgtctggaactctatagtgtggcttgtgcttttgaacttcttcattaagatagtcacgtcaacagcacaggattatctcaaaaagcagcaggatacggagatggaacttatttcggattccccgatccaggaccattctaaaactaactagtggcgcagctagtggtgtttatacacagctgctagcagcaaagattctcctctgtagcttaagcccctgcagatgatttcaagttccaacaattagtattagtagttattcatctgcgcagtggacaaaaacatggacacatggtcttggttaacttgtcagttgacgaccttttgtcattgagcctgtacctgtactggcagctcctgttggagtcattctgtttattttcggacatctacacggataaacagtaggaattgtttatggagcacggttggctttttttgaagtgaagagcacggttggctttgtgagatgtatcattcatacctgttcctatgtattctgggaacttgaaatgcaatagaaacctgggaggatttaacaaggatacatcattgtgtcattactatgtgcatgtggtttgcaatttgcacctcttccggaacaggtggtgaatagtctctggcagaacaata

SEQ ID NO: 36325 - DNA, 1695 bp, Zea Mays
gtcaccctttggtcctgtcctacaaatatttagttatcatgtcttaattgtatagtcttgaaggctttgaaacatatgtacttcaacaaattagttaggcagaaaaggcactttattttggttttcattgctagtgtattaaaggattgatataaaccatcctattcctgcttagttcgtgtttgcaaccatatcagacttcataaagaaaacagttgaaggtgggcagggcaccaatcgcctgattacatatcaaatacagacaacaggttctggtttgcatacatttgtgctgtatctgggtcctcatattgctctgttcactattaaggctgttcaatgtggtcgaattgatctaaaaattgctccatatgataccatacagctaaaggttgggccatcatggcttgacaagaaatgttcagaatttggaccacctgtgtatccagcatcagctcattcagttaggatcccagtcttcgacctactacctcagatacagctggaggcagttctttggggaattgggactgcgcttggtgagctccctccttattttatatcacgagcagctcgcttatcaggaagcgagtcaaaagctgttcaggagcttgatgcagctacttccaaagaagatgggccagtagcatcatcccttaatcgaaccaagcgttggcttctctctcactcccaacatctcaacttcttctctatcttgattcttgcttcggttccaaatccactctttgaccttgctggtattatgtgtgggcaatttggtgtgcctttctgggagttcttgtttgctactttgattgggaaagccatcatcaagactcatattcagacactatttatcgtgtccctgtgcaacaatcagctcttgtatcttattgaaaaggagttaatctggatatttggtcacgttcctgggttttctgccacccttccgtctgtgattgccagactccatgctgccaaggacaagtatctatcaccaccagccccagtctcaccgtcatcacaaatgggggagaaacagtggaatttctcttttacatctgtctggaactctatagtgtggcttgtgcttttgaacttcttcattaagatagtcacgtcaacagcacaggattatctcaaaaagcagcaggatacggagatggaacttatttcggattccccgatccaggaccattctaaaactaactagtggcgcagctagtggtgtttatacacagctgctagcagcaaagattctcctctgtagcttaagcccctgcagatgatttcaagttccaacaattagtattagtagttattcatctgcgcagtggacaaaaacatggacacatggtcttggttaacttgtcagttgacgaccttttgtcattgagcctgtacctgtactggcagctcctgttggagtcattctgtttattttcggacatctacacggataaacagtaggaattgtttatggagcacggttggctttttttgaagtgaagagcacggttggctttgtgagatgtatcattcatacctgttcctatgtattctgggaacttgaaatgcaatagaaacctgggaggatttaacaaggatacatcattgtgtcattactatgtgcatgtggtttgcaatttgcacctcttccggaacaggtggtgaatagtctctggcagaacaata

SEQ ID NO: 36326 - DNA, 2492 bp, Zea Mays
tatggcggacccacttatcaatcgatttatgggccccgcgtggcagagtcaaaagactcggaagggagttggttggtttttgtttcctccccgcacccgcaacaacggaaacaacggccccgtggtagcgaggagatcaggaattcaggagagcaaaaggggagagagaatgaattgaaacgaaggcccgcgacgcgaggagcgagggaactaccaccggtgaccggtctcggcgcctccgcgacgatagcctctccgacctcgagcgcggtccggttcctccctgcgtcagcacgcgagcccttggagcttcgagtcagatcccggcgggcgcccatggtggctctggtgccgttgagccgcgcgatgtagggttttcgcgcgccgcagagtaggagcgatggggcgccggaagatgtccgcggcggcaccgccgtctcggagctggtccaacgttggcggaagcgtcatcccggaacttcgagctaaacacaaaacagacttgcagaatttgacgctgaccaaacagccactcagaacattgcattttttcctgttagccatgttacaatacttgaaaagattagcaacatatatcctgagtaagggtggtttcttctttctcctaattgttttattggtagcttctggaatcttgctcgtcgtttcggatggtctgcataagaaggtttgttgcatgttcttctcttgtctttgtcttaatcagcgggatatggatagtcattttcataactcataagaacccatgttgcagtattttgtatagcatcttggcattgtttttgagcactaatgttgtttggatgtcatgtatgcagcatgtgcaggaattccttaattatgctaaatttgtgtcgtggtgggtttcattaggtgtggcttcatcaattggactaggttctggtttgcatacatttgtgctgtatctgggtcctcatattgctctgttcactattaaggctgttcaatgtggtcgaattgatctaaaaattgctccatatgataccatacagctaaaggttgggccatcatggcttgacaagaaatgttcagaatttggaccacctgtgtatccagcatcagctcattcagttaggatcccagtcttcgacctactacctcagatacagctggaggcagttctttggggaattgggactgcgcttgctcgcttatcaggaagcgagtcaaaagctgttcaggagcttgatgcagctacttccaaagaagatgggccagtagcatcatcccttaatcgaaccaagcgttggcttctctctcactcccaacatctcaacttcttctctatcttgattcttgcttcggttggtctcctgtcttccatcctctgttaccaagttcttcagtgtggatattttacacctgtaatttatgatatttggctttgtgtcttcacaattgatcttttttgcacctttggatcatgtgcaagctttagctccacatttaaaagctgtctagataaaatgacaccaacaaataagcgttccaaatccactctttgaccttgctggtattatgtgtgggcaatttggtgtgcctttctgggagttcttgtttgctactttgattgggaaagccatcatcaagactcatattcagacactatttatcgtgtccctgtgcaacaatcagctcttgtatcttattgaaaaggagttaatctggatatttggtcacgttcctgggttttctgccacccttccgtctgtgattgccagactccatgctgccaaggacaagtatctatcaccaccagccccagtctcaccgtcatcacaaatgggggagaaacagtggaatttctcttttacatctgtctggaactctatagtgtggcttgtgcttttgaacttcttcattaagatagtcacgtcaacagcacaggattatctcaaaaagcagcaggatacggagatggaacttatttcggattccccgatccaggaccattctaaaactaactagtggcgcagctagtggtgtttatacacagctgctagcagcaaagattctcctctgtagcttaagcccctgcagatgatttcaagttccaacaattagtattagtagttattcatctgcgcagtggacaaaaacatggacacatggtcttggttaacttgtcagttgacgaccttttgtcattgagcctgtacctgtactggcagctcctgttggagtcattctgtttattttcggacatctacacggataaacagtaggaattgtttatggagcacggttggctttttttgaagtgaagagcacggttggctttgtgagatgtatcattcatacctgttcctatgtattctgggaacttgaaatgcaatagaaacctgggaggatttaacaaggatacatcattgtgtcattactatgtgcatgtggtttgcaatttgcacctcttccggaacaggtggtgaatagtctctggcagaacaata

SEQ ID NO: 36327 - DNA, 2560 bp, Zea Mays
tatggcggacccacttatcaatcgatttatgggccccgcgtggcagagtcaaaagactcggaagggagttggttggtttttgtttcctccccgcacccgcaacaacggaaacaacggccccgtggtagcgaggagatcaggaattcaggagagcaaaaggggagagagaatgaattgaaacgaaggcccgcgacgcgaggagcgagggaactaccaccggtgaccggtctcggcgcctccgcgacgatagcctctccgacctcgagcgcggtccggttcctccctgcgtcagcacgcgagcccttggagcttcgagtcagatcccggcgggcgcccatggtggctctggtgccgttgagccgcgcgatgtagggttttcgcgcgccgcagagtaggagcgatggggcgccggaagatgtccgcggcggcaccgccgtctcggagctggtccaacgttggcggaagcgtcatcccgggtaagatctgtggctttgttccatgtgtggcgttaaggcgctgtgaggtgttgtggatcggattgatttcatgtcgagctaatttaagggtgtttgttttaccattctaaatgaggtggtgcaatcagtccatttctcaaatttggtggagtgattctattcctggtactaatttggtggaacgacttcatttgctgtactaattattagtccgcgaggctgaattattagcttgcaaggaatgaattattaacttgtaaggattgaagcgatgatgaatagcgcattctattccacaaatcaaacaaaataagaggagtgagaagatgatggactaactcattcctcaaaccaaacagcctgttagcttttggtttaggctctagctgatgactggtgctgttggtctgttttctttttatctcatgtatctacttattttgcagaacttcgagctaaacacaaaacagacttgcagaatttgacgctgaccaaacagccactcagaacattgcattttttcctgttagccatgttacaatacttgaaaagattagcaacatatatcctgagtaagggtggtttcttctttctcctaattgttttattggtagcttctggaatcttgctcgtcgtttcggatggtctgcataagaaggttctggtttgcatacatttgtgctgtatctgggtcctcatattgctctgttcactattaaggctgttcaatgtggtcgaattgatctaaaaattgctccatatgataccatacagctaaaggttgggccatcatggcttgacaagaaatgttcagaatttggaccacctgtgtatccagcatcagctcattcagttaggatcccagtcttcgacctactacctcagatacagctggaggcagttctttggggaattgggactgcgcttggtgagctccctccttattttatatcacgagcagctcgcttatcaggaagcgagtcaaaagctgttcaggagcttgatgcagctacttccaaagaagatgggccagtagcatcatcccttaatcgaaccaagcgttggcttctctctcactcccaacatctcaacttcttctctatcttgattcttgcttcggttccaaatccactctttgaccttgctggtattatgtgtgggcaatttggtgtgcctttctgggagttcttgtttgctactttgattgggaaagccatcatcaagactcatattcagacactatttatcgtgtccctgtgcaacaatcagctcttgtatcttattgaaaaggagttaatctggatatttggtcacgttcctgggttttctgccacccttccgtctgtgattgccagactccatgctgccaaggacaagtatctatcaccaccagccccagtctcaccgtcatcacaaatgggggagaaacagtggaatttctcttttacatctgtctggaactctatagtgtggcttgtgcttttgaacttcttcattaagatagtcacgtcaacagcacaggattatctcaaaaagcagcaggatacggagatggaacttatttcggattccccgatccaggaccattctaaaactaactagtggcgcagctagtggtgtttatacacagctgctagcagcaaagattctcctctgtagcttaagcccctgcagatgatttcaagttccaacaattagtattagtagttattcatctgcgcagtggacaaaaacatggacacatggtcttggttaacttgtcagttgacgaccttttgtcattgagcctgtacctgtactggcagctcctgttggagtcattctgtttattttcggacatctacacggataaacagtaggaattgtttatggagcacggttggctttttttgaagtgaagagcacggttggctttgtgagatgtatcattcatacctgttcctatgtattctgggaacttgaaatgcaatagaaacctgggaggatttaacaaggatacatcattgtgtcattactatgtgcatgtggtttgcaatttgcacctcttccggaacaggtggtgaatagtctctggcagaacaata

SEQ ID NO: 36328 - DNA, 2653 bp, Zea Mays
ctcagatctcttacggacggagtacgttcatccaccacactccccgatatggcggacccacttatcaatcgatttatgggccccgcgtggcagagtcaaaagactcggaagggagttggttggtttttgtttcctccccgcacccgcaacaacggaaacaacggccccgtggtagcgaggagatcaggaattcaggagagcaaaaggggagagagaatgaattgaaacgaaggcccgcgacgcgaggagcgagggaactaccaccggtgaccggtctcggcgcctccgcgacgatagcctctccgacctcgagcgcggtccggttcctccctgcgtcagcacgcgagcccttggagcttcgagtcagatcccggcgggcgcccatggtggctctggtgccgttgagccgcgcgatgtagggttttcgcgcgccgcagagtaggagcgatggggcgccggaagatgtccgcggcggcaccgccgtctcggagctggtccaacgttggcggaagcgtcatcccgggtaagatctgtggctttgttccatgtgtggcgttaaggcgctgtgaggtgttgtggatcggattgatttcatgtcgagctaatttaagggtgtttgttttaccattctaaatgaggtggtgcaatcagtccatttctcaaatttggtggagtgattctattcctggtactaatttggtggaacgacttcatttgctgtactaattattagtccgcgaggctgaattattagcttgcaaggaatgaattattaacttgtaaggattgaagcgatgatgaatagcgcattctattccacaaatcaaacaaaataagaggagtgagaagatgatggactaactcattcctcaaaccaaacagcctgttagcttttggtttaggctctagctgatgactggtgctgttggtctgttttctttttatctcatgtatctacttattttgcagaacttcgagctaaacacaaaacagacttgcagaatttgacgctgaccaaacagccactcagaacattgcattttttcctgttagccatgttacaatacttgaaaagattagcaacatatatcctgagtaagggtggtttcttctttctcctaattgttttattggtagcttctggaatcttgctcgtcgtttcggatggtctgcataagaagcatgtgcaggaattccttaattatgctaaatttgtgtcgtggtgggtttcattaggtgtggcttcatcaattggactaggttctggtttgcatacatttgtgctgtatctgggtcctcatattgctctgttcactattaaggctgttcaatgtggtcgaattgatctaaaaattgctccatatgataccatacagctaaaggttgggccatcatggcttgacaagaaatgttcagaatttggaccacctgtgtatccagcatcagctcattcagttaggatcccagtcttcgacctactacctcagatacagctggaggcagttctttggggaattgggactgcgcttgctcgcttatcaggaagcgagtcaaaagctgttcaggagcttgatgcagctacttccaaagaagatgggccagtagcatcatcccttaatcgaaccaagcgttggcttctctctcactcccaacatctcaacttcttctctatcttgattcttgcttcggttccaaatccactctttgaccttgctggtattatgtgtgggcaatttggtgtgcctttctgggagttcttgtttgctactttgattgggaaagccatcatcaagactcatattcagacactatttatcgtgtccctgtgcaacaatcagctcttgtatcttattgaaaaggagttaatctggatatttggtcacgttcctgggttttctgccacccttccgtctgtgattgccagactccatgctgccaaggacaagtatctatcaccaccagccccagtctcaccgtcatcacaaatgggggagaaacagtggaatttctcttttacatctgtctggaactctatagtgtggcttgtgcttttgaacttcttcattaagatagtcacgtcaacagcacaggattatctcaaaaagcagcaggatacggagatggaacttatttcggattccccgatccaggaccattctaaaactaactagtggcgcagctagtggtgtttatacacagctgctagcagcaaagattctcctctgtagcttaagcccctgcagatgatttcaagttccaacaattagtattagtagttattcatctgcgcagtggacaaaaacatggacacatggtcttggttaacttgtcagttgacgaccttttgtcattgagcctgtacctgtactggcagctcctgttggagtcattctgtttattttcggacatctacacggataaacagtaggaattgtttatggagcacggttggctttttttgaagtgaagagcacggttggctttgtgagatgtatcattcatacctgttcctatgtattctgggaacttgaaatgcaatagaaacctgggaggatttaacaaggatacatcattgtgtcattactatgtgcatgtggtttgcaatttgcacctcttccggaacaggtggtgaatagtctctggcagaacaata

SEQ ID NO: 36329 - DNA, 3377 bp, Zea Mays
gtccagtcctggccaacccccgcccggtaaccggcatggcgactccaccgtcctgagcgccgccaccacctcggcccgctttcgtttttggctccttccgcggagagggaatagaccaaacgctcctgtatagagagagctgggaacaagacgggaggcaactggtcggtgctcgccacctttaatttccgcctccgctgctactggagtagttatatagctagcttgctcagacacctttttggatgctcgctgctcccgacaagaccgcccgccatcgtgcagccatcgcagatcgggatctcgcggagctgcgattcattcgccagccatcctactcaaacgccacccatctctgagtctttgaccaactgttctgaagatttgagacactgttggagatgggtacaaggatgccaatctttccccgactatcgagcgcactgtccacggcgttgctggagtggatcttgatgctcctgctgttcatcgatgcggtttacagcttcctggtcactagattcgcccgtctctgcagattaccggcgccatgccctttctgctcaaggctcgatcacttcctgggcaacgagaaaccgtgcttctatagggacctgatctgcaaaacccacaagtcggagatttcgtccttggccttctgcagcctccaccagaagctcgcgggagcccgaaatatgtgtgaagggtgctgtggggaagtcgccggtgatgataagacagatgagactgatagcaatcaaagaattggtgatgctttcaattctcctcgtgaaaaagtctgctcgtgctgtggacagcattttaagcgacggagtgtagctttgtcctctagagagactgcagaactagaacctactcgagcgtttggctcaccaaaaacttacacggagtactctgtagtatgtcaagtggatgagcctttggagcctaaagatatataccaccaaagtgactacaggtctaatgagccagacggtctgctacagatgacatctgactctgagactgaggtcccttgtgccattgatgtgagaagttcacaatctcgtgaagccgatgttaagggcgaagacttgcaagaagatccagcttgtgagcaacccgttcttccttcccctgtggtgatcaagaaatctgaaatagtcgtcaggaaggagcctagtgttgaagacacctgcattacatcttcagcgtgtcctgctgtggatgatcatcctaatagcggaggtggtgtggaccagatggaagaaaaagaaagcctatccagaaaatgggcaccccagcacgatcctgtacttgttatagaaaattcaggtttacaagatgctggtatttcacaaattatgccaagtgatgagctaccacaggtttctggtgagactgaaccatctcagagcacaaatgaaggcaacacggatccatataaatctcagttcacaatactagaggagcactatgctgtttcggaagaaggaaatataaaatgtattctggaacaatttgacgtgacagaaattactagcagatcaggtggtgagtttcgtcaaagaagtgcgtcagcagctgattcacatacaaatgcactggtactagagaatactcatcatggtgcttcagaagatgcagaacagaaagataattgtggggatatccgtgtttcacaagtaggtgctggatccaaaacgagtggtgaagttgaagattatactaagaaaattgaacccactggtgacatgggagaacatgaactggtagtacaagatccttctggtagtgctcccaaagatttaatagttaaaggtcagtaaaaaacgatttatgtccaacacaaacattattaaaattggcccttacattgagctattttgctcagattatgtggacgaacctcatgtatcaacaactaccatgagatcgagcggtgaagtacctcaagatcatagtgccaccgaggaaaacccaaaaacaattgacagcattgttgaaaggagaccatctctaagcagtcagattagcattaccctaagatcaagtggtgaagtacttcaagatcatagtgccaccgaggaaaacccaaaaacaagtgaaagtattgttgaaaggagaccatctctaagcagtcagattagcattaccctaagatcgagtggtgaagtacttcaagatcatagtgccaccgaggaaaactcaaaaacaagtgaaagtattgttgaaaggagaccatctctaagcagtcagattagcatgaatgaagcctatagacttgccattggcaacaagggtagcttgacatcccctacattgacggatgtaatccttggaaaggactctacttctagcataaacgaagaactgaggctactgttatcacagatctcagcttccagggggcttgaggcaccatgggccgatccaggccctagcccacgtgcatatggacgtggtgatgagttggtggtgcagaacattaccaatagattatcacttgagaggaatgcttccggtttggagtctctagacggaagcattgttagtgagatggaaggtgaaagcaccattgaccggttgagacggcagattgatcttgatcggaaatcaatacacctactctgcagggaactggaagaagagaggaatgcctcagccattgctgcaagtcaagctctggctatgatcaccaagttgcaggatgagaaggccgcaatgcagatggaagcttcgcattaccaaaggatgatggaagagcaagctgaatatgacagtgaagcggtagcgaaagctaacgagttactcactgaaagagaacagctaattgaagaactggaagttgagctcgaaaactataggagacagtatggaggtggatcaacacagagacgaggcaatcgagtggcttttaaacaagaaaatagggatacaactatgcttgacggtggtggtcttgaagatcctctgattaacacacaacagggcataaattccttggtgggtttggaagaggagagggcatatatagcgactggtttgagaaaattggaacagaagctccaattctactccaacaacagtgtttccgttgagttacccagtccagatgttaaggatgacctctccgacaaagtatatgtcacagaagacttctcgttacactgccaggaaagctcgatggagagcaaggaagctggctcatcgacaactagtggggaggttgatctagttgcagtgcaggaagaaattgcaaagttgaacagaagactgaagacactagaaggagatcgcagttttcttgagcatagcatcaactccctcaggaatggcgacgaagtgatgtgacggggatctgaagcaccaacttt

SEQ ID NO: 36330 - DNA, 3393 bp, Zea Mays
gcccgctttcgtttttggctccttccgcggagagggaatagaccaaacgctcctgtatagagagagctgggaacaagacgggaggcaactggtcggtgctcgccacctttaatttccgcctccgctgctactggagtagttatatagctagcttgctcagacacctttttggatgctcgctgctcccgacaagaccgcccgccatcgtgcagccatcgcagatcgggatctcgcggagctgcgattcattcgccagccatcctactcaaacgccacccatctctgagtctttgaccaactgttctgaagatttgagacactgttggagatgggtacaaggatgccaatctttccccgactatcgagcgcactgtccacggcgttgctggagtggatcttgatgctcctgctgttcatcgatgcggtttacagcttcctggtcactagattcgcccgtctctgcagattaccggcgccatgccctttctgctcaaggctcgatcacttcctgggcaacgagaaaccgtgcttctatagggacctgatctgcaaaacccacaagtcggagatttcgtccttggccttctgcagcctccaccagaagctcgcgggagcccgaaatatgtgtgaagggtgctgtggggaagtcgccggtgatgataagacagatgagactgatagcaatcaaagaattggtgatgctttcaattctcctcgtgaaaaagtctgctcgtgctgtggacagcattttaagcgacggagtgtagctttgtcctctagagagactgcagaactagaacctactcgagcgtttggctcaccaaaaacttacacggagtactctgtagtatgtcaagtggatgagcctttggagcctaaagatatataccaccaaagtgactacaggtctaatgagccagacggtctgctacagatgacatctgactctgagactgaggtcccttgtgccattgatgtgagaagttcacaatctcgtgaagccgatgttaagggcgaagacttgcaagaagatccagcttgtgagcaacccgttcttccttcccctgtggtgatcaagaaatctgaaatagtcgtcaggaaggagcctagtgttgaagacacctgcattacatcttcagcgtgtcctgctgtggatgatcatcctaatagcggaggtggtgtggaccagatggaagaaaaagaaagcctatccagaaaatgggcaccccagcacgatcctgtacttgttatagaaaattcaggtttacaagatgctggtatttcacaaattatgccaagtgatgagctaccacaggtttctggtgagactgaaccatctcagagcacaaatgaaggcaacacggatccatataaatctcagttcacaatactagaggagcactatgctgtttcggaagaaggaaatataaaatgtattctggaacaatttgacgtgacagaaattactagcagatcaggtggtgagtttcgtcaaagaagtgcgtcagcagctgattcacatacaaatgcactggtactagagaatactcatcatggtgcttcagaagatgcagaacagaaaggtgctggatccaaaacgagtggtgaagttgaagattatactaagaaaattgaacccactggtgacatgggagaacatgaactggtagtacaagatccttctggtagtgctcccaaagatttaatagttaaagattatgtggacgaacctcatgtatcaacaactaccatgagatcgagcggtgaagtacctcaagatcatagtgccaccgaggaaaacccaaaaacaattgacagcattgttgaaaggagaccatctctaagcagtcagattagcattaccctaagatcaagtggtgaagtacttcaagatcatagtgccaccgaggaaaacccaaaaacaagtgaaatacttcaagatcatagtgccaccgaggaaaactcaaaaacaagtgaaagtattgttgaaaggagaccatctctaagcagtcagattagcatgaatgaagcctatagacttgccattggcaacaagggtagcttgacatcccctacattgacggatgtaatccttggaaaggactctacttctagcataaacgaagaactgaggctactgttatcacagatctcagcttccagggggcttgaggcaccatgggccgatccaggccctagcccacgtgcatatggacgtggtgatgagttggtggtgcagaacattaccaatagattatcacttgagaggaatgcttccggtttggagtctctagacggaagcattgttagtgagatggaaggtgaaagcaccattgaccggttgagacggcagattgatcttgatcggaaatcaatacacctactctgcagggaactggaagaagagaggaatgcctcagccattgctgcaagtcaagctctggctatgatcaccaagttgcaggatgagaaggccgcaatgcagatggaagcttcgcattaccaaaggatgatggaagagcaagctgaatatgacagtgaagcggtagcgaaagctaacgagttactcactgaaagagaacagctaattgaagaactggaagttgagctcgaaaactataggagacagtatggaggtggatcaacacagagacgaggcaatcgagtggcttttaaacaagaaaatagggatacaactatgcttgacggtggtggtcttgaagatcctctgattaacacacaacagggcataaattccttggtgggtttggaagaggagagggcatatatagcgactggtttgagaaaattggaacagaagctccaattctactccaacaacagtgtttccgttgagttacccagtccagatgttaaggatgacctctccgacaaagtatatgtcacagaagacttctcgttacactgccaggaaagctcgatggagagcaaggaagctggctcatcgacaactagtggggaggttgatctagttgcagtgcaggaagaaattgcaaagttgaacagaagactgaagacactagaaggagatcgcagttttcttgagcatagcatcaactccctcaggaatggcgacgaaggtttgatgtttatacaggaaattgcttgcaatctgagagaactgcgagcaattgctattggcaaaaaataaaatgcaccaaaatgtgtataatagtcattttctcgaaacttatttgtgcaatagacgccgaatcaacatatgaatcgtgcatcatgtttgtcatataaatgaaaagaaattcttgtaattagacaccagatgttgctgtaattatctttaaattcgtagggttgagatgtaaattggttctatatattatcatgttattatgttaagtttttgctatgaaa

SEQ ID NO: 36331 - DNA, 2745 bp, Zea Mays
gtagtccgatcaaaacctcctcaaacccaacgcaccgactagtcgctacgctcgcacgtcgtacccgacctcattcccttcccttcccttccgcccgaagtctccacgctccctttctcccgtttaaaaccttcgcttcgtctcgactctacttggccggccatttcctctcgcccagtcctcgctcacgtcaaaccctagggcccggggcctcctactcgtaggctcagatccaatgggcgcggcgccgtcgacgccgaggctgggcgcggcaggcgcggcgccgtcgcccagcgcggcggagcagatgttcacggcgctggtcggcgagaaggcctacccaatctcctccgagttctggaagcagctgctcgagctgcccctcaccctgcagtggccgcgcgaccgcgtgctgcaggcgtgccacgccttcgccgagaataactaccaaacaaagcatcttgcaaagattttgatccatttggtttggtgcttgcaagagtgcacatcaacaacttctgtatcttctgtcgtatatcggagggcgatcaatgcggcatacatatcatccatatttctcaagttcatcattgaaaacgcaaaaaccgacagttggcaagagctatgccttgtcattgacaggagtgagaaggggttggaaaactttcctgcagaaaacactgtggagtattttctgataagaggtgtgctggaatatattggtagtgtgggtgtaagtccggagtcatgctacctacatcatgaactcctgaacttgatgctagttcttatgtcaactcagttatgttctggaccatctccagaaccaaaggatgtgcatcctttcattgatgcagctatgcttcaggacagctccatagtggcttcagtagtgcagaaattgttgctcaattttgtaacacgaccgaaacttcctctaaatgcttcgcaccctgttttctctgatgatgctaggcctggtgttctgcagcgagttggctcagcagctgcaaatgtcgtcttattgccatattatactttcaactaccttgtaagctcaactcctgagggtgcgacaagtcaattggcagataacagtttacttgttctgcttatcatgatccactaccgaaagtgcttttcaactaatgagtccattccaaccaacaacgtatacacgatggactcaaataccaatgacaaggatgctccagtttttcatgataacccttattgcaaggcattaaacagtgctaaggacattcaatatgatcgtgctgatgttgaaggaaatgctcaaaatggacctgttgtcaggttgtcttttgcattgttgtttgatgctcttggaagattcttaaatgatgagatcccagttctgttgctctattctttggtccatgggaactgtgactttcaggaatacgtcttggttcgaacagacttggatactttgttgatgcctatcttggaaacgctatataatgcatcaaggaagacttcaaatcagatttacatgctgttgattattctcctgatcctcagtcaagattcaaccttcaatgctagtgtgcacaaattggtgcttcctggtgttccttggtaccatgaacgcctgatgcatcaaacttctatgggatctttgatggttgtaatactaattcagaccatcaagtacaacctctccaagctaagagatgtctaccttcacacaaactgtcttgcaattttagcaaatatggctccgcatgtgcataggctgagtgcttatgcatcacaaaggctagttagtctctttgacatgctttctcgcaagtatgccaaactagctgagttgaaaaatgacaagtctctgaaagttatatctgatcagatggaagcagacaacatcgcagatgatatgtctacagagcttcacatatatacagatttcttgagaattgttctggaaataatcaatgcaatccttacatatgcattgcccagaaatcccgaggttgtatatgctgtattgcatcgacaagaggtttttgagccatttaaaaatcatccacgttttaatgaactgcttgagaacatatacactgtattggatttcttcaatagtcgaatggacatgcaacaattagatggggaatggtccgtggataaagtgcttgaagtcatcaataaaacttgccgttcatggcgcggagaagggatgaagatgtttactcagttgcggtttacatatgagcaagaaagccaccctgaggaattctttatcccatatgcatggcgccttgtcctgtcacggggattctccttcaatcccagcgccataaatctcttccctgtggagattcaccttgaagatgcaccggccggtgaacaaaaggtttaggaagaatggtccgaaccagagttctgacaaggaacataaaggcatatttttgttccattgtggcaaagagcataatgtaaataggcggcatataccagtgtgaagtgctgactctgctcgcaaagcttccccgacgcgcaccaggatggcgtcctgcctcatcatctaccactccagcgagcctccatgctatagagtagcagctgttaaggactcttgtagtccaagggtctcaactataatattaacaaacaagtagacaagaatatgaagtagacaagagtatgaaggaaggtgttctgttatttttgtgtacatcatctgtttatagatatgaattagggtttctaatccatatgggc

SEQ ID NO: 36332 - DNA, 2962 bp, Zea Mays
gtagtccgatcaaaacctcctcaaacccaacgcaccgactagtcgctacgctcgcacgtcgtacccgacctcattcccttcccttcccttccgcccgaagtctccacgctccctttctcccgtttaaaaccttcgcttcgtctcgactctacttggccggccatttcctctcgcccagtcctcgctcacgtcaaaccctagggcccggggcctcctactcgtaggctcagatccaatgggcgcggcgccgtcgacgccgaggctgggcgcggcaggcgcggcgccgtcgcccagcgcggcggagcagatgttcacggcgctggtcggcgagaaggcctacccaatctcctccgagttctggaagcagctgctcgagctgcccctcaccctgcagtggccgcgcgaccgcgtgctgcaggcgtgccacgccttcgccgagaataactaccaaacaaagcatcttgcaaagattttgatccatttggtttggtgcttgcaagagtgcacatcaacaacttctgtatcttctgtcgtatatcggagggcgatcaatgcggcatacatatcatccatatttctcaagttcatcattgaaaacgcaaaaaccgacagttggcaagagctatgccttgtcattgacaggagtgagaaggggttggaaaactttcctgcagaaaacactgtggagtattttctgataagaggtgtgctggaatatattggtagtgtgggtgtaagttcttatgtcaactcagttatgttctggaccatctccagaaccaaaggatgtgcatcctttcattgatgcagctatgcttcaggacagctccatagtggcttcagtagtgcagaaattgttgctcaattttgtaacacgaccgaaacttcctctaaatgcttcgcaccctgttttctctgatgatgctaggcctggtgttctgcagcgagttggctcagcagctgcaaatgtcgtcttattgccatattatactttcaactaccttgtaagctcaactcctgagggtgcgacaagtcaattggcagataacagtttacttgttctgcttatcatgatccactaccgaaagtgcttttcaactaatgagtccattccaaccaacaacgtatacacgatggactcaaataccaatgacaaggatgctccagtttttcatgataacccttattgcaaggcattaaacagtgctaaggacattcaatatgatcgtgctgatgttgaaggaaatgctcaaaatggacctgttgtcaggttgtcttttgcattgttgtttgatgctcttggaagattcttaaatgatgagatcccagttctgttgctctattctttggtccatgggaactgtgactttcaggaatacgtcttggttcgaacagacttggatactttgttgatgcctatcttggaaacgctatataatgcatcaaggaagacttcaaatcagatttacatgctgttgattattctcctgatcctcagtcaagattcaaccttcaatgctagtgtgcacaaattggtgcttcctggtgttccttggtaccatgaacgcctgatgcatcaaacttctatgggatctttgatggttgtaatactaattcagaccatcaagtacaacctctccaagctaagagatgtctaccttcacacaaactgtcttgcaattttagcaaatatggctccgcatgtgcataggctgagtgcttatgcatcacaaaggctagttagtctctttgacatgctttctcgcaagtatgccaaactagctgagttgaaaaatgacaagtctctgaaagttatatctgatcagatggaagcagacaacatcgcagatgatatgtctacagagcttcacatatatacagatttcttgagaattgttctggaaataatcaatgcaatccttacatatgcattgcccagaaatcccgaggttgtatatgctgtattgcatcgacaagaggtttttgagccatttaaaaatcatccacgttttaatgaactgcttgagaacatatacactgtattggatttcttcaatagtcgaatggacatgcaacaattagatggggaatggtccgtggataaagtgcttgaagtcatcaataaaacttgccgttcatggcgcggagaagggatgaagatgtttactcagttgcggtttacatatgagcaagaaagccaccctgaggaattctttatcccatatgcatggcgccttgtcctgtcacggggattctccttcaatcccagcgccataaatctcttccctgtggagattcaccttgaagatgcaccggccggtgaacaaaaggtttaggaagaatggtccgaaccagagttctgacaaggaacataaaggcatatttttgttccattgtggcaaagagcataatgtaaataggcggcatataccaggtagtagtcgaatgtactcattcttttgtattaaaatagttctgttgtttcataatatgtgtaagagggggaagagggtggacgaattgtgcaagggttcagagattgtgctattataggtggtagattactatgtaggctatacacaattctttcataagttattgttgtattgtacccttaagctgcaaggccttgtggccacgctggccactcttatgcagttgtaaactctgcgatcttgtctttatccgttctgtgaagtgtgaagtgctgactctgctcgcaaagcttccccgacgcgcaccaggatggcgtcctgcctcatcatctaccactccagcgagcctccatgctatagagtagcagctgttaaggactcttgtagtccaagggtctcaactataatattaacaaacaagtagacaagaatatgaagtagacaagagtatgaaggaaggtgttctgttatttttgtgtacatcatctgtttatagatatgaattagggtttctaatccatatgggc

SEQ ID NO: 36333 - DNA, 3001 bp, Zea Mays
gtagtccgatcaaaacctcctcaaacccaacgcaccgactagtcgctacgctcgcacgtcgtacccgacctcattcccttcccttcccttccgcccgaagtctccacgctccctttctcccgtttaaaaccttcgcttcgtctcgactctacttggccggccatttcctctcgcccagtcctcgctcacgtcaaaccctagggcccggggcctcctactcgtaggctcagatccaatgggcgcggcgccgtcgacgccgaggctgggcgcggcaggcgcggcgccgtcgcccagcgcggcggagcagatgttcacggcgctggtcggcgagaaggcctacccaatctcctccgagttctggaagcagctgctcgagctgcccctcaccctgcagtggccgcgcgaccgcgtgctgcaggcgtgccacgccttcgccgagaataactaccaaacaaagcatcttgcaaagattttgatccatttggtttggtgcttgcaagagtgcacatcaacaacttctgtatcttctgtcgtatatcggagggcgatcaatgcggcatacatatcatccatatttctcaagttcatcattgaaaacgcaaaaaccgacagttggcaagagctatgccttgtcattgacaggagtgagaaggggttggaaaactttcctgcagaaaacactgtggagtattttctgataagaggtgtgctggaatatattggtagtgtgggtgtaagtccggagtcatgctacctacatcatgaactcctgaacttgatgctagttcttatgtcaactcagttatgttctggaccatctccagaaccaaaggatgtgcatcctttcattgatgcagctatgcttcagctccatagtggcttcagtagtgcagaaattgttgctcaattttgtaacacgaccgaaacttcctctaaatgcttcgcaccctgttttctctgatgatgctaggcctggtgttctgcagcgagttggctcagcagctgcaaatgtcgtcttattgccatattatactttcaactaccttgtaagctcaactcctgagggtgcgacaagtcaattggcagataacagtttacttgttctgcttatcatgatccactaccgaaagtgcttttcaactaatgagtccattccaaccaacaacgtatacacgatggactcaaataccaatgacaaggatgctccagtttttcatgataacccttattgcaaggcattaaacagtgctaaggacattcaatatgatcgtgctgatgttgaaggaaatgctcaaaatggacctgttgtcaggttgtcttttgcattgttgtttgatgctcttggaagattcttaaatgatgagatcccagttctgttgctctattctttggtccatgggaactgtgactttcaggaatacgtcttggttcgaacagacttggatactttgttgatgcctatcttggaaacgctatataatgcatcaaggaagacttcaaatcagatttacatgctgttgattattctcctgatcctcagtcaagattcaaccttcaatgctagtgtgcacaaattggtgcttcctggtgttccttggtaccatgaacgcctgatgcatcaaacttctatgggatctttgatggttgtaatactaattcagaccatcaagtacaacctctccaagctaagagtaggatgtctaccttcacacaaactgtcttgcaattttagcaaatatggctccgcatgtgcataggctgagtgcttatgcatcacaaaggctagttagtctctttgacatgctttctcgcaagtatgccaaactagctgagttgaaaaatgacaagtctctgaaagttatatctgatcagatggaagcagacaacatcgcagatgatatgagcttcacatatatacagatttcttgagaattgttctggaaataatcaatgcaatccttacatatgcattgcccagaaatcccgaggttgtatatgctgtattgcatcgacaagaggtttttgagccatttaaaaatcatccacgttttaatgaactgcttgagaacatatacactgtattggatttcttcaatagtcgaatggacatgcaacaattagatggggaatggtccgtggataaagtgcttgaagtcatcaataaaacttgccgttcatggcgcggagaagggatgaagatgtttactcagttgcggtttacatatgagcaagaaagccaccctgaggaattctttatcccatatgcatggcgccttgtcctgtcacggggattctccttcaatcccagcgccataaatctcttccctgtggagattcaccttgaagatgcaccggccggtgaacaaaaggtttaggaagaatggtccgaaccagagttctgacaaggaacataaaggcatatttttgttccattgtggcaaagagcataatgtaaataggcggcatataccaggtagtagtcgaatgtactcattcttttgtattaaaatagttctgttgtttcataatatgtgtaagagggggaagagggtggacgaattgtgcaagggttcagagattgtgctattataggtggtagattactatgtaggctatacacaattctttcataagttattgttgtattgtacccttaagctgcaaggccttgtggccacgctggccactcttatgcagttgtaaactctgcgatcttgtctttatccgttctgtgaagtgtgaagtgctgactctgctcgcaaagcttccccgacgcgcaccaggatggcgtcctgcctcatcatctaccactccagcgagcctccatgctatagagtagcagctgttaaggactcttgtagtccaagggtctcaactataatattaacaaacaagtagacaagaatatgaagtagacaagagtatgaaggaaggtgttctgttatttttgtgtacatcatctgtttatagatatgaattagggtttctaatccatatgggc

SEQ ID NO: 36334 - DNA, 3004 bp, Zea Mays
gtagtccgatcaaaacctcctcaaacccaacgcaccgactagtcgctacgctcgcacgtcgtacccgacctcattcccttcccttcccttccgcccgaagtctccacgctccctttctcccgtttaaaaccttcgcttcgtctcgactctacttggccggccatttcctctcgcccagtcctcgctcacgtcaaaccctagggcccggggcctcctactcgtaggctcagatccaatgggcgcggcgccgtcgacgccgaggctgggcgcggcaggcgcggcgccgtcgcccagcgcggcggagcagatgttcacggcgctggtcggcgagaaggcctacccaatctcctccgagttctggaagcagctgctcgagctgcccctcaccctgcagtggccgcgcgaccgcgtgctgcaggcgtgccacgccttcgccgagaataactaccaaacaaagcatcttgcaaagattttgatccatttggtttggtgcttgcaagagtgcacatcaacaacttctgtatcttctgtcgtatatcggagggcgatcaatgcggcatacatatcatccatatttctcaagttcatcattgaaaacgcaaaaaccgacagttggcaagagctatgccttgtcattgacaggagtgagaaggggttggaaaactttcctgcagaaaacactgtggagtattttctgataagaggtgtgctggaatatattggtagtgtgggtgtaagtccggagtcatgctacctacatcatgaactcctgaacttgatgctagttcttatgtcaactcagttatgttctggaccatctccagaaccaaaggatgtgcatcctttcattgatgcagctatgcttcagctccatagtggcttcagtagtgcagaaattgttgctcaattttgtaacacgaccgaaacttcctctaaatgcttcgcaccctgttttctctgatgatgctaggcctggtgttctgcagcgagttggctcagcagctgcaaatgtcgtcttattgccatattatactttcaactaccttgtaagctcaactcctgagggtgcgacaagtcaattggcagataacagtttacttgttctgcttatcatgatccactaccgaaagtgcttttcaactaatgagtccattccaaccaacaacgtatacacgatggactcaaataccaatgacaaggatgctccagtttttcatgataacccttattgcaaggcattaaacagtgctaaggacattcaatatgatcgtgctgatgttgaaggaaatgctcaaaatggacctgttgtcaggttgtcttttgcattgttgtttgatgctcttggaagattcttaaatgatgagatcccagttctgttgctctattctttggtccatgggaactgtgactttcaggaatacgtcttggttcgaacagacttggatactttgttgatgcctatcttggaaacgctatataatgcatcaaggaagacttcaaatcagatttacatgctgttgattattctcctgatcctcagtcaagattcaaccttcaatgctagtgtgcacaaattggtgcttcctggtgttccttggtaccatgaacgcctgatgcatcaaacttctatgggatctttgatggttgtaatactaattcagaccatcaagtacaacctctccaagctaagagatgtctaccttcacacaaactgtcttgcaattttagcaaatatggctccgcatgtgcataggctgagtgcttatgcatcacaaaggctagttagtctctttgacatgctttctcgcaagtatgccaaactagctgagttgaaaaatgacaagtctctgaaagttatatctgatcagatggaagcagacaacatcgcagatgatatgtctacagagcttcacatatatacagatttcttgagaattgttctggaaataatcaatgcaatccttacatatgcattgcccagaaatcccgaggttgtatatgctgtattgcatcgacaagaggtttttgagccatttaaaaatcatccacgttttaatgaactgcttgagaacatatacactgtattggatttcttcaatagtcgaatggacatgcaacaattagatggggaatggtccgtggataaagtgcttgaagtcatcaataaaacttgccgttcatggcgcggagaagggatgaagatgtttactcagttgcggtttacatatgagcaagaaagccaccctgaggaattctttatcccatatgcatggcgccttgtcctgtcacggggattctccttcaatcccagcgccataaatctcttccctgtggagattcaccttgaagatgcaccggccggtgaacaaaaggtttaggaagaatggtccgaaccagagttctgacaaggaacataaaggcatatttttgttccattgtggcaaagagcataatgtaaataggcggcatataccaggtagtagtcgaatgtactcattcttttgtattaaaatagttctgttgtttcataatatgtgtaagagggggaagagggtggacgaattgtgcaagggttcagagattgtgctattataggtggtagattactatgtaggctatacacaattctttcataagttattgttgtattgtacccttaagctgcaaggccttgtggccacgctggccactcttatgcagttgtaaactctgcgatcttgtctttatccgttctgtgaagtgtgaagtgctgactctgctcgcaaagcttccccgacgcgcaccaggatggcgtcctgcctcatcatctaccactccagcgagcctccatgctatagagtagcagctgttaaggactcttgtagtccaagggtctcaactataatattaacaaacaagtagacaagaatatgaagtagacaagagtatgaaggaaggtgttctgttatttttgtgtacatcatctgtttatagatatgaattagggtttctaatccatatgggc

SEQ ID NO: 36335 - DNA, 3002 bp, Zea Mays
gtagtccgatcaaaacctcctcaaacccaacgcaccgactagtcgctacgctcgcacgtcgtacccgacctcattcccttcccttcccttccgcccgaagtctccacgctccctttctcccgtttaaaaccttcgcttcgtctcgactctacttggccggccatttcctctcgcccagtcctcgctcacgtcaaaccctagggcccggggcctcctactcgtaggctcagatccaatgggcgcggcgccgtcgacgccgaggctgggcgcggcaggcgcggcgccgtcgcccagcgcggcggagcagatgttcacggcgctggtcggcgagaaggcctacccaatctcctccgagttctggaagcagctgctcgagctgcccctcaccctgcagtggccgcgcgaccgcgtgctgcaggcgtgccacgccttcgccgagaataactaccaaacaaagcatcttgcaaagattttgatccatttggtttggtgcttgcaagagtgcacatcaacaacttctgtatcttctgtcgtatatcggagggcgatcaatgcggcatacatatcatccatatttctcaagttcatcattgaaaacgcaaaaaccgacagttggcaagagctatgccttgtcattgacaggagtgagaaggggttggaaaactttcctgcagaaaacactgtggagtattttctgataagaggtgtgctggaatatattggtagtgtgggtgtaagtccggagtcatgctacctacatcatgaactcctgaacttgatgctagttcttatgtcaactcagttatgttctggaccatctccagaaccaaaggatgtgcatcctttcattgatgcagctatgcttcaggacagctccatagtggcttcagtagtgcagaaattgttgctcaattttgtaacacgaccgaaacttcctctaaatgcttcgcaccctgttttctctgatgatgctaggcctggtgttctgcagcgagttggctcagcagctgcaaatgtcgtcttattgccatattatactttcaactaccttgtaagctcaactcctgagggtgcgacaagtcaattggcagataacagtttacttgttctgcttatcatgatccactaccgaaagtgcttttcaactaatgagtccattccaaccaacaacgtatacacgatggactcaaataccaatgacaaggatgctccagtttttcatgataacccttattgcaaggcattaaacagtgctaaggacattcaatatgatcgtgctgatgttgaaggaaatgctcaaaatggacctgttgtcaggttgtcttttgcattgttgtttgatgctcttggaagattcttaaatgatgagatcccagttctgttgctctattctttggtccatgggaactgtgactttcaggaatacgtcttggttcgaacagacttggatactttgttgatgcctatcttggaaacgctatataatgcatcaaggaagacttcaaatcagatttacatgctgttgattattctcctgatcctcagtcaagattcaaccttcaatgctagtgtgcacaaattggtgcttcctggtgttccttggtaccatgaacgcctgatgcatcaaacttctatgggatctttgatggttgtaatactaattcagaccatcaagtacaacctctccaagctaagagatgtctaccttcacacaaactgtcttgcaattttagcaaatatggctccgcatgtgcataggctgagtgcttatgcatcacaaaggctagttagtctctttgacatgctttctcgcaagtatgccaaactagctgagttgaaaaatgacaagtctctgaaagttatatctgatcagatggaagcagacaacatcgcagatgatatgagcttcacatatatacagatttcttgagaattgttctggaaataatcaatgcaatccttacatatgcattgcccagaaatcccgaggttgtatatgctgtattgcatcgacaagaggtttttgagccatttaaaaatcatccacgttttaatgaactgcttgagaacatatacactgtattggatttcttcaatagtcgaatggacatgcaacaattagatggggaatggtccgtggataaagtgcttgaagtcatcaataaaacttgccgttcatggcgcggagaagggatgaagatgtttactcagttgcggtttacatatgagcaagaaagccaccctgaggaattctttatcccatatgcatggcgccttgtcctgtcacggggattctccttcaatcccagcgccataaatctcttccctgtggagattcaccttgaagatgcaccggccggtgaacaaaaggtttaggaagaatggtccgaaccagagttctgacaaggaacataaaggcatatttttgttccattgtggcaaagagcataatgtaaataggcggcatataccaggtagtagtcgaatgtactcattcttttgtattaaaatagttctgttgtttcataatatgtgtaagagggggaagagggtggacgaattgtgcaagggttcagagattgtgctattataggtggtagattactatgtaggctatacacaattctttcataagttattgttgtattgtacccttaagctgcaaggccttgtggccacgctggccactcttatgcagttgtaaactctgcgatcttgtctttatccgttctgtgaagtgtgaagtgctgactctgctcgcaaagcttccccgacgcgcaccaggatggcgtcctgcctcatcatctaccactccagcgagcctccatgctatagagtagcagctgttaaggactcttgtagtccaagggtctcaactataatattaacaaacaagtagacaagaatatgaagtagacaagagtatgaaggaaggtgttctgttatttttgtgtacatcatctgtttatagatatgaattagggtttctaatccatatgggc

SEQ ID NO: 36336 - DNA, 2398 bp, Zea Mays
tataaagacacgaagtgattcagtgcaatataagtctattgtttggaacacattaatatagatttatgctaagttgataattggtttgttgttagttaatatgaagacatgatgtgatttgaagaatgattatttatttctatagatgctactagaattatttcaaaatgattggttttatcagttttgggtaaatctggtaaaactcgaccccgaatccgaattattggatatccaaaatttcggataatattttgtcgaaacagaattaggttaggaatttttaatacccggttttttatttatccaaattacgcgacccgattatttcagctaaccagaatgggaggcctctccggttgcctctttctttctcagttctcacctcaacgtcaccgcaactccgcaagtccgcaacctcctccttcccaccccttctcacgcgattcaagcgtttcccattcggagccctaatcctctctttccatactcgcggaagccaccaccaccggcaggggaagcggaaggggagcacctcgggccaggcaagatggtgctcgcgcagctgggcgggagcatctcccgcgccctggcgcagatgagcaacgccacggtgatcgatgagaaggtgctcaacgactgcctcaacgagatctcgcgcgctctcctacaggccgatgtccagttcaagatggtccgcgacatgcaggccaacatcaagcgcatcgtcaacctcgaggcgcttgccgcaggcaccaacaagcgccgtatcatgcagcaggctgtcttcacggaactctgcaacatgttagatcccgggaagccttctttcactcccaaaaagggcaagccaagcgtagtcatgtttgttggtctgcaaggttcgggtaaaactaccacttgttcaaaatatgcttattatcatcagaagaaaggattcaaaccagcgctggtttgtgccgatacatttagagctggtgcttttgatcagttaaagcaaaatgcaacgaaggccaagattcccttttacggaagttacatggaatctgatccagtgaaaattgctgttgagggtgtggagaggttcaagaaagaaaactgtgatctcatcattgtggatacaagtggaaggcacaaacaagaagcagcactctttgaagaaatgcggcaagtttcggaagcaacaaaaccagacttggtgatttttgtgatggacagtagtataggtcaggctgcatttgatcaagcacaggcatttaaacaaagtgtttctgttggtgctgtgattattacaaaaatggatggtcacgcaaaaggtggcggcgcccttagcgcggtcgcagcaacaaaaagtcctgttatattcattggaactggagagcacattgatgattttgaagtttttgatgtgaagccatttgttagtcgcctgttaggtatgggagattggtcaggctttatggacaagattcatgaagtgatacctacagatcaacagcctgaccttctgcagaaactgtctgaaggaagctttagtctcaggcttatgtatgagcagttccagaaccttcttaaaatgggtcctattggccaggtcttctctatgttgccagggtttagcgctgaactaatgccaaaaggacatgagaaggaaagccaggctaagattaagcgctacatgacaatgatggattccatgactgatgcagggatgtcatggacatgctggaagagtacaagcgacttgctaaaatctggggcaagatgaagggtctcaagctccaaaagaaaggggacatgagtgcactgacccgcaacatgaatgttcagcagatgagcaaggcccttcctccgcagatgcttaaacagattggtggcatgggcggtctgcagtctctgatgaaacagatgggatcgaaggagatgagcggaatgtttggaggcatgggtggttgacttgtttttggtggatcgtcgctgtgatgctaaattgagagcgtttaatgctgcggtctgatcaccatcagagcattccctgaagatcagcctgcgctatgttttggatcaggcttagcgtagctccccatgcctgcaaatttaacctatatgaacagtacgtttgtcctctgaaaaaacggataaggtatatattacaaagcgaatatgcttatgtagatggttactccaaacattagtcttccagtggtggtgtcgttgggttggcaaaggatgcgccatggaactttcttgccagggtgcttgtttaggtgtgcactttgtgctcggcggaagttggaaattgactgccggtgatgcagcgctgtttgtgctgctgcaaggacagctgtgctacagccaacgtagaaaaaaataggcagccgagcagatccagatcgag

SEQ ID NO: 36337 - DNA, 377 bp, Zea Mays
atgggcaatgttgagggatgttgcatagggaacgcaaccttgtgtgctgcagcatcagaaaccagcaaagtttcaatttccattctaatgaagcgatgtgaggttatattgggtcaatttttggccgatgaaaatgatctaggagaacatcctttgcctagtgtgagggttgaagaaacgatctgtgttcttcaagagcttgctagactaattatagacattgatgcagcgaatactctcaacatacctccatatctgaagcaagctttgggggaaaacaaatcccatggacgggctcatttattgtctttgcttcccactttttctgagcttgttgtctcaaggaatcgcgatggacaatgatctacttggaagag

SEQ ID NO: 36338 - DNA, 595 bp, Zea Mays
aattatttcatataacctcggtcaaaaaatttatttcatataacatgtagaacagtttggggaatgggcatctgtcagaaaagatactgggtggatgacggagtcttacatgcatctaactttttcatttctcatttttttgggcactgcttctgttagatatgggcaatgttgagggatgttgcatagggaacgcaaccttgtgtgctgcagcatcagaaaccagcaaagtttcaatttccattctaatgaagcgatgtgaggttatattgggtcaatttttggccgatgaaaatgatctaggagaacatcctttgcctagtgtgagggttgaagaaacgatctgtgttcttcaagagcttgctagactaattatagacattgatgcagcgaatactctcaacatacctccatatctgaagcaagctttgggggaaaacaaatcccatggacgggctcatttattgtctttgcttcccactttttctgagcttgttgtctcaagagaagctagggtacgggagcttgtacaagtgctgctcagactcatttcctcggagctgggactacatcagctgacgtaacaactaatgat

SEQ ID NO: 36339 - DNA, 3063 bp, Zea Mays
gtttggggcaaacgacccaaagagggttttatcattggaattccctttttcttttgatagctacgagagtatttgcagccttgtatgccattagcatcttgcagtctcctggatcaaagaggtcagaaacttcaatggatcagcgtgatagtattattctcacactaaaaaatgttcaggcactaagaacactttttaatgttgcacatcgattacacaatgtccttggtccttcttgggttctggtattggagacactttcagcacttgatagagctattcattctccacatgcttcaactcaggaagtatcagcttctgtttcaaaactttcaagagatacatcgggacagtacagtgatttccatattctctcttctttaaattctcagttgtttgaaagttcagccttgatgaacatagctgcggtgaagtcacttctgtctgcattgcaccaattgtcaagtcagcacatatctggaagctctcaattgtctgtccagcagattgggagcatttcattttcagtggagcgcatgacaacgattcttgccaataatctgcatcgagttgaaccgatatgggatcaaattgctgctcatcatcttgagcttgcaaattgctctaacccacaattatgtaatatggcactgaactcattggatcaatcaatttgtttggtagcgggttctgaaaaatttcagggcatcagcgcagcacctcatcagtttccagaaagccatttggtcaaagaaagtgaaactgtatcatttgagtatgcagttttatctccattgatgatcctctattcctccaacaagaacgttgatgtacaaatgggtgcattaaagattcttttgcatgttcttgagagacatggagaaaagttatcatatagctggcccagcattcttcatatgttaaggatggttactgatgcatcagaaaaagacctcatctccttaggctttcagagcattcgtgtaataatgaatgaaggactggcaacaatccctgtacaatgccttgatgaatgcattttggtaactggagcatatggtactcagaaaactgatataaacataagtttaacatcagttggacttttgtggactgctactgattttattgtgaagggattagtcagcaagcctattgagcaagctagtcacatgaatgatgatgttcaatcatgtgaaatgactgaagaggcaaacagcaagcaagttcctccaaaactagttgattatagtatacttttcttttcagttttctctgtcctccagaaattgggttcagatgatcgtcctgaggttcgaaattcagctgttaggactctcttccagactctcagcatccatggccaaaagctttctaaaagtatgtgggaggattgtctttggttatatgttttccctatgttagagcatgtttcccacttggcatctacctcatctcgagatgagtggcaagggaaggaacttggaactcgggctggcaaagctgttcatatgcttatccatcacagtcgaaatacagcacaaaagcaatgggatgaaaccattgttcttgtacttggtggtattgcacggcttttgcgttcttttttctcttacctccaacaactgagaaaattttcttctggttgggtgcttttactcagttttataaaaaatagcatcttaaacggtagcaaggaggttgctattgctgccatcaattgcttgcagacgtttgtcggcgcaaactgtccaaagggcaatttggaatcctcgtatgttaaatctgttcttgatatttatgaacttgttcttcaaacttcatctaattttaagaatgactccactgataaagtgaagcaagaggttctccgtggtcttggtgatctttatgtccaagcacaatctctgtttactggtgacatgtatctaaggcttatggcaattatgcatctgatgatcaagactaccttgaatcctactgattatgatagtgaactgggtagtattcctgctgtacaacgaggtatattggaaatcattcctatgctacgcccaacagttgtattgtctcccatgtggacacatctgcttcttgagctgctatgctatcttaatgggcacgaaggccccctccagaaaaataatgaacaaacgcccgatcataattctcaagcactggtagacggtgcaaagcatgctcttgttgaaagaagcaatctcaatggcgggggtacaaaactggatatggtgggatctggttggggcattctatttgtagaaaaacttgtaccaatcattgccaaccttttcttggaggctccaccaaatgaaaggtttagtgtctctcctgaagtcattcaaggtcttggaaggtatttgctttttatgatttatatctgacaacataatgcaaaactaaggatatatccacttgtcaagaaggctttacgattattgcagaacagaagaacagctttacttattttcatttttccatgtcgaaaagggtattaattgtgaaacggcctctagcttagttggttaggtggtctgagtagcactccttagatcctgagttggactctctgtgtgagtgaatttcatgataaggttaaaaaaatcccctagttgtcccacgctaaagcataggtcttattgaagtgtataagtggattggctatcttctcccattaacttaagcttttgagtttaactggttagtgtgtccactttaacatgttatcaaagtcagagtcagaggtctcgagttcgaatcctggtataggctttatttgtgcctccacctatttatttctacgtttgcgcctttctctctggctgcacgtgagtgggagtgttgaagtgtataagtggattggctatcttcttccattagcttaaacttttgggttgaactggttagtgcgtccactctaacaggtctaaggttcgaccccggttgcggtcattctcacatgggctacgatgtcgtgtatgggtggagcagaggtttaggggttttctcaacttgtttaaggtcttcttagtattgtgagaatag

SEQ ID NO: 36340 - DNA, 3801 bp, Zea Mays
catgacttcactccgcactaatgttgagctcgagggtgaagcaggggagccttcttaccgtcgtttagttctccgtctggtttctcatgtcatcaggctatacagctcttcacttgttactgaaagtgaggttttccttaatatgcttgtaaaagttacccgtcaggacttaccattatggcatcagatacttgtccttgaaattttaaggggtttttgtgttgaagcctgcactctgcgcttgctgtttcagacatttgacttgaatcctgtgaataccaatgtcgtggagaacatagttagagcacttgctttggttgtagcttcaattcaggcttcagattcaagcgaagaaactctagccgctgttggtgggatgttcagtagtaaagctaaagggatcgagtggagtatggaccatgatgcatcaaatgctgctgttttggttgctagtgaagcacatactatcactctggcccttgaaggtctcttaggcgtagttttcactattgccactttgactgatgaagctctagatgttggtgagcttgaatcacctaaatgtgaatcaaatagtatggaatgtagtggacagttggcccttctttgtatggctttggtcaattcaacatggttaaccatccttgactctttgtcatttattttgacgaggtcacagggggaagctataatattagagatattgaaaggataccaagcattcactcaggcttgtggagttctccgtgccatagagcccttaaactctttcctagcatcactttgcaagtttacaatcaataatccaaatgaaggagagaagaaaagcatcttgcagtctcctggatcaaagaggtcagaaacttcaatggatcagcgtgatagtattattctcacactaaaaaatgttcaggcactaagaacactttttaatgttgcacatcgattacacaatgtccttggtccttcttgggttctggtattggagacactttcagcacttgatagagctattcattctccacatgcttcaactcaggaagtatcagcttctgtttcaaaactttcaagagatacatcgggacagtacagtgatttccatattctctcttctttaaattctcaggaagttgtttgaaagttcagccttgatgaacatagctgcggtgaagtcacttctgtctgcattgcaccaattgtcaagtcagcacatatctggaagctctcaattgtctgtccagcagattgggagcatttcattttcagtggagcgcatgacaacgattcttgccaataatctgcatcgagttgaaccgatatgggatcaaattgctgctcatcatcttgagcttgcaaattgctctaacccacaattatgtaatatggcactgaactcattggatcaatcaatttgtttggtagcgggttctgaaaaatttcagggcatcagcgcagcacctcatcagtttccagaaagccatttggtcaaagaaagtgaaactgtatcatttgagtatgcagttttatctccattgatgatcctctattcctccaacaagaacgttgatgtacaaatgggtgcattaaagattcttttgcatgttcttgagagacatggagaaaagttatcatatagctggcccagcattcttcatatgttaaggatggttactgatgcatcagaaaaagacctcatctccttaggctttcagagcattcgtgtaataatgaatgaaggactggcaacaatccctgtacaatgccttgatgaatgcattttggtaactggagcatatggtactcagaaaactgatataaacataagtttaacatcagttggacttttgtggactgctactgattttattgtgaagggattagtcagcaagcctattgagcaagctagtcacatgaatgatgatgttcaatcatgtgaaatgactgaagaggcaaacagcaagcaagttcctccaaaactagttgattatagtatacttttcttttcagttttctctgtcctccagaaattgggttcagatgatcgtcctgaggttcgaaattcagctgttaggactctcttccagactctcagcatccatggccaaaagctttctaaaagtatgtgggaggattgtctttggttatatgttttccctatgttagagcatgtttcccacttggcatctacctcatctcgagatgagtggcaagggaaggaacttggaactcgggctggcaaagctgttcatatgcttatccatcacagtcgaaatacagcacaaaagcaatgggatgaaaccattgttcttgtacttggtggtattgcacggcttttgcgttcttttttctcttacctccaacaactgagaaaattttcttctggttgggtgcttttactcagttttataaaaaatagcatcttaaacggtagcaaggaggttgctattgctgccatcaattgcttgcagacgtttgtcggcgcaaactgtccaaagggcaatttggaatcctcgtatgttaaatctgttcttgatatttatgaacttgttcttcaaacttcatctaattttaagaatgactccactgataaagtgaagcaagaggttctccgtggtcttggtgatctttatgtccaagcacaatctctgtttactggtgacatgtatctaaggcttatggcaattatgcatctgatgatcaagactaccttgaatcctactgattatgatagtgaactgggtagtattcctgctgtacaacgaggtatattggaaatcattcctatgctacgcccaacagttgtattgtctcccatgtggacacatctgcttcttgagctgctatgctatcttaatgggcacgaaggccccctccagaaaaataatgaacaaacgcccgatcataattctcaagcactggtagacggtgcaaagcatgctcttgttgaaagaagcaatctcaatggcgggggtacaaaactggatatggtgggatctggttggggcattctatttgtagaaaaacttgtaccaatcattgccaaccttttcttggaggctccaccaaatgaaaggtttagtgtctctcctgaagtcattcaaggtcttggaaggtatttgctttttatgatttatatctgacaacataatgcaaaactaaggatatatccacttgtcaagaaggctttacgattattgcagaacagaagaacagctttacttattttcatttttccatgtcgaaaagggtattaattgtgaaacggcctctagcttagttggttaggtggtctgagtagcactccttagatcctgagttggactctctgtgtgagtgaatttcatgataaggttaaaaaaatcccctagttgtcccacgctaaagcataggtcttattgaagtgtataagtggattggctatcttctcccattaacttaagcttttgagtttaactggttagtgtgtccactttaacatgttatcaaagtcagagtcagaggtctcgagttcgaatcctggtataggctttatttgtgcctccacctatttatttctacgtttgcgcctttctctctggctgcacgtgagtgggagtgttgaagtgtataagtggattggctatcttcttccattagcttaaacttttgggttgaactggttagtgcgtccactctaacaggtctaaggttcgaccccggttgcggtcattctcacatgggctacgatgtcgtgtatgggtggagcagaggtttaggggttttctcaacttgtttaaggtcttcttagtattgtgagaatag

SEQ ID NO: 36341 - DNA, 3809 bp, Zea Mays
ctcacttctcatgacttcactccgcactaatgttgagctcgagggtgaagcaggggagccttcttaccgtcgtttagttctccgtctggtttctcatgtcatcaggctatacagctcttcacttgttactgaaagtgaggttttccttaatatgcttgtaaaagttacccgtcaggacttaccattatggcatcagatacttgtccttgaaattttaaggggtttttgtgttgaagcctgcactctgcgcttgctgtttcagacatttgacttgaatcctgtgaataccaatgtcgtggagaacatagttagagcacttgctttggttgtagcttcaattcaggtggcttcagattcaagcgaagaaactctagccgctgttggtgggatgttcagtagtaaagctaaagggatcgagtggagtatggaccatgatgcatcaaatgctgctgttttggttgctagtgaagcacatactatcactctggcccttgaaggtctcttaggcgtagttttcactattgccactttgactgatgaagctctagatgttggtgagcttgaatcacctaaatgtgaatcaaatagtatggaatgtagtggacagttggcccttctttgtatggctttggtcaattcaacatggttaaccatccttgactctttgtcatttattttgacgaggtcacagggggaagctataatattagagatattgaaaggataccaagcattcactcaggcttgtggagttctccgtgccatagagcccttaaactctttcctagcatcactttgcaagtttacaatcaataatccaaatgaaggagagaagaaaagcatcttgcagtctcctggatcaaagaggtcagaaacttcaatggatcagcgtgatagtattattctcacactaaaaaatgttcaggcactaagaacactttttaatgttgcacatcgattacacaatgtccttggtccttcttgggttctggtattggagacactttcagcacttgatagagctattcattctccacatgcttcaactcaggaagtatcagcttctgtttcaaaactttcaagagatacatcgggacagtacagtgatttccatattctctcttctttaaattctcagttgtttgaaagttcagccttgatgaacatagctgcggtgaagtcacttctgtctgcattgcaccaattgtcaagtcagcacatatctggaagctctcaattgtctgtccagcagattgggagcatttcattttcagtggagcgcatgacaacgattcttgccaataatctgcatcgagttgaaccgatatgggatcaaattgctgctcatcatcttgagcttgcaaattgctctaacccacaattatgtaatatggcactgaactcattggatcaatcaatttgtttggtagcgggttctgaaaaatttcagggcatcagcgcagcacctcatcagtttccagaaagccatttggtcaaagaaagtgaaactgtatcatttgagtatgcagttttatctccattgatgatcctctattcctccaacaagaacgttgatgtacaaatgggtgcattaaagattcttttgcatgttcttgagagacatggagaaaagttatcatatagctggcccagcattcttcatatgttaaggatggttactgatgcatcagaaaaagacctcatctccttaggctttcagagcattcgtgtaataatgaatgaaggactggcaacaatccctgtacaatgccttgatgaatgcattttggtaactggagcatatggtactcagaaaactgatataaacataagtttaacatcagttggacttttgtggactgctactgattttattgtgaagggattagtcagcaagcctattgagcaagctagtcacatgaatgatgatgttcaatcatgtgaaatgactgaagaggcaaacagcaagcaagttcctccaaaactagttgattatagtatacttttcttttcagttttctctgtcctccagaaattgggttcagatgatcgtcctgaggttcgaaattcagctgttaggactctcttccagactctcagcatccatggccaaaagctttctaaaagtatgtgggaggattgtctttggttatatgttttccctatgttagagcatgtttcccacttggcatctacctcatctcgagatgagtggcaagggaaggaacttggaactcgggctggcaaagctgttcatatgcttatccatcacagtcgaaatacagcacaaaagcaatgggatgaaaccattgttcttgtacttggtggtattgcacggcttttgcgttcttttttctcttacctccaacaactgagaaaattttcttctggttgggtgcttttactcagttttataaaaaatagcatcttaaacggtagcaaggaggttgctattgctgccatcaattgcttgcagacgtttgtcggcgcaaactgtccaaagggcaatttggaatcctcgtatgttaaatctgttcttgatatttatgaacttgttcttcaaacttcatctaattttaagaatgactccactgataaagtgaagcaagaggttctccgtggtcttggtgatctttatgtccaagcacaatctctgtttactggtgacatgtatctaaggcttatggcaattatgcatctgatgatcaagactaccttgaatcctactgattatgatagtgaactgggtagtattcctgctgtacaacgaggtatattggaaatcattcctatgctacgcccaacagttgtattgtctcccatgtggacacatctgcttcttgagctgctatgctatcttaatgggcacgaaggccccctccagaaaaataatgaacaaacgcccgatcataattctcaagcactggtagacggtgcaaagcatgctcttgttgaaagaagcaatctcaatggcgggggtacaaaactggatatggtgggatctggttggggcattctatttgtagaaaaacttgtaccaatcattgccaaccttttcttggaggctccaccaaatgaaaggtttagtgtctctcctgaagtcattcaaggtcttggaaggtatttgctttttatgatttatatctgacaacataatgcaaaactaaggatatatccacttgtcaagaaggctttacgattattgcagaacagaagaacagctttacttattttcatttttccatgtcgaaaagggtattaattgtgaaacggcctctagcttagttggttaggtggtctgagtagcactccttagatcctgagttggactctctgtgtgagtgaatttcatgataaggttaaaaaaatcccctagttgtcccacgctaaagcataggtcttattgaagtgtataagtggattggctatcttctcccattaacttaagcttttgagtttaactggttagtgtgtccactttaacatgttatcaaagtcagagtcagaggtctcgagttcgaatcctggtataggctttatttgtgcctccacctatttatttctacgtttgcgcctttctctctggctgcacgtgagtgggagtgttgaagtgtataagtggattggctatcttcttccattagcttaaacttttgggttgaactggttagtgcgtccactctaacaggtctaaggttcgaccccggttgcggtcattctcacatgggctacgatgtcgtgtatgggtggagcagaggtttaggggttttctcaacttgtttaaggtcttcttagtattgtgagaatag

SEQ ID NO: 36342 - DNA, 3766 bp, Zea Mays
ctcacttctcatgacttcactccgcactaatgttgagctcgagggtgaagcaggggagccttcttaccgtcgtttagttctccgtctggtttctcatgtcatcaggctatacagctcttcacttgttactgaaagtgaggttttccttaatatgcttgtaaaagttacccgtcaggacttaccattatggcatcagatacttgtccttgaaattttaaggggtttttgtgttgaagcctgcactctgcgcttgctgtttcagacatttgacttgaatcctgtgaataccaatgtcgtggagaacatagttagagcacttgctttggttgtagcttcaattcaggcttcagattcaagcgaagaaactctagccgctgttggtgggatgttcagtagtaaagctaaagggatcgagtggagtatggaccatgatgcatcaaatgctgctgttttggttgctagtgaagcacatactatcactctggcccttgaaggtctcttaggcgtagttttcactattgccactttgactgatgaagctctagatgttggtgagcttgaatcacctaaatgtgaatcaaatagtatggaatgtagtggacagttggcccttctttgtatggctttggtcaattcaacatggttaaccatccttgactctttgtcatttattttgacgaggtcacagggggaagctataatattagagatattgaaaggataccaagcattcactcaggcttgtggagttctccgtgccatagagcccttaaactctttcctagcatcactttgcaagtttacaatcaataatccaaatgaaggagagaagaaaagcatcttgcagtctcctggatcaaagaggtcagaaacttcaatggatcagcgtgatagtattattctcacactaaaaaatgttcaggcactaagaacactttttaatgttgcacatcgattacacaatgtccttggtccttcttgggttctggtattggagacactttcagcacttgatagagctattcattctccacatgcttcaactcaggaagtatcagcttctgtttcaaaactttcaagagatacatcgggacagtacagtgatttccatattctctcttctttaaattctcagttgtttgaaagttcagccttgatgaacatagctgcggtgaagtcacttctgtctgcattgcaccaattgtcaagtcagcacatatctggaagctctcaattgtctgtccagcagattgggagcatttcattttcagtggagcgcatgacaacgattcttgccaataatctgcatcgagttgaaccgatatgggatcaaattgctgctcatcatcttgagcttgcaaattgctctaacccacaattatgtaatatggcactgaactcattggatcaatcaatttgtttggtagcgggttctgaaaaatttcagggcatcagcgcagcacctcatcagtttccagaaagccatttttatctccattgatgatcctctattcctccaacaagaacgttgatgtacaaatgggtgcattaaagattcttttgcatgttcttgagagacatggagaaaagttatcatatagctggcccagcattcttcatatgttaaggatggttactgatgcatcagaaaaagacctcatctccttaggctttcagagcattcgtgtaataatgaatgaaggactggcaacaatccctgtacaatgccttgatgaatgcattttggtaactggagcatatggtactcagaaaactgatataaacataagtttaacatcagttggacttttgtggactgctactgattttattgtgaagggattagtcagcaagcctattgagcaagctagtcacatgaatgatgatgttcaatcatgtgaaatgactgaagaggcaaacagcaagcaagttcctccaaaactagttgattatagtatacttttcttttcagttttctctgtcctccagaaattgggttcagatgatcgtcctgaggttcgaaattcagctgttaggactctcttccagactctcagcatccatggccaaaagctttctaaaagtatgtgggaggattgtctttggttatatgttttccctatgttagagcatgtttcccacttggcatctacctcatctcgagatgagtggcaagggaaggaacttggaactcgggctggcaaagctgttcatatgcttatccatcacagtcgaaatacagcacaaaagcaatgggatgaaaccattgttcttgtacttggtggtattgcacggcttttgcgttcttttttctcttacctccaacaactgagaaaattttcttctggttgggtgcttttactcagttttataaaaaatagcatcttaaacggtagcaaggaggttgctattgctgccatcaattgcttgcagacgtttgtcggcgcaaactgtccaaagggcaatttggaatcctcgtatgttaaatctgttcttgatatttatgaacttgttcttcaaacttcatctaattttaagaatgactccactgataaagtgaagcaagaggttctccgtggtcttggtgatctttatgtccaagcacaatctctgtttactggtgacatgtatctaaggcttatggcaattatgcatctgatgatcaagactaccttgaatcctactgattatgatagtgaactgggtagtattcctgctgtacaacgaggtatattggaaatcattcctatgctacgcccaacagttgtattgtctcccatgtggacacatctgcttcttgagctgctatgctatcttaatgggcacgaaggccccctccagaaaaataatgaacaaacgcccgatcataattctcaagcactggtagacggtgcaaagcatgctcttgttgaaagaagcaatctcaatggcgggggtacaaaactggatatggtgggatctggttggggcattctatttgtagaaaaacttgtaccaatcattgccaaccttttcttggaggctccaccaaatgaaaggtttagtgtctctcctgaagtcattcaaggtcttggaaggtatttgctttttatgatttatatctgacaacataatgcaaaactaaggatatatccacttgtcaagaaggctttacgattattgcagaacagaagaacagctttacttattttcatttttccatgtcgaaaagggtattaattgtgaaacggcctctagcttagttggttaggtggtctgagtagcactccttagatcctgagttggactctctgtgtgagtgaatttcatgataaggttaaaaaaatcccctagttgtcccacgctaaagcataggtcttattgaagtgtataagtggattggctatcttctcccattaacttaagcttttgagtttaactggttagtgtgtccactttaacatgttatcaaagtcagagtcagaggtctcgagttcgaatcctggtataggctttatttgtgcctccacctatttatttctacgtttgcgcctttctctctggctgcacgtgagtgggagtgttgaagtgtataagtggattggctatcttcttccattagcttaaacttttgggttgaactggttagtgcgtccactctaacaggtctaaggttcgaccccggttgcggtcattctcacatgggctacgatgtcgtgtatgggtggagcagaggtttaggggttttctcaacttgtttaaggtcttcttagtattgtgagaatag

SEQ ID NO: 36343 - DNA, 3623 bp, Zea Mays
ctcacttctcatgacttcactccgcactaatgttgagctcgagggtgaagcaggggagccttcttaccgtcgtttagttctccgtctggtttctcatgtcatcaggctatacagctcttcacttgttactgaaagtgaggttttccttaatatgcttgtaaaagttacccgtcaggacttaccattatggcatcagatacttgtccttgaaattttaaggggtttttgtgttgaagcctgcactctgcgcttgctgtttcagacatttgacttgaatcctgtgaataccaatgtcgtggagaacatagttagagcacttgctttggttgtagcttcaattcaggcttcagattcaagcgaagaaactctagccgctgttggtgggatgttcagtagtaaagctaaagggatcgagtggagtatggaccatgatgcatcaaatgctgctgttttggttgctagtgaagcacatactatcactctggcccttgaaggtctcttaggcgtagttttcactattgccactttgactgatgaagctctagatgttggtgagcttgaatcacctaaatgtgaatcaaatagtatggaatgtagtggacagttggcccttctttgtatggctttggtcaattcaacatggttaaccatccttgactctttgtcatttattttgacgaggtcacagggggaagctataatattagagatattgaaaggataccaagcattcactcaggcactaagaacactttttaatgttgcacatcgattacacaatgtccttggtccttcttgggttctggtattggagacactttcagcacttgatagagctattcattctccacatgcttcaactcaggaagtatcagcttctgtttcaaaactttcaagagatacatcgggacagtacagtgatttccatattctctcttctttaaattctcagttgtttgaaagttcagccttgatgaacatagctgcggtgaagtcacttctgtctgcattgcaccaattgtcaagtcagcacatatctggaagctctcaattgtctgtccagcagattgggagcatttcattttcagtggagcgcatgacaacgattcttgccaataatctgcatcgagttgaaccgatatgggatcaaattgctgctcatcatcttgagcttgcaaattgctctaacccacaattatgtaatatggcactgaactcattggatcaatcaatttgtttggtagcgggttctgaaaaatttcagggcatcagcgcagcacctcatcagtttccagaaagccatttggtcaaagaaagtgaaactgtatcatttgagtatgcagttttatctccattgatgatcctctattcctccaacaagaacgttgatgtacaaatgggtgcattaaagattcttttgcatgttcttgagagacatggagaaaagttatcatatagctggcccagcattcttcatatgttaaggatggttactgatgcatcagaaaaagacctcatctccttaggctttcagagcattcgtgtaataatgaatgaaggactggcaacaatccctgtacaatgccttgatgaatgcattttggtaactggagcatatggtactcagaaaactgatataaacataagtttaacatcagttggacttttgtggactgctactgattttattgtgaagggattagtcagcaagcctattgagcaagctagtcacatgaatgatgatgttcaatcatgtgaaatgactgaagaggcaaacagcaagcaagttcctccaaaactagttgattatagtatacttttcttttcagttttctctgtcctccagaaattgggttcagatgatcgtcctgaggttcgaaattcagctgttaggactctcttccagactctcagcatccatggccaaaagctttctaaaagtatgtgggaggattgtctttggttatatgttttccctatgttagagcatgtttcccacttggcatctacctcatctcgagatgagtggcaagggaaggaacttggaactcgggctggcaaagctgttcatatgcttatccatcacagtcgaaatacagcacaaaagcaatgggatgaaaccattgttcttgtacttggtggtattgcacggcttttgcgttcttttttctcttacctccaacaactgagaaaattttcttctggttgggtgcttttactcagttttataaaaaatagcatcttaaacggtagcaaggaggttgctattgctgccatcaattgcttgcagacgtttgtcggcgcaaactgtccaaagggcaatttggaatcctcgtatgttaaatctgttcttgatatttatgaacttgttcttcaaacttcatctaattttaagaatgactccactgataaagtgaagcaagaggttctccgtggtcttggtgatctttatgtccaagcacaatctctgtttactggtgacatgtatctaaggcttatggcaattatgcatctgatgatcaagactaccttgaatcctactgattatgatagtgaactgggtagtattcctgctgtacaacgaggtatattggaaatcattcctatgctacgcccaacagttgtattgtctcccatgtggacacatctgcttcttgagctgctatgctatcttaatgggcacgaaggccccctccagaaaaataatgaacaaacgcccgatcataattctcaagcactggtagacggtgcaaagcatgctcttgttgaaagaagcaatctcaatggcgggggtacaaaactggatatggtgggatctggttggggcattctatttgtagaaaaacttgtaccaatcattgccaaccttttcttggaggctccaccaaatgaaaggtttagtgtctctcctgaagtcattcaaggtcttggaaggtatttgctttttatgatttatatctgacaacataatgcaaaactaaggatatatccacttgtcaagaaggctttacgattattgcagaacagaagaacagctttacttattttcatttttccatgtcgaaaagggtattaattgtgaaacggcctctagcttagttggttaggtggtctgagtagcactccttagatcctgagttggactctctgtgtgagtgaatttcatgataaggttaaaaaaatcccctagttgtcccacgctaaagcataggtcttattgaagtgtataagtggattggctatcttctcccattaacttaagcttttgagtttaactggttagtgtgtccactttaacatgttatcaaagtcagagtcagaggtctcgagttcgaatcctggtataggctttatttgtgcctccacctatttatttctacgtttgcgcctttctctctggctgcacgtgagtgggagtgttgaagtgtataagtggattggctatcttcttccattagcttaaacttttgggttgaactggttagtgcgtccactctaacaggtctaaggttcgaccccggttgcggtcattctcacatgggctacgatgtcgtgtatgggtggagcagaggtttaggggttttctcaacttgtttaaggtcttcttagtattgtgagaatag

SEQ ID NO: 36344 - DNA, 3806 bp, Zea Mays
ctcacttctcatgacttcactccgcactaatgttgagctcgagggtgaagcaggggagccttcttaccgtcgtttagttctccgtctggtttctcatgtcatcaggctatacagctcttcacttgttactgaaagtgaggttttccttaatatgcttgtaaaagttacccgtcaggacttaccattatggcatcagatacttgtccttgaaattttaaggggtttttgtgttgaagcctgcactctgcgcttgctgtttcagacatttgacttgaatcctgtgaataccaatgtcgtggagaacatagttagagcacttgctttggttgtagcttcaattcaggcttcagattcaagcgaagaaactctagccgctgttggtgggatgttcagtagtaaagctaaagggatcgagtggagtatggaccatgatgcatcaaatgctgctgttttggttgctagtgaagcacatactatcactctggcccttgaaggtctcttaggcgtagttttcactattgccactttgactgatgaagctctagatgttggtgagcttgaatcacctaaatgtgaatcaaatagtatggaatgtagtggacagttggcccttctttgtatggctttggtcaattcaacatggttaaccatccttgactctttgtcatttattttgacgaggtcacagggggaagctataatattagagatattgaaaggataccaagcattcactcaggcttgtggagttctccgtgccatagagcccttaaactctttcctagcatcactttgcaagtttacaatcaataatccaaatgaaggagagaagaaaagcatcttgcagtctcctggatcaaagaggtcagaaacttcaatggatcagcgtgatagtattattctcacactaaaaaatgttcaggcactaagaacactttttaatgttgcacatcgattacacaatgtccttggtccttcttgggttctggtattggagacactttcagcacttgatagagctattcattctccacatgcttcaactcaggaagtatcagcttctgtttcaaaactttcaagagatacatcgggacagtacagtgatttccatattctctcttctttaaattctcagttgtttgaaagttcagccttgatgaacatagctgcggtgaagtcacttctgtctgcattgcaccaattgtcaagtcagcacatatctggaagctctcaattgtctgtccagcagattgggagcatttcattttcagtggagcgcatgacaacgattcttgccaataatctgcatcgagttgaaccgatatgggatcaaattgctgctcatcatcttgagcttgcaaattgctctaacccacaattatgtaatatggcactgaactcattggatcaatcaatttgtttggtagcgggttctgaaaaatttcagggcatcagcgcagcacctcatcagtttccagaaagccatttggtcaaagaaagtgaaactgtatcatttgagtatgcagttttatctccattgatgatcctctattcctccaacaagaacgttgatgtacaaatgggtgcattaaagattcttttgcatgttcttgagagacatggagaaaagttatcatatagctggcccagcattcttcatatgttaaggatggttactgatgcatcagaaaaagacctcatctccttaggctttcagagcattcgtgtaataatgaatgaaggactggcaacaatccctgtacaatgccttgatgaatgcattttggtaactggagcatatggtactcagaaaactgatataaacataagtttaacatcagttggacttttgtggactgctactgattttattgtgaagggattagtcagcaagcctattgagcaagctagtcacatgaatgatgatgttcaatcatgtgaaatgactgaagaggcaaacagcaagcaagttcctccaaaactagttgattatagtatacttttcttttcagttttctctgtcctccagaaattgggttcagatgatcgtcctgaggttcgaaattcagctgttaggactctcttccagactctcagcatccatggccaaaagctttctaaaagtatgtgggaggattgtctttggttatatgttttccctatgttagagcatgtttcccacttggcatctacctcatctcgagatgagtggcaagggaaggaacttggaactcgggctggcaaagctgttcatatgcttatccatcacagtcgaaatacagcacaaaagcaatgggatgaaaccattgttcttgtacttggtggtattgcacggcttttgcgttcttttttctcttacctccaacaactgagaaaattttcttctggttgggtgcttttactcagttttataaaaaatagcatcttaaacggtagcaaggaggttgctattgctgccatcaattgcttgcagacgtttgtcggcgcaaactgtccaaagggcaatttggaatcctcgtatgttaaatctgttcttgatatttatgaacttgttcttcaaacttcatctaattttaagaatgactccactgataaagtgaagcaagaggttctccgtggtcttggtgatctttatgtccaagcacaatctctgtttactggtgacatgtatctaaggcttatggcaattatgcatctgatgatcaagactaccttgaatcctactgattatgatagtgaactgggtagtattcctgctgtacaacgaggtatattggaaatcattcctatgctacgcccaacagttgtattgtctcccatgtggacacatctgcttcttgagctgctatgctatcttaatgggcacgaaggccccctccagaaaaataatgaacaaacgcccgatcataattctcaagcactggtagacggtgcaaagcatgctcttgttgaaagaagcaatctcaatggcgggggtacaaaactggatatggtgggatctggttggggcattctatttgtagaaaaacttgtaccaatcattgccaaccttttcttggaggctccaccaaatgaaaggtttagtgtctctcctgaagtcattcaaggtcttggaaggtatttgctttttatgatttatatctgacaacataatgcaaaactaaggatatatccacttgtcaagaaggctttacgattattgcagaacagaagaacagctttacttattttcatttttccatgtcgaaaagggtattaattgtgaaacggcctctagcttagttggttaggtggtctgagtagcactccttagatcctgagttggactctctgtgtgagtgaatttcatgataaggttaaaaaaatcccctagttgtcccacgctaaagcataggtcttattgaagtgtataagtggattggctatcttctcccattaacttaagcttttgagtttaactggttagtgtgtccactttaacatgttatcaaagtcagagtcagaggtctcgagttcgaatcctggtataggctttatttgtgcctccacctatttatttctacgtttgcgcctttctctctggctgcacgtgagtgggagtgttgaagtgtataagtggattggctatcttcttccattagcttaaacttttgggttgaactggttagtgcgtccactctaacaggtctaaggttcgaccccggttgcggtcattctcacatgggctacgatgtcgtgtatgggtggagcagaggtttaggggttttctcaacttgtttaaggtcttcttagtattgtgagaatag

SEQ ID NO: 36345 - DNA, 3740 bp, Zea Mays
ctcacttctcatgacttcactccgcactaatgttgagctcgagggtgaagcaggggagccttcttaccgtcgtttagttctccgtctggtttctcatgtcatcaggctatacagctcttcacttgttactgaaagtgaggttttccttaatatgcttgtaaaagttacccgtcaggacttaccattatggcatcagatacttgtccttgaaattttaaggggtttttgtgttgaagcctgcactctgcgcttgctgtttcagacatttgacttgaatcctgtgaataccaatgtcgtggagaacatagttagagcacttgctttggttgtagcttcaattcaggcttcagattcaagcgaagaaactctagccgctgttggtgggatgttcagtagtaaagctaaagggatcgagtggagtatggaccatgatgcatcaaatgctgctgttttggttgctagtgaagcacatactatcactctggcccttgaaggtctcttaggcgtagttttcactattgccactttgactgatgaagctctagatgttggtgagcttgaatcacctaaatgtgaatcaaatagtatggaatgtagtggacagttggcccttctttgtatggctttggtcaattcaacatggttaaccatccttgactctttgtcatttattttgacgaggtcacagggggaagctataatattagagatattgaaaggataccaagcattcactcaggcttgtggagttctccgtgccatagagcccttaaactctttcctagcatcactttgcaagtttacaatcaataatccaaatgaaggagagaagaaaagcatcttgcagtctcctggatcaaagaggtcagaaacttcaatggatcagcgtgatagtattattctcacactaaaaaatgttcaggtattggagacactttcagcacttgatagagctattcattctccacatgcttcaactcaggaagtatcagcttctgtttcaaaactttcaagagatacatcgggacagtacagtgatttccatattctctcttctttaaattctcagttgtttgaaagttcagccttgatgaacatagctgcggtgaagtcacttctgtctgcattgcaccaattgtcaagtcagcacatatctggaagctctcaattgtctgtccagcagattgggagcatttcattttcagtggagcgcatgacaacgattcttgccaataatctgcatcgagttgaaccgatatgggatcaaattgctgctcatcatcttgagcttgcaaattgctctaacccacaattatgtaatatggcactgaactcattggatcaatcaatttgtttggtagcgggttctgaaaaatttcagggcatcagcgcagcacctcatcagtttccagaaagccatttggtcaaagaaagtgaaactgtatcatttgagtatgcagttttatctccattgatgatcctctattcctccaacaagaacgttgatgtacaaatgggtgcattaaagattcttttgcatgttcttgagagacatggagaaaagttatcatatagctggcccagcattcttcatatgttaaggatggttactgatgcatcagaaaaagacctcatctccttaggctttcagagcattcgtgtaataatgaatgaaggactggcaacaatccctgtacaatgccttgatgaatgcattttggtaactggagcatatggtactcagaaaactgatataaacataagtttaacatcagttggacttttgtggactgctactgattttattgtgaagggattagtcagcaagcctattgagcaagctagtcacatgaatgatgatgttcaatcatgtgaaatgactgaagaggcaaacagcaagcaagttcctccaaaactagttgattatagtatacttttcttttcagttttctctgtcctccagaaattgggttcagatgatcgtcctgaggttcgaaattcagctgttaggactctcttccagactctcagcatccatggccaaaagctttctaaaagtatgtgggaggattgtctttggttatatgttttccctatgttagagcatgtttcccacttggcatctacctcatctcgagatgagtggcaagggaaggaacttggaactcgggctggcaaagctgttcatatgcttatccatcacagtcgaaatacagcacaaaagcaatgggatgaaaccattgttcttgtacttggtggtattgcacggcttttgcgttcttttttctcttacctccaacaactgagaaaattttcttctggttgggtgcttttactcagttttataaaaaatagcatcttaaacggtagcaaggaggttgctattgctgccatcaattgcttgcagacgtttgtcggcgcaaactgtccaaagggcaatttggaatcctcgtatgttaaatctgttcttgatatttatgaacttgttcttcaaacttcatctaattttaagaatgactccactgataaagtgaagcaagaggttctccgtggtcttggtgatctttatgtccaagcacaatctctgtttactggtgacatgtatctaaggcttatggcaattatgcatctgatgatcaagactaccttgaatcctactgattatgatagtgaactgggtagtattcctgctgtacaacgaggtatattggaaatcattcctatgctacgcccaacagttgtattgtctcccatgtggacacatctgcttcttgagctgctatgctatcttaatgggcacgaaggccccctccagaaaaataatgaacaaacgcccgatcataattctcaagcactggtagacggtgcaaagcatgctcttgttgaaagaagcaatctcaatggcgggggtacaaaactggatatggtgggatctggttggggcattctatttgtagaaaaacttgtaccaatcattgccaaccttttcttggaggctccaccaaatgaaaggtttagtgtctctcctgaagtcattcaaggtcttggaaggtatttgctttttatgatttatatctgacaacataatgcaaaactaaggatatatccacttgtcaagaaggctttacgattattgcagaacagaagaacagctttacttattttcatttttccatgtcgaaaagggtattaattgtgaaacggcctctagcttagttggttaggtggtctgagtagcactccttagatcctgagttggactctctgtgtgagtgaatttcatgataaggttaaaaaaatcccctagttgtcccacgctaaagcataggtcttattgaagtgtataagtggattggctatcttctcccattaacttaagcttttgagtttaactggttagtgtgtccactttaacatgttatcaaagtcagagtcagaggtctcgagttcgaatcctggtataggctttatttgtgcctccacctatttatttctacgtttgcgcctttctctctggctgcacgtgagtgggagtgttgaagtgtataagtggattggctatcttcttccattagcttaaacttttgggttgaactggttagtgcgtccactctaacaggtctaaggttcgaccccggttgcggtcattctcacatgggctacgatgtcgtgtatgggtggagcagaggtttaggggttttctcaacttgtttaaggtcttcttagtattgtgagaatag

SEQ ID NO: 36346 - DNA, 3626 bp, Zea Mays
ctcacttctcatgacttcactccgcactaatgttgagctcgagggtgaagcaggggagccttcttaccgtcgtttagttctccgtctggtttctcatgtcatcaggctatacagctcttcacttgttactgaaagtgaggttttccttaatatgcttgtaaaagttacccgtcaggacttaccattatggcatcagatacttgtccttgaaattttaaggggtttttgtgttgaagcctgcactctgcgcttgctgtttcagacatttgacttgaatcctgtgaataccaatgtcgtggagaacatagttagagcacttgctttggttgtagcttcaattcaggtggcttcagattcaagcgaagaaactctagccgctgttggtgggatgttcagtagtaaagctaaagggatcgagtggagtatggaccatgatgcatcaaatgctgctgttttggttgctagtgaagcacatactatcactctggcccttgaaggtctcttaggcgtagttttcactattgccactttgactgatgaagctctagatgttggtgagcttgaatcacctaaatgtgaatcaaatagtatggaatgtagtggacagttggcccttctttgtatggctttggtcaattcaacatggttaaccatccttgactctttgtcatttattttgacgaggtcacagggggaagctataatattagagatattgaaaggataccaagcattcactcaggcactaagaacactttttaatgttgcacatcgattacacaatgtccttggtccttcttgggttctggtattggagacactttcagcacttgatagagctattcattctccacatgcttcaactcaggaagtatcagcttctgtttcaaaactttcaagagatacatcgggacagtacagtgatttccatattctctcttctttaaattctcagttgtttgaaagttcagccttgatgaacatagctgcggtgaagtcacttctgtctgcattgcaccaattgtcaagtcagcacatatctggaagctctcaattgtctgtccagcagattgggagcatttcattttcagtggagcgcatgacaacgattcttgccaataatctgcatcgagttgaaccgatatgggatcaaattgctgctcatcatcttgagcttgcaaattgctctaacccacaattatgtaatatggcactgaactcattggatcaatcaatttgtttggtagcgggttctgaaaaatttcagggcatcagcgcagcacctcatcagtttccagaaagccatttggtcaaagaaagtgaaactgtatcatttgagtatgcagttttatctccattgatgatcctctattcctccaacaagaacgttgatgtacaaatgggtgcattaaagattcttttgcatgttcttgagagacatggagaaaagttatcatatagctggcccagcattcttcatatgttaaggatggttactgatgcatcagaaaaagacctcatctccttaggctttcagagcattcgtgtaataatgaatgaaggactggcaacaatccctgtacaatgccttgatgaatgcattttggtaactggagcatatggtactcagaaaactgatataaacataagtttaacatcagttggacttttgtggactgctactgattttattgtgaagggattagtcagcaagcctattgagcaagctagtcacatgaatgatgatgttcaatcatgtgaaatgactgaagaggcaaacagcaagcaagttcctccaaaactagttgattatagtatacttttcttttcagttttctctgtcctccagaaattgggttcagatgatcgtcctgaggttcgaaattcagctgttaggactctcttccagactctcagcatccatggccaaaagctttctaaaagtatgtgggaggattgtctttggttatatgttttccctatgttagagcatgtttcccacttggcatctacctcatctcgagatgagtggcaagggaaggaacttggaactcgggctggcaaagctgttcatatgcttatccatcacagtcgaaatacagcacaaaagcaatgggatgaaaccattgttcttgtacttggtggtattgcacggcttttgcgttcttttttctcttacctccaacaactgagaaaattttcttctggttgggtgcttttactcagttttataaaaaatagcatcttaaacggtagcaaggaggttgctattgctgccatcaattgcttgcagacgtttgtcggcgcaaactgtccaaagggcaatttggaatcctcgtatgttaaatctgttcttgatatttatgaacttgttcttcaaacttcatctaattttaagaatgactccactgataaagtgaagcaagaggttctccgtggtcttggtgatctttatgtccaagcacaatctctgtttactggtgacatgtatctaaggcttatggcaattatgcatctgatgatcaagactaccttgaatcctactgattatgatagtgaactgggtagtattcctgctgtacaacgaggtatattggaaatcattcctatgctacgcccaacagttgtattgtctcccatgtggacacatctgcttcttgagctgctatgctatcttaatgggcacgaaggccccctccagaaaaataatgaacaaacgcccgatcataattctcaagcactggtagacggtgcaaagcatgctcttgttgaaagaagcaatctcaatggcgggggtacaaaactggatatggtgggatctggttggggcattctatttgtagaaaaacttgtaccaatcattgccaaccttttcttggaggctccaccaaatgaaaggtttagtgtctctcctgaagtcattcaaggtcttggaaggtatttgctttttatgatttatatctgacaacataatgcaaaactaaggatatatccacttgtcaagaaggctttacgattattgcagaacagaagaacagctttacttattttcatttttccatgtcgaaaagggtattaattgtgaaacggcctctagcttagttggttaggtggtctgagtagcactccttagatcctgagttggactctctgtgtgagtgaatttcatgataaggttaaaaaaatcccctagttgtcccacgctaaagcataggtcttattgaagtgtataagtggattggctatcttctcccattaacttaagcttttgagtttaactggttagtgtgtccactttaacatgttatcaaagtcagagtcagaggtctcgagttcgaatcctggtataggctttatttgtgcctccacctatttatttctacgtttgcgcctttctctctggctgcacgtgagtgggagtgttgaagtgtataagtggattggctatcttcttccattagcttaaacttttgggttgaactggttagtgcgtccactctaacaggtctaaggttcgaccccggttgcggtcattctcacatgggctacgatgtcgtgtatgggtggagcagaggtttaggggttttctcaacttgtttaaggtcttcttagtattgtgagaatag

SEQ ID NO: 36347 - DNA, 3804 bp, Zea Mays
ctcacttctcatgacttcactccgcactaatgttgagctcgagggtgaagcaggggagccttcttaccgtcgtttagttctccgtctggtttctcatgtcatcaggctatacagctcttcacttgttactgaaagtgaggttttccttaatatgcttgtaaaagttacccgtcaggacttaccattatggcatcagatacttgtccttgaaattttaaggggtttttgtgttgaagcctgcactctgcgcttgctgtttcagacatttgacttgaatcctgtgaataccaatgtcgtggagaacatagttagagcacttgctttggttgtagcttcaattcaggtggcttcagattcaagcgaagaaactctagccgctgttggtgggatgttcagtagtaaagctaaagggatcgagtggagtatggaccatgatgcatcaaatgctgctgttttggttgctagtgaagcacatactatcactctggcccttgaaggtctcttaggcgtagttttcactattgccactttgactgatgaagctctagatgttggtgagcttgaatcacctaaatgtgaatcaaatagtatggaatgtagtggacagttggcccttctttgtatggctttggtcaattcaacatggttaaccatccttgactctttgtcatttattttgacgaggtcacagggggaagctataatattagagatattgaaaggataccaagcattcactcaggcttgtggagttctccgtgccatagagcccttaaactctttcctagcatcactttgcaagtttacaatcaataatccaaatgaaggagagaagaaaagcatcttgcagtctcctggatcaaagaggtcagaaacttcaatggatcagcgtgatagtattattctcacactaaaaaatgttcaggcactaagaacactttttaatgttgcacatcgattacacaatgtccttggtccttcttgggttctggtattggagacactttcagcacttgatagagctattcattctccacatgcttcaactcaggaagtatcagcttctgtttcaaaactttcaagagatacatcgggacagtacagtgatttccatattctctcttctttaaattctcagttgtttgaaagttcagccttgatgaacatagctgcggtgaagtcacttctgtctgcattgcaccaattgtcaagtcagcacatatctggaagctctcaattgtctgtccagcagattgggagcatttcattttcagtggagcgcatgacaacgattcttgccaataatctgcatcgagttgaaccgatatgggatcaaattgctgctcatcatcttgagcttgcaaattgctctaacccacaattatgtaatatggcactgaactcattggatcaatcaatttgtttggtagcgggttctgaaaaatttcagggcatcagcgcagcacctcatcagtttccagaaagccatttggtcaaagaaagtgaaactgtatcatttgagtatgcagttttatctccattgatgatcctctattcctccaacaagaacgttgatgtacaaatgggtgcattaaagattcttttgcatgttcttgagagacatggagaaaagttatcatatagctggcccagcattcttcatatgttaaggatggttactgatgcatcagaaaaagacctcatctccttaggctttcagagcattcgtgtaataatgaatgaaggactggcaacaatccctgtacaatgccttgatgaatgcattttggtaactggagcatatggtactcagaaaactgatataaacataagtttaacatcagttggacttttgtggactgctactgattttattgtgaagggattagtcagcaagcctattgagcaagctagtcacatgaatgatgatgttcaatcatgtgaaatgactgaagaggcaaacagcaagcaagttcctccaaaactagttgattatagtatacttttcttttcagttttctctgtcctccagaaattgggttcagatgatcgtcctgaggttcgaaattcagctgttaggactctcttccagactctcagcatccatggccaaaagctttctaaaagtatgtgggaggattgtctttggttatatgttttccctatgttagagcatgtttcccacttggcatctacctcatctcgagatgagtggcaagggaaggaacttggaactcgggctggcaaagctgttcatatgcttatccatcacagtcgaaatacagcacaaaagcaatgggatgaaaccattgttcttgtacttggtggtattgcacggcttttgcgttcttttttctcttacctccaacaactgagaaaattttcttctggttgggtgcttttactcagttttataaaaaatagcatcttaaacggtagcaaggaggttgctattgctgccatcaattgcttgcagacgtttgtcggcgcaaactgtccaaagggcaatttggaatcctcgtatgttaaatctgttcttgatatttatgaacttgttcttcaaacttcatctaattttaagaatgactccactgataaagtgaagcaagaggttctccgtggtcttggtgatctttatgtccaagcacaatctctgtttactggtgacatgtatctaaggcttatggcaattatgcatctgatgatcaagactaccttgaatcctactgattatgatagtgaactgtattcctgctgtacaacgaggtatattggaaatcattcctatgctacgcccaacagttgtattgtctcccatgtggacacatctgcttcttgagctgctatgctatcttaatgggcacgaaggccccctccagaaaaataatgaacaaacgcccgatcataattctcaagcactggtagacggtgcaaagcatgctcttgttgaaagaagcaatctcaatggcgggggtacaaaactggatatggtgggatctggttggggcattctatttgtagaaaaacttgtaccaatcattgccaaccttttcttggaggctccaccaaatgaaaggtttagtgtctctcctgaagtcattcaaggtcttggaaggtatttgctttttatgatttatatctgacaacataatgcaaaactaaggatatatccacttgtcaagaaggctttacgattattgcagaacagaagaacagctttacttattttcatttttccatgtcgaaaagggtattaattgtgaaacggcctctagcttagttggttaggtggtctgagtagcactccttagatcctgagttggactctctgtgtgagtgaatttcatgataaggttaaaaaaatcccctagttgtcccacgctaaagcataggtcttattgaagtgtataagtggattggctatcttctcccattaacttaagcttttgagtttaactggttagtgtgtccactttaacatgttatcaaagtcagagtcagaggtctcgagttcgaatcctggtataggctttatttgtgcctccacctatttatttctacgtttgcgcctttctctctggctgcacgtgagtgggagtgttgaagtgtataagtggattggctatcttcttccattagcttaaacttttgggttgaactggttagtgcgtccactctaacaggtctaaggttcgaccccggttgcggtcattctcacatgggctacgatgtcgtgtatgggtggagcagaggtttaggggttttctcaacttgtttaaggtcttcttagtattgtgagaatag

SEQ ID NO: 36348 - DNA, 3618 bp, Zea Mays
ctcacttctcatgacttcactccgcactaatgttgagctcgagggtgaagcaggggagccttcttaccgtcgtttagttctccgtctggtttctcatgtcatcaggctatacagctcttcacttgttactgaaagtgaggttttccttaatatgcttgtaaaagttacccgtcaggacttaccattatggcatcagatacttgtccttgaaattttaaggggtttttgtgttgaagcctgcactctgcgcttgctgtttcagacatttgacttgaatcctgtgaataccaatgtcgtggagaacatagttagagcacttgctttggttgtagcttcaattcaggcttcagattcaagcgaagaaactctagccgctgttggtgggatgttcagtagtaaagctaaagggatcgagtggagtatggaccatgatgcatcaaatgctgctgttttggttgctagtgaagcacatactatcactctggcccttgaaggtctcttaggcgtagttttcactattgccactttgactgatgaagctctagatgttggtgagcttgaatcacctaaatgtgaatcaaatagtatggaatgtagtggacagttggcccttctttgtatggctttggtcaattcaacatggttaaccatccttgactctttgtcatttattttgacgaggtcacagggggaagctataatattagagatattgaaaggataccaagcattcactcaggcactaagaacactttttaatgttgcacatcgattacacaatgtccttggtccttcttgggttctggtattggagacactttcagcacttgatagagctattcattctccacatgcttcaactcaggaagtatcagcttctgtttcaaaactttcaagagatacatcgggacagtacagtgatttccatattctctcttctttaaattctcagttgtttgaaagttcagccttgatgaacatagctgcggtgaagtcacttctgtctgcattgcaccaattgtcaagtcagcacatatctggaagctctcaattgtctgtccagcagattgggagcatttcattttcagtggagcgcatgacaacgattcttgccaataatctgcatcgagttgaaccgatatgggatcaaattgctgctcatcatcttgagcttgcaaattgctctaacccacaattatgtaatatggcactgaactcattggatcaatcaatttgtttggtagcgggttctgaaaaatttcagggcatcagcgcagcacctcatcagtttccagaaagccatttggtcaaagaaagtgaaactgtatcatttgagtatgcagttttatctccattgatgatcctctattcctccaacaagaacgttgatgtacaaatgggtgcattaaagattcttttgcatgttcttgagagacatggagaaaagttatcatatagctggcccagcattcttcatatgttaaggatggttactgatgcatcagaaaaagacctcatctccttaggctttcagagcattcgtgtaataatgaatgaaggactggcaacaatccctgtacaatgccttgatgaatgcattttggtaactggagcatatggtactcagaaaactgatataaacataagtttaacatcagttggacttttgtggactgctactgattttattgtgaagggattagtcagcaagcctattgagcaagctagtcacatgaatgatgatgttcaatcatgtgaaatgactgaagaggcaaacagcaagcaagttcctccaaaactagttgattatagtatacttttcttttcagttttctctgtcctccagaaattgggttcagatgatcgtcctgaggttcgaaattcagctgttaggactctcttccagactctcagcatccatggccaaaagctttctaaaagtatgtgggaggattgtctttggttatatgttttccctatgttagagcatgtttcccacttggcatctacctcatctcgagatgagtggcaagggaaggaacttggaactcgggctggcaaagctgttcatatgcttatccatcacagtcgaaatacagcacaaaagcaatgggatgaaaccattgttcttgtacttggtggtattgcacggcttttgcgttcttttttctcttacctccaacaactgagaaaattttcttctggttgggtgcttttactcagttttataaaaaatagcatcttaaacggtagcaaggaggttgctattgctgccatcaattgcttgcagacgtttgtcggcgcaaactgtccaaagggcaatttggaatcctcgtatgttaaatctgttcttgatatttatgaacttgttcttcaaacttcatctaattttaagaatgactccactgataaagtgaagcaagaggttctccgtggtcttggtgatctttatgtccaagcacaatctctgtttactggtgacatgtatctaaggcttatggcaattatgcatctgatgatcaagactaccttgaatcctactgattatgatagtgaactgtattcctgctgtacaacgaggtatattggaaatcattcctatgctacgcccaacagttgtattgtctcccatgtggacacatctgcttcttgagctgctatgctatcttaatgggcacgaaggccccctccagaaaaataatgaacaaacgcccgatcataattctcaagcactggtagacggtgcaaagcatgctcttgttgaaagaagcaatctcaatggcgggggtacaaaactggatatggtgggatctggttggggcattctatttgtagaaaaacttgtaccaatcattgccaaccttttcttggaggctccaccaaatgaaaggtttagtgtctctcctgaagtcattcaaggtcttggaaggtatttgctttttatgatttatatctgacaacataatgcaaaactaaggatatatccacttgtcaagaaggctttacgattattgcagaacagaagaacagctttacttattttcatttttccatgtcgaaaagggtattaattgtgaaacggcctctagcttagttggttaggtggtctgagtagcactccttagatcctgagttggactctctgtgtgagtgaatttcatgataaggttaaaaaaatcccctagttgtcccacgctaaagcataggtcttattgaagtgtataagtggattggctatcttctcccattaacttaagcttttgagtttaactggttagtgtgtccactttaacatgttatcaaagtcagagtcagaggtctcgagttcgaatcctggtataggctttatttgtgcctccacctatttatttctacgtttgcgcctttctctctggctgcacgtgagtgggagtgttgaagtgtataagtggattggctatcttcttccattagcttaaacttttgggttgaactggttagtgcgtccactctaacaggtctaaggttcgaccccggttgcggtcattctcacatgggctacgatgtcgtgtatgggtggagcagaggtttaggggttttctcaacttgtttaaggtcttcttagtattgtgagaatag

SEQ ID NO: 36349 - DNA, 3801 bp, Zea Mays
ctcacttctcatgacttcactccgcactaatgttgagctcgagggtgaagcaggggagccttcttaccgtcgtttagttctccgtctggtttctcatgtcatcaggctatacagctcttcacttgttactgaaagtgaggttttccttaatatgcttgtaaaagttacccgtcaggacttaccattatggcatcagatacttgtccttgaaattttaaggggtttttgtgttgaagcctgcactctgcgcttgctgtttcagacatttgacttgaatcctgtgaataccaatgtcgtggagaacatagttagagcacttgctttggttgtagcttcaattcaggcttcagattcaagcgaagaaactctagccgctgttggtgggatgttcagtagtaaagctaaagggatcgagtggagtatggaccatgatgcatcaaatgctgctgttttggttgctagtgaagcacatactatcactctggcccttgaaggtctcttaggcgtagttttcactattgccactttgactgatgaagctctagatgttggtgagcttgaatcacctaaatgtgaatcaaatagtatggaatgtagtggacagttggcccttctttgtatggctttggtcaattcaacatggttaaccatccttgactctttgtcatttattttgacgaggtcacagggggaagctataatattagagatattgaaaggataccaagcattcactcaggcttgtggagttctccgtgccatagagcccttaaactctttcctagcatcactttgcaagtttacaatcaataatccaaatgaaggagagaagaaaagcatcttgcagtctcctggatcaaagaggtcagaaacttcaatggatcagcgtgatagtattattctcacactaaaaaatgttcaggcactaagaacactttttaatgttgcacatcgattacacaatgtccttggtccttcttgggttctggtattggagacactttcagcacttgatagagctattcattctccacatgcttcaactcaggaagtatcagcttctgtttcaaaactttcaagagatacatcgggacagtacagtgatttccatattctctcttctttaaattctcagttgtttgaaagttcagccttgatgaacatagctgcggtgaagtcacttctgtctgcattgcaccaattgtcaagtcagcacatatctggaagctctcaattgtctgtccagcagattgggagcatttcattttcagtggagcgcatgacaacgattcttgccaataatctgcatcgagttgaaccgatatgggatcaaattgctgctcatcatcttgagcttgcaaattgctctaacccacaattatgtaatatggcactgaactcattggatcaatcaatttgtttggtagcgggttctgaaaaatttcagggcatcagcgcagcacctcatcagtttccagaaagccatttggtcaaagaaagtgaaactgtatcatttgagtatgcagttttatctccattgatgatcctctattcctccaacaagaacgttgatgtacaaatgggtgcattaaagattcttttgcatgttcttgagagacatggagaaaagttatcatatagctggcccagcattcttcatatgttaaggatggttactgatgcatcagaaaaagacctcatctccttaggctttcagagcattcgtgtaataatgaatgaaggactggcaacaatccctgtacaatgccttgatgaatgcattttggtaactggagcatatggtactcagaaaactgatataaacataagtttaacatcagttggacttttgtggactgctactgattttattgtgaagggattagtcagcaagcctattgagcaagctagtcacatgaatgatgatgttcaatcatgtgaaatgactgaagaggcaaacagcaagcaagttcctccaaaactagttgattatagtatacttttcttttcagttttctctgtcctccagaaattgggttcagatgatcgtcctgaggttcgaaattcagctgttaggactctcttccagactctcagcatccatggccaaaagctttctaaaagtatgtgggaggattgtctttggttatatgttttccctatgttagagcatgtttcccacttggcatctacctcatctcgagatgagtggcaagggaaggaacttggaactcgggctggcaaagctgttcatatgcttatccatcacagtcgaaatacagcacaaaagcaatgggatgaaaccattgttcttgtacttggtggtattgcacggcttttgcgttcttttttctcttacctccaacaactgagaaaattttcttctggttgggtgcttttactcagttttataaaaaatagcatcttaaacggtagcaaggaggttgctattgctgccatcaattgcttgcagacgtttgtcggcgcaaactgtccaaagggcaatttggaatcctcgtatgttaaatctgttcttgatatttatgaacttgttcttcaaacttcatctaattttaagaatgactccactgataaagtgaagcaagaggttctccgtggtcttggtgatctttatgtccaagcacaatctctgtttactggtgacatgtatctaaggcttatggcaattatgcatctgatgatcaagactaccttgaatcctactgattatgatagtgaactgtattcctgctgtacaacgaggtatattggaaatcattcctatgctacgcccaacagttgtattgtctcccatgtggacacatctgcttcttgagctgctatgctatcttaatgggcacgaaggccccctccagaaaaataatgaacaaacgcccgatcataattctcaagcactggtagacggtgcaaagcatgctcttgttgaaagaagcaatctcaatggcgggggtacaaaactggatatggtgggatctggttggggcattctatttgtagaaaaacttgtaccaatcattgccaaccttttcttggaggctccaccaaatgaaaggtttagtgtctctcctgaagtcattcaaggtcttggaaggtatttgctttttatgatttatatctgacaacataatgcaaaactaaggatatatccacttgtcaagaaggctttacgattattgcagaacagaagaacagctttacttattttcatttttccatgtcgaaaagggtattaattgtgaaacggcctctagcttagttggttaggtggtctgagtagcactccttagatcctgagttggactctctgtgtgagtgaatttcatgataaggttaaaaaaatcccctagttgtcccacgctaaagcataggtcttattgaagtgtataagtggattggctatcttctcccattaacttaagcttttgagtttaactggttagtgtgtccactttaacatgttatcaaagtcagagtcagaggtctcgagttcgaatcctggtataggctttatttgtgcctccacctatttatttctacgtttgcgcctttctctctggctgcacgtgagtgggagtgttgaagtgtataagtggattggctatcttcttccattagcttaaacttttgggttgaactggttagtgcgtccactctaacaggtctaaggttcgaccccggttgcggtcattctcacatgggctacgatgtcgtgtatgggtggagcagaggtttaggggttttctcaacttgtttaaggtcttcttagtattgtgagaatag

SEQ ID NO: 36350 - DNA, 2089 bp, Zea Mays
agcattcgtgtaataatgaatgaaggactggcaacaatccctgtacaatgccttgatgaatgcattttggtaactggagcatatggtactcagaaaactgatataaacataagtttaacatcagttggacttttgtggactgctactgattttattgtgaagggattagtcagcaagcctattgagcaagctagtcacatgaatgatgatgttcaatcatgtgaaatgactgaagaggcaaacagcaagcaagttcctccaaaactagttgattatagtatacttttcttttcagttttctctgtcctccagaaattgggttcagatgatcgtcctgaggttcgaaattcagctgttaggactctcttccagactctcagcatccatggccaaaagctttctaaaagtatgtgggaggattgtctttggttatatgttttccctatgttagagcatgtttcccacttggcatctacctcatctcgagatgagtggcaagggaaggaacttggaactcgggctggcaaagctgttcatatgcttatccatcacagtcgaaatacagcacaaaagcaatgggatgaaaccattgttcttgtacttggtggtattgcacggcttttgcgttcttttttctcttacctccaacaactgagaaaattttcttctggttgggtgcttttactcagttttataaaaaatagcatcttaaacggtagcaaggaggttgctattgctgccatcaattgcttgcagacgtttgtcggcgcaaactgtccaaagggcaatttggaatcctcgtatgttaaatctgttcttgatatttatgaacttgttcttcaaacttcatctaattttaagaatgactccactgataaagtgaagcaagaggttctccgtggtcttggtgatctttatgtccaagcacaatctctgtttactggtgacatgtatctaaggcttatggcaattatgcatctgatgatcaagactaccttgaatcctactgattatgatagtgaactgggtagtattcctgctgtacaacgaggtatattggaaatcattcctatgctacgcccaacagttgtattgtctcccatgtggacacatctgcttcttgagctgctatgctatcttaatgggcacgaaggccccctccagaaaaataatgaacaaacgcccgatcataattctcaagcactggtagacggtgcaaagcatgctcttgttgaaagaagcaatctcaatggcgggggtacaaaactggatatggtgggatctggttggggcattctatttgtagaaaaacttgtaccaatcattgccaaccttttcttggaggctccaccaaatgaaaggtttagtgtctctcctgaagtcattcaaggtcttggaaggtatttgctttttatgatttatatctgacaacataatgcaaaactaaggatatatccacttgtcaagaaggctttacgattattgcagaacagaagaacagctttacttattttcatttttccatgtcgaaaagggtattaattgtgaaacggcctctagcttagttggttaggtggtctgagtagcactccttagatcctgagttggactctctgtgtgagtgaatttcatgataaggttaaaaaaatcccctagttgtcccacgctaaagcataggtcttattgaagtgtataagtggattggctatcttctcccattaacttaagcttttgagtttaactggttagtgtgtccactttaacatgttatcaaagtcagagtcagaggtctcgagttcgaatcctggtataggctttatttgtgcctccacctatttatttctacgtttgcgcctttctctctggctgcacgtgagtgggagtgttgaagtgtataagtggattggctatcttcttccattagcttaaacttttgggttgaactggttagtgcgtccactctaacaggtctaaggttcgaccccggttgcggtcattctcacatgggctacgatgtcgtgtatgggtggagcagaggtttaggggttttctcaacttgtttaaggtcttcttagtattgtgagaatag

SEQ ID NO: 36351 - DNA, 1978 bp, Zea Mays
ctttgcagagcattcgtgtaataatgaatgaaggactggcaacaatccctgtacaatgccttgatgaatgcattttggtaactggagcatatggtactcagaaaactgatataaacataagtttaacatcagttggacttttgtggactgctactgattttattgtgaagggattagtcagcaagcctattgagcaagctagtcacatgaatgatgatgttcaatcatgtgaaatgactgaagaggcaaacagcaagcaagttcctccaaaactagttgattatagtatacttttcttttcagttttctctgtcctccagaaattgggttcagatgatcgtcctgaggttcgaaattcagctgttaggactctcttccagactctcagcatccatggccaaaagctttctaaaagtatgtgggaggattgtctttggttatatgttttccctatgttagagcatgtttcccacttggcatctacctcatctcgagatgagtggcaagggaaggaacttggaactcgggctggcaaagctgttcatatgcttatccatcacagtcgaaatacagcacaaaagcaatgggatgaaaccattgttcttgtacttggtggtattgcacggcttttgcgttcttttttctcttacctccaacaactgagaaaattttcttctggttgggtgcttttactcagttttataaaaaatagcatcttaaacggtagcaaggaggttgctattgctgccatcaattgcttgcagacgtttgtcggcgcaaactgtccaaagggcaatttggaatcctcgtatgttaaatctgttcttgatatttatgaacttgttcttcaaacttcatctaattttaagaatgactccactgataaagtgaagcaagaggttctccgtggtcttgggtagtattcctgctgtacaacgaggtatattggaaatcattcctatgctacgcccaacagttgtattgtctcccatgtggacacatctgcttcttgagctgctatgctatcttaatgggcacgaaggccccctccagaaaaataatgaacaaacgcccgatcataattctcaagcactggtagacggtgcaaagcatgctcttgttgaaagaagcaatctcaatggcgggggtacaaaactggatatggtgggatctggttggggcattctatttgtagaaaaacttgtaccaatcattgccaaccttttcttggaggctccaccaaatgaaaggtttagtgtctctcctgaagtcattcaaggtcttggaaggtatttgctttttatgatttatatctgacaacataatgcaaaactaaggatatatccacttgtcaagaaggctttacgattattgcagaacagaagaacagctttacttattttcatttttccatgtcgaaaagggtattaattgtgaaacggcctctagcttagttggttaggtggtctgagtagcactccttagatcctgagttggactctctgtgtgagtgaatttcatgataaggttaaaaaaatcccctagttgtcccacgctaaagcataggtcttattgaagtgtataagtggattggctatcttctcccattaacttaagcttttgagtttaactggttagtgtgtccactttaacatgttatcaaagtcagagtcagaggtctcgagttcgaatcctggtataggctttatttgtgcctccacctatttatttctacgtttgcgcctttctctctggctgcacgtgagtgggagtgttgaagtgtataagtggattggctatcttcttccattagcttaaacttttgggttgaactggttagtgcgtccactctaacaggtctaaggttcgaccccggttgcggtcattctcacatgggctacgatgtcgtgtatgggtggagcagaggtttaggggttttctcaacttgtttaaggtcttcttagtattgtgagaatag

SEQ ID NO: 36352 - DNA, 1099 bp, Zea Mays
acttctcatgacttcactccgcactaatgttgagctcgagggtgaagcaggggagccttcttaccgtcgtttagttctccgtctggtttctcatgtcatcaggctatacagctcttcacttgttactgaaagtgaggttttccttaatatgcttgtaaaagttacccgtcaggacttaccattatggcatcagatacttgtccttgaaattttaaggggtttttgtgttgaagcctgcactctgcgcttgctgtttcagacatttgacttgaatcctgtgaataccaatgtcgtggagaacatagttagagcacttgctttggttgtagcttcaattcaggtggcttcagattcaagcgaagaaactctagccgctgttggtgggatgttcagtagtaaagctaaagggatcgagtggagtatggaccatgatgcatcaaatgctgctgttttggttgctagtgaagcacatactatcactctggcccttgaaggtctcttaggcgtagttttcactattgccactttgactgatgaagctctagatgttggtgagcttgaatcacctaaatgtgaatcaaatagtatggaatgtagtggacagttggcccttctttgtatggctttggtcaattcaacatggttaaccatccttgactctttgtcatttattttgacgaggtcacagggggaagctataatattagagatattgaaaggataccaagcattcactcaggcactaagaacactttttaatgttgcacatcgattacacaatgtccttggtccttcttgggttctggtattggagacactttcagcacttgatagagctattcattctccacatgcttcaactcaggaagtatcagcttctgtttcaaaactttcaagagatacatcgggacagtacagtgatttccatattctctcttctttaaattctcaggagttgaaccgatatgggatcaaattgctgctcatcatcttgaggatggttactgatgcatcagaaaaagacctcatctccttaggctttcagagcattcgtgtaataatgaatgaaggactggcaacaatccctgtacaatgcctt

SEQ ID NO: 36353 - DNA, 1936 bp, Zea Mays
ctcacttctcatgacttcactccgcactaatgttgagctcgagggtgaagcaggggagccttcttaccgtcgtttagttctccgtctggtttctcatgtcatcaggctatacagctcttcacttgttactgaaagtgaggttttccttaatatgcttgtaaaagttacccgtcaggacttaccattatggcatcagatacttgtccttgaaattttaaggggtttttgtgttgaagcctgcactctgcgcttgctgtttcagacatttgacttctgcaagggaggagttaatgggttggcgtatggctggagccaaagcgctctccttccatttagaagaggtgtcttagttgtatggggtgtgtctggtgttgttaggcaaatgaatcctgtgaataccaatgtcgtggagaacatagttagagcacttgctttggttgtagcttcaattcaggtggcttcagattcaagcgaagaaactctagccgctgttggtgggatgttcagtagtaaagctaaagggatcgagtggagtatggaccatgatgcatcaaatgctgctgttttggttgctagtgaagcacatactatcactctggcccttgaaggtctcttaggcgtagttttcactattgccactttgactgatgaagctctagatgttggtgagcttgaatcacctaaatgtgaatcaaatagtatggaatgtagtggacagttggcccttctttgtatggctttggtcaattcaacatggttaaccatccttgactctttgtcatttattttgacgaggtcacagggggaagctataatattagagatattgaaaggataccaagcattcactcaggcttgtggagttctccgtgccatagagcccttaaactctttcctagcatcactttgcaagtttacaatcaataatccaaatgaaggagagaagaaaagcatcttgcagtctcctggatcaaagaggtcagaaacttcaatggatcagcgtgatagtattattctcacactaaaaaatgttcaggcactaagaacactttttaatgttgcacatcgattacacaatgtccttggtccttcttgggttctggtattggagacactttcagcacttgatagagctattcattctccacatgcttcaactcaggaagtatcagcttctgtttcaaaactttcaagagatacatcgggacagtacagtgatttccatattctctcttctttaaattctcagttgtttgaaagttcagccttgatgaacatagctgcggtgaagtcacttctgtctgcattgcaccaattgtcaagtcagcacatatctggaagctctcaattgtctgtccagcagattgggagcatttcattttcagtggagcgcatgacaacgattcttgccaataatctgcatcgagttgaaccgatatgggatcaaattgctgctcatcatcttgagcttgcaaattgctctaacccacaattatgtaatatggcactgaactcattggatcaatcaatttgtttggtagcgggttctgaaaaatttcagggcatcagcgcagcacctcatcagtttccagaaagccatttggtcaaagaaagtgaaactgtatcatttgagtatgcagttttatctccattgatgatcctctattcctccaacaagaacgttgatgtacaaatgggtgcattaaagattcttttgcatgttcttgagagacatggagaaaagttatcatatagctggcccagcattcttcatatgttaaggatggttactgatgcatcagaaaaagacctcatctccttaggctttcagcatgatatgatttctctgtgggagttttcccctggcatagctccttaggcctgttgtgtttatgtctgtctatggaagttgaatagggttacagattacatttct

SEQ ID NO: 36354 - DNA, 1822 bp, Zea Mays
ctcacttctcatgacttcactccgcactaatgttgagctcgagggtgaagcaggggagccttcttaccgtcgtttagttctccgtctggtttctcatgtcatcaggctatacagctcttcacttgttactgaaagtgaggttttccttaatatgcttgtaaaagttacccgtcaggacttaccattatggcatcagatacttgtccttgaaattttaaggggtttttgtgttgaagcctgcactctgcgcttgctgtttcagacatttgacttgaatcctgtgaataccaatgtcgtggagaacatagttagagcacttgctttggttgtagcttcaattcaggcttcagattcaagcgaagaaactctagccgctgttggtgggatgttcagtagtaaagctaaagggatcgagtggagtatggaccatgatgcatcaaatgctgctgttttggttgctagtgaagcacatactatcactctggcccttgaaggtctcttaggcgtagttttcactattgccactttgactgatgaagctctagatgttggtgagcttgaatcacctaaatgtgaatcaaatagtatggaatgtagtggacagttggcccttctttgtatggctttggtcaattcaacatggttaaccatccttgactctttgtcatttattttgacgaggtcacagggggaagctataatattagagatattgaaaggataccaagcattcactcaggcttgtggagttctccgtgccatagagcccttaaactctttcctagcatcactttgcaagtttacaatcaataatccaaatgaaggagagaagaaaagcatcttgcagtctcctggatcaaagaggtcagaaacttcaatggatcagcgtgatagtattattctcacactaaaaaatgttcaggcactaagaacactttttaatgttgcacatcgattacacaatgtccttggtccttcttgggttctggtattggagacactttcagcacttgatagagctattcattctccacatgcttcaactcaggaagtatcagcttctgtttcaaaactttcaagagatacatcgggacagtacagtgatttccatattctctcttctttaaattctcagttgtttgaaagttcagccttgatgaacatagctgcggtgaagtcacttctgtctgcattgcaccaattgtcaagtcagcacatatctggaagctctcaattgtctgtccagcagattgggagcatttcattttcagtggagcgcatgacaacgattcttgccaataatctgcatcgagttgaaccgatatgggatcaaattgctgctcatcatcttgagcttgcaaattgctctaacccacaattatgtaatatggcactgaactcattggatcaatcaatttgtttggtagcgggttctgaaaaatttcagggcatcagcgcagcacctcatcagtttccagaaagccatttggtcaaagaaagtgaaactgtatcatttgagtatgcagttttatctccattgatgatcctctattcctccaacaagaacgttgatgtacaaatgggtgcattaaagattcttttgcatgttcttgagagacatggagaaaagttatcatatagctggcccagcattcttcatatgttaaggatggttactgatgcatcagaaaaagacctcatctccttaggctttcagcatgatatgatttctctgtgggagttttcccctggcatagctccttaggcctgttgtgtttatgtctgtctatggaagttgaatagggttacagattacatttct

SEQ ID NO: 36355 - DNA, 932 bp, Zea Mays
gtccccgtctcttctcagatctcacttgtcccgtgccgcgcgccctcccgcttccgatccccgcgtgagcgcaggccaaaaacctaacccctggtctcaccatcgcttcctccgcctgaggaggagcaggccggcggaggaggagatggtcttcatggcggcgctggaggccgatctgcgcgctctctccgctgaggcacgccgccgccaccccgctgtcaaagacgccgccgagcacgctatactcaagctccgatctctatctgccccaagtgaaatagctcaaaatgaagatatactgcggatgtttctgatggcatgtaatgtcaaatcagtgaagttgagtgtcataggactatcctgtttgcaaaagcttatatcacacgctgctgttgcatcatctgcgctgaaggatatactagcgactttgaaggatcacgcagagatgactgatgagattgttcaactaaagactttgcaaacgatgttgattctctttcaatcacatctacatcctgaaagtgaggagagcatgtcacaagctcttggaatatgcctttacctacttgaaagcaatcgatcttctgacagtgtccgcaatacggcagcagctacgtttagacaagcagtggcattggtcttcgataatgttattcgtgctgaatcacttccctccggtaaagcttcttcagcaagacttggttcccgtgttagcgctgttgctgataacgtcactcatagcttcagtcacacactatcgctaccaagcaactctggggatcctaccatcatgcagaatttgagtgatgttggaaagcttgggctccgtctgctcgaagacctgacagctattgctgcaggtggatctgctatgtggctccgtgtttattcactgcataggacatttgcccttgacatacttgagcttctgc

SEQ ID NO: 36356 - DNA, 1016 bp, Zea Mays
aaacatcgtctgtccctcctgcctggtcggctggtccccgtctcttctcagatctcacttgtcccgtgccgcgcgccctcccgcttccgatccccgcgtgagcgcaggccaaaaacctaacccctggtctcaccatcgcttcctccgcctgaggaggagcaggccggcggaggaggagatggtcttcatggcggcgctggaggccgatctgcgcgctctctccgctgaggcacgccgccgccaccccgctgtcaaagacgccgccgagcacgctatactcaagctccgatctctatctgccccaagtgaaatagctcaaaatgaagatatactgcggatgtttctgatggcatgtaatgtcaaatcagtgaagttgagtgtcataggactatcctgtttgcaaaagcttatatcacacgctgctgttgcatcatctgcgctgaaggatatactagcgactttgaaggatcacgcagagatgactgatgagattgttcaactaaagactttgcaaacgatgttgattctctttcaatcacatctacatcctgaaagtgaggagagcatgtcacaagctcttggaatatgcctttacctacttgaaagcaatcgatcttctgacagtgtccgcaatacggcagcagctacgtttagacaagcagtggcattggtcttcgataatgttattcgtgctgaatcacttccctccggtaaagcttcttcagcaagacttggttcccgtgttagcgctgttgctgataacgtcactcatagcttcagtcacacactatcgctaccaagcaactctggggatcctaccatcatgcagaatttgagtgatgttggaaagcttgggctccgtctgctcgaagacctgacagctattgctgcaggtggatctgctatgtggctccgtgtttattcactgcataggacatttgcccttgacatacttgagagagttgcgtatcattatattaatagaagaggaaaaggcccgaggcctgaaaacaaac

SEQ ID NO: 36357 - DNA, 920 bp, Zea Mays
gtccccgtctcttctcagatctcacttgtcccgtgccgcgcgccctcccgcttccgatccccgcgtgagcgcaggccaaaaacctaacccctggtctcaccatcgcttcctccgcctgaggaggagcaggccggcggaggaggagatggtcttcatggcggcgctggaggccgatctgcgcgctctctccgctgaggcacgccgccgccaccccgctgtcaaagacgccgccgagcacgctatactcaagctccgatctctatctgccccaagtgaaatagctcaaaatgaagatatactgcggatgtttctgatggcatgtaatgtcaaatcagtgaagttgagtgtcataggactatcctgtttgcaaaagcttatatcacacgctgctgttgcatcatctgcgctgaaggatatactagcgactttgaaggatcacgcagagatgactgatgagattgttcaactaaagactttgcaaacgatgttgattctctttcaatcacatctacatcctgaaagtgaggagagcatgtcacaagctcttggaatatgcctttacctacttgaaagcaatcgatcttctgacagtgtccgcaatacggcagcagctacgtttagacaagcagtggcattggtcttcgataatgttattcgtgctgaatcacttccctccggtaaagcttcttcagcaagacttggttcccgtgttagcgctgttgctgataacgtcactcatagcttcagtcacacactatcgctaccaagcaactctggggatcctaccatcatgcagaatttgagtgatgttggaaagcttgggctccgtctgctcgaagacctgacagctattgctgcaggctatgtggctccgtgtttattcactgcataggacatttgcccttgacatacttgagtaa

SEQ ID NO: 36358 - DNA, 923 bp, Zea Mays
gtccccgtctcttctcagatctcacttgtcccgtgccgcgcgccctcccgcttccgatccccgcgtgagcgcaggccaaaaacctaacccctggtctcaccatcgcttcctccgcctgaggaggagcaggccggcggaggaggagatggtcttcatggcggcgctggaggccgatctgcgcgctctctccgctgaggcacgccgccgccaccccgctgtcaaagacgccgccgagcacgctatactcaagctccgatctctatctgccccaagtgaaatagctcaaaatgaagatatactgcggatgtttctgatggcatgtaatgtcaaatcagtgaagttgagtgtcataggactatcctgtttgcaaaagcttatatcacacgctgctgttgcatcatctgcgctgaaggatatactagcgactttgaaggatcacgcagagatgactgatgagattgttcaactaaagactttgcaaacgatgttgattctctttcaatcacatctacatcctgaaagagagcatgtcacaagctcttggaatatgcctttacctacttgaaagcaatcgatcttctgacagtgtccgcaatacggcagcagctacgtttagacaagcagtggcattggtcttcgataatgttattcgtgctgaatcacttccctccggtaaagcttcttcagcaagacttggttcccgtgttagcgctgttgctgataacgtcactcatagcttcagtcacacactatcgctaccaagcaactctggggatcctaccatcatgcagaatttgagtgatgttggaaagcttgggctccgtctgctcgaagacctgacagctattgctgcaggtggatctgctatgtggctccgtgtttattcactgcataggacatttgcccttgacatacttgagtaa

SEQ ID NO: 36359 - DNA, 962 bp, Zea Mays
cctcctgcctggtcggctggtccccgtctcttctcagatctcacttgtcccgtgccgcgcgccctcccgcttccgatccccgcgtgagcgcaggccaaaaacctaacccctggtctcaccatcgcttcctccgcctgaggaggagcaggccggcggaggaggagatggtcttcatggcggcgctggaggccgatctgcgcgctctctccgctgaggcacgccgccgccaccccgctgtcaaagacgccgccgagcacgctatactcaagctccgatctctatctgccccaagtgaaatagctcaaaatgaagatatactgcggatgtttctgatggcatgtaatgtcaaatcagtgaagttgagtgtcataggactatcctgtttgcaaaagcttatatcacacgctgctgttgcatcatctgcgctgaaggatatactagcgactttgaaggatcacgcagagatgactgatgagattgttcaactaaagactttgcaaacgatgttgattctctttcaatcacatctacatcctgaaagtgaggagagcatgtcacaagctcttggaatatgcctttacctacttgaaagcaatcgatcttctgacagtgtccgcaatacggcagcagctacgtttagacaagcagtggcattggtcttcgataatgttattcgtgctgaatcacttccctccggtaaagcttcttcagcaagacttggttcccgtgttagcgctgttgctgataacgtcactcatagcttcagtcacacactattcagattgctttacatggcagatcgctaccaagcaactctggggatcctaccatcatgcagaatttgagtgatgttggaaagcttgggctccgtctgctcgaagacctgacagctattgctgcaggctatgtggctccgtgtttattcactgcataggacatttgcccttgacatacttgagtaa

SEQ ID NO: 36360 - DNA, 861 bp, Zea Mays
ggtccccgtctcttctcagatctcacttgtcccgtgccgcgcgccctcccgcttccgatccccgcgtgagcgcaggccaaaaacctaacccctggtctcaccatcgcttcctccgcctgaggaggagcaggccggcggaggaggagatggtcttcatggcggcgctggaggccgatctgcgcgctctctccgctgaggcacgccgccgccaccccgctgtcaaagacgccgccgagcacgctatactcaagctccgatctctatctgccccaagtgaaatagctcaaaatgaagatatactgcggatgtttctgatggcatgtaatgtcaaatcagtgaagttgagtgtcataggactatcctgtttgcaaaagcttatatcacacgctgctgttgcatcatctgcgctgaaggatatactagcgactttgaaggatcacgcagagatgactgatgagattgttcaactaaagactttgcaaacgatgttgattctctttcaatcacatctacatcctgaaagtgaggagagcatgtcacaagctcttggaatatgcctttacctacttgaaagcaatcgatcttctgacagtgtccgcaatacggcagcagctacgtttagacaagcagtggcattggtcttcgataatgttattcgtgctgaatcacttccctccggtaaagcttcttcagcaagacttggttcccgtgttagcgctgttgctgataacgtcactcatagcttcagtcacacactttgagatggataataatataacaagctctgcatttcacttgcattcctatggccgcttcattctagtcagatttgaaaaggcattttaaaattgatactcaaat

SEQ ID NO: 36361 - DNA, 295 bp, Zea Mays
gtccctcctgcctggtcggctggtccccgtctcttctcagatctcacttgtcccgtgccgcgcgccctcccgcttccgatccccgcgtgagcgcaggccaaaaacctaacccctggtctcaccatcgcttcctccgcctgaggaggagcaggccggcggaggaggagatggtcttcatggcggcgctggaggccgatctgcgcgctctctccgctgaggcacgccgccgccaccccgctgtcaaagacgccgccgagcacgctatactcaagtgacatgtcaacatgtattgata

SEQ ID NO: 36362 - DNA, 907 bp, Zea Mays
cttcctagagtggtgctttcttttgaatagcttggatgagctgtggtatttgataataaactgcaatttaggttgaaacttttttaaccaagatgttctatagtatcagttactgcatgatattttgatgtgtgtgctgattgtaccacagaaaatgctgttctaggccgctaggaatatgaatttgttgtacttgtagtgttctttagtacaactattttgcaaattatggtctgtggtaatatcagagtggcactttttcttgaaagaagctgatgttgtagttttttctctctctctattctgcatttaccattttgtttatgcttgagaaaattgcattatgttgttttatgtttcttactagcaatgactacatgcagactacagcatctgaaagtggactttttgatcatttggtaaacgtttgggagtttaagcctggtcctgttccagggacatgtgacatctatttcttagtcaattttaagtttcaatcaccactgtatcgtcaggttgcatcaatgttcttcaaggaagttgtttctcgactagtgagctcatttagtgaccgttgttttagaatatatggccctgctgttccagtgctggaaaatagttatggacaaagaagatgaagccgttatggttcaattttgaaggttgtatctttcatggatctctagggattacttgtagtcaaggcataatccttccttttgtaatcggtggtagtgccatttagaacaccatcgtgcaagaggtcgtctataaggaaatcagtcagtattgagttttcatcattggctatttctgaggttatattttcatctatttcaaaattcgtttcacgtgcatacaacgaaatggttatgttttcatcattggcaaattggcaattcctgag

SEQ ID NO: 36363 - DNA, 2264 bp, Zea Mays
aagaccattaggccagactatttcaaagaaattttcagacatgagatactccaatatttcctggccattccttctactgctatgttttgtttcgatggcagatgcagagtacatgaagtacaaggatccaaagcaacctattaactctagaatcagggatcttatcggtaggatgacccttgctgaaaaaattggccaaatgacacagatagaacgccaggttgcatctgcaaatgtcatgaaacagtactttataggaagcatcttaagtggtggtggaagtgttccttctccccaggccagtcctgcaatttgggtgaacatggtcaatgaatttcagaaaggtgccttgtcaacgcgtctaggaattccattgatttatggaattgatgctgttcatggtaataacaatgtctacaacgccactttattccctcataacattggacttggagctacaagggatcctggcctcataaaaagaattggtgaagcaactgctcttgaagtgcgtgcgacaggcattcaatatacttttgctccatgtattgcagtttgcagagatccaagatggggtcggtgctatgagagctacagtgaggatcacaaggttgtgcagcagatgacagatattatccttggtttgcagggtgagatcccagtcaatcataccaagggagttccatatgtagctgggaaggataaggttgctgcttgtgctaaacactatgttggtgatggtggaactcataatggaatcaatgagaataatacaatcattgatgagcatgggctgctaagcattcacatgccaccatattatgactctatcataaagggtgttgctactgttatgggtttcgtgatatctgactggctaggagtggaccgtatcacctcacctcctggcgcaaactatacttattctgtgcaagctggaattaatgctggcattgatatggtgatggtgccatacaattacactgattacattaatgatctcacttctctcgttcacaagggtgtcatcaatataagcagaattgatgatgctgtgaagcggatccttcgagtcaaatttacaatgggcctgtttgagaaccctttagctgatcttagttttgcagagcagcttggaaagaaggagcatagggaactggctagagaagctgtcaggaaatcacttgttctgttaaaaaatgggaactctcccgatcagcaattcctacctctccctaagagagctagaagtatcctggtagctggaagtcatgctagcaatttggggtaccagtgtggtggatggtcaatccaatggatgggggacagtggtaatatcacaactgtatcctgtgcagggacaacaattcttgatgcgataaagtctaccgttgctgactcgacgtctgttgtctactctgagaaccccgatgacagtttcatgaagcacaatgacttctcattcgctatcgtcgttgttggcgagccaccatacgctgaaacagttggcgatagcaccgacctcactatgctagaccctggtccagacacgatcagaactgtgtgtgctgcagttaaatgtgcagtagtcatcatttctggtcgtcccattgtgattgagccgtatgttccattagtggaagcgcttgttgcagcttggcttccgggaaccgaaggtcagggtgtcgcagatgtactctttggagactacggtttcacaggcaagctcccgcacacctggttcaagtctgtcgaccaactgcccatgaatgtgggagacctacagtacgatccactctaccctttcggcttcggtttgatgataaattcatcattgccagggttctctggtgttgacaatctgggatataggaagcaaagagtgctatttgctgtgctgtgttctctactgtcattggttctaatcagttaatgaattgggcgtagatagtatttcaacacatagctgcccttttgtagttctcatatgattagagtgttactaatctagctttagcgattgttagctgccaaatgagtcactggacgtcaatcaatctattatctatctatctactagatgattccccgcgttttgccgagatgctgccattgattatattcctcctgctctgattatcactttggttaccttgtgcaaattgattgttcatgatgatccaactgaggtccccaatcttaccaaacaccttttaagttgagtctaaaccatcaagaaagaaaaaatcaatggcacaacttcc

SEQ ID NO: 36364 - DNA, 2356 bp, Zea Mays
gttcgcttccagctgtaaacactatagaaacagggcctcttgaattctgttcatggttcggggatcaagaccattaggccagactatttcaaagaaattttcagacatgagatactccaatatttcctggccattccttctactgctatgttttgtttcgatggcagatgcagagtacatgaagtacaaggatccaaagcaacctattaactctagaatcagggatcttatcggtaggatgacccttgctgaaaaaattggccaaatgacacagatagaacgccaggttgcatctgcaaatgtcatgaaacagtactttataggaagcatcttaagtggtggtggaagtgttccttctccccaggccagtcctgcaatttgggtgaacatggtcaatgaatttcagaaaggtgccttgtcaacgcgtctaggaattccattgatttatggaattgatgctgttcatggtaataacaatgtctacaacgccactttattccctcataacattggacttggagctacaagggatcctggcctcataaaaagaattggtgaagcaactgctcttgaagtgcgtgcgacaggcattcaatatacttttgctccatgtattgcagtttgcagagatccaagatggggtcggtgctatgagagctacagtgaggatcacaaggttgtgcagcagatgacagatattatccttggtttgcaggggataaggttgctgcttgtgctaaacactatgttggtgatggtggaactcataatggaatcaatgagaataatacaatcattgatgagcatgggctgctaagcattcacatgccaccatattatgactctatcataaagggtgttgctactgttatggtttcttattcaagcttgaatggtgtaaaaatgcatgccaatcatgacttagtcactggataccttaaatccaagctgcattttagaggtttcgtgatatctgactggctaggagtggaccgtatcacctcacctcctggcgcaaactatacttattctgtgcaagctggaattaatgctggcattgatatggtgatggtgccatacaattacactgattacattaatgatctcacttctctcgttcacaagggtgtcatcaatataagcagaattgatgatgctgtgaagcggatccttcgagtcaaatttacaatgggcctgtttgagaaccctttagctgatcttagttttgcagagcagcttggaaagaaggagcatagggaactggctagagaagctgtcaggaaatcacttgttctgttaaaaaatgggaactctcccgatcagcaattcctacctctccctaagagagctagaagtatcctggtagctggaagtcatgctagcaatttggggtaccagtgtggtggatggtcaatccaatggatgggggacagtggtaatatcacaactgggacaacaattcttgatgcgataaagtctaccgttgctgactcgacgtctgttgtctactctgagaaccccgatgacagtttcatgaagcacaatgacttctcattcgctatcgtcgttgttggcgagccaccatacgctgaaacagttggcgatagcaccgacctcactatgctagaccctggtccagacacgatcagaactgtgtgtgctgcagttaaatgtgcagtagtcatcatttctggtcgtcccattgtgattgagccgtatgttccattagtggaagcgcttgttgcagcttggcttccgggaaccgaaggtcagggtgtcgcagatgtactctttggagactacggtttcacaggcaagctcccgcacacctggttcaagtctgtcgaccaactgcccatgaatgtgggagacctacagtacgatccactctaccctttcggcttcggtttgatgataaattcatcattgccagggttctctggtgttgacaatctgggatataggaagcaaagagtgctatttgctgtgctgtgttctctactgtcattggttctaatcagttaatgaattgggcgtagatagtatttcaacacatagctgcccttttgtagttctcatatgattagagtgttactaatctagctttagcgattgttagctgccaaatgagtcactggacgtcaatcaatctattatctatctatctactagatgattccccgcgttttgccgagatgctgccattgattatattcctcctgctctgattatcactttggttaccttgtgcaaattgattgttcatgatgatccaactgaggtccccaatcttaccaaacaccttttaagttgagtctaaaccatcaagaaagaaaaaatcaatggcacaacttcc

SEQ ID NO: 36365 - DNA, 2408 bp, Zea Mays
gttgttcgcttccagctgtaaacactatagaaacagggcctcttgaattctgttcatggttcggggatcaagaccattaggccagactatttcaaagaaattttcagacatgagatactccaatatttcctggccattccttctactgctatgttttgtttcgatggcagatgcagagtacatgaagtacaaggatccaaagcaacctattaactctagaatcagggatcttatcggtaggatgacccttgctgaaaaaattggccaaatgacacagatagaacgccaggttgcatctgcaaatgtcatgaaacagtactttataggaagcatcttaagtggtggtggaagtgttccttctccccaggccagtcctgcaatttgggtgaacatggtcaatgaatttcagaaaggtgccttgtcaacgcgtctaggaattccattgatttatggaattgatgctgttcatggtaataacaatgtctacaacgccactttattccctcataacattggacttggagctacaagggatcctggcctcataaaaagaattggtgaagcaactgctcttgaagtgcgtgcgacaggcattcaatatacttttgctccatgtattgcagtttgcagagatccaagatggggtcggtgctatgagagctacagtgaggatcacaaggttgtgcagcagatgacagatattatccttggtttgcagggtgagatcccagtcaatcataccaagggagttccatatgtagctgggaaggataaggttgctgcttgtgctaaacactatgttggtgatggtggaactcataatggaatcaatgagaataatacaatcattgatgagcatgggctgctaagcattcacatgccaccatattatgactctatcataaagggtgttgctactgttatggtttcttattcaagcttgaatggtgtaaaaatgcatgccaatcatgacttagtcactggataccttaaatccaagctgcattttagaggtttcgtgatatctgactggctaggagtggaccgtatcacctcacctcctggcgcaaactatacttattctgtgcaagctggaattaatgctggcattgatatggtgatggtgccatacaattacactgattacattaatgatctcacttctctcgttcacaagggtgtcatcaatataagcagaattgatgatgctgtgaagcggatccttcgagtcaaatttacaatgggcctgtttgagaaccctttagctgatcttagttttgcagagcagcttggaaagaaggagcatagggaactggctagagaagctgtcaggaaatcacttgttctgttaaaaaatgggaactctcccgatcagcaattcctacctctccctaagagagctagaagtatcctggtagctggaagtcatgctagcaatttggggtaccagtgtggtggatggtcaatccaatggatgggggacagtggtaatatcacaactgggacaacaattcttgatgcgataaagtctaccgttgctgactcgacgtctgttgtctactctgagaaccccgatgacagtttcatgaagcacaatgacttctcattcgctatcgtcgttgttggcgagccaccatacgctgaaacagttggcgatagcaccgacctcactatgctagaccctggtccagacacgatcagaactgtgtgtgctgcagttaaatgtgcagtagtcatcatttctggtcgtcccattgtgattgagccgtatgttccattagtggaagcgcttgttgcagcttggcttccgggaaccgaaggtcagggtgtcgcagatgtactctttggagactacggtttcacaggcaagctcccgcacacctggttcaagtctgtcgaccaactgcccatgaatgtgggagacctacagtacgatccactctaccctttcggcttcggtttgatgataaattcatcattgccagggttctctggtgttgacaatctgggatataggaagcaaagagtgctatttgctgtgctgtgttctctactgtcattggttctaatcagttaatgaattgggcgtagatagtatttcaacacatagctgcccttttgtagttctcatatgattagagtgttactaatctagctttagcgattgttagctgccaaatgagtcactggacgtcaatcaatctattatctatctatctactagatgattccccgcgttttgccgagatgctgccattgattatattcctcctgctctgattatcactttggttaccttgtgcaaattgattgttcatgatgatccaactgaggtccccaatcttaccaaacaccttttaagttgagtctaaaccatcaagaaagaaaaaatcaatggcacaacttcc

SEQ ID NO: 36366 - DNA, 2507 bp, Zea Mays
ggttgttcgcttccagctgtaaacactatagaaacagggcctcttgaattctgttcatggttcggggatcaagaccattaggccagactatttcaaagaaattttcagacatgagatactccaatatttcctggccattccttctactgctatgttttgtttcgatggcagatgcagagtacatgaagtacaaggatccaaagcaacctattaactctagaatcagggatcttatcggtaggatgacccttgctgaaaaaattggccaaatgacacagatagaacgccaggttgcatctgcaaatgtcatgaaacagtactttatagcatcttaagtggtggtggaagtgttccttctccccaggccagtcctgcaatttgggtgaacatggtcaatgaatttcagaaaggtgccttgtcaacgcgtctaggaattccattgatttatggaattgatgctgttcatggtaataacaatgtctacaacgccactttattccctcataacattggacttggagctacaagggatcctggcctcataaaaagaattggtgaagcaactgctcttgaagtgcgtgcgacaggcattcaatatacttttgctccatgtattgcagtttgcagagatccaagatggggtcggtgctatgagagctacagtgaggatcacaaggttgtgcagcagatgacagatattatccttggtttgcagggtgagatcccagtcaatcataccaagggagttccatatgtagctgggaaggataaggttgctgcttgtgctaaacactatgttggtgatggtggaactcataatggaatcaatgagaataatacaatcattgatgagcatgggctgctaagcattcacatgccaccatattatgactctatcataaagggtgttgctactgttatggtttcttattcaagcttgaatggtgtaaaaatgcatgccaatcatgacttagtcactggataccttaaatccaagctgcattttagagttagtaataatctgacgctttatctacattactttgctgtgatcttaaacttaagtttggatatcttgtgatggcttgcagggtttcgtgatatctgactggctaggagtggaccgtatcacctcacctcctggcgcaaactatacttattctgtgcaagctggaattaatgctggcattgatatggtgatggtgccatacaattacactgattacattaatgatctcacttctctcgttcacaagggtgtcatcaatataagcagaattgatgatgctgtgaagcggatccttcgagtcaaatttacaatgggcctgtttgagaaccctttagctgatcttagttttgcagagcagcttggaaagaaggagcatagggaactggctagagaagctgtcaggaaatcacttgttctgttaaaaaatgggaactctcccgatcagcaattcctacctctccctaagagagctagaagtatcctggtagctggaagtcatgctagcaatttggggtaccagtgtggtggatggtcaatccaatggatgggggacagtggtaatatcacaactgtgattcagtatcctgtgcagggacaacaattcttgatgcgataaagtctaccgttgctgactcgacgtctgttgtctactctgagaaccccgatgacagtttcatgaagcacaatgacttctcattcgctatcgtcgttgttggcgagccaccatacgctgaaacagttggcgatagcaccgacctcactatgctagaccctggtccagacacgatcagaactgtgtgtgctgcagttaaatgtgcagtagtcatcatttctggtcgtcccattgtgattgagccgtatgttccattagtggaagcgcttgttgcagcttggcttccgggaaccgaaggtcagggtgtcgcagatgtactctttggagactacggtttcacaggcaagctcccgcacacctggttcaagtctgtcgaccaactgcccatgaatgtgggagacctacagtacgatccactctaccctttcggcttcggtttgatgataaattcatcattgccagggttctctggtgttgacaatctgggatataggaagcaaagagtgctatttgctgtgctgtgttctctactgtcattggttctaatcagttaatgaattgggcgtagatagtatttcaacacatagctgcccttttgtagttctcatatgattagagtgttactaatctagctttagcgattgttagctgccaaatgagtcactggacgtcaatcaatctattatctatctatctactagatgattccccgcgttttgccgagatgctgccattgattatattcctcctgctctgattatcactttggttaccttgtgcaaattgattgttcatgatgatccaactgaggtccccaatcttaccaaacaccttttaagttgagtctaaaccatcaagaaagaaaaaatcaatggcacaacttcc

SEQ ID NO: 36367 - DNA, 2536 bp, Zea Mays
tgctgtttctttttcagcctcgcattaggatttccagggaaatcgggggatgccactatagtgtcccgctgtcggctaatttggcggccagtattttataactaatgggttgttcgcttccagctgtaaacactatagaaacagggcctcttgaattctgttcatggttcggggatcaagaccattaggccagactatttcaaagaaattttcagacatgagatactccaatatttcctggccattccttctactgctatgttttgtttcgatggcagatgcagagtacatgaagtacaaggatccaaagcaacctattaactctagaatcagggatcttatcggtaggatgacccttgctgaaaaaattggccaaatgacacagatagaacgccaggttgcatctgcaaatgtcatgaaacagtactttataggaagcatcttaagtggtggtggaagtgttccttctccccaggccagtcctgcaatttgggtgaacatggtcaatgaatttcagaaaggtgccttgtcaacgcgtctaggaattccattgatttatggaattgatgctgttcatggtaataacaatgtctacaacgccactttattccctcataacattggacttggagctacaagggatcctggcctcataaaaagaattggtgaagcaactgctcttgaagtgcgtgcgacaggcattcaatatacttttgctccatgtattgcagtttgcagagatccaagatggggtcggtgctatgagagctacagtgaggatcacaaggttgtgcagcagatgacagatattatccttggtttgcagggtgagatcccagtcaatcataccaagggagttccatatgtagctgggaaggataaggttgctgcttgtgctaaacactatgttggtgatggtggaactcataatggaatcaatgagaataatacaatcattgatgagcatgggctgctaagcattcacatgccaccatattatgactctatcataaagggtgttgctactgttatggtttcttattcaagcttgaatggtgtaaaaatgcatgccaatcatgacttagtcactggataccttaaatccaagctgcattttagaggtttcgtgatatctgactggctaggagtggaccgtatcacctcacctcctggcgcaaactatacttattctgtgcaagctggaattaatgctggcattgatatggtgatggtgccatacaattacactgattacattaatgatctcacttctctcgttcacaagggtgtcatcaatataagcagaattgatgatgctgtgaagcggatccttcgagtcaaatttacaatgggcctgtttgagaaccctttagctgatcttagttttgcagagcagcttggaaagaaggagcatagggaactggctagagaagctgtcaggaaatcacttgttctgttaaaaaatgggaactctcccgatcagcaattcctacctctccctaagagagctagaagtatcctggtagctggaagtcatgctagcaatttggggtaccagtgtggtggatggtcaatccaatggatgggggacagtggtaatatcacaactgtgattcagtatcctgtgcagggacaacaattcttgatgcgataaagtctaccgttgctgactcgacgtctgttgtctactctgagaaccccgatgacagtttcatgaagcacaatgacttctcattcgctatcgtcgttgttggcgagccaccatacgctgaaacagttggcgatagcaccgacctcactatgctagaccctggtccagacacgatcagaactgtgtgtgctgcagttaaatgtgcagtagtcatcatttctggtcgtcccattgtgattgagccgtatgttccattagtggaagcgcttgttgcagcttggcttccgggaaccgaaggtcagggtgtcgcagatgtactctttggagactacggtttcacaggcaagctcccgcacacctggttcaagtctgtcgaccaactgcccatgaatgtgggagacctacagtacgatccactctaccctttcggcttcggtttgatgataaattcatcattgccagggttctctggtgttgacaatctgggatataggaagcaaagagtgctatttgctgtgctgtgttctctactgtcattggttctaatcagttaatgaattgggcgtagatagtatttcaacacatagctgcccttttgtagttctcatatgattagagtgttactaatctagctttagcgattgttagctgccaaatgagtcactggacgtcaatcaatctattatctatctatctactagatgattccccgcgttttgccgagatgctgccattgattatattcctcctgctctgattatcactttggttaccttgtgcaaattgattgttcatgatgatccaactgaggtccccaatcttaccaaacaccttttaagttgagtctaaaccatcaagaaagaaaaaatcaatggcacaacttcc

SEQ ID NO: 36368 - DNA, 2543 bp, Zea Mays
aacaaatgctgtttccatctgcctgccctctttcagcgcgtgcccccgaatgttccttccgaaagcaccgcgctcgcctacagatcacgacacctcgcaccgccgctcccacttccggcctcgccggtgcgtgcatgtgcgcgccagggacgccaattgagctcggctccagcacgcaatcggctgcagagtgagctcagagctcaccctctccctctgccgctgctccgctggcctcttgaattctgttcatggttcggggatcaagaccattaggccagactatttcaaagaaattttcagacatgagatactccaatatttcctggccattccttctactgctatgttttgtttcgatggcagatgcagagtacatgaagtacaaggatccaaagcaacctattaactctagaatcagggatcttatcggtaggatgacccttgctgaaaaaattggccaaatgacacagatagaacgccaggttgcatctgcaaatgtcatgaaacagtactttataggaagcatcttaagtggtggtggaagtgttccttctccccaggccagtcctgcaatttgggtgaacatggtcaatgaatttcagaaaggtgccttgtcaacgcgtctaggaattccattgatttatggaattgatgctgttcatgggatcctggcctcataaaaagaattggtgaagcaactgctcttgaagtgcgtgcgacaggcattcaatatacttttgctccatgtattgcagtttgcagagatccaagatggggtcggtgctatgagagctacagtgaggatcacaaggttgtgcagcagatgacagatattatccttggtttgcagggtgagatcccagtcaatcataccaagggagttccatatgtagctgggaaggataaggttgctgcttgtgctaaacactatgttggtgatggtggaactcataatggaatcaatgagaataatacaatcattgatgagcatgggctgctaagcattcacatgccaccatattatgactctatcataaagggtgttgctactgttatggtttcttattcaagcttgaatggtgtaaaaatgcatgccaatcatgacttagtcactggataccttaaatccaagctgcattttagaggtttcgtgatatctgactggctaggagtggaccgtatcacctcacctcctggcgcaaactatacttattctgtgcaagctggaattaatgctggcattgatatggtgatggtgccatacaattacactgattacattaatgatctcacttctctcgttcacaagggtgtcatcaatataagcagaattgatgatgctgtgaagcggatccttcgagtcaaatttacaatgggcctgtttgagaaccctttagctgatcttagttttgcagagcagcttggaaagaaggagcatagggaactggctagagaagctgtcaggaaatcacttgttctgttaaaaaatgggaactctcccgatcagcaattcctacctctccctaagagagctagaagtatcctggtagctggaagtcatgctagcaatttggggtaccagtgtggtggatggtcaatccaatggatgggggacagtggtaatatcacaactgggacaacaattcttgatgcgataaagtctaccgttgctgactcgacgtctgttgtctactctgagaaccccgatgacagtttcatgaagcacaatgacttctcattcgctatcgtcgttgttggcgagccaccatacgctgaaacagttggcgatagcaccgacctcactatgctagaccctggtccagacacgatcagaactgtgtgtgctgcagttaaatgtgcagtagtcatcatttctggtcgtcccattgtgattgagccgtatgttccattagtggaagcgcttgttgcagcttggcttccgggaaccgaaggtcagggtgtcgcagatgtactctttggagactacggtttcacaggcaagctcccgcacacctggttcaagtctgtcgaccaactgcccatgaatgtgggagacctacagtacgatccactctaccctttcggcttcggtttgatgataaattcatcattgccagggttctctggtgttgacaatctgggatataggaagcaaagagtgctatttgctgtgctgtgttctctactgtcattggttctaatcagttaatgaattgggcgtagatagtatttcaacacatagctgcccttttgtagttctcatatgattagagtgttactaatctagctttagcgattgttagctgccaaatgagtcactggacgtcaatcaatctattatctatctatctactagatgattccccgcgttttgccgagatgctgccattgattatattcctcctgctctgattatcactttggttaccttgtgcaaattgattgttcatgatgatccaactgaggtccccaatcttaccaaacaccttttaagttgagtctaaaccatcaagaaagaaaaaatcaatggcacaacttcc

SEQ ID NO: 36369 - DNA, 2537 bp, Zea Mays
aacaaatgctgtttccatctgcctgccctctttcagcgcgtgcccccgaatgttccttccgaaagcaccgcgctcgcctacagatcacgacacctcgcaccgccgctcccacttccggcctcgccggtgcgtgcatgtgcgcgccagggacgccaattgagctcggctccagcacgcaatcggctgcagagtgagctcagagctcaccctctccctctgccgctgctccgctggcctcttgaattctgttcatggttcggggatcaagaccattaggccagactatttcaaagaaattttcagacatgagatactccaatatttcctggccattccttctactgctatgttttgtttcgatggcagatgcagagtacatgaagtacaaggatccaaagcaacctattaactctagaatcagggatcttatcggtaggatgacccttgctgaaaaaattggccaaatgacacagatagaacgccaggttgcatctgcaaatgtcatgaaacagtactttataggaagcatcttaagtggtggtggaagtgttccttctccccaggccagtcctgcaatttgggtgaacatggtcaatgaatttcagaaaggtgccttgtcaacgcgtctaggaattccattgatttatggaattgatgctgttcatggtaataacaatgtctacaacgccactttattccctcataacattggacttggagctacaagggatcctggcctcataaaaagaattggtgaagcaactgctcttgaagtgcgtgcgacaggcattcaatatacttttgctccatgtattgcagtttgcagagatccaagatggggtcggtgctatgagagctacagtgaggatcacaaggttgtgcagcagatgacagatattatccttggtttgcagggtgagatcccagtcaatcataccaagggagttccatatgtagctgggaaggataaggttgctgcttgtgctaaacactatgttggtgatggtggaactcataatggaatcaatgagaataatacaatcattgatgagcatgggctgctaagcattcacatgccaccatattatgactctatcataaagggtgttgctactgttatgggtttcgtgatatctgactggctaggagtggaccgtatcacctcacctcctggcgcaaactatacttattctgtgcaagctggaattaatgctggcattgatatggtgatggtgccatacaattacactgattacattaatgatctcacttctctcgttcacaagggtgtcatcaatataagcagaattgatgatgctgtgaagcggatccttcgagtcaaatttacaatgggcctgtttgagaaccctttagctgatcttagttttgcagagcagcttggaaagaaggagcatagggaactggctagagaagctgtcaggaaatcacttgttctgttaaaaaatgggaactctcccgatcagcaattcctacctctccctaagagagctagaagtatcctggtagctggaagtcatgctagcaatttggggtaccagtgtggtggatggtcaatccaatggatgggggacagtggtaatatcacaactgtgattcagtatcctgtgcagggacaacaattcttgatgcgataaagtctaccgttgctgactcgacgtctgttgtctactctgagaaccccgatgacagtttcatgaagcacaatgacttctcattcgctatcgtcgttgttggcgagccaccatacgctgaaacagttggcgatagcaccgacctcactatgctagaccctggtccagacacgatcagaactgtgtgtgctgcagttaaatgtgcagtagtcatcatttctggtcgtcccattgtgattgagccgtatgttccattagtggaagcgcttgttgcagcttggcttccgggaaccgaaggtcagggtgtcgcagatgtactctttggagactacggtttcacaggcaagctcccgcacacctggttcaagtctgtcgaccaactgcccatgaatgtgggagacctacagtacgatccactctaccctttcggcttcggtttgatgataaattcatcattgccagggttctctggtgttgacaatctgggatataggaagcaaagagtgctatttgctgtgctgtgttctctactgtcattggttctaatcagttaatgaattgggcgtagatagtatttcaacacatagctgcccttttgtagttctcatatgattagagtgttactaatctagctttagcgattgttagctgccaaatgagtcactggacgtcaatcaatctattatctatctatctactagatgattccccgcgttttgccgagatgctgccattgattatattcctcctgctctgattatcactttggttaccttgtgcaaattgattgttcatgatgatccaactgaggtccccaatcttaccaaacaccttttaagttgagtctaaaccatcaagaaagaaaaaatcaatggcacaacttcc

SEQ ID NO: 36370 - DNA, 2517 bp, Zea Mays
aacaaatgctgtttccatctgcctgccctctttcagcgcgtgcccccgaatgttccttccgaaagcaccgcgctcgcctacagatcacgacacctcgcaccgccgctcccacttccggcctcgccggtgcgtgcatgtgcgcgccagggacgccaattgagctcggctccagcacgcaatcggctgcagagtgagctcagagctcaccctctccctctgccgctgctccgctggcctcttgaattctgttcatggttcggggatcaagaccattaggccagactatttcaaagaaattttcagacatgagatactccaatatttcctggccattccttctactgctatgttttgtttcgatggcagatgcagagtacatgaagtacaaggatccaaagcaacctattaactctagaatcagggatcttatcggtaggatgacccttgctgaaaaaattggccaaatgacacagatagaacgccaggttgcatctgcaaatgtcatgaaacagtactttataggaagcatcttaagtggtggtggaagtgttccttctccccaggccagtcctgcaatttgggtgaacatggtcaatgaatttcagaaaggtgccttgtcaacgcgtctaggaattccattgatttatggaattgatgctgttcatggtaataacaatgtctacaacgccactttattccctcataacattggacttggagctacaagggatcctggcctcataaaaagaattggtgaagcaactgctcttgaagtgcgtgcgacaggcattcaatatacttttgctccatgtattgcagtttgcagagatccaagatggggtcggtgctatgagagctacagtgaggatcacaaggttgtgcagcagatgacagatattatccttggtttgcagggtgagatcccagtcaatcataccaagggagttccatatgtagctgggaaggataaggttgctgcttgtgctaaacactatgttggtgatggtggaactcataatggaatcaatgagaataatacaatcattgatgagcatgggctgctaagcattcacatgccaccatattatgactctatcataaagggtgttgctactgttatgggtttcgtgatatctgactggctaggagtggaccgtatcacctcacctcctggcgcaaactatacttattctgtgcaagctggaattaatgctggcattgatatggtgatggtgccatacaattacactgattacattaatgatctcacttctctcgttcacaagggtgtcatcaatataagcagaattgatgatgctgtgaagcggatccttcgagtcaaatttacaatgggcctgtttgagaaccctttagctgatcttagttttgcagagcagcttggaaagaaggagcatagggaactggctagagaagctgtcaggaaatcacttgttctgttaaaaaatgggaactctcccgatcagcaattcctacctctccctaagagagctagaagtatcctggtagctggaagtcatgctagcaatttggggtaccagtgtggtggatggtcaatccaatggatgggggacagtggtaatatcacaactgggacaacaattcttgatgcgataaagtctaccgttgctgactcgacgtctgttgtctactctgagaaccccgatgacagtttcatgaagcacaatgacttctcattcgctatcgtcgttgttggcgagccaccatacgctgaaacagttggcgatagcaccgacctcactatgctagaccctggtccagacacgatcagaactgtgtgtgctgcagttaaatgtgcagtagtcatcatttctggtcgtcccattgtgattgagccgtatgttccattagtggaagcgcttgttgcagcttggcttccgggaaccgaaggtcagggtgtcgcagatgtactctttggagactacggtttcacaggcaagctcccgcacacctggttcaagtctgtcgaccaactgcccatgaatgtgggagacctacagtacgatccactctaccctttcggcttcggtttgatgataaattcatcattgccagggttctctggtgttgacaatctgggatataggaagcaaagagtgctatttgctgtgctgtgttctctactgtcattggttctaatcagttaatgaattgggcgtagatagtatttcaacacatagctgcccttttgtagttctcatatgattagagtgttactaatctagctttagcgattgttagctgccaaatgagtcactggacgtcaatcaatctattatctatctatctactagatgattccccgcgttttgccgagatgctgccattgattatattcctcctgctctgattatcactttggttaccttgtgcaaattgattgttcatgatgatccaactgaggtccccaatcttaccaaacaccttttaagttgagtctaaaccatcaagaaagaaaaaatcaatggcacaacttcc

SEQ ID NO: 36371 - DNA, 2402 bp, Zea Mays
aacaaatgctgtttccatctgcctgccctctttcagcgcgtgcccccgaatgttccttccgaaagcaccgcgctcgcctacagatcacgacacctcgcaccgccgctcccacttccggcctcgccggtgcgtgcatgtgcgcgccagggacgccaattgagctcggctccagcacgcaatcggctgcagagtgagctcagagctcaccctctccctctgccgctgctccgctggcctcttgaattctgttcatggttcggggatcaagaccattaggccagactatttcaaagaaattttcagacatgagatactccaatatttcctggccattccttctactgctatgttttgtttcgatggcagatgcagagtacatgaagtacaaggatccaaagcaacctattaactctagaatcagggatcttatcggtaggatgacccttgctgaaaaaattggccaaatgacacagatagaacgccaggttgcatctgcaaatgtcatgaaacagtactttataggaagcatcttaagtggtggtggaagtgttccttctccccaggccagtcctgcaatttgggtgaacatggtcaatgaatttcagaaaggtgccttgtcaacgcgtctaggaattccattgatttatggaattgatgctgttcatggtaataacaatgtctacaacgccactttattccctcataacattggacttggagctacaagggatcctggcctcataaaaagaattggtgaagcaactgctcttgaagtgcgtgcgacaggcattcaatatacttttgctccatgtattgcagtttgcagagatccaagatggggtcggtgctatgagagctacagtgaggatcacaaggttgtgcagcagatgacagatattatccttggtttgcagggtgagatcccagtcaatcataccaagggagttccatatgtagctgggaaggataaggttgctgcttgtgctaaacactatgttggtgatggtggaactcataatggaatcaatgagaataatacaatcattgatgagcatgggctgctaagcattcacatgccaccatattatgactctatcataaagggtgttgctactgttatggtttcttattcaagcttgaatggtgtaaaaatgcatgccaatcatgacttagtcactggataccttaaatccaagctgcattttagaggtttcgtgatatctgactggctaggagtggaccgtatcacctcacctcctggcgcaaactatacttattctgtgcaagctggaattaatgctggcattgatatggtgatggtgccatacaattacactgattacattaatgatctcacttctctcgttcacaagggtgtcatcaatataagcagaattgatgatgctgtgaagcggatccttcgagtcaaatttacaatgggcctgtttgagaaccctttagctgatcttagttttgcagagcagcttggaaagaagggacaacaattcttgatgcgataaagtctaccgttgctgactcgacgtctgttgtctactctgagaaccccgatgacagtttcatgaagcacaatgacttctcattcgctatcgtcgttgttggcgagccaccatacgctgaaacagttggcgatagcaccgacctcactatgctagaccctggtccagacacgatcagaactgtgtgtgctgcagttaaatgtgcagtagtcatcatttctggtcgtcccattgtgattgagccgtatgttccattagtggaagcgcttgttgcagcttggcttccgggaaccgaaggtcagggtgtcgcagatgtactctttggagactacggtttcacaggcaagctcccgcacacctggttcaagtctgtcgaccaactgcccatgaatgtgggagacctacagtacgatccactctaccctttcggcttcggtttgatgataaattcatcattgccagggttctctggtgttgacaatctgggatataggaagcaaagagtgctatttgctgtgctgtgttctctactgtcattggttctaatcagttaatgaattgggcgtagatagtatttcaacacatagctgcccttttgtagttctcatatgattagagtgttactaatctagctttagcgattgttagctgccaaatgagtcactggacgtcaatcaatctattatctatctatctactagatgattccccgcgttttgccgagatgctgccattgattatattcctcctgctctgattatcactttggttaccttgtgcaaattgattgttcatgatgatccaactgaggtccccaatcttaccaaacaccttttaagttgagtctaaaccatcaagaaagaaaaaatcaatggcacaacttcc

SEQ ID NO: 36372 - DNA, 2380 bp, Zea Mays
aacaaatgctgtttccatctgcctgccctctttcagcgcgtgcccccgaatgttccttccgaaagcaccgcgctcgcctacagatcacgacacctcgcaccgccgctcccacttccggcctcgccggtgcgtgcatgtgcgcgccagggacgccaattgagctcggctccagcacgcaatcggctgcagagtgagctcagagctcaccctctccctctgccgctgctccgctggcctcttgaattctgttcatggttcggggatcaagaccattaggccagactatttcaaagaaattttcagacatgagatactccaatatttcctggccattccttctactgctatgttttgtttcgatggcagatgcagagtacatgaagtacaaggatccaaagcaacctattaactctagaatcagggatcttatcggtaggatgacccttgctgaaaaaattggccaaatgacacagatagaacgccaggttgcatctgcaaatgtcatgaaacagtactttataggaagcatcttaagtggtggtggaagtgttccttctccccaggccagtcctgcaatttgggtgaacatggtcaatgaatttcagaaaggtgccttgtcaacgcgtctaggaattccattgatttatggaattgatgctgttcatggtaataacaatgtctacaacgccactttattccctcataacattggacttggagctacaagggatcctggcctcataaaaagaattggtgaagcaactgctcttgaagtgcgtgcgacaggcattcaatatacttttgctccatgtattgcagtttgcagagatccaagatggggtcggtgctatgagagctacagtgaggatcacaaggttgtgcagcagatgacagatattatccttggtttgcagggtgagatcccagtcaatcataccaagggagttccatatgtagctgggaaggtttcgtgatatctgactggctaggagtggaccgtatcacctcacctcctggcgcaaactatacttattctgtgcaagctggaattaatgctggcattgatatggtgatggtgccatacaattacactgattacattaatgatctcacttctctcgttcacaagggtgtcatcaatataagcagaattgatgatgctgtgaagcggatccttcgagtcaaatttacaatgggcctgtttgagaaccctttagctgatcttagttttgcagagcagcttggaaagaaggagcatagggaactggctagagaagctgtcaggaaatcacttgttctgttaaaaaatgggaactctcccgatcagcaattcctacctctccctaagagagctagaagtatcctggtagctggaagtcatgctagcaatttggggtaccagtgtggtggatggtcaatccaatggatgggggacagtggtaatatcacaactgtgattcagtatcctgtgcagggacaacaattcttgatgcgataaagtctaccgttgctgactcgacgtctgttgtctactctgagaaccccgatgacagtttcatgaagcacaatgacttctcattcgctatcgtcgttgttggcgagccaccatacgctgaaacagttggcgatagcaccgacctcactatgctagaccctggtccagacacgatcagaactgtgtgtgctgcagttaaatgtgcagtagtcatcatttctggtcgtcccattgtgattgagccgtatgttccattagtggaagcgcttgttgcagcttggcttccgggaaccgaaggtcagggtgtcgcagatgtactctttggagactacggtttcacaggcaagctcccgcacacctggttcaagtctgtcgaccaactgcccatgaatgtgggagacctacagtacgatccactctaccctttcggcttcggtttgatgataaattcatcattgccagggttctctggtgttgacaatctgggatataggaagcaaagagtgctatttgctgtgctgtgttctctactgtcattggttctaatcagttaatgaattgggcgtagatagtatttcaacacatagctgcccttttgtagttctcatatgattagagtgttactaatctagctttagcgattgttagctgccaaatgagtcactggacgtcaatcaatctattatctatctatctactagatgattccccgcgttttgccgagatgctgccattgattatattcctcctgctctgattatcactttggttaccttgtgcaaattgattgttcatgatgatccaactgaggtccccaatcttaccaaacaccttttaagttgagtctaaaccatcaagaaagaaaaaatcaatggcacaacttcc

SEQ ID NO: 36373 - DNA, 2481 bp, Zea Mays
aacaaatgctgtttccatctgcctgccctctttcagcgcgtgcccccgaatgttccttccgaaagcaccgcgctcgcctacagatcacgacacctcgcaccgccgctcccacttccggcctcgccggtgcgtgcatgtgcgcgccagggacgccaattgagctcggctccagcacgcaatcggctgcagagtgagctcagagctcaccctctccctctgccgctgctccgctaccattaggccagactatttcaaagaaattttcagacatgagatactccaatatttcctggccattccttctactgctatgttttgtttcgatggcagatgcagagtacatgaagtacaaggatccaaagcaacctattaactctagaatcagggatcttatcggtaggatgacccttgctgaaaaaattggccaaatgacacagatagaacgccaggttgcatctgcaaatgtcatgaaacagtactttataggaagcatcttaagtggtggtggaagtgttccttctccccaggccagtcctgcaatttgggtgaacatggtcaatgaatttcagaaaggtgccttgtcaacgcgtctaggaattccattgatttatggaattgatgctgttcatggtaataacaatgtctacaacgccactttattccctcataacattggacttggagctacaagggatcctggcctcataaaaagaattggtgaagcaactgctcttgaagtgcgtgcgacaggcattcaatatacttttgctccatgtattgcagtttgcagagatccaagatggggtcggtgctatgagagctacagtgaggatcacaaggttgtgcagcagatgacagatattatccttggtttgcagggtgagatcccagtcaatcataccaagggagttccatatgtagctgggaaggataaggttgctgcttgtgctaaacactatgttggtgatggtggaactcataatggaatcaatgagaataatacaatcattgatgagcatgggctgctaagcattcacatgccaccatattatgactctatcataaagggtgttgctactgttatgggtttcgtgatatctgactggctaggagtggaccgtatcacctcacctcctggcgcaaactatacttattctgtgcaagctggaattaatgctggcattgatatggtgatggtgccatacaattacactgattacattaatgatctcacttctctcgttcacaagggtgtcatcaatataagcagaattgatgatgctgtgaagcggatccttcgagtcaaatttacaatgggcctgtttgagaaccctttagctgatcttagttttgcagagcagcttggaaagaaggagcatagggaactggctagagaagctgtcaggaaatcacttgttctgttaaaaaatgggaactctcccgatcagcaattcctacctctccctaagagagctagaagtatcctggtagctggaagtcatgctagcaatttggggtaccagtgtggtggatggtcaatccaatggatgggggacagtggtaatatcacaactgggacaacaattcttgatgcgataaagtctaccgttgctgactcgacgtctgttgtctactctgagaaccccgatgacagtttcatgaagcacaatgacttctcattcgctatcgtcgttgttggcgagccaccatacgctgaaacagttggcgatagcaccgacctcactatgctagaccctggtccagacacgatcagaactgtgtgtgctgcagttaaatgtgcagtagtcatcatttctggtcgtcccattgtgattgagccgtatgttccattagtggaagcgcttgttgcagcttggcttccgggaaccgaaggtcagggtgtcgcagatgtactctttggagactacggtttcacaggcaagctcccgcacacctggttcaagtctgtcgaccaactgcccatgaatgtgggagacctacagtacgatccactctaccctttcggcttcggtttgatgataaattcatcattgccagggttctctggtgttgacaatctgggatataggaagcaaagagtgctatttgctgtgctgtgttctctactgtcattggttctaatcagttaatgaattgggcgtagatagtatttcaacacatagctgcccttttgtagttctcatatgattagagtgttactaatctagctttagcgattgttagctgccaaatgagtcactggacgtcaatcaatctattatctatctatctactagatgattccccgcgttttgccgagatgctgccattgattatattcctcctgctctgattatcactttggttaccttgtgcaaattgattgttcatgatgatccaactgaggtccccaatcttaccaaacaccttttaagttgagtctaaaccatcaagaaagaaaaaatcaatggcacaacttcc

SEQ ID NO: 36374 - DNA, 2628 bp, Zea Mays
aacaaatgctgtttccatctgcctgccctctttcagcgcgtgcccccgaatgttccttccgaaagcaccgcgctcgcctacagatcacgacacctcgcaccgccgctcccacttccggcctcgccggtgcgtgcatgtgcgcgccagggacgccaattgagctcggctccagcacgcaatcggctgcagagtgagctcagagctcaccctctccctctgccgctgctccgctggcctcttgaattctgttcatggttcggggatcaagaccattaggccagactatttcaaagaaattttcagacatgagatactccaatatttcctggccattccttctactgctatgttttgtttcgatggcagatgcagagtacatgaagtacaaggatccaaagcaacctattaactctagaatcagggatcttatcggtaggatgacccttgctgaaaaaattggccaaatgacacagatagaacgccaggttgcatctgcaaatgtcatgaaacagtactttataggaagcatcttaagtggtggtggaagtgttccttctccccaggccagtcctgcaatttgggtgaacatggtcaatgaatttcagaaaggtgccttgtcaacgcgtctaggaattccattgatttatggaattgatgctgttcatggtaataacaatgtctacaacgccactttattccctcataacattggacttggagctacaagggatcctggcctcataaaaagaattggtgaagcaactgctcttgaagtgcgtgcgacaggcattcaatatacttttgctccatgtattgcagtttgcagagatccaagatggggtcggtgctatgagagctacagtgaggatcacaaggttgtgcagcagatgacagatattatccttggtttgcagggtgagatcccagtcaatcataccaagggagttccatatgtagctgggaaggataaggttgctgcttgtgctaaacactatgttggtgatggtggaactcataatggaatcaatgagaataatacaatcattgatgagcatgggctgctaagcattcacatgccaccatattatgactctatcataaagggtgttgctactgttatggtttcttattcaagcttgaatggtgtaaaaatgcatgccaatcatgacttagtcactggataccttaaatccaagctgcattttagagttaggtttcgtgatatctgactggctaggagtggaccgtatcacctcacctcctggcgcaaactatacttattctgtgcaagctggaattaatgctggcattgatatggtgatggtgccatacaattacactgattacattaatgatctcacttctctcgttcacaagggtgtcatcaatataagcagaattgatgatgctgtgaagcggatccttcgagtcaaatttacaatgggcctgtttgagaaccctttagctgatcttagttttgcagagcagcttggaaagaaggagcatagggaactggctagagaagctgtcaggaaatcacttgttctgttaaaaaatgggaactctcccgatcagcaattcctacctctccctaagagagctagaagtatcctggtagctggaagtcatgctagcaatttggggtaccagtgtggtggatggtcaatccaatggatgggggacagtggtaatatcacaactgtgattcagtatcctgtgcagggacaacaattcttgatgcgataaagtctaccgttgctgactcgacgtctgttgtctactctgagaaccccgatgacagtttcatgaagcacaatgacttctcattcgctatcgtcgttgttggcgagccaccatacgctgaaacagttggcgatagcaccgacctcactatgctagaccctggtccagacacgatcagaactgtgtgtgctgcagttaaatgtgcagtagtcatcatttctggtcgtcccattgtgattgagccgtatgttccattagtggaagcgcttgttgcagcttggcttccgggaaccgaaggtcagggtgtcgcagatgtactctttggagactacggtttcacaggcaagctcccgcacacctggttcaagtctgtcgaccaactgcccatgaatgtgggagacctacagtacgatccactctaccctttcggcttcggtttgatgataaattcatcattgccagggttctctggtgttgacaatctgggatataggaagcaaagagtgctatttgctgtgctgtgttctctactgtcattggttctaatcagttaatgaattgggcgtagatagtatttcaacacatagctgcccttttgtagttctcatatgattagagtgttactaatctagctttagcgattgttagctgccaaatgagtcactggacgtcaatcaatctattatctatctatctactagatgattccccgcgttttgccgagatgctgccattgattatattcctcctgctctgattatcactttggttaccttgtgcaaattgattgttcatgatgatccaactgaggtccccaatcttaccaaacaccttttaagttgagtctaaaccatcaagaaagaaaaaatcaatggcacaacttcc

SEQ ID NO: 36375 - DNA, 2616 bp, Zea Mays
aacaaatgctgtttccatctgcctgccctctttcagcgcgtgcccccgaatgttccttccgaaagcaccgcgctcgcctacagatcacgacacctcgcaccgccgctcccacttccggcctcgccggtgcgtgcatgtgcgcgccagggacgccaattgagctcggctccagcacgcaatcggctgcagagtgagctcagagctcaccctctccctctgccgctgctccgctggcctcttgaattctgttcatggttcggggatcaagaccattaggccagactatttcaaagaaattttcagacatgagatactccaatatttcctggccattccttctactgctatgttttgtttcgatggcagatgcagagtacatgaagtacaaggatccaaagcaacctattaactctagaatcagggatcttatcggtaggatgacccttgctgaaaaaattggccaaatgacacagatagaacgccaggttgcatctgcaaatgtcatgaaacagtactttataggaagcatcttaagtggtggtggaagtgttccttctccccaggccagtcctgcaatttgggtgaacatggtcaatgaatttcagaaaggtgccttgtcaacgcgtctaggaattccattgatttatggaattgatgctgttcatggtaataacaatgtctacaacgccactttattccctcataacattggacttggagctacaagggatcctggcctcataaaaagaattggtgaagcaactgctcttgaagtgcgtgcgacaggcattcaatatacttttgctccatgtattgcaagatccaagatggggtcggtgctatgagagctacagtgaggatcacaaggttgtgcagcagatgacagatattatccttggtttgcagggtgagatcccagtcaatcataccaagggagttccatatgtagctgggaaggataaggttgctgcttgtgctaaacactatgttggtgatggtggaactcataatggaatcaatgagaataatacaatcattgatgagcatgggctgctaagcattcacatgccaccatattatgactctatcataaagggtgttgctactgttatggtttcttattcaagcttgaatggtgtaaaaatgcatgccaatcatgacttagtcactggataccttaaatccaagctgcattttagaggtttcgtgatatctgactggctaggagtggaccgtatcacctcacctcctggcgcaaactatacttattctgtgcaagctggaattaatgctggcattgatatggtgatggtgccatacaattacactgattacattaatgatctcacttctctcgttcacaagggtgtcatcaatataagcagaattgatgatgctgtgaagcggatccttcgagtcaaatttacaatgggcctgtttgagaaccctttagctgatcttagttttgcagagcagcttggaaagaaggagcatagggaactggctagagaagctgtcaggaaatcacttgttctgttaaaaaatgggaactctcccgatcagcaattcctacctctccctaagagagctagaagtatcctggtagctggaagtcatgctagcaatttggggtaccagtgtggtggatggtcaatccaatggatgggggacagtggtaatatcacaactgtgattcagtatcctgtgcagggacaacaattcttgatgcgataaagtctaccgttgctgactcgacgtctgttgtctactctgagaaccccgatgacagtttcatgaagcacaatgacttctcattcgctatcgtcgttgttggcgagccaccatacgctgaaacagttggcgatagcaccgacctcactatgctagaccctggtccagacacgatcagaactgtgtgtgctgcagttaaatgtgcagtagtcatcatttctggtcgtcccattgtgattgagccgtatgttccattagtggaagcgcttgttgcagcttggcttccgggaaccgaaggtcagggtgtcgcagatgtactctttggagactacggtttcacaggcaagctcccgcacacctggttcaagtctgtcgaccaactgcccatgaatgtgggagacctacagtacgatccactctaccctttcggcttcggtttgatgataaattcatcattgccagggttctctggtgttgacaatctgggatataggaagcaaagagtgctatttgctgtgctgtgttctctactgtcattggttctaatcagttaatgaattgggcgtagatagtatttcaacacatagctgcccttttgtagttctcatatgattagagtgttactaatctagctttagcgattgttagctgccaaatgagtcactggacgtcaatcaatctattatctatctatctactagatgattccccgcgttttgccgagatgctgccattgattatattcctcctgctctgattatcactttggttaccttgtgcaaattgattgttcatgatgatccaactgaggtccccaatcttaccaaacaccttttaagttgagtctaaaccatcaagaaagaaaaaatcaatggcacaacttcc

SEQ ID NO: 36376 - DNA, 2773 bp, Zea Mays
caactcttcccagcacacttcctcagcaagacctctgcgtcgaatgtatagagaggaccgaattggagcgttcacccattcgcgtaaattgtcttgtgaaatgctttccagttgaatgccaaacgtcgtttcgtaccgtgtgcaagtgcaacaaatgctgtttccatctgcctgccctctttcagcgcgtgcccccgaatgttccttccgaaagcaccgcgctcgcctacagatcacgacacctcgcaccgccgctcccacttccggcctcgccggtgcgtgcatgtgcgcgccagggacgccaattgagctcggctccagcacgcaatcggctgcagagtgagctcagagctcaccctctccctctgccgctgctccgctggcctcttgaattctgttcatggttcggggatcaagaccattaggccagactatttcaaagaaattttcagacatgagatactccaatatttcctggccattccttctactgctatgttttgtttcgatggcagatgcagagtacatgaagtacaaggatccaaagcaacctattaactctagaatcagggatcttatcggtaggatgacccttgctgaaaaaattggccaaatgacacagatagaacgccaggttgcatctgcaaatgtcatgaaacagtactttataggaagcatcttaagtggtggtggaagtgttccttctccccaggccagtcctgcaatttgggtgaacatggtcaatgaatttcagaaaggtgccttgtcaacgcgtctaggaattccattgatttatggaattgatgctgttcatggtaataacaatgtctacaacgccactttattccctcataacattggacttggagctacaagggatcctggcctcataaaaagaattggtgaagcaactgctcttgaagtgcgtgcgacaggcattcaatatacttttgctccatgtattgcagtttgcagagatccaagatggggtcggtgctatgagagctacagtgaggatcacaaggttgtgcagcagatgacagatattatccttggtttgcagggtgagatcccagtcaatcataccaagggagttccatatgtagctgggaaggataaggttgctgcttgtgctaaacactatgttggtgatggtggaactcataatggaatcaatgagaataatacaatcattgatgagcatgggctgctaagcattcacatgccaccatattatgactctatcataaagggtgttgctactgttatggtttcttattcaagcttgaatggtgtaaaaatgcatgccaatcatgacttagtcactggataccttaaatccaagctgcattttagaggtttcgtgatatctgactggctaggagtggaccgtatcacctcacctcctggcgcaaactatacttattctgtgcaagctggaattaatgctggcattgatatggtgatggtgccatacaattacactgattacattaatgatctcacttctctcgttcacaagggtgtcatcaatataagcagaattgatgatgctgtgaagcggatccttcgagtcaaatttacaatgggcctgtttgagaaccctttagctgatcttagttttgcagagcagcttggaaagaaggagcatagggaactggctagagaagctgtcaggaaatcacttgttctgttaaaaaatgggaactctcccgatcagcaattcctacctctccctaagagagctagaagtatcctggtagctggaagtcatgctagcaatttggggtaccagtgtggtggatggtcaatccaatggatgggggacagtggtaatatcacaactgtgattcagtatcctgtgcagggacaacaattcttgatgcgataaagtctaccgttgctgactcgacgtctgttgtctactctgagaaccccgatgacagtttcatgaagcacaatgacttctcattcgctatcgtcgttgttggcgagccaccatacgctgaaacagttggcgatagcaccgacctcactatgctagaccctggtccagacacgatcagaactgtgtgtgctgcagttaaatgtgcagtagtcatcatttctggtcgtcccattgtgattgagccgtatgttccattagtggaagcgcttgttgcagcttggcttccgggaaccgaaggtcagggtgtcgcagatgtactctttggagactacggtttcacaggcaagctcccgcacacctggttcaagtctgtcgaccaactgcccatgaatgtgggagacctacagtacgatccactctaccctttcggcttcggtttgatgataaattcatcattgccagggttctctggtgttgacaatctgggatataggaagcaaagagtgctatttgctgtgctgtgttctctactgtcattggttctaatcagttaatgaattgggcgtagatagtatttcaacacatagctgcccttttgtagttctcatatgattagagtgttactaatctagctttagcgattgttagctgccaaatgagtcactggacgtcaatcaatctattatctatctatctactagatgattccccgcgttttgccgagatgctgccattgattatattcctcctgctctgattatcactttggttaccttgtgcaaattgattgttcatgatgatccaactgaggtccccaatcttaccaaacaccttttaagttgagtctaaaccatcaagaaagaaaaaatcaatggcacaacttcc

SEQ ID NO: 36377 - DNA, 2760 bp, Zea Mays
atttgttcaactcttcccagcacacttcctcagcaagacctctgcgtcgaatgtatagagaggaccgaattggagcgttcacccattcgcgtaaattgtcttgtgaaatgctttccagttgaatgccaaacgtcgtttcgtaccgtgtgcaagtgcaacaaatgctgtttccatctgcctgccctctttcagcgcgtgcccccgaatgttccttccgaaagcaccgcgctcgcctacagatcacgacacctcgcaccgccgctcccacttccggcctcgccggtgcgtgcatgtgcgcgccagggacgccaattgagctcggctccagcacgcaatcggctgcagagtgagctcagagctcaccctctccctctgccgctgctccgctggcctcttgaattctgttcatggttcggggatcaagaccattaggccagactatttcaaagaaattttcagacatgagatactccaatatttcctggccattccttctactgctatgttttgtttcgatggcagatgcagagtacatgaagtacaaggatccaaagcaacctattaactctagaatcagggatcttatcggtaggatgacccttgctgaaaaaattggccaaatgacacagatagaacgccaggttgcatctgcaaatgtcatgaaacagtactttataggaagcatcttaagtggtggtggaagtgttccttctccccaggccagtcctgcaatttgggtgaacatggtcaatgaatttcagaaaggtgccttgtcaacgcgtctaggaattccattgatttatggaattgatgctgttcatggtaataacaatgtctacaacgccactttattccctcataacattggacttggagctacaagggatcctggcctcataaaaagaattggtgaagcaactgctcttgaagtgcgtgcgacaggcattcaatatacttttgctccatgtattgcagtttgcagagatccaagatggggtcggtgctatgagagctacagtgaggatcacaaggttgtgcagcagatgacagatattatccttggtttgcagggtgagatcccagtcaatcataccaagggagttccatatgtagctgggaaggataaggttgctgcttgtgctaaacactatgttggtgatggtggaactcataatggaatcaatgagaataatacaatcattgatgagcatgggctgctaagcattcacatgccaccatattatgactctatcataaagggtgttgctactgttatggtttcttattcaagcttgaatggtgtaaaaatgcatgccaatcatgacttagtcactggataccttaaatccaagctgcattttagaggtttcgtgatatctgactggctaggagtggaccgtatcacctcacctcctggcgcaaactatacttattctgtgcaagctggaattaatgctggcattgatatggtgatggtgccatacaattacactgattacattaatgatctcacttctctcgttcacaagggtgtcatcaatataagcagaattgatgatgctgtgaagcggatccttcgagtcaaatttacaatgggcctgtttgagaaccctttagctgatcttagttttgcagagcagcttggaaagaaggagcatagggaactggctagagaagctgtcaggaaatcacttgttctgttaaaaaatgggaactctcccgatcagcaattcctacctctccctaagagagctagaagtatcctggtagctggaagtcatgctagcaatttggggtaccagtgtggtggatggtcaatccaatggatgggggacagtggtaatatcacaactgggacaacaattcttgatgcgataaagtctaccgttgctgactcgacgtctgttgtctactctgagaaccccgatgacagtttcatgaagcacaatgacttctcattcgctatcgtcgttgttggcgagccaccatacgctgaaacagttggcgatagcaccgacctcactatgctagaccctggtccagacacgatcagaactgtgtgtgctgcagttaaatgtgcagtagtcatcatttctggtcgtcccattgtgattgagccgtatgttccattagtggaagcgcttgttgcagcttggcttccgggaaccgaaggtcagggtgtcgcagatgtactctttggagactacggtttcacaggcaagctcccgcacacctggttcaagtctgtcgaccaactgcccatgaatgtgggagacctacagtacgatccactctaccctttcggcttcggtttgatgataaattcatcattgccagggttctctggtgttgacaatctgggatataggaagcaaagagtgctatttgctgtgctgtgttctctactgtcattggttctaatcagttaatgaattgggcgtagatagtatttcaacacatagctgcccttttgtagttctcatatgattagagtgttactaatctagctttagcgattgttagctgccaaatgagtcactggacgtcaatcaatctattatctatctatctactagatgattccccgcgttttgccgagatgctgccattgattatattcctcctgctctgattatcactttggttaccttgtgcaaattgattgttcatgatgatccaactgaggtccccaatcttaccaaacaccttttaagttgagtctaaaccatcaagaaagaaaaaatcaatggcacaacttcc

SEQ ID NO: 36378 - DNA, 1766 bp, Zea Mays
gaaaaaacaaaaaaaattatcttatttttctttcgaaaaacaccatgttttcataaaaaaacaattgaaaatagtttctttccctggatgatggtgtgctagcattggattttcgcacccttgtcgttctgagttccttaccagttacatttaattatttggaggtggcgtgggtgcttgtatggtatgggtaggaatcactccaaggtttaagcatctgcctaccttttgaaattaatcttaccagatgaactgaagaagagttgaacttattagcaatccaagtatttacagagacccagcttccttacaagagtcagttacaaatttatgctcagaagcgaggcaaactcctgccttcatatcgtcccattcatggaggttctcttcatgcacctctatttaagtcagaagtaaccatagatggtcaaacatttgagagcccagagtactgtcacacaatgaaggaagctgaaacagttgctgcaaaagttgctctgatgtccttacctcaagaagcaaacccaacacagcaattactgcttccatctgtaaactataagaatcttctacaagaactagttcagaaggaaggctttcccttgcctatctataatacagcctcggatgtctcgaactattctgctgccttcgtatcaactgtggaaatccatggtgtaacttttcatggaaagccagggaacaccaaaaagcaagcagagatgaatgctgcaaagtctgcttttgaacatttcaaaaacataaatcatgatgctggatcatctggctctgctaacccacttcctgttgccgctacaaaacagtctgttgatggaaacactctacgtgcaaagctggaagttaacaaatcacaccttgcagagccaagcacagaagttgaagcaatatattcatctacagaagttgacaaactgccacttccagggccaagcatggatatcgaagtaatggactcaactcttgaagttgacaaactgccccttccagagcgaagcatggatgttaaagttgtgaattcgtctctgaaagttgacaaactgcactttgcagagccaatcacagaagctgaagtgatccactcatctctgcaagttgatgaaccgctcattccaaagccaggcatgagctcatctctagagaacacacctgctgtgaatggccactcagcccccatatccccaaccattactcctactctaataagcgtgccaacagcaaccatgcctgtcagcaatgacagatgcggttgctacatgtcaaccaacagaatccaagtctaccctcgccacactgatatggttatcccggaaggcgcggccgtgcttcccatcagcgataatcagtgggtagctgtcagcctaccttattccatggaacaaagggatttctgttgccgtaatccggactgccacttaggaagataaaagcagacaaaaggatggatgctttgtgatgattatatagcttgtgatgctgagcattgcccgtgatgtactaaaatctagtgtaacaagactgccttgcgctggactacgattagtgtccctaatgcggagacttgtgtgactcctattgtatctagattaagctgtacttgtttgactatgtgcggaagtcttgagttacactcctatagtagaggacttgaactctggatggaccatccgcaacatttatcatgatcagacttttttcatacttcctacttgagcttgttgtctttcggaatgcttctgtatgttgat

SEQ ID NO: 36379 - DNA, 1878 bp, Zea Mays
gggcgtattcctctctctttcctcaacctcatccgagtggctctccgtgtgctgtggcggcggcggcgcccggctctgctcggacggactccaccgaaggctcggctcccctcggactccacctgcgacggccggccctctgcctgcaccgacggtgcccggctccctcggcatccaccagcggtgcccgactccaagaaatgtacaagtcacggctgcaggagctgtgccagaagcggcgatgggcgccgccgttgtacgagcctacccgagagggtcctgcccacgcgcccctcttccgcgccactgtcgtcgtgaatggcgagaggttcagttcccgggatgaaggggagaagtcactcaaggaggcgtacaacctcgcggcgatggccgccttcgacaacctcatcgcgctcccggccgcggcccttgcccctgccccggctgctccagcgccgccctcatccgagacccagcttccttacaagagtcagttacaaatttatgctcagaagcgaggcaaactcctgccttcatatcgtcccattcatggaggttctcttcatgcacctctatttaagtcagaagtaaccatagatggtcaaacatttgagagcccagagtactgtcacacaatgaaggaagctgaaacagttgctgcaaaagttgctctgatgtccttacctcaagaagcaaacccaacacagcaattactgcttccatctgtaaactataagaatcttctacaagaactagttcagaaggaaggctttcccttgcctatctataatacagcctcggatgtctcgaactattctgctgccttcgtatcaactgtggaaatccatggtgtaacttttcatggaaagccagggaacaccaaaaagcaagcagagatgaatgctgcaaagtctgcttttgaacatttcaaaaacatctgttgatggaaacactctacgtgcaaagctggaagttaacaaatcacaccttgcagagccaagcacagaagttgaagcaatatattcatctacagaagttgacaaactgccacttccagggccaagcatggatatcgaagtaatggactcaactcttgaagttgacaaactgccccttccagagcgaagcatggatgttaaagttgtgaattcgtctctgaaagttgacaaactgcactttgcagagccaatcacagaagctgaagtgatccactcatctctgcaagttgatgaaccgctcattccaaagccaggcatgagctcatctctagagaacacacctgctgtgaatggccactcagcccccatatccccaaccattactcctactctaataagcgtgccaacagcaaccatgcctgtcagcaatgacagatgcggttgctacatgtcaaccaacagaatccaagtctaccctcgccacactgatatggttatcccggaaggcgcggccgtgcttcccatcagcgataatcagtgggtagctgtcagcctaccttattccatggaacaaagggatttctgttgccgtaatccggactgccacttaggaagataaaagcagacaaaaggatggatgctttgtgatgattatatagcttgtgatgctgagcattgcccgtgatgtactaaaatctagtgtaacaagactgccttgcgctggactacgattagtgtccctaatgcggagacttgtgtgactcctattgtatctagattaagctgtacttgtttgactatgtgcggaagtcttgagttacactcctatagtagaggacttgaactctggatggaccatccgcaacatttatcatgatcagacttttttcatacttcctacttgagcttgttgtctttcggaatgcttctgtatgttgat

SEQ ID NO: 36380 - DNA, 1658 bp, Zea Mays
gggcgtattcctctctctttcctcaacctcatccgagtggctctccgtgtgctgtggcggcggcggcgcccggctctgctcggacggactccaccgaaggctcggctcccctcggactccacctgcgacggccggccctctgcctgcaccgacggtgcccggctccctcggcatccaccagcggtgcccgactccaagaaatgtacaagtcacggctgcaggagctgtgccagaagcggcgatgggcgccgccgttgtacgagcctacccgagagggtcctgcccacgcgcccctcttccgcgccactgtcgtcgtgaatggcgagaggttcagttcccgggatgaaggggagaagtcactcaaggaggcgtacaacctcgcggcgatggccgccttcgacaacctcatcgcgctcccggccgcggcccttgcccctgccccggctgctccagcgccgccctcatccgagacccagcttccttacaagagtcagttacaaatttatgctcagaagcgaggcaaactcctgccttcatatcgtcccattcatggaggttctcttcatgcacctctatttaagtcagaagtaaccatagatggtcaaacatttgagagcccagagtactgtcacacaatgaaggaagctgaaacagttgctgcaaaagttgctctgatgtccttacctcaagaagcaaacccaacacagcaattactgtctgttgatggaaacactctacgtgcaaagctggaagttaacaaatcacaccttgcagagccaagcacagaagttgaagcaatatattcatctacagaagttgacaaactgccacttccagggccaagcatggatatcgaagtaatggactcaactcttgaagttgacaaactgccccttccagagcgaagcatggatgttaaagttgtgaattcgtctctgaaagttgacaaactgcactttgcagagccaatcacagaagctgaagtgatccactcatctctgcaagttgatgaaccgctcattccaaagccaggcatgagctcatctctagagaacacacctgctgtgaatggccactcagcccccatatccccaaccattactcctactctaataagcgtgccaacagcaaccatgcctgtcagcaatgacagatgcggttgctacatgtcaaccaacagaatccaagtctaccctcgccacactgatatggttatcccggaaggcgcggccgtgcttcccatcagcgataatcagtgggtagctgtcagcctaccttattccatggaacaaagggatttctgttgccgtaatccggactgccacttaggaagataaaagcagacaaaaggatggatgctttgtgatgattatatagcttgtgatgctgagcattgcccgtgatgtactaaaatctagtgtaacaagactgccttgcgctggactacgattagtgtccctaatgcggagacttgtgtgactcctattgtatctagattaagctgtacttgtttgactatgtgcggaagtcttgagttacactcctatagtagaggacttgaactctggatggaccatccgcaacatttatcatgatcagacttttttcatacttcctacttgagcttgttgtctttcggaatgcttctgtatgttgat

SEQ ID NO: 36381 - DNA, 1855 bp, Zea Mays
gggcgtattcctctctctttcctcaacctcatccgagtggctctccgtgtgctgtggcggcggcggcgcccggctctgctcggacggactccaccgaaggctcggctcccctcggactccacctgcgacggccggccctctgcctgcaccgacggtgcccggctccctcggcatccaccagcggtgcccgactccaaggagctgtgccagaagcggcgatgggcgccgccgttgtacgagcctacccgagagggtcctgcccacgcgcccctcttccgcgccactgtcgtcgtgaatggcgagaggttcagttcccgggatgaaggggagaagtcactcaaggaggcgtacaacctcgcggcgatggccgccttcgacaacctcatcgcgctcccggccgcggcccttgcccctgccccggctgctccagcgccgccctcatccgagacccagcttccttacaagagtcagttacaaatttatgctcagaagcgaggcaaactcctgccttcatatcgtcccattcatggaggttctcttcatgcacctctatttaagtcagaagtaaccatagatggtcaaacatttgagagcccagagtactgtcacacaatgaaggaagctgaaacagttgctgcaaaagttgctctgatgtccttacctcaagaagcaaacccaacacagcaattactgcttccatctgtaaactataagaatcttctacaagaactagttcagaaggaaggctttcccttgcctatctataatacagcctcggatgtctcgaactattctgctgccttcgtatcaactgtggaaatccatggtgtaacttttcatggaaagccagggaacaccaaaaagcaagcagagatgaatgctgcaaagtctgcttttgaacatttcaaaaacatctgttgatggaaacactctacgtgcaaagctggaagttaacaaatcacaccttgcagagccaagcacagaagttgaagcaatatattcatctacagaagttgacaaactgccacttccagggccaagcatggatatcgaagtaatggactcaactcttgaagttgacaaactgccccttccagagcgaagcatggatgttaaagttgtgaattcgtctctgaaagttgacaaactgcactttgcagagccaatcacagaagctgaagtgatccactcatctctgcaagttgatgaaccgctcattccaaagccaggcatgagctcatctctagagaacacacctgctgtgaatggccactcagcccccatatccccaaccattactcctactctaataagcgtgccaacagcaaccatgcctgtcagcaatgacagatgcggttgctacatgtcaaccaacagaatccaagtctaccctcgccacactgatatggttatcccggaaggcgcggccgtgcttcccatcagcgataatcagtgggtagctgtcagcctaccttattccatggaacaaagggatttctgttgccgtaatccggactgccacttaggaagataaaagcagacaaaaggatggatgctttgtgatgattatatagcttgtgatgctgagcattgcccgtgatgtactaaaatctagtgtaacaagactgccttgcgctggactacgattagtgtccctaatgcggagacttgtgtgactcctattgtatctagattaagctgtacttgtttgactatgtgcggaagtcttgagttacactcctatagtagaggacttgaactctggatggaccatccgcaacatttatcatgatcagacttttttcatacttcctacttgagcttgttgtctttcggaatgcttctgtatgttgat

SEQ ID NO: 36382 - DNA, 1929 bp, Zea Mays
gggcgtattcctctctctttcctcaacctcatccgagtggctctccgtgtgctgtggcggcggcggcgcccggctctgctcggacggactccaccgaaggctcggctcccctcggactccacctgcgacggccggccctctgcctgcaccgacggtgcccggctccctcggcatccaccagcggtgcccgactccaagtcacggctgcaggagctgtgccagaagcggcgatgggcgccgccgttgtacgagcctacccgagagggtcctgcccacgcgcccctcttccgcgccactgtcgtcgtgaatggcgagaggttcagttcccgggatgaaggggagaagtcactcaaggaggcgtacaacctcgcggcgatggccgccttcgacaacctcatcgcgctcccggccgcggcccttgcccctgccccggctgctccagcgccgccctcatccgagacccagcttccttacaagagtcagttacaaatttatgctcagaagcgaggcaaactcctgccttcatatcgtcccattcatggaggttctcttcatgcacctctatttaagtcagaagtaaccatagatggtcaaacatttgagagcccagagtactgtcacacaatgaaggaagctgaaacagttgctgcaaaagttgctctgatgtccttacctcaagaagcaaacccaacacagcaattactgcttccatctgtaaactataagaatcttctacaagaactagttcagaaggaaggctttcccttgcctatctataatacagcctcggatgtctcgaactattctgctgccttcgtatcaactgtggaaatccatggtgtaacttttcatggaaagccagggaacaccaaaaagcaagcagagatgaatgctgcaaagtctgcttttgaacatttcaaaaacataaatcatgatgctggatcatctggctctgctaacccacttcctgttgccgctacaaaacagtctgttgatggaaacactctacgtgcaaagctggaagttaacaaatcacaccttgcagagccaagcacagaagttgaagcaatatattcatctacagaagttgacaaactgccacttccagggccaagcatggatatcgaagtaatggactcaactcttgaagttgacaaactgccccttccagagcgaagcatggatgttaaagttgtgaattcgtctctgaaagttgacaaactgcactttgcagagccaatcacagaagctgaagtgatccactcatctctgcaagttgatgaaccgctcattccaaagccaggcatgagctcatctctagagaacacacctgctgtgaatggccactcagcccccatatccccaaccattactcctactctaataagcgtgccaacagcaaccatgcctgtcagcaatgacagatgcggttgctacatgtcaaccaacagaatccaagtctaccctcgccacactgatatggttatcccggaaggcgcggccgtgcttcccatcagcgataatcagtgggtagctgtcagcctaccttattccatggaacaaagggatttctgttgccgtaatccggactgccacttaggaagataaaagcagacaaaaggatggatgctttgtgatgattatatagcttgtgatgctgagcattgcccgtgatgtactaaaatctagtgtaacaagactgccttgcgctggactacgattagtgtccctaatgcggagacttgtgtgactcctattgtatctagattaagctgtacttgtttgactatgtgcggaagtcttgagttacactcctatagtagaggacttgaactctggatggaccatccgcaacatttatcatgatcagacttttttcatacttcctacttgagcttgttgtctttcggaatgcttctgtatgttgat

SEQ ID NO: 36383 - DNA, 1602 bp, Zea Mays
gccacctgggcgtattcctctctctttcctcaacctcatccgagtggctctccgtgtgctgtggcggcggcggcgcccggctctgctcggacggactccaccgaaggctcggctcccctcggactccacctgcgacggccggccctctgcctgcaccgacggtgcccggctccctcggcatccaccagcggtgcccgactccaagaaatgtacaagtcacggctgcaggagctgtgccagaagcggcgatgggcgccgccgttgtacgagcctacccgagagggtcctgcccacgcgcccctcttccgcgccactgtcgtcgtgaatggcgagaggttcagttcccgggatgaaggggagaagtcactcaaggaggcgtacaacctcgcggcgatggccgccttcgacaacctcatcgcgctcccggccgcggcccttgcccctgccccggctgctccagcgccgccctcatccgagacccagcttccttacaagagtcagttacaaatttatgctcagaagcgaggcaaactcctgccttcatatcgtcccattcatggaggttctcttcatgcacctctatttaagtcagaagtaaccatagatggtcaaacatttgagagcccagagtactgtcacacaatgaaggaagctgaaacatctgttgatggaaacactctacgtgcaaagctggaagttaacaaatcacaccttgcagagccaagcacagaagttgaagcaatatattcatctacagaagttgacaaactgccacttccagggccaagcatggatatcgaagtaatggactcaactcttgaagttgacaaactgccccttccagagcgaagcatggatgttaaagttgtgaattcgtctctgaaagttgacaaactgcactttgcagagccaatcacagaagctgaagtgatccactcatctctgcaagttgatgaaccgctcattccaaagccaggcatgagctcatctctagagaacacacctgctgtgaatggccactcagcccccatatccccaaccattactcctactctaataagcgtgccaacagcaaccatgcctgtcagcaatgacagatgcggttgctacatgtcaaccaacagaatccaagtctaccctcgccacactgatatggttatcccggaaggcgcggccgtgcttcccatcagcgataatcagtgggtagctgtcagcctaccttattccatggaacaaagggatttctgttgccgtaatccggactgccacttaggaagataaaagcagacaaaaggatggatgctttgtgatgattatatagcttgtgatgctgagcattgcccgtgatgtactaaaatctagtgtaacaagactgccttgcgctggactacgattagtgtccctaatgcggagacttgtgtgactcctattgtatctagattaagctgtacttgtttgactatgtgcggaagtcttgagttacactcctatagtagaggacttgaactctggatggaccatccgcaacatttatcatgatcagacttttttcatacttcctacttgagcttgttgtctttcggaatgcttctgtatgttgat

SEQ ID NO: 36384 - DNA, 1934 bp, Zea Mays
gtgagacctggccacctgggcgtattcctctctctttcctcaacctcatccgagtggctctccgtgtgctgtggcggcggcggcgcccggctctgctcggacggactccaccgaaggctcggctcccctcggactccacctgcgacggccggccctctgcctgcaccgacggtgcccggctccctcggcatccaccagcggtgcccgactccaaggagctgtgccagaagcggcgatgggcgccgccgttgtacgagcctacccgagagggtcctgcccacgcgcccctcttccgcgccactgtcgtcgtgaatggcgagaggttcagttcccgggatgaaggggagaagtcactcaaggaggcgtacaacctcgcggcgatggccgccttcgacaacctcatcgcgctcccggccgcggcccttgcccctgccccggctgctccagcgccgccctcatccgagacccagcttccttacaagagtcagttacaaatttatgctcagaagcgaggcaaactcctgccttcatatcgtcccattcatggaggttctcttcatgcacctctatttaagtcagaagtaaccatagatggtcaaacatttgagagcccagagtactgtcacacaatgaaggaagctgaaacagttgctgcaaaagttgctctgatgtccttacctcaagaagcaaacccaacacagcaattactgcttccatctgtaaactataagaatcttctacaagaactagttcagaaggaaggctttcccttgcctatctataatacagcctcggatgtctcgaactattctgctgccttcgtatcaactgtggaaatccatggtgtaacttttcatggaaagccagggaacaccaaaaagcaagcagagatgaatgctgcaaagtctgcttttgaacatttcaaaaacataaatcatgatgctggatcatctggctctgctaacccacttcctgttgccgctacaaaacagtctgttgatggaaacactctacgtgcaaagctggaagttaacaaatcacaccttgcagagccaagcacagaagttgaagcaatatattcatctacagaagttgacaaactgccacttccagggccaagcatggatatcgaagtaatggactcaactcttgaagttgacaaactgccccttccagagcgaagcatggatgttaaagttgtgaattcgtctctgaaagttgacaaactgcactttgcagagccaatcacagaagctgaagtgatccactcatctctgcaagttgatgaaccgctcattccaaagccaggcatgagctcatctctagagaacacacctgctgtgaatggccactcagcccccatatccccaaccattactcctactctaataagcgtgccaacagcaaccatgcctgtcagcaatgacagatgcggttgctacatgtcaaccaacagaatccaagtctaccctcgccacactgatatggttatcccggaaggcgcggccgtgcttcccatcagcgataatcagtgggtagctgtcagcctaccttattccatggaacaaagggatttctgttgccgtaatccggactgccacttaggaagataaaagcagacaaaaggatggatgctttgtgatgattatatagcttgtgatgctgagcattgcccgtgatgtactaaaatctagtgtaacaagactgccttgcgctggactacgattagtgtccctaatgcggagacttgtgtgactcctattgtatctagattaagctgtacttgtttgactatgtgcggaagtcttgagttacactcctatagtagaggacttgaactctggatggaccatccgcaacatttatcatgatcagacttttttcatacttcctacttgagcttgttgtctttcggaatgcttctgtatgttgat

SEQ ID NO: 36385 - DNA, 1234 bp, Zea Mays
tccactgccacaaggcaacgaaatgtcggattgttaatggtgcaaacgctaccgtgatatggaaggggatggttgttattttaccaatcttgtgaattgaggatttgaaccttttgaagacatctctcaatcaccagttcacttgcaacagccaatctgtacaaaggataagaacacctcatccaagccaaccctaaagcacataggtaaaaatttcagtgaagaagaagatagacacaagggactaatcaaacaagaggcacgttttggaaaagaatatatttgttctctgaggcgaatagagaaaattgtcccaaacgtactgaaaattctttgctgcatcgttggagttgtatccaagatgctgtaagttatgtggatgttgcaatagtattgagactagaaatcaaagcggtttggctgttcatgatagggtggagcaagctgagaagctttttaaagaacaagatccccacaacaagtcttttcaattcaagcattgctggctgttgttgaggaaccaaccaaaatggcatgacaagctaaatcaattagttaccacaaaaaactagtaacaagaagcagaaaacaaccagaaaaatcaagtctaggccttgttgacctatcaatgaaggaggttaatgatgctgctcctaatgcaattgagattccagagatagaaccatcacaaagacctttgggtaagaagaaggcaaaagaggcggcacgtcagggtggcaatgatgcttgcaaagaagcattgaagtttctgtaggcaaaaaagattgaggatgatgcagagaaggagatgaagagagaagaaagacatgcaaagtcatttgctctggacaaagagatgcttgaactagaaaaggagaggattgcgctaaagaaggagaaggttgccaacgaggcaaacaataatttcttgaagaggattgcagaagaagatagaataatgaccattgatctcagtgccatgaatgagatgcagcagcaatattacctgagcattcaagctgagattatggctcgtcgcatgaattagatcatagctcactgctagccttgttcttaatttagtttctagaggcattctattgtacgaactattgtcattgttaattttaattgcatgaactatgtgtcttgagttatcagcattgtaagaactatttcggttgtgatgttaatttaaagaatattaagttcctaattctgtacaaggtcagtg

SEQ ID NO: 36386 - DNA, 1093 bp, Zea Mays
cgtacgtcacacaggcctttcaccttgacgtcggcgctaggctctgcctcctccccgccactcatgttcttcgcaggagttcctccccgccgctcccggtcatcgtaggatctcttcctagccgccgcaggaaccggattcagatatggaaggggatggttgttattttaccaatcttgtgaattgaggatttgaaccttttgaagacatctctcaatcaccagttcacttgcaacagccaatctgtacaaaggataagaacacctcatccaagccaaccctaaagcacataggtggagcaagctgagaagctttttaaagaacaagatccccacaacaagtcttttcaattcaagcattgctggctgttgttgaggaaccaaccaaaatggcatgacaagctaaatcaattagttaccacaaaaaactagtaacaagaagcagaaaacaaccagaaaaatcaagtctaggccttgttgacctatcaatgaaggaggttaatgatgctgctcctaatgcaattgagattccagagatagaaccatcacaaagacctttgggtaagaagaaggcaaaagaggcggcacgtcagggtggcaatgatgcttgcaaagaagcattgaagtttctgtaggcaaaaaagattgaggatgatgcagagaaggagatgaagagagaagaaagacatgcaaagtcatttgctctggacaaagagatgcttgaactagaaaaggagaggattgcgctaaagaaggagaaggttgccaacgaggcaaacaataatttcttgaagaggattgcagaagaagatagaataatgaccattgatctcagtgccatgaatgagatgcagcagcaatattacctgagcattcaagctgagattatggctcgtcgcatgaattagatcatagctcactgctagccttgttcttaatttagtttctagaggcattctattgtacgaactattgtcattgttaattttaattgcatgaactatgtgtcttgagttatcagcattgtaagaactatttcggttgtgatgttaatttaaagaatattaagttcctaattctgtacaaggtcagtg

SEQ ID NO: 36387 - DNA, 624 bp, Zea Mays
ctttctttcttttttcatcgtcttggcccctcctccctttcgccttcatcttccctaaaccctaggcagtgtcctaaatacgctctcccccggtggggtcgctacagcgatctgatctttcgccagtcaccggcgccggaggctccgcgctctatactcatggttgtcccgcgcgctcccgagcagacacagcaggaccaggatgaggagatgctggttccgcatcaggatgccattgagggtctgcagaaggatgttcttgagggtccgcagccgatggaagaatttgcatctgctgttgagaaccaaattataccagatacctccacatctagatttacatggtatattgaaaatttctccaaacgaaatgttagaaagcactactctgacgattttactgttggggggtacaaatggcgagtgctcgtcttccccagaggaaataacgtggactacctttcaatgtacctggatgttgctgattcgaacttgatgcctcccggttggagtaggaatgcacaattcagccttgctgtggtaaaccaattagacagcaaagcatcgttaagaaaaggatgagagtcttcaaggcagataagaactaaggaagataaagctttg

SEQ ID NO: 36388 - DNA, 687 bp, Zea Mays
caaaatgtgaaactggcccgtttgcgaaattggcagtcgcgcagcgcagcttttatatagccaaatctttctttcttttttcatcgtcttggcccctcctccctttcgccttcatcttccctaaaccctaggcagtgtcctaaatacgctctcccccggtggggtcgctacagcgatctgatctttcgccagtcaccggcgccggaggctccgcgctctatactcatggttgtcccgcgcgctcccgagacacagcaggaccaggatgaggagatgctggttccgcatcaggatgccattgagggtctgcagaaggatgttcttgagggtccgcagccgatggaagaatttgcatctgctgttgagaaccaaattataccagatacctccacatctagatttacatggtatattgaaaatttctccaaacgaaatgttagaaagcactactctgacgattttactgttggggggtacaaatggcgagtgctcgtcttccccagaggaaataacgtggactacctttcaatgtacctggatgttgctgattcgaacttgatgcctcccggttggagtaggaatgcacaattcagccttgctgtggtaaaccaattagacagcaaagcatcgttaagaaaaggatgagagtcttcaaggcagataagaactaaggaagataaagctttg

SEQ ID NO: 36389 - DNA, 2394 bp, Zea Mays
aaagacaacctccttccacgtgagcgctttcttccttcagccttctcgttatcctgaacgcggcaatctccgaaggtcccatccaaaacctcgccgccggattcgcacctcactctcgcccgcgcactacgaattgactgacgcctacgccctaccgctgcaagcagcaccatagcgggagccgctaccatggcgtcctgctacaacccgtggcgcctattcccaggcatgtcgacggcggtccctgccgggcccgtcacggcgccggctcattctcgcacctgcaagtcctcgaaagtgttcagtgctttgcctcaccggaggggtctgctgttcctgggcacgcggcgtgccaggatcaagtgcgtcaaggacgactctctccatttcgacccgtcgaagatagaaccgccaccgtactccagctacttcgactccacatccggtcagctcgagccggcgtcgggcgctcgggcaagcatacccgggaaggagtactggccagagggcacggcggcccgcgtccgtgccgcgcgagcgcctgctccggttggggagtcagctgggatgccatcatttggcacgaagcccgggagcaggaggagagggtataaggagcaggtgacgtcggcgtcaggaacggagggtgcacagactgatgacagaaaggatggtgatgaacctgatgtggctattataggctctggggacgatgcattggaggagataaaggattcggtggatgagtatgtcatttatgagacaccagaggaagaggagctgagtgagtatgacatggacaaaatgatggggcggccacacccgttcattgatccagcaaaggcaatgtcactaggggagccgaaaaccagtgaagagctctggtggcactggaggaggaagtctcaggaggaggaaatgtggtcaagatggcagaggaggcgtccagatgttgacacggtttttgcaaaggcaatggcggagactgggcaaattaaaatttttggggaccatccttcacggacagaagctgctcttgcaaagacaagaagacatttgtacaaagaggaaaggttagaagcagagcaaaggagactagaagaaatagggccaatagcgtactactcagaatgggttgaagcttataaaaacaaggatacatcacgtgaggccatacagaagcactttgaggaaactggcgaagatgagaatgttcaacttataaaaatgtttcaacaccaaactgctggggaatatcgtatcatgatgggcaccgatgtgcgtattcagcgagatcctttggccatgagaatgcgggaagaccagatcaaacagatttggggcggtgatcctgtctatccaacaattaattatgttcaggatcctgatgaagtgattgactacagaggtcctgaatttcatgagcctacccctgaagttgtaccttacctgatggagcatgggataatgatcacaaaggaagagctatatgcacgtctgaatgaagagagagaggacgtcaatcaagacataacgtatattcctgaagctaaagatcctatggctaccgccattgatataggagagcattcttacaatgaagacagtgatgatgaggatgaggatgtcgataaagctgctgcacagcctcaatcactagaggatgaggaagacgatagggatgatgttgcagaagtagaagagaaagtgaaccagaattggagtgctctaaagtctactggacaggctgaaaagcccaaggaaaaatcaaagaaagatgaaatgacactaaaagaagctattgacgattctgagaacctaactgactttcttatggactttgaggaaaccgagtaatactctggacattttgctattctgtcccatcacacatgcccttaggggctaggggcgatgaagaaaactggatgtccacaaaactctacttgctcaatacgatggaaggtagctccagctgcctgttttgattcacaagttggcaatgctatcagaaaaaaggaatccagatagaatgttgtggcgcatggctcaagaattgacaacaatcttcatgcttttgaagaaacaagagaagccacaaaacaagagataaggagtagcttaaccatttgcagttggaactatgttagccttcttaggctgtccgcagaagatcgtgtaaaataggaaattcacactgtagattacattatttgcagagttaagtttgaaaaagaagataagacatgagatgagatatgatagctgctagagacagtgttacaccataaataatatatttcgactaggcatgagctgtgcgtttttagataagtttgccagttagggtgtgtgtggtttattggttacaatgatgcgacgagataagacaag

SEQ ID NO: 36390 - DNA, 1553 bp, Zea Mays
aaagacaacctccttccacgtgagcgctttcttccttcagccttctcgttatcctgaacgcggcaatctccgaaggtcccatccaaaacctcgccgccggattcgcacctcactctcgcccgcgcactacgaattgactgacgcctacgccctaccgctgcaagcagcaccatagcgggagccgctaccatggcgtcctgctacaacccgtggcgcctattcccaggcatgtcgacggcggtccctgccgggcccgtcacggcgccggctcattctcgcacctgcaagtcctcggtttttgcaaaggcaatggcggagactgggcaaattaaaatttttggggaccatccttcacggacagaagctgctcttgcaaagacaagaagacatttgtacaaagaggaaaggttagaagcagagcaaaggagactagaagaaatagggccaatagcgtactactcagaatgggttgaagcttataaaaacaaggatacatcacgtgaggccatacagaagcactttgaggaaactggcgaagatgagaatgttcaacttataaaaatgtttcaacaccaaactgctggggaatatcgtatcatgatgggcaccgatgtgcgtattcagcgagatcctttggccatgagaatgcgggaagaccagatcaaacagatttggggcggtgatcctgtctatccaacaattaattatgttcaggatcctgatgaagtgattgactacagaggtcctgaatttcatgagcctacccctgaagttgtaccttacctgatggagcatgggataatgatcacaaaggaagagctatatgcacgtctgaatgaagagagagaggacgtcaatcaagacataacgtatattcctgaagctaaagatcctatggctaccgccattgatataggagagcattcttacaatgaagacagtgatgatgaggatgaggatgtcgataaagctgctgcacagcctcaatcactagaggatgaggaagacgatagggatgatgttgcagaagtagaagagaaagtgaaccagaattggagtgctctaaagtctactggacaggctgaaaagcccaaggaaaaatcaaagaaagatgaaatgacactaaaagaagctattgacgattctgagaacctaactgactttcttatggactttgaggaaaccgagtaatactctggacattttgctattctgtcccatcacacatggactggagcaatgaaaggaaacactggtcgagtagccccttaatcatttctttgattcttcccaaggcttgaagctgcagctctaattagcctgagggattcaacaaagtcatccagcagcttatgagaatctggaaattgtgcgtcatccactgctagatttaccatcatagtgttaacataactttggaagttcacggttagggcctgcagaaaaaaaaaagacgaacaaacaaatatgcaaattttgctttaacttgttttagacatgaaccgagtccagactacaagcatgtatgggtattgaagacacttgttttttct

SEQ ID NO: 36391 - DNA, 1921 bp, Zea Mays
gtgaatggagccaccaatgtcttgagcattggtccctccacaggataatgttgacattatcagcttgtccattactcctaatcggaggcctcctggactcgcaacattcttcaatccaatagacatggcactcttgtcagctgtaaaagctggcatatttgtggtgcaagctgcaggaaatactggtccttcccctaaaagcatgtcttcctacagtccctggatatttactgttggagcttctgcccatgacagggtatacagtaactatgttgtgcttggcaacaatttgaccattcaaggagttggccttgctcctggaacggatggtgatcccatgtataatttagttgctgcaccacatgcactgaagaacaatacagccagttgtaatgaaatgtcccttggggagtgccaagattcgagtcacctagatgcagatttgataagaggaaagatactagtgtgcagctattctataagatttgtgcttggtctttcttctgtgaaacaagctctagatacagccaatgatgtcagcgccgcaggagttatattctatttagacccatttgttcttgggtttcaactgaacccaactccaatgcacatgcctgggcttataataccatcatctgatgactcaaaggtatttctcacttactacaatgactccctagtgagagatgggacatcaggtcaagttgttagctttggcggagttgctaaaatattagggggtctaaatccaaattatggaaattctgctccgaaagtaatgttctattctgctaggggtcctgaccctgaggacaacacactgtcaaatgctgatatcttgaaaccaaatctagtagcaccgggaagttccatttggggtgcttggagttcagttggattggattctgctgaatttgctggtgaaagtttcgcaatgctctctggcacaagtatggctgcgccccatgtcgctggcctcgccgctctaatcaagcagaagtttccttcttttagcccagcagctatagcttctgcactgtccacaaccacaactcttagtgacaggcaagggaaaccaatcatggcacagcgaacatacagcaacccagacttgacgcagtctccagcgacatcttttgatatggggaatggctttgtcaacgccaccgctgctttagacccggggctcataattgattgcagctatgatgatttcttctcctttctttgcggcataaatgggtctagcccagtcgtgaaaaactacactggcaacagctgcgtggcctccaccatgacaggagcagatctaaacctaccatcaatcaccatagccgtgctcaaccaaacaagaaccataacgagaacggtgatcaacgtggccgctgacgagagctactctgtcaattacagtgcccctaatggaactgcagtttccgtggtgccgacgcaatttttcattccaagcggacagaagcagctcgtgacctttgttgtgaacgccaccataaacagctccactgcgagcttcgggaacgttgggttccagggtaacaaaggccaccgggcgatcatcccattctcggtgatctccaaggttgtatacagttcctgatgactgatgagccgagctgatgcagtggatgcaatgcaaatgcaaatgcaaaccagggcctgactgatccagcgtatgcagtgatgacttgactgcatggaggtggagcttgcctttgactagagaaattttttgttggttgtggcgtgtacattctgaagcatgttgatgtaagtagctgagtgattaaccagtaactgtaaagagaatgtactgccagatatccagaatgggaaatccttgtgcaaccagaatgttaaatagcactctgttggggtttgatttaccgatatgatgttcgtgcga

SEQ ID NO: 36392 - DNA, 2607 bp, Zea Mays
cagacagagttcacccaaacctatgaattatggctcatatattgttcacctccaaaaatcactattgaagaggactctaaggggagagcattatgtaaagctgtatagctaccgctacttgattaatggttttgctgttgtcattactcctcggcagacaagctatccgggagaaaagaagtagcgaatgtgatgctggattactcagttaggacagcaacaactcatacccctgaatttcttggactgccacaaggagcctgggttcaagaaggtggtccacaattcgcgggacagggtgttgtcattggcctcatcgacacaggaatagatccaacccaccctagctttgcagatgatctatcgactgatagttatccagtacctgctcactactctggcatttgtgaggttacaaatgattttccatctggatcttgcaatagaaagctcgtgggggctcagcattttgcagcatctgcaataactagaggagtcttcaacgcatctcaggatcttgcttcaccatctgatagtgatggccatgggacgcatacagcatccattgctgctggcaatcatggaattcctgttgttgtggctgggcatcaatttggaaatgcaagcggcatggctcctcgtgcacacattgctgtctataaagctctttacaaaagctttggtggttttgctgctgatgttgtggctgcaatagatcaggcagctgaagataatgttgacattatcagcttgtccattactcctaatcggaggcctcctggactcgcaacattcttcaatccaatagacatggcactcttgtcagctgtaaaagctggcatatttgtggtgcaagctgcaggaaatactggtccttcccctaaaagcatgtcttcctacagtccctggatatttactgttggagcttctgcccatgacagggtatacagtaactatgttgtgcttggcaacaatttgaccattcaaggagttggccttgctcctggaacggatggtgatcccatgtataatttagttgctgcaccacatgcactgaagaacaatacagccagttgtaatgaaatgtcccttggggagtgccaagattcgagtcacctagatgcagatttgataagaggaaagatactagtgtgcagctattctataagatttgtgcttggtctttcttctgtgaaacaagctctagatacagccaatgatgtcagcgccgcaggagttatattctatttagacccatttgttcttgggtttcaactgaacccaactccaatgcacatgcctgggcttataataccatcatctgatgactcaaaggtatttctcacttactacaatgactccctagtgagagatgggacatcaggtcaagttgttagctttggcggagttgctaaaatattagggggtctaaatccaaattatggaaattctgctccgaaagtaatgttctattctgctaggggtcctgaccctgaggacaacacactgtcaaatgctgatatcttgaaaccaaatctagtagcaccgggaagttccatttggggtgcttggagttcagttggattggattctgctgaatttgctggtgaaagtttcgcaatgctctctggcacaagtatggctgcgccccatgtcgctggcctcgccgctctaatcaagcagaagtttccttcttttagcccagcagctatagcttctgcactgtccacaaccacaactcttagtgacaggcaagggaaaccaatcatggcacagcgaacatacagcaacccagacttgacgcagtctccagcgacatcttttgatatggggaatggctttgtcaacgccaccgctgctttagacccggggctcataattgattgcagctatgatgatttcttctcctttctttgcggcataaatgggtctagcccagtcgtgaaaaactacactggcaacagctgcgtggcctccaccatgacaggagcagatctaaacctaccatcaatcaccatagccgtgctcaaccaaacaagaaccataacgagaacggtgatcaacgtggccgctgacgagagctactctgtcaattacagtgcccctaatggaactgcagtttccgtggtgccgacgcaatttttcattccaagcggacagaagcagctcgtgacctttgttgtgaacgccaccataaacagctccactgcgagcttcgggaacgttgggttccagggtaacaaaggccaccgggcgatcatcccattctcggtgatctccaaggttgtatacagttcctgatgactgatgagccgagctgatgcagtggatgcaatgcaaatgcaaatgcaaaccagggcctgactgatccagcgtatgcagtgatgacttgactgcatggaggtggagcttgcctttgactagagaaattttttgttggttgtggcgtgtacattctgaagcatgttgatgtaagtagctgagtgattaaccagtaactgtaaagagaatgtactgccagatatccagaatgggaaatccttgtgcaaccagaatgttaaatagcactctgttggggtttgatttaccgatatgatgttcgtgcga

SEQ ID NO: 36393 - DNA, 2770 bp, Zea Mays
tgggtgttctcgcctcctcctcgggcgacgctgccgccggcggaggcgacttaacttggagaagttcgggagcagcaaggctgctactgccgtcggccgcggcggcagcggaggaggaggaggaggagacaccccgaccaccagcgtcctcaggaagccgagacagagttcacccaaacctatgaattatggctcatatattgttcacctccaaaaatcactattgaagaggactctaaggggagagcattatgtaaagctgtatagctaccgctacttgattaatggttttgctgttgtcattactcctcggcaggcagacaagctatccgggagaaaagaagtagcgaatgtgatgctggattactcagttaggacagcaacaactcatacccctgaatttcttggactgccacaaggagcctgggttcaagaaggtggtccacaattcgcgggacagggtgttgtcattggcctcatcgacacaggaatagatccaacccaccctagctttgcagatgatctatcgactgatagttatccagtacctgctcactactctggcatttgtgaggttacaaatgattttccatctggatcttgcaatagaaagctcgtgggggctcagcattttgcagcatctgcaataactagaggagtcttcaacgcatctcaggatcttgcttcaccatctgatagtgatggccatgggacgcatacagcatccattgctgctggcaatcatggaattcctgttgttgtggctgggcatcaatttggaaatgcaagcggcatggctcctcgtgcacacattgctgtctataaagctctttacaaaagctttggtggttttgctgctgatgttgtggctgcaatagatcaggcagctgaagataatgttgacattatcagcttgtccattactcctaatcggaggcctcctggactcgcaacattcttcaatccaatagacatggcactcttgtcagctgtaaaagctggcatatttgtggtgcaagctgcaggaaatactggtccttcccctaaaagcatgtcttcctacagtccctggatatttactgttggagcttctgcccatgacagggtatacagtaactatgttgtgcttggcaacaatttgaccattcaaggagttggccttgctcctggaacggatggtgatcccatgtataatttagttgctgcaccacatgcactgaagaacaatacagccagttgtaatgaaatgtcccttggggagtgccaagattcgagtcacctagatgcagatttgataagaggaaagatactagtgtgcagctattctataagatttgtgcttggtctttcttctgtgaaacaagctctagatacagccaatgatgtcagcgccgcaggagttatattctatttagacccatttgttcttgggtttcaactgaacccaactccaatgcacatgcctgggcttataataccatcatctgatgactcaaaggtatttctcacttactacaatgactccctagtgagagatgggacatcaggtcaagttgttagctttggcggagttgctaaaatattagggggtctaaatccaaattatggaaattctgctccgaaagtaatgttctattctgctaggggtcctgaccctgaggacaacacactgtcaaatgctgatatcttgaaaccaaatctagtagcaccgggaagttccatttggggtgcttggagttcagttggattggattctgctgaatttgctggtgaaagtttcgcaatgctctctggcacaagtatggctgcgccccatgtcgctggcctcgccgctctaatcaagcagaagtttccttcttttagcccagcagctatagcttctgcactgtccacaaccacaactcttagtgacaggcaagggaaaccaatcatggcacagcgaacatacagcaacccagacttgacgcagtctccagcgacatcttttgatatggggaatggctttgtcaacgccaccgctgctttagacccggggctcataattgattgcagctatgatgatttcttctcctttctttgcggcataaatgggtctagcccagtcgtgaaaaactacactggcaacagctgcgtggcctccaccatgacaggagcagatctaaacctaccatcaatcaccatagccgtgctcaaccaaacaagaaccataacgagaacggtgatcaacgtggccgctgacgagagctactctgtcaattacagtgcccctaatggaactgcagtttccgtggtgccgacgcaatttttcattccaagcggacagaagcagctcgtgacctttgttgtgaacgccaccataaacagctccactgcgagcttcgggaacgttgggttccagggtaacaaaggccaccgggcgatcatcccattctcggtgatctccaaggttgtatacagttcctgatgactgatgagccgagctgatgcagtggatgcaatgcaaatgcaaatgcaaaccagggcctgactgatccagcgtatgcagtgatgacttgactgcatggaggtggagcttgcctttgactagagaaattttttgttggttgtggcgtgtacattctgaagcatgttgatgtaagtagctgagtgattaaccagtaactgtaaagagaatgtactgccagatatccagaatgggaaatccttgtgcaaccagaatgttaaatagcactctgttggggtttgatttaccgatatgatgttcgtgcga

SEQ ID NO: 36394 - DNA, 3193 bp, Zea Mays
gtattctttcccttcctgctcgatgcatccctttcttctctagcctcgcaaagtcgcactctttgggtgttctcgcctcctcctcgggcgacgctgccgccggcggaggtgcactccctgtctccctctgactccctccccctctttccctcgccattaatttgccgcctgccatcccggccgcgcttcagtacgcctgaaagttcggttttggctcccatgggcggtggacgcaactagcatttctttcttggcggttcttggtgtcttgtggttgtgggggtgggcaccgagcagcttcataggaatgggggtggcgcggagggaggagcaccgggcggccgccgccgcgttcctgtacgcgctgacggttcttggggtgttggcgggcggcgccggcgtccgcgctttcgaggacggcactgcggtgtacattgtcaccatgaagcaggcgccggtttcccacaggcgacttaacttggagaagttcgggagcagcaaggctgctactgccgtcggccgcggcggcagcggaggaggaggaggaggagacaccccgaccaccagcgtcctcaggaagccgagacagagttcacccaaacctatgaattatggctcatatattgttcacctccaaaaatcactattgaagaggactctaaggggagagcattatgtaaagctgtatagctaccgctacttgattaatggttttgctgttgtcattactcctcggcaggcagacaagctatccgggagaaaagaagtagcgaatgtgatgctggattactcagttaggacagcaacaactcatacccctgaatttcttggactgccacaaggagcctgggttcaagaaggtggtccacaattcgcgggacagggtgttgtcattggcctcatcgacacaggaatagatccaacccaccctagctttgcagatgatctatcgactgatagttatccagtacctgctcactactctggcatttgtgaggttacaaatgattttccatctggatcttgcaatagaaagctcgtgggggctcagcattttgcagcatctgcaataactagaggagtcttcaacgcatctcaggatcttgcttcaccatctgatagtgatggccatgggacgcatacagcatccattgctgctggcaatcatggaattcctgttgttgtggctgggcatcaatttggaaatgcaagcggcatggctcctcgtgcacacattgctgtctataaagctctttacaaaagctttggtggttttgctgctgatgttgtggctgcaatagatcaggcagctgaagataatgttgacattatcagcttgtccattactcctaatcggaggcctcctggactcgcaacattcttcaatccaatagacatggcactcttgtcagctgtaaaagctggcatatttgtggtgcaagctgcaggaaatactggtccttcccctaaaagcatgtcttcctacagtccctggatatttactgttggagcttctgcccatgacagggtatacagtaactatgttgtgcttggcaacaatttgaccattcaaggagttggccttgctcctggaacggatggtgatcccatgtataatttagttgctgcaccacatgcactgaagaacaatacagccagttgtaatgaaatgtcccttggggagtgccaagattcgagtcacctagatgcagatttgataagaggaaagatactagtgtgcagctattctataagatttgtgcttggtctttcttctgtgaaacaagctctagatacagccaatgatgtcagcgccgcaggagttatattctatttagacccatttgttcttgggtttcaactgaacccaactccaatgcacatgcctgggcttataataccatcatctgatgactcaaaggtatttctcacttactacaatgactccctagtgagagatgggacatcaggtcaagttgttagctttggcggagttgctaaaatattagggggtctaaatccaaattatggaaattctgctccgaaagtaatgttctattctgctaggggtcctgaccctgaggacaacacactgtcaaatgctgatatcttgaaaccaaatctagtagcaccgggaagttccatttggggtgcttggagttcagttggattggattctgctgaatttgctggtgaaagtttcgcaatgctctctggcacaagtatggctgcgccccatgtcgctggcctcgccgctctaatcaagcagaagtttccttcttttagcccagcagctatagcttctgcactgtccacaaccacaactcttagtgacaggcaagggaaaccaatcatggcacagcgaacatacagcaacccagacttgacgcagtctccagcgacatcttttgatatggggaatggctttgtcaacgccaccgctgctttagacccggggctcataattgattgcagctatgatgatttcttctcctttctttgcggcataaatgggtctagcccagtcgtgaaaaactacactggcaacagctgcgtggcctccaccatgacaggagcagatctaaacctaccatcaatcaccatagccgtgctcaaccaaacaagaaccataacgagaacggtgatcaacgtggccgctgacgagagctactctgtcaattacagtgcccctaatggaactgcagtttccgtggtgccgacgcaatttttcattccaagcggacagaagcagctcgtgacctttgttgtgaacgccaccataaacagctccactgcgagcttcgggaacgttgggttccagggtaacaaaggccaccgggcgatcatcccattctcggtgatctccaaggttgtatacagttcctgatgactgatgagccgagctgatgcagtggatgcaatgcaaatgcaaatgcaaaccagggcctgactgatccagcgtatgcagtgatgacttgactgcatggaggtggagcttgcctttgactagagaaattttttgttggttgtggcgtgtacattctgaagcatgttgatgtaagtagctgagtgattaaccagtaactgtaaagagaatgtactgccagatatccagaatgggaaatccttgtgcaaccagaatgttaaatagcactctgttggggtttgatttaccgatatgatgttcgtgcga

SEQ ID NO: 36395 - DNA, 2882 bp, Zea Mays
gcagtattctttcccttcctgctcgatgcatccctttcttctctagcctcgcaaagtcgcactctttgggtgttctcgcctcctcctcgggcgacgctgccgccggcggagacagagttcacccaaacctatgaattatggctcatatattgttcacctccaaaaatcactattgaagaggactctaaggggagagcattatgtaaagctgtatagctaccgctacttgattaatggttttgctgttgtcattactcctcggcaggcagacaagctatccgggagaaaagaagtagcgaatgtgatgctggattactcagttaggacagcaacaactcatacccctgaatttcttggactgccacaaggagcctgggttcaagaaggtggtccacaattcgcgggacagggtgttgtcattggcctcatcgacacaggaatagatccaacccaccctagctttgcagatgatctatcgactgatagttatccagtacctgctcactactctggcatttgtgaggttacaaatgattttccatctggatcttgcaatagaaagctcgtgggggctcagcattttgcagcatctgcaataactagaggagtcttcaacgcatctcaggatcttgcttcaccatctgatagtgatggccatgggacgcatacagcatccattgctgctggcaatcatggaattcctgttgttgtggctgggcatcaatttggaaatgcaagcggcatggctcctcgtgcacacattgctgtctataaagctctttacaaaagctttggtggttttgctgctgatgttgtggctgcaatagatcaggtggttgttgttcctggcgtacgacttcttcccagcgatcgttcgacgaactgcactgcataccccttcccgcatcatcttagatcggttacatcgaacatacacatgaaatgtctcatgtgaatggagccaccaatgtcttgagcattggtccctccacagggcagctgaagataatgttgacattatcagcttgtccattactcctaatcggaggcctcctggactcgcaacattcttcaatccaatagacatggcactcttgtcagctgtaaaagctggcatatttgtggtgcaagctgcaggaaatactggtccttcccctaaaagcatgtcttcctacagtccctggatatttactgttggagcttctgcccatgacagggtatacagtaactatgttgtgcttggcaacaatttgaccattcaaggagttggccttgctcctggaacggatggtgatcccatgtataatttagttgctgcaccacatgcactgaagaacaatacagccagttgtaatgaaatgtcccttggggagtgccaagattcgagtcacctagatgcagatttgataagaggaaagatactagtgtgcagctattctataagatttgtgcttggtctttcttctgtgaaacaagctctagatacagccaatgatgtcagcgccgcaggagttatattctatttagacccatttgttcttgggtttcaactgaacccaactccaatgcacatgcctgggcttataataccatcatctgatgactcaaaggtatttctcacttactacaatgactccctagtgagagatgggacatcaggtcaagttgttagctttggcggagttgctaaaatattagggggtctaaatccaaattatggaaattctgctccgaaagtaatgttctattctgctaggggtcctgaccctgaggacaacacactgtcaaatgctgatatcttgaaaccaaatctagtagcaccgggaagttccatttggggtgcttggagttcagttggattggattctgctgaatttgctggtgaaagtttcgcaatgctctctggcacaagtatggctgcgccccatgtcgctggcctcgccgctctaatcaagcagaagtttccttcttttagcccagcagctatagcttctgcactgtccacaaccacaactcttagtgacaggcaagggaaaccaatcatggcacagcgaacatacagcaacccagacttgacgcagtctccagcgacatcttttgatatggggaatggctttgtcaacgccaccgctgctttagacccggggctcataattgattgcagctatgatgatttcttctcctttctttgcggcataaatgggtctagcccagtcgtgaaaaactacactggcaacagctgcgtggcctccaccatgacaggagcagatctaaacctaccatcaatcaccatagccgtgctcaaccaaacaagaaccataacgagaacggtgatcaacgtggccgctgacgagagctactctgtcaattacagtgcccctaatggaactgcagtttccgtggtgccgacgcaatttttcattccaagcggacagaagcagctcgtgacctttgttgtgaacgccaccataaacagctccactgcgagcttcgggaacgttgggttccagggtaacaaaggccaccgggcgatcatcccattctcggtgatctccaaggttgtatacagttcctgatgactgatgagccgagctgatgcagtggatgcaatgcaaatgcaaatgcaaaccagggcctgactgatccagcgtatgcagtgatgacttgactgcatggaggtggagcttgcctttgactagagaaattttttgttggttgtggcgtgtacattctgaagcatgttgatgtaagtagctgagtgattaaccagtaactgtaaagagaatgtactgccagatatccagaatgggaaatccttgtgcaaccagaatgttaaatagcactctgttggggtttgatttaccgatatgatgttcgtgcga

SEQ ID NO: 36396 - DNA, 2500 bp, Zea Mays
cagcagtattctttcccttcctgctcgatgcatccctttcttctctagcctcgcaaagtcgcactctttgggtgttctcgcctcctcctcgggcgacgctgccgccggcggagacagagttcacccaaacctatgaattatggctcatatattgttcacctccaaaaatcactattgaagaggactctaaggggagagcattatgtaaagctgtatagctaccgctacttgattaatggttttgctgttgtcattactcctcggcaggcagacaagctatccgggagaaaagaagtagcgaatgtgatgctggattactcagttaggacagcaacaactcatacccctgaatttcttggactgccacaaggagcctgggttcaagaaggtggtccacaattcgcgggacagggtgttgtcattggcctcatcgacacaggaatagatccaacccaccctagctttgcagatgatctatcgactgatagttatccagtacctgctcactactctggcatttgtgaggttacaaatgattttccatctggatcttgcaatagaaagctcgtgggggctcagcattttgcagcatctgcaataactagaggagtcttcaacgcatctcaggatcttgcttcaccatctgatagtgatggccatgggacgcatacagcatccattgctgctggcaatcatggaattcctgttgttgtggctgggcatcaatttggaaatgcaagcggcatggctcctcgtgcacacattgctgtctataaagctctttacaaaagctttggtggttttgctgctgatgttgtggctgcaatagatcagggtatacagtaactatgttgtgcttggcaacaatttgaccattcaaggagttggccttgctcctggaacggatggtgatcccatgtataatttagttgctgcaccacatgcactgaagaacaatacagccagttgtaatgaaatgtcccttggggagtgccaagattcgagtcacctagatgcagatttgataagaggaaagatactagtgtgcagctattctataagatttgtgcttggtctttcttctgtgaaacaagctctagatacagccaatgatgtcagcgccgcaggagttatattctatttagacccatttgttcttgggtttcaactgaacccaactccaatgcacatgcctgggcttataataccatcatctgatgactcaaaggtatttctcacttactacaatgactccctagtgagagatgggacatcaggtcaagttgttagctttggcggagttgctaaaatattagggggtctaaatccaaattatggaaattctgctccgaaagtaatgttctattctgctaggggtcctgaccctgaggacaacacactgtcaaatgctgatatcttgaaaccaaatctagtagcaccgggaagttccatttggggtgcttggagttcagttggattggattctgctgaatttgctggtgaaagtttcgcaatgctctctggcacaagtatggctgcgccccatgtcgctggcctcgccgctctaatcaagcagaagtttccttcttttagcccagcagctatagcttctgcactgtccacaaccacaactcttagtgacaggcaagggaaaccaatcatggcacagcgaacatacagcaacccagacttgacgcagtctccagcgacatcttttgatatggggaatggctttgtcaacgccaccgctgctttagacccggggctcataattgattgcagctatgatgatttcttctcctttctttgcggcataaatgggtctagcccagtcgtgaaaaactacactggcaacagctgcgtggcctccaccatgacaggagcagatctaaacctaccatcaatcaccatagccgtgctcaaccaaacaagaaccataacgagaacggtgatcaacgtggccgctgacgagagctactctgtcaattacagtgcccctaatggaactgcagtttccgtggtgccgacgcaatttttcattccaagcggacagaagcagctcgtgacctttgttgtgaacgccaccataaacagctccactgcgagcttcgggaacgttgggttccagggtaacaaaggccaccgggcgatcatcccattctcggtgatctccaaggttgtatacagttcctgatgactgatgagccgagctgatgcagtggatgcaatgcaaatgcaaatgcaaaccagggcctgactgatccagcgtatgcagtgatgacttgactgcatggaggtggagcttgcctttgactagagaaattttttgttggttgtggcgtgtacattctgaagcatgttgatgtaagtagctgagtgattaaccagtaactgtaaagagaatgtactgccagatatccagaatgggaaatccttgtgcaaccagaatgttaaatagcactctgttggggtttgatttaccgatatgatgttcgtgcga

SEQ ID NO: 36397 - DNA, 2732 bp, Zea Mays
agcattggtagcagcagtattctttcccttcctgctcgatgcatccctttcttctctagcctcgcaaagtcgcactctttgggtgttctcgcctcctcctcgggcgacgctgccgccggcggagacagagttcacccaaacctatgaattatggctcatatattgttcacctccaaaaatcactattgaagaggactctaaggggagagcattatgtaaagctgtatagctaccgctacttgattaatggttttgctgttgtcattactcctcggcaggcagacaagctatccgggagaaaagaagtagcgaatgtgatgctggattactcagttaggacagcaacaactcatacccctgaatttcttggactgccacaaggagcctgggttcaagaaggtggtccacaattcgcgggacagggtgttgtcattggcctcatcgacacaggaatagatccaacccaccctagctttgcagatgatctatcgactgatagttatccagtacctgctcactactctggcatttgtgaggttacaaatgattttccatctggatcttgcaatagaaagctcgtgggggctcagcattttgcagcatctgcaataactagaggagtcttcaacgcatctcaggatcttgcttcaccatctgatagtgatggccatgggacgcatacagcatccattgctgctggcaatcatggaattcctgttgttgtggctgggcatcaatttggaaatgcaagcggcatggctcctcgtgcacacattgctgtctataaagctctttacaaaagctttggtggttttgctgctgatgttgtggctgcaatagatcaggcagctgaagataatgttgacattatcagcttgtccattactcctaatcggaggcctcctggactcgcaacattcttcaatccaatagacatggcactcttgtcagctgtaaaagctggcatatttgtggtgcaagctgcaggaaatactggtccttcccctaaaagcatgtcttcctacagtccctggatatttactgttggagcttctgcccatgacagggtatacagtaactatgttgtgcttggcaacaatttgaccattcaaggagttggccttgctcctggaacggatggtgatcccatgtataatttagttgctgcaccacatgcactgaagaacaatacagccagttgtaatgaaatgtcccttggggagtgccaagattcgagtcacctagatgcagatttgataagaggaaagatactagtgtgcagctattctataagatttgtgcttggtctttcttctgtgaaacaagctctagatacagccaatgatgtcagcgccgcaggagttatattctatttagacccatttgttcttgggtttcaactgaacccaactccaatgcacatgcctgggcttataataccatcatctgatgactcaaaggtatttctcacttactacaatgactccctagtgagagatgggacatcaggtcaagttgttagctttggcggagttgctaaaatattagggggtctaaatccaaattatggaaattctgctccgaaagtaatgttctattctgctaggggtcctgaccctgaggacaacacactgtcaaatgctgatatcttgaaaccaaatctagtagcaccgggaagttccatttggggtgcttggagttcagttggattggattctgctgaatttgctggtgaaagtttcgcaatgctctctggcacaagtatggctgcgccccatgtcgctggcctcgccgctctaatcaagcagaagtttccttcttttagcccagcagctatagcttctgcactgtccacaaccacaactcttagtgacaggcaagggaaaccaatcatggcacagcgaacatacagcaacccagacttgacgcagtctccagcgacatcttttgatatggggaatggctttgtcaacgccaccgctgctttagacccggggctcataattgattgcagctatgatgatttcttctcctttctttgcggcataaatgggtctagcccagtcgtgaaaaactacactggcaacagctgcgtggcctccaccatgacaggagcagatctaaacctaccatcaatcaccatagccgtgctcaaccaaacaagaaccataacgagaacggtgatcaacgtggccgctgacgagagctactctgtcaattacagtgcccctaatggaactgcagtttccgtggtgccgacgcaatttttcattccaagcggacagaagcagctcgtgacctttgttgtgaacgccaccataaacagctccactgcgagcttcgggaacgttgggttccagggtaacaaaggccaccgggcgatcatcccattctcggtgatctccaaggttgtatacagttcctgatgactgatgagccgagctgatgcagtggatgcaatgcaaatgcaaatgcaaaccagggcctgactgatccagcgtatgcagtgatgacttgactgcatggaggtggagcttgcctttgactagagaaattttttgttggttgtggcgtgtacattctgaagcatgttgatgtaagtagctgagtgattaaccagtaactgtaaagagaatgtactgccagatatccagaatgggaaatccttgtgcaaccagaatgttaaatagcactctgttggggtttgatttaccgatatgatgttcgtgcga

SEQ ID NO: 36398 - DNA, 1997 bp, Zea Mays
tttgaaggaagcagtgtaactgtagatctttgcatttgatgatgttgttgcaaaagaaaaggtatggattggttctcgtttaatcctggtgtagagcataatcctgttgagcttagatttcctcatgccaaagatcgatatgacgcagactcatgccaagtgtgtgttcaagctcatacagaagcttgttcaaacaatcacatctgatctgagcatccttcgtaaaaggctgcgacttgtaacttgtttggaattgaaagaaaatgatcgtttgattccctagcaatagaaatcctgggtaaaatcctgcatttgctggtgtcaaggtattccaaatggcgctaagattgatcagtctccaaacatgatcgtgtcttccaatatctgagacactgggctaccaggtaccagcacacccactgcactgagccacatcggccaggaaccagcagcggcaggaacaaggcaggcgatccggagaaaccaaccttgctatcatcgccggcctaatatcaatcccctgttttacccctgggccacggcagtcgtccagctggtttgcctcccacacaagggtaaaagcggaacgctaaaacctcaccccctccgcttggaagttccatcgccgccgcctccatcgctacacaccacgacgcagcgcccgattccgccggccagcaacgatgcagagctccctcgcccggccgccggtactggccggatgcggcgagagacggggcctggcagccgtggcacggtgccgcgctgaggcggcggcgcccgtgtggacggcgtccagggcgtctgcggggccgtacaccgggagggacccggaggtgaagaagcccgcgtggctgcggcagcgcgctgcgcagggggagaagtacgctcgcctgcgggagtccatcggcgagctcaagctcaacaccgtctgcgtcgaggcacagtgccccaacatcggcgagtgttggaacggaggtggaggggccggcggcgaaggggacggcatcgcgacggccaccatcatggtgcttggtgacacctgcacgcgcgggtgtcgattctgcgctgtgaagaccagcaacaaaccgccgccgcctgatcccctggagcctctgaacacggctttggctgttgcaagctggggtgtagattatgttgtgctaaccagtgtcgatagagatgacttacctgatggtggaagtagccattttgctcagacagtgaaagctttaaaggagctcaaacctggaatactggtagagtgcttaacctcggattttcgaggtgacctggaggctatctcatctttggcaaactctggcctagatgtttatgcacacaacattgaaactgtgaggagtctacagagggttgtgagggatccccgggcagggtatgatcagagcttagcagttctcaagcatgcaaaaggttccagggaggacatgattacaaagtcttctatcatgcttggtcttggagagactgatgaagaggtgaaacaagccatgatggatctacgggcaattggtgttgacatccttactttgggacagtacttgcaggttagctcaatacacacaggacctattgaatctagatatcatgccatcccatcttcctgtaattaacaatttgatatcacagccatcagaaagacatctaacagtaagagagtatgtgactccccaaaagttccaattttggaaggagtatggagaatcggtgggtttccgatatgttgctagcggacccttgatagtatgcgcatctttgctctctgcgactctgccgttgttgcccctgttgaatagagaaaaaacgaggatgccgattctttttctgtatacacgataacacgaaaagctgttcaagtgtagtagcatgtacgaaactgtctccatgttttggacgattacacattgctttgttcatcatgataaagagagaaagaaaacgaagaaagctggagaaaggggatatcgcactttatt

SEQ ID NO: 36399 - DNA, 2838 bp, Zea Mays
ggctgtggcaattgaacatattttaaggatgatattctttttctaaggttgaaccgaagcattagtggaatccggaatcctggtgttattggggacaggagatccatttcaagaggaagttctttaactcttgactggcctgaggatgtggagttttcaaactgggtagatcaagatgtatttgaaaatgaggaattccaggaaagtaaaagatggtggtcatccaattcttcagtgcagcaaggggattccaactccagaccactaagtcgaacatcttcctaccctcagcagccactgcagcaccggtcaagtgaacctatcgttttaccaaagacttcttcatttacctcatttccaccacctgttgctggtggtggtagagccccttaccctgctcaaggccttacacgtcatgggagcattccatcaattggcgctgggctccaaatgggttctccgagcatgtcactttctgcttctccatatcatatggtcggaccatctcatgggctgccatacacgggaggcatgccttatggtgctcttaacctgcctgtaaacaatccagtgcagaatgattggtcgaatcatgttaaccctttcactggggagcatcttaatctactgcccaatttattgcacaaacaattatcacttcctaatagcccaatgtcgtcactcctattttctcagcatcagcagagattggcacaggtccaatcatcccatcagaattacctcaatataatgccacacgtcctatatccccatcactccgcagagattacaagcaggtttggttctgttggcagttcccattcatcaagagacaagagatcaaggtcggggaagggaaaacataacattcgattctctcaactaccatctgatactggtagccagaatggtgacagcggaggtataaagtttagatccaagtacatgtcatctgaagagatcgaatcaatcttaagaatgcagcattctgcaagccacagcagcgatccttatattgttgattactatcatcaagcttgtatggcaaaaaggggtgccacttctaagcaaaagaccaatttctccccaacatcaatgaaagatgtaccatccaagtctcgatccagcagtgatcagcacacatatcttcaggttgatgctcttggaagagtatctttttcttccatacggaggcctcggtctcttcttgaagtcgaccatccttcatctgctgatggctctcatgatcagaagtccactgtgaggcccctggagaaagaaccaatgcttgcagcaagagtcactgttgaagacgccctttgccttgttcttgaggttgatgacactgaccgtctgttgcagtctagccagtcacaggacaacattttcgaactgaaacgaagacggcaagtcctcctggaaggtctagctgcatcattgcagtttgttgatcctctcggacccagcaaatctggtcattcatctgggtcagccctgaaggacgatgttatttttctgcgcattgtttctctgcccaaaggacgtaagtttttagcacgttaccttcggcttcttgtccctggcagcgagttgacccggatagtatgcatggctatttttcgccatttgaggttcttgtttgggggtttgccatcagactctagtgcagcagaaactacagttgctcttgcgaagactgtttcatcttgtgtgcatcacatggaacttggtgctcttagtgcctgccttgctgctgttgtttgttcgtctgaacagccacctctgcgccctcttggtagctctgctggtgatggggcttctcttgttattaaatcagtactggaccgagcaactgagttactgactgatcgccatgctgcagccagctacactgtgccaaaccgtgctctctggcaggcatcatttgatgctttctttgggcttctaacaaaatactgtgtcagtaagtttgaaagtatccaacagatgtttgtcacacagacaccgagctcaggaatcggacctgaggcttccaaagctactagtaaggagatgcctgttgagctacttcgtgcaagccttcctcatacaaacgagcagcagcgccagcggcttcttgattttgctcagagatccatgccagtaacaggtttcaatccctcaggtgctagaggtgggcacatcacttcagaatctgttcctggatgatgtaactgaaggagacacacaagggcaaagagtcaatgcttttaaacattgatgagatggtcttcagctgataattgttgtatctgaagacatgcatgccccattataagttgtgagcgagcttggagaagttccgattgctcaggaaagtagccttcacttcaggttgtgacgtaagtttaggtttcagagtaatcgaatagaccagtgaaatgttccttatgtgggtcatttaatatagtacccacctgatgatatcataatactggaacaggaaatgtaccccttcacatttctactagagtcgatgttcttcgtaggccattgtggactggtttgcacatttactgggcatgtatttgtttatattctgacatactgttattgagctactcctgtcctgggtcgggctcttggcttctagtctaggtgggtggaaatgttcgggttgtttttgcttgatcatattctgtcagccttcctttcatcatttccctcaatattccttgtggtgtgtgtggagccatctgccttcgcgaactgtgcgatttccagcatgaattcgttcgttaagaaatgccaaccgttagcttagctccatttaacagcgtgatgtgaaaatatattgat

SEQ ID NO: 36400 - DNA, 3033 bp, Zea Mays
gagactcttggccgctgaatccgctgcgctgagaattttgacgctggccagtacgccttcttcgggaaggagccactcgaggggttcgagctcgggggtttggaggaagccggcagtgatggcaatggcggtggattcagcgggccagatgaggggctgtaccggctaaactcggttggagacgagattgacgatcagagtaacttgtctgacattgatgatcttgcaagcaccttcgctaagttgaaccgaagcattagtggaatccggaatcctggtgttattggggacaggagatccatttcaagaggaagttctttaactcttgactggcctgaggatgtggagttttcaaactgggtagatcaagatgtatttgaaaatgaggaattccaggaaagtaaaagatggtggtcatccaattcttcagtgcagcaaggggattccaactccagaccactaagtcgaacatcttcctaccctcagcagccactgcagcaccggtcaagtgaacctatcgttttaccaaagacttcttcatttacctcatttccaccacctgttgctggtggtggtagagccccttaccctgctcaaggccttacacgtcatgggagcattccatcaattggcgctgggctccaaatgggttctccgagcatgtcactttctgcttctccatatcatatggtcggaccatctcatgggctgccatacacgggaggcatgccttatggtgctcttaacctgcctgtaaacaatccagtgcagaatgattggtcgaatcatgttaaccctttcactggggagcatcttaatctactgcccaatttattgcacaaacaattatcacttcctaatagcccaatgtcgtcactcctattttctcagcatcagcagagattggcacaggtccaatcatcccatcagaattacctcaatataatgccacacgtcctatatccccatcactccgcagagattacaagcaggtttggttctgttggcagttcccattcatcaagagacaagagatcaaggtcggggaagggaaaacataacattcgattctctcaactaccatctgatactggtagccagaatggtgacagcggaggtataaagtttagatccaagtacatgtcatctgaagagatcgaatcaatcttaagaatgcagcattctgcaagccacagcagcgatccttatattgttgattactatcatcaagcttgtatggcaaaaaggggtgccacttctaagcaaaagaccaatttctccccaacatcaatgaaagatgtaccatccaagtctcgatccagcagtgatcagcacacatatcttcaggttgatgctcttggaagagtatctttttcttccatacggaggcctcggtctcttcttgaagtcgaccatccttcatctgctgatggctctcatgatcagaagtccactgtgaggcccctggagaaagaaccaatgcttgcagcaagagtcactgttgaagacgccctttgccttgttcttgaggttgatgacactgaccgtctgttgcagtctagccagtcacaggacaacattttcgaactgaaacgaagacggcaagtcctcctggaaggtctagctgcatcattgcagtttgttgatcctctcggacccagcaaatctggtcattcatctgggtcagccctgaaggacgatgttatttttctgcgcattgtttctctgcccaaaggacgtaagtttttagcacgttaccttcggcttcttgtccctggcagcgagttgacccggatagtatgcatggctatttttcgccatttgaggttcttgtttgggggtttgccatcagactctagtgcagcagaaactacagttgctcttgcgaagactgtttcatcttgtgtgcatcacatggaacttggtgctcttagtgcctgccttgctgctgttgtttgttcgtctgaacagccacctctgcgccctcttggtagctctgctggtgatggggcttctcttgttattaaatcagtactggaccgagcaactgagttactgactgatcgccatgctgcagccagctacactgtgccaaaccgtgctctctggcaggcatcatttgatgctttctttgggcttctaacaaaatactgtgtcagtaagtttgaaagtatccaacagatgtttgtcacacagacaccgagctcaggaatcggacctgaggcttccaaagctactagtaaggagatgcctgttgagctacttcgtgcaagccttcctcatacaaacgagcagcagcgccagcggcttcttgattttgctcagagatccatgccagtaacaggtttcaatccctcaggtgctagaggtgggcacatcacttcagaatctgttcctggatgatgtaactgaaggagacacacaagggcaaagagtcaatgcttttaaacattgatgagatggtcttcagctgataattgttgtatctgaagacatgcatgccccattataagttgtgagcgagcttggagaagttccgattgctcaggaaagtagccttcacttcaggttgtgacgtaagtttaggtttcagagtaatcgaatagaccagtgaaatgttccttatgtgggtcatttaatatagtacccacctgatgatatcataatactggaacaggaaatgtaccccttcacatttctactagagtcgatgttcttcgtaggccattgtggactggtttgcacatttactgggcatgtatttgtttatattctgacatactgttattgagctactcctgtcctgggtcgggctcttggcttctagtctaggtgggtggaaatgttcgggttgtttttgcttgatcatattctgtcagccttcctttcatcatttccctcaatattccttgtggtgtgtgtggagccatctgccttcgcgaactgtgcgatttccagcatgaattcgttcgttaagaaatgccaaccgttagcttagctccatttaacagcgtgatgtgaaaatatattgat

SEQ ID NO: 36401 - DNA, 3586 bp, Zea Mays
gtctcatctaccactacaattgccaatctgcctctagtttctgcactgttacgattcgcctagtactcctctccttcaccttgatgtgcctcggaatctgatattctatttttttcagaagctaggtagtactacctcgaaggggaaaatcgtttcttttttttcactattattttctttttgggagtgaggtctctccccctgtgggctgtgggctgtgggctgtcactgacctcttcccttctgtgtccgccaatttatctggtgccctgagctctcttgtgtgtgatctgtgaatcactgaatccttctcgccaacagcccaacacatggaaaagagagctgcagaagcagacgcctaaaacatggccgcagtatgctcctcattcacctgccgcgtctagtatttcggaaatattttgtatttattaaagcaggagagggaggcaagcagcagccgaggccgagctatctctctatttccccctcgcccagctcagatccgaagcctgaaggaaatcgcgccaacaggccctagccccagatgcgcgccgccgcttgctgcctgcgctgctgctactccttctaggggtcttgcggcgatgctgggcgtcgagcccgagagcggaggcgccgcgtcctcctccgccgcagagaattttgacgctggccagtacgccttcttcgggaaggagccactcgaggggttcgagctcgggggtttggaggaagccggcagtgatggcaatggcggtggattcagcgggccagatgaggggctgtaccggctaaactcggttggagacgagattgacgatcagagtaacttgtctgacattgatgatcttgcaagcaccttcgctaaggttctttaactcttgactggcctgaggatgtggagttttcaaactgggtagatcaagatgtatttgaaaatgaggaattccaggaaagtaaaagatggtggtcatccaattcttcagtgcagcaaggggattccaactccagaccactaagtcgaacatcttcctaccctcagcagccactgcagcaccggtcaagtgaacctatcgttttaccaaagacttcttcatttacctcatttccaccacctgttgctggtggtggtagagccccttaccctgctcaaggccttacacgtcatgggagcattccatcaattggcgctgggctccaaatgggttctccgagcatgtcactttctgcttctccatatcatatggtcggaccatctcatgggctgccatacacgggaggcatgccttatggtgctcttaacctgcctgtaaacaatccagtgcagaatgattggtcgaatcatgttaaccctttcactggggagcatcttaatctactgcccaatttattgcacaaacaattatcacttcctaatagcccaatgtcgtcactcctattttctcagcatcagcagagattggcacaggtccaatcatcccatcagaattacctcaatataatgccacacgtcctatatccccatcactccgcagagattacaagcaggtttggttctgttggcagttcccattcatcaagagacaagagatcaaggtcggggaagggaaaacataacattcgattctctcaactaccatctgatactggtagccagaatggtgacagcggaggtataaagtttagatccaagtacatgtcatctgaagagatcgaatcaatcttaagaatgcagcattctgcaagccacagcagcgatccttatattgttgattactatcatcaagcttgtatggcaaaaaggggtgccacttctaagcaaaagaccaatttctccccaacatcaatgaaagatgtaccatccaagtctcgatccagcagtgatcagcacacatatcttcaggttgatgctcttggaagagtatctttttcttccatacggaggcctcggtctcttcttgaagtcgaccatccttcatctgctgatggctctcatgatcagaagtccactgtgaggcccctggagaaagaaccaatgcttgcagcaagagtcactgttgaagacgccctttgccttgttcttgaggttgatgacactgaccgtctgttgcagtctagccagtcacaggacaacattttcgaactgaaacgaagacggcaagtcctcctggaaggtctagctgcatcattgcagtttgttgatcctctcggacccagcaaatctggtcattcatctgggtcagccctgaaggacgatgttatttttctgcgcattgtttctctgcccaaaggacgtaagtttttagcacgttaccttcggcttcttgtccctggcagcgagttgacccggatagtatgcatggctatttttcgccatttgaggttcttgtttgggggtttgccatcagactctagtgcagcagaaactacagttgctcttgcgaagactgtttcatcttgtgtgcatcacatggaacttggtgctcttagtgcctgccttgctgctgttgtttgttcgtctgaacagccacctctgcgccctcttggtagctctgctggtgatggggcttctcttgttattaaatcagtactggaccgagcaactgagttactgactgatcgccatgctgcagccagctacactgtgccaaaccgtgctctctggcaggcatcatttgatgctttctttgggcttctaacaaaatactgtgtcagtaagtttgaaagtatccaacagatgtttgtcacacagacaccgagctcaggaatcggacctgaggcttccaaagctactagtaaggagatgcctgttgagctacttcgtgcaagccttcctcatacaaacgagcagcagcgccagcggcttcttgattttgctcagagatccatgccagtaacaggtttcaatccctcaggtgctagaggtgggcacatcacttcagaatctgttcctggatgatgtaactgaaggagacacacaagggcaaagagtcaatgcttttaaacattgatgagatggtcttcagctgataattgttgtatctgaagacatgcatgccccattataagttgtgagcgagcttggagaagttccgattgctcaggaaagtagccttcacttcaggttgtgacgtaagtttaggtttcagagtaatcgaatagaccagtgaaatgttccttatgtgggtcatttaatatagtacccacctgatgatatcataatactggaacaggaaatgtaccccttcacatttctactagagtcgatgttcttcgtaggccattgtggactggtttgcacatttactgggcatgtatttgtttatattctgacatactgttattgagctactcctgtcctgggtcgggctcttggcttctagtctaggtgggtggaaatgttcgggttgtttttgcttgatcatattctgtcagccttcctttcatcatttccctcaatattccttgtggtgtgtgtggagccatctgccttcgcgaactgtgcgatttccagcatgaattcgttcgttaagaaatgccaaccgttagcttagctccatttaacagcgtgatgtgaaaatatattgat

SEQ ID NO: 36402 - DNA, 1484 bp, Zea Mays
aattgaagattttctcctgaacaaagaagtgtagtctgcgagaaaacaggacagaaggtttttggcgcaaacaaggatcatgaattggatgatgaaactggtgtacagctatctgttaaacctgcaaaaataaatgaatttatcgcggcttgcattctgttggcttcaatatgcggggaagttggtagagtggacattgtattagaggtttcgtacaaagttcttcagatgggtaaaagtaatattttgtggactctactggctctccatgtctttgcttccatgtgtggtgataagtttctcgcaccaaagagttgcaactttctcatgacaactatacggttagttgtcctgcttcttgagagcaacgacacttctctgtgccttgtgtcatcatatatccagtcaaacaagccaacaacattaccatcctgtgcacattgtctgtttaatgtggatacggtttccattgatggcttcatctcttcactgttggatgagttggatttatgttctctgcaatggaacaaccgcacctgctcaaatgaaaatatcacaaggtgcagttcgcatatggtatcaagtggacttgataccagatgtagtgaaacttgtaatatcttcaagcaaggaaaactatctgaggatactcataactacccagcagagattaatttatgctacttcaccgagctaatttctttgctcgagctctttgggatctatatgagctgcgagtggacatacaacaatgtcgttatccgtcttctggagattctggaattgtgcatgtgccgtgactattcagctgctctgttagtacttgtgagccaacttggaaggtcatttgtcgatgatgttggttacgaggagagaagtgttagtaagctaaggaacaaattatcgttattgttaacaggggcacattttacaaaatcatggagtttaagtgttcagtttactgccattggtgcattggaaacattgctacaggtgatttaaacttcacatcaactgaacgagcaccccaaccaactgaacatgttagcactattgatattgatgctcatgattctcaccttaaccgtttccttgcaaatgtggatgatcacatcccatctagtggacccatagacatatatgagatagaaacaccatcttcatcttgctctaaaaacctagaaaataggattgggaagaaaagaaagctcagtattgctagagttttacaaaactatgtggacattagggcaaatgaaacaacaatatttatgaatgaactcaatgagacaactaaggaagtaggtgactattctatcaagtagtgtttggatcttctagaatcaattgaagaactttcagatgaggaaaaggtgcaggcaacaaatgtgctgaagtgtgaggtcaacagagaaattttcatgaacttcaagattccaacggtttgtttgttatgggtcaaaggcgaaatcgctcctaaggta

SEQ ID NO: 36403 - DNA, 2677 bp, Zea Mays
caaatgtgcaaggaggaacacctccgaggtgattcagcagaagcagctagggcaactgagtctgatgccagagatctattggaaaaggagataattgaattaaagacacagaacatgagtttgaagcaaacacaaaatacctgcaaaaataatgatgaacttttacgtatctctgaattagaggaagaaaatagaaagctcatacagattttaggagaagaaaggaagaagatcacttctgagaagaaaaaaattgaagaagaaaagtgcaaaactctagaaatgcaaaggatatggaagtcagaagcacagaagtctgaagagtatagaagagttgctgatactgaaagaaaagttgccaatgattggagagcatcatgtgaaaggttgaggagtgaagcaaatgaactcagagctcagttgactgctcaaattcagaaaacagaagaaatacttaaaagggctgaagcggagaagcagaaggtcgccagagaaaagaaacgtgctgattcagagaaatcattatctgaaaagaatagaacacttgttgaagttgagaagaaaaaagtaacagaagaaaagtgccgtgctgacaatttatttgctaagttagaggagcagaagaaactcaatgaacatttgcgaactagcatacaggttgaaacgaagaatgcaatagaagagaaaaaacgaggagaccatttgtttcagaaattagaagagatgagagaacagactgaatgtttacagagaaaggcaaatgaattctctgcaggtagagatgtaatttcttctggcaagtgtggccggcgacacattgatagaatttctgagaatgcaaacgttaagcttctcaaagagaaacttaagctgaaaaaagaacaactaaagcatgtcaagaatgtgtccaagctagataaagcaaaaactgctttaataagaagagagcttcaaagtttaaagcaagactggacacagctactgggtcggtttaacatgctggatgaccaccttgcacgtggtgttgaagatattcatgtcttaacacagttgaatcagcatccagagatacatggctttgaacagaagctgcttcctaatgattcagttcctgccccatattttcggttgcaggctgggacagttccatttggctcttctatcccaagtgaatacacttcatatcagttgcccagagaaagctgctcacgatcaatctcaggtactagttctgaattatgcccccctcttggtagctctcacagactgctgaagtcaaaatgtcagcacagatcttcatgtccaacatccatatctgatgaaaaattcatgggctcacagggcaaggataacctatttgtctcatcgacagatatcaggaaaaaacaggattcagttgttcccgagctggctcctaaaattagaaatgatagagcattgccttgtggtacgcttacagatagaagagaaacacttggtggtgataggaagagaaaacacaccaaaatgtctcaagacccctctgcttttcttccctcaaaaaatgatttgctacatttgaaatcaaaggtgcctgctaccacttcaaatgttgcattatcctttgatgatgatcctttgtgtctgcagcaaggaaataacaccatatgtgttactgaaggtgacatggataaagctccttcattcagtttcccttctaaagtgtcttgtggaggaaatggctgtactagtagcaagtttgcttcattgatcccctttgaggaaatggtcagggaaaactgcttaaagttgctcaatttggatgatgatgcagatgaggaaaagtttagaaaggcaaaggagagaccccattcaccaaacctgagcatcatccgaccccgtagaactaaactgccaacgtatgcagaacctcacagcttgggtagatctctcaacggttgtcctgccttaggatctgatgccattgattccaagacaaggtccaaagcatcggaagttaaagagcctgtaattcagaaatcgactcaaaattatatccagcttgatccgtcgtcaaatacaatcgagtgtagtggcattgctaaacctctttttgtgaatgataaatccaatgcagctgtcaatgtttcttgtagcaccagtttggttgtagtgccagcgagcacttcttttgacagccttttgcatgagcatgtggcccagaattctgtagcatcttctgctgaggcattagacagtataagcagaccaatgttatcgggaggtggtcattcagattccattttacatttgtccaaggaagtgtctaacaaaaacaactcacatctgatttgtgacaaatcaagtcctgggctgcaagctaatgttcggacaagtgaaacaacagtgaccaagccaaacaattcggtctcgaatagtttgcttcggcaccatcatggatccgaaaaccctccattgcacttagttggatttacaagaatgaaaagaagcaaaatgattaacatatttcggtattgggagatactgagttctcaatctcaaaagcattctgacgaagcttcagttgatggtccactgcttgataaagtgtcaactgacacaatgctacctatagaattcactgaagaaacttttgtggatggaaattttgcctcatcagctttttcgtcgagtggta

SEQ ID NO: 36404 - DNA, 2986 bp, Zea Mays
tcagagcgagagtcggtccaacggctactggttccactgtctccgcttccagactctacgttcctgtctcgttcaaaaccctaaacctttcctctccatcggactctcgccgccgccccatggcggcggaaccaagagagcccacatcctcgctggatgcccagctcgcggcctcttcctcctccgcagccggcgtaggcggccccaacccgtgctgcgcgacgcagtggaagaattgccagaaattggtgaggagccggacggcgctgcgggaggcggtgaagctcctgcaggctgagaacgagaagctgcggaaggagaactcggagctcagcaaagtgtgcaaggaggaacacctccgaggtgattcagcagaagcagctagggcaactgagtctgatgccagagatctattggaaaaggagataattgaattaaagacacagaacatgagtttgaagcaaacacaaaatacctgcaaaaataatgatgaacttttacgtatctctgaattagaggaagaaaatagaaagctcatacagattttaggagaagaaaggaagaagatcacttctgagaagaaaaaaattgaagaagaaaagtgcaaaactctagaaatgcaaaggatatggaagtcagaagcacagaagtctgaagagtatagaagagttgctgatactgaaagaaaagttgccaatgattggagagcatcatgtgaaaggttgaggagtgaagcaaatgaactcagagctcagttgactgctcaaattcagaaaacagaagaaatacttaaaagggctgaagcggagaagcagaaggtcgccagagaaaagaaacgtgctgattcagagaaatcattatctgaaaagaatagaacacttgttgaagttgagaagaaaaaagtaacagaagaaaagtgccgtgctgacaatttatttgctaagttagaggagcagaagaaactcaatgaacatttgcgaactagcatacaggttgaaacgaagaatgcaatagaagagaaaaaacgaggagaccatttgtttcagaaattagaagagatgagagaacagactgaatgtttacagagaaaggcaaatgaattctctgcaggtagagatgtaatttcttctggcaagtgtggccggcgacacattgatagaatttctgagaatgcaaacgttaagcttctcaaagagaaacttaagctgaaaaaagaacaactaaagcatgtcaagaatgtgtccaagctagataaagcaaaaactgctttaataagaagagagcttcaaagtttaaagcaagactggacacagctactgggtcggtttaacatgctggatgaccaccttgcacgtggtgttgaagatattcatgtcttaacacagccctcccaggctcccagcccctacacgcctccctacaggccagtccatctcgtgtgcacacaaccaagggaaccgttgaatcagcatccagagatacatggctttgaacagaagctgcttcctaatgattcagttcctgccccatattttcggttgcaggctgggacagttccatttggctcttctatcccaagtgaatacacttcatatcagttgcccagagaaagctgctcacgatcaatctcagatatcaggaaaaaacaggattcagttgttcccgagctggctcctaaaattagaaatgatagagcattgccttgtggtacgcttacagatagaagagaaacacttggtggtgataggaagagaaaacacaccaaaatgtctcaagacccctctgcttttcttccctcaaaaaatgatttgctacatttgaaatcaaaggtgcctgctaccacttcaaatgttgcattatcctttgatgatgatcctttgtgtctgcagcaaggaaataacaccatatgtgttactgaaggtgacatggataaagctccttcattcagtttcccttctaaagtgtcttgtggaggaaatggctgtactagtagcaagtttgcttcattgatcccctttgaggaaatggtcagggaaaactgcttaaagttgctcaatttggatgatgatgcagatgaggaaaagtttagaaaggcaaaggagagaccccattcaccaaacctgagcatcatccgaccccgtagaactaaactgccaacgtatgcagaacctcacagcttgggtagatctctcaacggttgtcctgccttaggatctgatgccattgattccaagacaaggtccaaagcatcggaagttaaagagcctgtaattcagaaatcgactcaaaattatatccagcttgatccgtcgtcaaatacaatcgagtgtagtggcattgctaaacctctttttgtgaatgataaatccaatgcagctgtcaatgtttcttgtagcaccagtttggttgtagtgccagcgagcacttcttttgacagccttttgcatgagcatgtggcccagaattctgtagcatcttctgctgaggcattagacagtataagcagaccaatgttatcgggaggtggtcattcagattccattttacatttgtccaaggaagtgtctaacaaaaacaactcacatctgatttgtgacaaatcaagtcctgggctgcaagctaatgttcggacaagtgaaacaacagtgaccaagccaaacaattcggtctcgaatagtttgcttcggcaccatcatggatccgaaaaccctccattgcacttagttggatttacaagaatgaaaagaagcaaaatgattaacatatttcggtattgggagatactgagttctcaatctcaaaagcattctgacgaagcttcagttgatggtccactgcttgataaagtgtcaactgacacaatgctacctatagagtagcgagaaggtttccctcatattttcccttttgttgtgggatactagattcactgaagaaacttttgtggatggaaattttgcctcatcagctttttcgtcgagtggta

SEQ ID NO: 36405 - DNA, 2921 bp, Zea Mays
tcagagcgagagtcggtccaacggctactggttccactgtctccgcttccagactctacgttcctgtctcgttcaaaaccctaaacctttcctctccatcggactctcgccgccgccccatggcggcggaaccaagagagcccacatcctcgctggatgcccagctcgcggcctcttcctcctccgcagccggcgtaggcggccccaacccgtgctgcgcgacgcagtggaagaattgccagaaattggtgaggagccggacggcgctgcgggaggcggtgaagctcctgcaggctgagaacgagaagctgcggaaggagaactcggagctcagcaaagcatgctagtagcgtgctagcaggaattttaacagaaggtgcctatcacagagaagatgtctttcaaatgtgcaaggaggaacacctccgaggtgattcagcagaagcagctagggcaactgagtctgatgccagagatctattggaaaaggagataattgaattaaagacacagaacatgagtttgaagcaaacacaaaatacctgcaaaaataatgatgaacttttacgtatctctgaattagaggaagaaaatagaaagctcatacagattttaggagaagaaaggaagaagatcacttctgagaagaaaaaaattgaagaagaaaagtgcaaaactctagaaatgcaaaggatatggaagtcagaagcacagaagtctgaagagtatagaagagttgctgatactgaaagaaaagttgccaatgattggagagcatcatgtgaaaggttgaggagtgaagcaaatgaactcagagctcagttgactgctcaaattcagaaaacagaagaaatacttaaaagggctgaagcggagaagcagaaggtcgccagagaaaagaaacgtgctgattcagagaaatcattatctgaaaagaatagaacacttgttgaagttgagaagaaaaaagtaacagaagaaaagtgccgtgctgacaatttatttgctaagttagaggagcagaagaaactcaatgaacatttgcgaactagcatacaggttgaaacgaagaatgcaatagaagagaaaaaacgaggagaccatttgtttcagaaattagaagagatgagagaacagactgaatgtttacagagaaaggcaaatgaattctctgcaggtagagatgtaatttcttctggcaagtgtggccggcgacacattgatagaatttctgagaatgcaaacgttaagcttctcaaagagaaacttaagctgaaaaaagaacaactaaagcatgtcaagaatgtgtccaagctagataaagcaaaaactgctttaataagaagagagcttcaaagtttaaagcaagactggacacagctactgggtcggtttaacatgctggatgaccaccttgcacgtggtgttgaagatattcatgtcttaacacaggctgggacagttccatttggctcttctatcccaagtgaatacacttcatatcagttgcccagagaaagctgctcacgatcaatctcagggcaaggataacctatttgtctcatcgacagatatcaggaaaaaacaggattcagttgttcccgagctggctcctaaaattagaaatgatagagcattgccttgtggtacgcttacagatagaagagaaacacttggtggtgataggaagagaaaacacaccaaaatgtctcaagacccctctgcttttcttccctcaaaaaatgatttgctacatttgaaatcaaaggtgcctgctaccacttcaaatgttgcattatcctttgatgatgatcctttgtgtctgcagcaaggaaataacaccatatgtgttactgaaggtgacatggataaagctccttcattcagtttcccttctaaagtgtcttgtggaggaaatggctgtactagtagcaagtttgcttcattgatcccctttgaggaaatggtcagggaaaactgcttaaagttgctcaatttggatgatgatgcagatgaggaaaagtttagaaaggcaaaggagagaccccattcaccaaacctgagcatcatccgaccccgtagaactaaactgccaacgtatgcagaacctcacagcttgggtagatctctcaacggttgtcctgccttaggatctgatgccattgattccaagacaaggtccaaagcatcggaagttaaagagcctgtaattcagaaatcgactcaaaattatatccagcttgatccgtcgtcaaatacaatcgagtgtagtggcattgctaaacctctttttgtgaatgataaatccaatgcagctgtcaatgtttcttgtagcaccagtttggttgtagtgccagcgagcacttcttttgacagccttttgcatgagcatgtggcccagaattctgtagcatcttctgctgaggcattagacagtataagcagaccaatgttatcgggaggtggtcattcagattccattttacatttgtccaaggaagtgtctaacaaaaacaactcacatctgatttgtgacaaatcaagtcctgggctgcaagctaatgttcggacaagtgaaacaacagtgaccaagccaaacaattcggtctcgaatagtttgcttcggcaccatcatggatccgaaaaccctccattgcacttagttggatttacaagaatgaaaagaagcaaaatgattaacatatttcggtattgggagatactgagttctcaatctcaaaagcattctgacgaagcttcagttgatggtccactgcttgataaagtgtcaactgacacaatgctacctatagacgagaaggtttccctcatattttcccttttgttgtgggatactagattcactgaagaaacttttgtggatggaaattttgcctcatcagctttttcgtcgagtggta

SEQ ID NO: 36406 - DNA, 2890 bp, Zea Mays
tcagagcgagagtcggtccaacggctactggttccactgtctccgcttccagactctacgttcctgtctcgttcaaaaccctaaacctttcctctccatcggactctcgccgccgccccatggcggcggaaccaagagagcccacatcctcgctggatgcccagctcgcggcctcttcctcctccgcagccggcgtaggcggccccaacccgtgctgcgcgacgcagtggaagaattgccagaaattggtgaggagccggacggcgctgcgggaggcggtgaagctcctgcaggctgagaacgagaagctgcggaaggagaactcggagctcagcaaagcatgctagtagcgtgctagcaggaattttaacagaaggtgcctatcacagagaagatgtctttcaaatgtgcaaggaggaacacctccgaggtgattcagcagaagcagctagggcaactgagtctgatgccagagatctattggaaaaggagataattgaattaaagacacagaacatgagtttgaagcaaacacaaaatacctgcaaaaataatgatgaacttttacgtatctctgaattagaggaagaaaatagaaagctcatacagattttaggagaagaaaggaagaagatcacttctgagaagaaaaaaattgaagaagaaaagtgcaaaactctagaaatgcaaaggatatggaagtcagaagcacagaagtctgaagagtatagaagagttgctgatactgaaagaaaagttgccaatgattggagagcatcatgtgaaaggttgaggagtgaagcaaatgaactcagagctcagttgactgctcaaattcagaaaacagaagaaatacttaaaagggctgaagcggagaagcagaaggtcgccagagaaaagaaacgtgctgattcagagaaatcattatctgaaaagaatagaacacttgttgaagttgagaagaaaaaagtaacagaagaaaagtgccgtgctgacaatttatttgctaagttagaggagcagaagaaactcaatgaacatttgcgaactagcatacaggttgaaacgaagaatgcaatagaagagaaaaaacgaggagaccatttgtttcagaaattagaagagatgagagaacagactgaatgtttacagagaaaggcaaatgaattctctgcaggtagagatgtaatttcttctggcaagtgtggccggcgacacattgatagaatttctgagaatgcaaacgttaagcttctcaaagagaaacttaagctgaaaaaagaacaactaaagcatgtcaagaatgtgtccaagctagataaagcaaaaactgctttaataagaagagagcttcaaagtttaaagcaagactggacacagctactgggtcggtttaacatgctggatgaccaccttgcacgtggtgttgaagatattcatgtcttaacacaggctgggacagttccatttggctcttctatcccaagtgaatacacttcatatcagttgcccagagaaagctgctcacgatcaatctcagatatcaggaaaaaacaggattcagttgttcccgagctggctcctaaaattagaaatgatagagcattgccttgtggtacgcttacagatagaagagaaacacttggtggtgataggaagagaaaacacaccaaaatgtctcaagacccctctgcttttcttccctcaaaaaatgatttgctacatttgaaatcaaaggtgcctgctaccacttcaaatgttgcattatcctttgatgatgatcctttgtgtctgcagcaaggaaataacaccatatgtgttactgaaggtgacatggataaagctccttcattcagtttcccttctaaagtgtcttgtggaggaaatggctgtactagtagcaagtttgcttcattgatcccctttgaggaaatggtcagggaaaactgcttaaagttgctcaatttggatgatgatgcagatgaggaaaagtttagaaaggcaaaggagagaccccattcaccaaacctgagcatcatccgaccccgtagaactaaactgccaacgtatgcagaacctcacagcttgggtagatctctcaacggttgtcctgccttaggatctgatgccattgattccaagacaaggtccaaagcatcggaagttaaagagcctgtaattcagaaatcgactcaaaattatatccagcttgatccgtcgtcaaatacaatcgagtgtagtggcattgctaaacctctttttgtgaatgataaatccaatgcagctgtcaatgtttcttgtagcaccagtttggttgtagtgccagcgagcacttcttttgacagccttttgcatgagcatgtggcccagaattctgtagcatcttctgctgaggcattagacagtataagcagaccaatgttatcgggaggtggtcattcagattccattttacatttgtccaaggaagtgtctaacaaaaacaactcacatctgatttgtgacaaatcaagtcctgggctgcaagctaatgttcggacaagtgaaacaacagtgaccaagccaaacaattcggtctcgaatagtttgcttcggcaccatcatggatccgaaaaccctccattgcacttagttggatttacaagaatgaaaagaagcaaaatgattaacatatttcggtattgggagatactgagttctcaatctcaaaagcattctgacgaagcttcagttgatggtccactgcttgataaagtgtcaactgacacaatgctacctatagacgagaaggtttccctcatattttcccttttgttgtgggatactagattcactgaagaaacttttgtggatggaaattttgcctcatcagctttttcgtcgagtggta

SEQ ID NO: 36407 - DNA, 2884 bp, Zea Mays
ctcagacctctcacctcgggcctcagagagtcagagcgagagtcggtccaacggctactggttccactgtctccgcttccagactctacgttcctgtctcgttcaaaaccctaaacctttcctctccatcggactctcgccgccgccccatggcggcggaaccaagagagcccacatcctcgctggatgcccagctcgcggcctcttcctcctccgcagccggcgtaggcggccccaacccgtgctgcgcgacgcagtggaagaattgccagaaattggtgaggagccggacggcgctgcgggaggcggtgaagctcctgcaggctgagaacgagaagctgcggaaggagaactcggagctcagcaaagtgtgcaaggaggaacacctccgaggtgattcagcagaagcagctagggcaactgagtctgatgccagagatctattggaaaaggagataattgaattaaagacacagaacatgagtttgaagcaaacacaaaatacctgcaaaaataatgatgaacttttacgtatctctgaattagaggaagaaaatagaaagctcatacagattttaggagaagaaaggaagaagatcacttctgagaagaaaaaaattgaagaagaaaagtgcaaaactctagaaatgcaaaggatatggaagtcagaagcacagaagtctgaagagtatagaagagttgctgatactgaaagaaaagttgccaatgattggagagcatcatgtgaaaggttgaggagtgaagcaaatgaactcagagctcagttgactgctcaaattcagaaaacagaagaaatacttaaaagggctgaagcggagaagcagaaggtcgccagagaaaagaaacgtgctgattcagagaaatcattatctgaaaagaatagaacacttgttgaagttgagaagaaaaaagtaacagaagaaaagtgccgtgctgacaatttatttgctaagttagaggagcagaagaaactcaatgaacatttgcgaactagcatacaggttgaaacgaagaatgcaatagaagagaaaaaacgaggagaccatttgtttcagaaattagaagagatgagagaacagactgaatgtttacagagaaaggcaaatgaattctctgcaggtagagatgtaatttcttctggcaagtgtggccggcgacacattgatagaatttctgagaatgcaaacgttaagcttctcaaagagaaacttaagctgaaaaaagaacaactaaagcatgtcaagaatgtgtccaagctagataaagcaaaaactgctttaataagaagagagcttcaaagtttaaagcaagactggacacagctactgggtcggtttaacatgctggatgaccaccttgcacgtggtgttgaagatattcatgtcttaacacaggctgggacagttccatttggctcttctatcccaagtgaatacacttcatatcagttgcccagagaaagctgctcacgatcaatctcagggcaaggataacctatttgtctcatcgacagatatcaggaaaaaacaggattcagttgttcccgagctggctcctaaaattagaaatgatagagcattgccttgtggtacgcttacagatagaagagaaacacttggtggtgataggaagagaaaacacaccaaaatgtctcaagacccctctgcttttcttccctcaaaaaatgatttgctacatttgaaatcaaaggtgcctgctaccacttcaaatgttgcattatcctttgatgatgatcctttgtgtctgcagcaaggaaataacaccatatgtgttactgaaggtgacatggataaagctccttcattcagtttcccttctaaagtgtcttgtggaggaaatggctgtactagtagcaagtttgcttcattgatcccctttgaggaaatggtcagggaaaactgcttaaagttgctcaatttggatgatgatgcagatgaggaaaagtttagaaaggcaaaggagagaccccattcaccaaacctgagcatcatccgaccccgtagaactaaactgccaacgtatgcagaacctcacagcttgggtagatctctcaacggttgtcctgccttaggatctgatgccattgattccaagacaaggtccaaagcatcggaagttaaagagcctgtaattcagaaatcgactcaaaattatatccagcttgatccgtcgtcaaatacaatcgagtgtagtggcattgctaaacctctttttgtgaatgataaatccaatgcagctgtcaatgtttcttgtagcaccagtttggttgtagtgccagcgagcacttcttttgacagccttttgcatgagcatgtggcccagaattctgtagcatcttctgctgaggcattagacagtataagcagaccaatgttatcgggaggtggtcattcagattccattttacatttgtccaaggaagtgtctaacaaaaacaactcacatctgatttgtgacaaatcaagtcctgggctgcaagctaatgttcggacaagtgaaacaacagtgaccaagccaaacaattcggtctcgaatagtttgcttcggcaccatcatggatccgaaaaccctccattgcacttagttggatttacaagaatgaaaagaagcaaaatgattaacatatttcggtattgggagatactgagttctcaatctcaaaagcattctgacgaagcttcagttgatggtccactgcttgataaagtgtcaactgacacaatgctacctatagacgagaaggtttccctcatattttcccttttgttgtgggatactagattcactgaagaaacttttgtggatggaaattttgcctcatcagctttttcgtcgagtggta

SEQ ID NO: 36408 - DNA, 3082 bp, Zea Mays
gctctgggctcagacctctcacctcgggcctcagagagtcagagcgagagtcggtccaacggctactggttccactgtctccgcttccagactctacgttcctgtctcgttcaaaaccctaaacctttcctctccatcggactctcgccgccgccccatggcggcggaaccaagagagcccacatcctcgctggatgcccagctcgcggcctcttcctcctccgcagccggcgtaggcggccccaacccgtgctgcgcgacgcagtggaagaattgccagaaattggtgaggagccggacggcgctgcgggaggcggtgaagctcctgcaggctgagaacgagaagctgcggaaggagaactcggagctcagcaaagcatgctagtagcgtgctagcaggaattttaacagaaggtgcctatcacagagaagatgtctttcaaatgtgcaaggaggaacacctccgaggtgattcagcagaagcagctagggcaactgagtctgatgccagagatctattggaaaaggagataattgaattaaagacacagaacatgagtttgaagcaaacacaaaatacctgcaaaaataatgatgaacttttacgtatctctgaattagaggaagaaaatagaaagctcatacagattttaggagaagaaaggaagaagatcacttctgagaagaaaaaaattgaagaagaaaagtgcaaaactctagaaatgcaaaggatatggaagtcagaagcacagaagtctgaagagtatagaagagttgctgatactgaaagaaaagttgccaatgattggagagcatcatgtgaaaggttgaggagtgaagcaaatgaactcagagctcagttgactgctcaaattcagaaaacagaagaaatacttaaaagggctgaagcggagaagcagaaggtcgccagagaaaagaaacgtgctgattcagagaaatcattatctgaaaagaatagaacacttgttgaagttgagaagaaaaaagtaacagaagaaaagtgccgtgctgacaatttatttgctaagttagaggagcagaagaaactcaatgaacatttgcgaactagcatacaggttgaaacgaagaatgcaatagaagagaaaaaacgaggagaccatttgtttcagaaattagaagagatgagagaacagactgaatgtttacagagaaaggcaaatgaattctctgcaggtagagatgtaatttcttctggcaagtgtggccggcgacacattgatagaatttctgagaatgcaaacgttaagcttctcaaagagaaacttaagctgaaaaaagaacaactaaagcatgtcaagaatgtgtccaagctagataaagcaaaaactgctttaataagaagagagcttcaaagtttaaagcaagactggacacagctactgggtcggtttaacatgctggatgaccaccttgcacgtggtgttgaagatattcatgtcttaacacaggctgggacagttccatttggctcttctatcccaagtgaatacacttcatatcagttgcccagagaaagctgctcacgatcaatctcaggtactagttctgaattatgcccccctcttggtagctctcacagactgctgaagtcaaaatgtcagcacagatcttcatgtccaacatccatatctgatgaaaaattcatgggctcacagggcaaggataacctatttgtctcatcgacagatatcaggaaaaaacaggattcagttgttcccgagctggctcctaaaattagaaatgatagagcattgccttgtggtacgcttacagatagaagagaaacacttggtggtgataggaagagaaaacacaccaaaatgtctcaagacccctctgcttttcttccctcaaaaaatgatttgctacatttgaaatcaaaggtgcctgctaccacttcaaatgttgcattatcctttgatgatgatcctttgtgtctgcagcaaggaaataacaccatatgtgttactgaaggtgacatggataaagctccttcattcagtttcccttctaaagtgtcttgtggaggaaatggctgtactagtagcaagtttgcttcattgatcccctttgaggaaatggtcagggaaaactgcttaaagttgctcaatttggatgatgatgcagatgaggaaaagtttagaaaggcaaaggagagaccccattcaccaaacctgagcatcatccgaccccgtagaactaaactgccaacgtatgcagaacctcacagcttgggtagatctctcaacggttgtcctgccttaggatctgatgccattgattccaagacaaggtccaaagcatcggaagttaaagagcctgtaattcagaaatcgactcaaaattatatccagcttgatccgtcgtcaaatacaatcgagtgtagtggcattgctaaacctctttttgtgaatgataaatccaatgcagctgtcaatgtttcttgtagcaccagtttggttgtagtgccagcgagcacttcttttgacagccttttgcatgagcatgtggcccagaattctgtagcatcttctgctgaggcattagacagtataagcagaccaatgttatcgggaggtggtcattcagattccattttacatttgtccaaggaagtgtctaacaaaaacaactcacatctgatttgtgacaaatcaagtcctgggctgcaagctaatgttcggacaagtgaaacaacagtgaccaagccaaacaattcggtctcgaatagtttgcttcggcaccatcatggatccgaaaaccctccattgcacttagttggatttacaagaatgaaaagaagcaaaatgattaacatatttcggtattgggagatactgagttctcaatctcaaaagcattctgacgaagcttcagttgatggtccactgcttgataaagtgtcaactgacacaatgctacctatagagtagcgagaaggtttccctcatattttcccttttgttgtgggatactagattcactgaagaaacttttgtggatggaaattttgcctcatcagctttttcgtcgagtggta

SEQ ID NO: 36409 - DNA, 3081 bp, Zea Mays
ctcgcccgcaggaggggccggctgttgcgggctctgggctcagacctctcacctcgggcctcagagagtcagagcgagagtcggtccaacggctactggttccactgtctccgcttccagactctacgttcctgtctcgttcaaaaccctaaacctttcctctccatcggactctcgccgccgccccatggcggcggaaccaagagagcccacatcctcgctggatgcccagctcgcggcctcttcctcctccgcagccggcgtaggcggccccaacccgtgctgcgcgacgcagtggaagaattgccagaaattggtgaggagccggacggcgctgcgggaggcggtgaagctcctgcaggctgagaacgagaagctgcggaaggagaactcggagctcagcaaagtgtgcaaggaggaacacctccgaggtgattcagcagaagcagctagggcaactgagtctgatgccagagatctattggaaaaggagataattgaattaaagacacagaacatgagtttgaagcaaacacaaaatacctgcaaaaataatgatgaacttttacgtatctctgaattagaggaagaaaatagaaagctcatacagattttaggagaagaaaggaagaagatcacttctgagaagaaaaaaattgaagaagaaaagtgcaaaactctagaaatgcaaaggatatggaagtcagaagcacagaagtctgaagagtatagaagagttgctgatactgaaagaaaagttgccaatgattggagagcatcatgtgaaaggttgaggagtgaagcaaatgaactcagagctcagttgactgctcaaattcagaaaacagaagaaatacttaaaagggctgaagcggagaagcagaaggtcgccagagaaaagaaacgtgctgattcagagaaatcattatctgaaaagaatagaacacttgttgaagttgagaagaaaaaagtaacagaagaaaagtgccgtgctgacaatttatttgctaagttagaggagcagaagaaactcaatgaacatttgcgaactagcatacaggttgaaacgaagaatgcaatagaagagaaaaaacgaggagaccatttgtttcagaaattagaagagatgagagaacagactgaatgtttacagagaaaggcaaatgaattctctgcaggtagagatgtaatttcttctggcaagtgtggccggcgacacattgatagaatttctgagaatgcaaacgttaagcttctcaaagagaaacttaagctgaaaaaagaacaactaaagcatgtcaagaatgtgtccaagctagataaagcaaaaactgctttaataagaagagagcttcaaagtttaaagcaagactggacacagctactgggtcggtttaacatgctggatgaccaccttgcacgtggtgttgaagatattcatgtcttaacacagccctcccaggctcccagcccctacacgcctccctacaggccagtccatctcgtgtgcacacaaccaagggaaccgttgaatcagcatccagagatacatggctttgaacagaagctgcttcctaatgattcagttcctgccccatattttcggttgcaggctgggacagttccatttggctcttctatcccaagtgaatacacttcatatcagttgcccagagaaagctgctcacgatcaatctcagggcaaggataacctatttgtctcatcgacagatatcaggaaaaaacaggattcagttgttcccgagctggctcctaaaattagaaatgatagagcattgccttgtggtacgcttacagatagaagagaaacacttggtggtgataggaagagaaaacacaccaaaatgtctcaagacccctctgcttttcttccctcaaaaaatgatttgctacatttgaaatcaaaggtgcctgctaccacttcaaatgttgcattatcctttgatgatgatcctttgtgtctgcagcaaggaaataacaccatatgtgttactgaaggtgacatggataaagctccttcattcagtttcccttctaaagtgtcttgtggaggaaatggctgtactagtagcaagtttgcttcattgatcccctttgaggaaatggtcagggaaaactgcttaaagttgctcaatttggatgatgatgcagatgaggaaaagtttagaaaggcaaaggagagaccccattcaccaaacctgagcatcatccgaccccgtagaactaaactgccaacgtatgcagaacctcacagcttgggtagatctctcaacggttgtcctgccttaggatctgatgccattgattccaagacaaggtccaaagcatcggaagttaaagagcctgtaattcagaaatcgactcaaaattatatccagcttgatccgtcgtcaaatacaatcgagtgtagtggcattgctaaacctctttttgtgaatgataaatccaatgcagctgtcaatgtttcttgtagcaccagtttggttgtagtgccagcgagcacttcttttgacagccttttgcatgagcatgtggcccagaattctgtagcatcttctgctgaggcattagacagtataagcagaccaatgttatcgggaggtggtcattcagattccattttacatttgtccaaggaagtgtctaacaaaaacaactcacatctgatttgtgacaaatcaagtcctgggctgcaagctaatgttcggacaagtgaaacaacagtgaccaagccaaacaattcggtctcgaatagtttgcttcggcaccatcatggatccgaaaaccctccattgcacttagttggatttacaagaatgaaaagaagcaaaatgattaacatatttcggtattgggagatactgagttctcaatctcaaaagcattctgacgaagcttcagttgatggtccactgcttgataaagtgtcaactgacacaatgctacctatagacgagaaggtttccctcatattttcccttttgttgtgggatactagattcactgaagaaacttttgtggatggaaattttgcctcatcagctttttcgtcgagtggta

SEQ ID NO: 36410 - DNA, 3222 bp, Zea Mays
ccaccctatgctctgtcctcgcccgcagggtaagaggggccggctgttgcgggctctgggctcagacctctcacctcgggcctcagagagtcagagcgagagtcggtccaacggctactggttccactgtctccgcttccagactctacgttcctgtctcgttcaaaaccctaaacctttcctctccatcggactctcgccgccgccccatggcggcggaaccaagagagcccacatcctcgctggatgcccagctcgcggcctcttcctcctccgcagccggcgtaggcggccccaacccgtgctgcgcgacgcagtggaagaattgccagaaattggtgaggagccggacggcgctgcgggaggcggtgaagctcctgcaggctgagaacgagaagctgcggaaggagaactcggagctcagcaaagtgtgcaaggaggaacacctccgaggtgattcagcagaagcagctagggcaactgagtctgatgccagagatctattggaaaaggagataattgaattaaagacacagaacatgagtttgaagcaaacacaaaatacctgcaaaaataatgatgaacttttacgtatctctgaattagaggaagaaaatagaaagctcatacagattttaggagaagaaaggaagaagatcacttctgagaagaaaaaaattgaagaagaaaagtgcaaaactctagaaatgcaaaggatatggaagtcagaagcacagaagtctgaagagtatagaagagttgctgatactgaaagaaaagttgccaatgattggagagcatcatgtgaaaggttgaggagtgaagcaaatgaactcagagctcagttgactgctcaaattcagaaaacagaagaaatacttaaaagggctgaagcggagaagcagaaggtcgccagagaaaagaaacgtgctgattcagagaaatcattatctgaaaagaatagaacacttgttgaagttgagaagaaaaaagtaacagaagaaaagtgccgtgctgacaatttatttgctaagttagaggagcagaagaaactcaatgaacatttgcgaactagcatacaggttgaaacgaagaatgcaatagaagagaaaaaacgaggagaccatttgtttcagaaattagaagagatgagagaacagactgaatgtttacagagaaaggcaaatgaattctctgcaggtagagatgtaatttcttctggcaagtgtggccggcgacacattgatagaatttctgagaatgcaaacgttaagcttctcaaagagaaacttaagctgaaaaaagaacaactaaagcatgtcaagaatgtgtccaagctagataaagcaaaaactgctttaataagaagagagcttcaaagtttaaagcaagactggacacagctactgggtcggtttaacatgctggatgaccaccttgcacgtggtgttgaagatattcatgtcttaacacagccctcccaggctcccagcccctacacgcctccctacaggccagtccatctcgtgtgcacacaaccaagggaaccgttgaatcagcatccagagatacatggctttgaacagaagctgcttcctaatgattcagttcctgccccatattttcggttgcaggctgggacagttccatttggctcttctatcccaagtgaatacacttcatatcagttgcccagagaaagctgctcacgatcaatctcaggtactagttctgaattatgcccccctcttggtagctctcacagactgctgaagtcaaaatgtcagcacagatcttcatgtccaacatccatatctgatgaaaaattcatgggctcacagggcaaggataacctatttgtctcatcgacagatatcaggaaaaaacaggattcagttgttcccgagctggctcctaaaattagaaatgatagagcattgccttgtggtacgcttacagatagaagagaaacacttggtggtgataggaagagaaaacacaccaaaatgtctcaagacccctctgcttttcttccctcaaaaaatgatttgctacatttgaaatcaaaggtgcctgctaccacttcaaatgttgcattatcctttgatgatgatcctttgtgtctgcagcaaggaaataacaccatatgtgttactgaaggtgacatggataaagctccttcattcagtttcccttctaaagtgtcttgtggaggaaatggctgtactagtagcaagtttgcttcattgatcccctttgaggaaatggtcagggaaaactgcttaaagttgctcaatttggatgatgatgcagatgaggaaaagtttagaaaggcaaaggagagaccccattcaccaaacctgagcatcatccgaccccgtagaactaaactgccaacgtatgcagaacctcacagcttgggtagatctctcaacggttgtcctgccttaggatctgatgccattgattccaagacaaggtccaaagcatcggaagttaaagagcctgtaattcagaaatcgactcaaaattatatccagcttgatccgtcgtcaaatacaatcgagtgtagtggcattgctaaacctctttttgtgaatgataaatccaatgcagctgtcaatgtttcttgtagcaccagtttggttgtagtgccagcgagcacttcttttgacagccttttgcatgagcatgtggcccagaattctgtagcatcttctgctgaggcattagacagtataagcagaccaatgttatcgggaggtggtcattcagattccattttacatttgtccaaggaagtgtctaacaaaaacaactcacatctgatttgtgacaaatcaagtcctgggctgcaagctaatgttcggacaagtgaaacaacagtgaccaagccaaacaattcggtctcgaatagtttgcttcggcaccatcatggatccgaaaaccctccattgcacttagttggatttacaagaatgaaaagaagcaaaatgattaacatatttcggtattgggagatactgagttctcaatctcaaaagcattctgacgaagcttcagttgatggtccactgcttgataaagtgtcaactgacacaatgctacctatagacgagaaggtttccctcatattttcccttttgttgtgggatactagattcactgaagaaacttttgtggatggaaattttgcctcatcagctttttcgtcgagtggta

SEQ ID NO: 36411 - DNA, 2830 bp, Zea Mays
ccaccctatgctctgtcctcgcccgcagggtaagaggggccggctgttgcgggctctgggctcagacctctcacctcgggcctcagagagtcagagcgagagtcggtccaacggctactggttccactgtctccgcttccagactctacgttcctgtctcgttcaaaaccctaaacctttcctctccatcggactctcgccgccgccccatggcggcggaaccaagagagcccacatcctcgctggatgcccagctcgcggcctcttcctcctccgcagccggcgtaggcggccccaacccgtgctgcgcgacgcagtggaagaattgccagaaattggtgaggagccggacggcgctgcgggaggcggtgaagctcctgcaggctgagaacgagaagctgcggaaggagaactcggagctcagcaaagtgtgcaaggaggaacacctccgaggtgattcagcagaagcagctagggcaactgagtctgatgccagagatctattggaaaaggagataattgaattaaagacacagaacatgagtttgaagcaaacacaaaatacctgcaaaaataatgatgaacttttacgtatctctgaattagaggaagaaaatagaaagctcatacagattttaggagaagaaaggaagaagatcacttctgagaagaaaaaaattgaagaagaaaagtgcaaaactctagaaatgcaaaggatatggaagtcagaagcacagaagtctgaagagtatagaagagttgctgatactgaaagaaaagttgccaatgattggagagcatcatgtgaaaggttgaggagtgaagcaaatgaactcagagctcagttgactgctcaaattcagaaaacagaagaaatacttaaaagggctgaagcggagaagcagaaggtcgccagagaaaagaaacgtgctgattcagagaaatcattatctgaaaagaatagaacacttgttgaagttgagaagaaaaaagtaacagaagaaaagtgccgtgctgacaatttatttgctaagttagaggagcagaagaaactcaatgaacatttgcgaactagcatacaggttgaaacgaagaatgcaatagaagagaaaaaacgaggagaccatttgtttcagaaattagaagagatgagagaacagactgaatgtttacagagaaaggcaaatgaattctctgcaggtagagatgtaatttcttctggcaagtgtggccggcgacacattgatagaatttctgagaatgcaaacgttaagcttctcaaagagaaacttaagctgaaaaaagaacaactaaagcatgtcaagaatgtgtccaagctagataaagcaaaaactgctttaataagaagagagcttcaaagtttaaagcaagactggacacagctactgggtcggtttaacatgctggatgaccaccttgcacgtggtgttgaagatattcatgtcttaacacagttgaatcagcatccagagatacatggctttgaacagaagctgcttcctaatgattcagttcctgccccatattttcggttgcaggctgggacagttccatttggctcttctatcccaagtgaatacacttcatatcagttgcccagagaaagctgctcacgatcaatctcagggcaaggataacctatttgtctcatcgacagatatcaggaaaaaacaggattcagttgttcccgagctggctcctaaaattagaaatgatagagcattgccttgtggtacgcttacagatagaagagaaacacttggtggtgataggaagagaaaacacaccaaaatgtctcaagacccctctgcttttcttccctcaaaaaatgatttgctacatttgaaatcaaaggtgcctgctaccacttcaaatgttgcattatcctttgatgatgatcctttgtgtctgcagcaaggaaataacaccatatgtgttactgaagatgaggaaaagtttagaaaggcaaaggagagaccccattcaccaaacctgagcatcatccgaccccgtagaactaaactgccaacgtatgcagaacctcacagcttgggtagatctctcaacggttgtcctgccttaggatctgatgccattgattccaagacaaggtccaaagcatcggaagttaaagagcctgtaattcagaaatcgactcaaaattatatccagcttgatccgtcgtcaaatacaatcgagtgtagtggcattgctaaacctctttttgtgaatgataaatccaatgcagctgtcaatgtttcttgtagcaccagtttggttgtagtgccagcgagcacttcttttgacagccttttgcatgagcatgtggcccagaattctgtagcatcttctgctgaggcattagacagtataagcagaccaatgttatcgggaggtggtcattcagattccattttacatttgtccaaggaagtgtctaacaaaaacaactcacatctgatttgtgacaaatcaagtcctgggctgcaagctaatgttcggacaagtgaaacaacagtgaccaagccaaacaattcggtctcgaatagtttgcttcggcaccatcatggatccgaaaaccctccattgcacttagttggatttacaagaatgaaaagaagcaaaatgattaacatatttcggtattgggagatactgagttctcaatctcaaaagcattctgacgaagcttcagttgatggtccactgcttgataaagtgtcaactgacacaatgctacctatagaattcactgaagaaacttttgtggatggaaattttgcctcatcagctttttcgtcgagtggta

SEQ ID NO: 36412 - DNA, 3215 bp, Zea Mays
accaccctatgctctgtcctcgcccgcagggtaagaggggccggctgttgcgggctctgggctcagacctctcacctcgggcctcagagagtcagagcgagagtcggtccaacggctactggttccactgtctccgcttccagactctacgttcctgtctcgttcaaaaccctaaacctttcctctccatcggactctcgccgccgccccatggcggcggaaccaagagagcccacatcctcgctggatgcccagctcgcggcctcttcctcctccgcagccggcgtaggcggccccaacccgtgctgcgcgacgcagtggaagaattgccagaaattggtgaggagccggacggcgctgcgggaggcggtgaagctcctgcaggctgagaacgagaagctgcggaaggagaactcggagctcagcaaagcatgctagtagcgtgctagcaggaattttaacagaaggtgcctatcacagagaagatgtctttcaaatgtgcaaggaggaacacctccgaggtgattcagcagaagcagctagggcaactgagtctgatgccagagatctattggaaaaggagataattgaattaaagacacagaacatgagtttgaagcaaacacaaaatacctgcaaaaataatgatgaacttttacgtatctctgaattagaggaagaaaatagaaagctcatacagattttaggagaagaaaggaagaagatcacttctgagaagaaaaaaattgaagaagaaaagtgcaaaactctagaaatgcaaaggatatggaagtcagaagcacagaagtctgaagagtatagaagagttgctgatactgaaagaaaagttgccaatgattggagagcatcatgtgaaaggttgaggagtgaagcaaatgaactcagagctcagttgactgctcaaattcagaaaacagaagaaatacttaaaagggctgaagcggagaagcagaaggtcgccagagaaaagaaacgtgctgattcagagaaatcattatctgaaaagaatagaacacttgttgaagttgagaagaaaaaagtaacagaagaaaagtgccgtgctgacaatttatttgctaagttagaggagcagaagaaactcaatgaacatttgcgaactagcatacaggttgaaacgaagaatgcaatagaagagaaaaaacgaggagaccatttgtttcagaaattagaagagatgagagaacagactgaatgtttacagagaaaggcaaatgaattctctgcaggtagagatgtaatttcttctggcaagtgtggccggcgacacattgatagaatttctgagaatgcaaacgttaagcttctcaaagagaaacttaagctgaaaaaagaacaactaaagcatgtcaagaatgtgtccaagctagataaagcaaaaactgctttaataagaagagagcttcaaagtttaaagcaagactggacacagctactgggtcggtttaacatgctggatgaccaccttgcacgtggtgttgaagatattcatgtcttaacacagttgaatcagcatccagagatacatggctttgaacagaagctgcttcctaatgattcagttcctgccccatattttcggttgcaggctgggacagttccatttggctcttctatcccaagtgaatacacttcatatcagttgcccagagaaagctgctcacgatcaatctcaggtactagttctgaattatgcccccctcttggtagctctcacagactgctgaagtcaaaatgtcagcacagatcttcatgtccaacatccatatctgatgaaaaattcatgggctcacagggcaaggataacctatttgtctcatcgacagatatcaggaaaaaacaggattcagttgttcccgagctggctcctaaaattagaaatgatagagcattgccttgtggtacgcttacagatagaagagaaacacttggtggtgataggaagagaaaacacaccaaaatgtctcaagacccctctgcttttcttccctcaaaaaatgatttgctacatttgaaatcaaaggtgcctgctaccacttcaaatgttgcattatcctttgatgatgatcctttgtgtctgcagcaaggaaataacaccatatgtgttactgaaggtgacatggataaagctccttcattcagtttcccttctaaagtgtcttgtggaggaaatggctgtactagtagcaagtttgcttcattgatcccctttgaggaaatggtcagggaaaactgcttaaagttgctcaatttggatgatgatgcagatgaggaaaagtttagaaaggcaaaggagagaccccattcaccaaacctgagcatcatccgaccccgtagaactaaactgccaacgtatgcagaacctcacagcttgggtagatctctcaacggttgtcctgccttaggatctgatgccattgattccaagacaaggtccaaagcatcggaagttaaagagcctgtaattcagaaatcgactcaaaattatatccagcttgatccgtcgtcaaatacaatcgagtgtagtggcattgctaaacctctttttgtgaatgataaatccaatgcagctgtcaatgtttcttgtagcaccagtttggttgtagtgccagcgagcacttcttttgacagccttttgcatgagcatgtggcccagaattctgtagcatcttctgctgaggcattagacagtataagcagaccaatgttatcgggaggtggtcattcagattccattttacatttgtccaaggaagtgtctaacaaaaacaactcacatctgatttgtgacaaatcaagtcctgggctgcaagctaatgttcggacaagtgaaacaacagtgaccaagccaaacaattcggtctcgaatagtttgcttcggcaccatcatggatccgaaaaccctccattgcacttagttggatttacaagaatgaaaagaagcaaaatgattaacatatttcggtattgggagatactgagttctcaatctcaaaagcattctgacgaagcttcagttgatggtccactgcttgataaagtgtcaactgacacaatgctacctatagagtagaaggtttccctcatattttcccttttgttgtgggatactagattcactgaagaaacttttgtggatggaaattttgcctcatcagctttttcgtcgagtggta

SEQ ID NO: 36413 - DNA, 3139 bp, Zea Mays
accaccctatgctctgtcctcgcccgcagggtaagaggggccggctgttgcgggctctgggctcagacctctcacctcgggcctcagagagtcagagcgagagtcggtccaacggctactggttccactgtctccgcttccagactctacgttcctgtctcgttcaaaaccctaaacctttcctctccatcggactctcgccgccgccccatggcggcggaaccaagagagcccacatcctcgctggatgcccagctcgcggcctcttcctcctccgcagccggcgtaggcggccccaacccgtgctgcgcgacgcagtggaagaattgccagaaattggtgaggagccggacggcgctgcgggaggcggtgaagctcctgcaggctgagaacgagaagctgcggaaggagaactcggagctcagcaaagtgtgcaaggaggaacacctccgaggtgattcagcagaagcagctagggcaactgagtctgatgccagagatctattggaaaaggagataattgaattaaagacacagaacatgagtttgaagcaaacacaaaatacctgcaaaaataatgatgaacttttacgtatctctgaattagaggaagaaaatagaaagctcatacagattttaggagaagaaaggaagaagatcacttctgagaagaaaaaaattgaagaagaaaagtgcaaaactctagaaatgcaaaggatatggaagtcagaagcacagaagtctgaagagtatagaagagttgctgatactgaaagaaaagttgccaatgattggagagcatcatgtgaaaggttgaggagtgaagcaaatgaactcagagctcagttgactgctcaaattcagaaaacagaagaaatacttaaaagggctgaagcggagaagcagaaggtcgccagagaaaagaaacgtgctgattcagagaaatcattatctgaaaagaatagaacacttgttgaagttgagaagaaaaaagtaacagaagaaaagtgccgtgctgacaatttatttgctaagttagaggagcagaagaaactcaatgaacatttgcgaactagcatacaggttgaaacgaagaatgcaatagaagagaaaaaacgaggagaccatttgtttcagaaattagaagagatgagagaacagactgaatgtttacagagaaaggcaaatgaattctctgcaggtagagatgtaatttcttctggcaagtgtggccggcgacacattgatagaatttctgagaatgcaaacgttaagcttctcaaagagaaacttaagctgaaaaaagaacaactaaagcatgtcaagaatgtgtccaagctagataaagcaaaaactgctttaataagaagagagcttcaaagtttaaagcaagactggacacagctactgggtcggtttaacatgctggatgaccaccttgcacgtggtgttgaagatattcatgtcttaacacagcatccagagatacatggctttgaacagaagctgcttcctaatgattcagttcctgccccatattttcggttgcaggctgggacagttccatttggctcttctatcccaagtgaatacacttcatatcagttgcccagagaaagctgctcacgatcaatctcaggtactagttctgaattatgcccccctcttggtagctctcacagactgctgaagtcaaaatgtcagcacagatcttcatgtccaacatccatatctgatgaaaaattcatgggctcacagggcaaggataacctatttgtctcatcgacagatatcaggaaaaaacaggattcagttgttcccgagctggctcctaaaattagaaatgatagagcattgccttgtggtacgcttacagatagaagagaaacacttggtggtgataggaagagaaaacacaccaaaatgtctcaagacccctctgcttttcttccctcaaaaaatgatttgctacatttgaaatcaaaggtgcctgctaccacttcaaatgttgcattatcctttgatgatgatcctttgtgtctgcagcaaggaaataacaccatatgtgttactgaaggtgacatggataaagctccttcattcagtttcccttctaaagtgtcttgtggaggaaatggctgtactagtagcaagtttgcttcattgatcccctttgaggaaatggtcagggaaaactgcttaaagttgctcaatttggatgatgatgcagatgaggaaaagtttagaaaggcaaaggagagaccccattcaccaaacctgagcatcatccgaccccgtagaactaaactgccaacgtatgcagaacctcacagcttgggtagatctctcaacggttgtcctgccttaggatctgatgccattgattccaagacaaggtccaaagcatcggaagttaaagagcctgtaattcagaaatcgactcaaaattatatccagcttgatccgtcgtcaaatacaatcgagtgtagtggcattgctaaacctctttttgtgaatgataaatccaatgcagctgtcaatgtttcttgtagcaccagtttggttgtagtgccagcgagcacttcttttgacagccttttgcatgagcatgtggcccagaattctgtagcatcttctgctgaggcattagacagtataagcagaccaatgttatcgggaggtggtcattcagattccattttacatttgtccaaggaagtgtctaacaaaaacaactcacatctgatttgtgacaaatcaagtcctgggctgcaagctaatgttcggacaagtgaaacaacagtgaccaagccaaacaattcggtctcgaatagtttgcttcggcaccatcatggatccgaaaaccctccattgcacttagttggatttacaagaatgaaaagaagcaaaatgattaacatatttcggtattgggagatactgagttctcaatctcaaaagcattctgacgaagcttcagttgatggtccactgcttgataaagtgtcaactgacacaatgctacctatagacgagaaggtttccctcatattttcccttttgttgtgggatactagattcactgaagaaacttttgtggatggaaattttgcctcatcagctttttcgtcgagtggta

SEQ ID NO: 36414 - DNA, 3102 bp, Zea Mays
gacgacaccaccctatgctctgtcctcgcccgcagggtaagaggggccggctgttgcgggctctgggctcagacctctcacctcgggcctcagagagtcagagcgagagtcggtccaacggctactggttccactgtctccgcttccagactctacgttcctgtctcgttcaaaaccctaaacctttcctctccatcggactctcgccgccgccccatggcggcggaaccaagagagcccacatcctcgctggatgcccagctcgcggcctcttcctcctccgcagccggcgtaggcggccccaacccgtgctgcgcgacgcagtggaagaattgccagaaattggtgaggagccggacggcgctgcgggaggcggtgaagctcctgcaggctgagaacgagaagctgcggaaggagaactcggagctcagcaaagcatgctagtagcgtgctagcaggaattttaacagaaggtgcctatcacagagaagatgtctttcaaatgtgcaaggaggaacacctccgaggtgattcagcagaagcagctagggcaactgagtctgatgccagagatctattggaaaaggagataattgaattaaagacacagaacatgagtttgaagcaaacacaaaatacctgcaaaaataatgatgaacttttacgtatctctgaattagaggaagaaaatagaaagctcatacagattttaggagaagaaaggaagaagatcacttctgagaagaaaaaaattgaagaagaaaagtgcaaaactctagaaatgcaaaggatatggaagtcagaagcacagaagtctgaagagtatagaagagttgctgatactgaaagaaaagttgccaatgattggagagcatcatgtgaaaggttgaggagtgaagcaaatgaactcagagctcagttgactgctcaaattcagaaaacagaagaaatacttaaaagggctgaagcggagaagcagaaggtcgccagagaaaagaaacgtgctgattcagagaaatcattatctgaaaagaatagaacacttgttgaagttgagaagaaaaaagtaacagaagaaaagtgccgtgctgacaatttatttgctaagttagaggagcagaagaaactcaatgaacatttgcgaactagcatacaggttgaaacgaagaatgcaatagaagagaaaaaacgaggagaccatttgtttcagaaattagaagagatgagagaacagactgaatgtttacagagaaaggcaaatgaattctctgcaggtagagatgtaatttcttctggcaagtgtggccggcgacacattgatagaatttctgagaatgcaaacgttaagcttctcaaagagaaacttaagctgaaaaaagaacaactaaagcatgtcaagaatgtgtccaagctagataaagcaaaaactgctttaataagaagagagcttcaaagtttaaagcaagactggacacagctactgggtcggtttaacatgctggatgaccaccttgcacgtggtgttgaagatattcatgtcttaacacagttgaatcagcatccagagatacatggctttgaacagaagctgcttcctaatgattcagttcctgccccatattttcggttgcaggctgggacagttccatttggctcttctatcccaagtgaatacacttcatatcagttgcccagagaaagctgctcacgatcaatctcagggcaaggataacctatttgtctcatcgacagatatcaggaaaaaacaggattcagttgttcccgagctggctcctaaaattagaaatgatagagcattgccttgtggtacgcttacagatagaagagaaacacttggtggtgataggaagagaaaacacaccaaaatgtctcaagacccctctgcttttcttccctcaaaaaatgatttgctacatttgaaatcaaaggtgcctgctaccacttcaaatgttgcattatcctttgatgatgatcctttgtgtctgcagcaaggaaataacaccatatgtgttactgaaggtgacatggataaagctccttcattcagtttcccttctaaagtgtcttgtggaggaaatggctgtactagtagcaagtttgcttcattgatcccctttgaggaaatggtcagggaaaactgcttaaagttgctcaatttggatgatgatgcagatgaggaaaagtttagaaaggcaaaggagagaccccattcaccaaacctgagcatcatccgaccccgtagaactaaactgccaacgtatgcagaacctcacagcttgggtagatctctcaacggttgtcctgccttaggatctgatgccattgattccaagacaaggtccaaagcatcggaagttaaagagcctgtaattcagaaatcgactcaaaattatatccagcttgatccgtcgtcaaatacaatcgagtgtagtggcattgctaaacctctttttgtgaatgataaatccaatgcagctgtcaatgtttcttgtagcaccagtttggttgtagtgccagcgagcacttcttttgacagccttttgcatgagcatgtggcccagaattctgtagcatcttctgctgaggcattagacagtataagcagaccaatgttatcgggaggtggtcattcagattccattttacatttgtccaaggaagtgtctaacaaaaacaactcacatctgatttgtgacaaatcaagtcctgggctgcaagctaatgttcggacaagtgaaacaacagtgaccaagccaaacaattcggtctcgaatagtttgcttcggcaccatcatggatccgaaaaccctccattgcacttagttggatttacaagaatgaaaagaagcaaaatgattaacatatttcggtattgggagatactgagttctcaatctcaaaagcattctgacgaagcttcagttgatggtccactgcttgataaagtgtcaactgacacaatgctacctatagacgagaaggtttccctcatattttcccttttgttgtgggatactagattcactgaagaaacttttgtggatggaaattttgcctcatcagctttttcgtcgagtggta

SEQ ID NO: 36415 - DNA, 3035 bp, Zea Mays
gacgacaccaccctatgctctgtcctcgcccgcagggtaagaggggccggctgttgcgggctctgggctcagacctctcacctcgggcctcagagagtcagagcgagagtcggtccaacggctactggttccactgtctccgcttccagactctacgttcctgtctcgttcaaaaccctaaacctttcctctccatcggactctcgccgccgccccatggcggcggaaccaagagagcccacatcctcgctggatgcccagctcgcggcctcttcctcctccgcagccggcgtaggcggccccaacccgtgctgcgcgacgcagtggaagaattgccagaaattggtgaggagccggacggcgctgcgggaggcggtgaagctcctgcaggctgagaacgagaagctgcggaaggagaactcggagctcagcaaagtgtgcaaggaggaacacctccgaggtgattcagcagaagcagctagggcaactgagtctgatgccagagatctattggaaaaggagataattgaattaaagacacagaacatgagtttgaagcaaacacaaaatacctgcaaaaataatgatgaacttttacgtatctctgaattagaggaagaaaatagaaagctcatacagattttaggagaagaaaggaagaagatcacttctgagaagaaaaaaattgaagaagaaaagtgcaaaactctagaaatgcaaaggatatggaagtcagaagcacagaagtctgaagagtatagaagagttgctgatactgaaagaaaagttgccaatgattggagagcatcatgtgaaaggttgaggagtgaagcaaatgaactcagagctcagttgactgctcaaattcagaaaacagaagaaatacttaaaagggctgaagcggagaagcagaaggtcgccagagaaaagaaacgtgctgattcagagaaatcattatctgaaaagaatagaacacttgttgaagttgagaagaaaaaagtaacagaagaaaagtgccgtgctgacaatttatttgctaagttagaggagcagaagaaactcaatgaacatttgcgaactagcatacaggttgaaacgaagaatgcaatagaagagaaaaaacgaggagaccatttgtttcagaaattagaagagatgagagaacagactgaatgtttacagagaaaggcaaatgaattctctgcaggtagagatgtaatttcttctggcaagtgtggccggcgacacattgatagaatttctgagaatgcaaacgttaagcttctcaaagagaaacttaagctgaaaaaagaacaactaaagcatgtcaagaatgtgtccaagctagataaagcaaaaactgctttaataagaagagagcttcaaagtttaaagcaagactggacacagctactgggtcggtttaacatgctggatgaccaccttgcacgtggtgttgaagatattcatgtcttaacacagttgaatcagcatccagagatacatggctttgaacagaagctgcttcctaatgattcagttcctgccccatattttcggttgcaggctgggacagttccatttggctcttctatcccaagtgaatacacttcatatcagttgcccagagaaagctgctcacgatcaatctcagggcaaggataacctatttgtctcatcgacagatatcaggaaaaaacaggattcagttgttcccgagctggctcctaaaattagaaatgatagagcattgccttgtggtacgcttacagatagaagagaaacacttggtggtgataggaagagaaaacacaccaaaatgtctcaagacccctctgcttttcttccctcaaaaaatgatttgctacatttgaaatcaaaggtgcctgctaccacttcaaatgttgcattatcctttgatgatgatcctttgtgtctgcagcaaggaaataacaccatatgtgttactgaaggtgacatggataaagctccttcattcagtttcccttctaaagtgtcttgtggaggaaatggctgtactagtagcaagtttgcttcattgatcccctttgaggaaatggtcagggaaaactgcttaaagttgctcaatttggatgatgatgcagatgaggaaaagtttagaaaggcaaaggagagaccccattcaccaaacctgagcatcatccgaccccgtagaactaaactgccaacgtatgcagaacctcacagcttgggtagatctctcaacggttgtcctgccttaggatctgatgccattgattccaagacaaggtccaaagcatcggaagttaaagagcctgtaattcagaaatcgactcaaaattatatccagcttgatccgtcgtcaaatacaatcgagtgtagtggcattgctaaacctctttttgtgaatgataaatccaatgcagctgtcaatgtttcttgtagcaccagtttggttgtagtgccagcgagcacttcttttgacagccttttgcatgagcatgtggcccagaattctgtagcatcttctgctgaggcattagacagtataagcagaccaatgttatcgggaggtggtcattcagattccattttacatttgtccaaggaagtgtctaacaaaaacaactcacatctgatttgtgacaaatcaagtcctgggctgcaagctaatgttcggacaagtgaaacaacagtgaccaagccaaacaattcggtctcgaatagtttgcttcggcaccatcatggatccgaaaaccctccattgcacttagttggatttacaagaatgaaaagaagcaaaatgattaacatatttcggtattgggagatactgagttctcaatctcaaaagcattctgacgaagcttcagttgatggtccactgcttgataaagtgtcaactgacacaatgctacctatagacgagaaggtttccctcatattttcccttttgttgtgggatactagattcactgaagaaacttttgtggatggaaattttgcctcatcagctttttcgtcgagtggta

SEQ ID NO: 36416 - DNA, 996 bp, Zea Mays
gtcaaagttaagtgtttttgtgtatattactatattagtgattaaagcttctaaagtttgcgtacatgtatgctaatatgctatattgttatgtcaactttggtttgagaatactgggaaatgttaggctatgagtatacgatgatatctgctcctaataactttgttatttttaaggcatggtgcctattttctgatttaagccaaattacttggtacacactgttcagtcaatgtgctagcataaagaccaaattctgtagttaattatgccactagttcacctttcaaacttacagttttagagttatttatcacctataattaccgggaggatttatctattggttgatttcttggattaagcaagatttgattttctcctgggtttcatcttcaatggagtactgtgttttacattagggataaggagccccgccctactggtggctcattgggtctcagcttaaacatactgtaacttggttcggagtaaaagacatgagagaggtctgccggctcgtgccttgttcaaatggtgatcagagagggttccgggatttcataagctatctggtacagaaagaatgcgctggcgtgattaggattcctgctgtgaaggcgatgtggacgagaatactgttcatccttcctcccacatctgatgcatgtggcatggtaggaatcccccctcttccagctgacaccatgattgttgtaactttgcccaaggaaacaacagtcgaagcatcataacaattttgtgtgctacatgtatgtatgttagctttgtcggtgtaagctttttgtggagctttgtgctccatagcagtcatgtaaaaactgtgcataattgttggctactatgcggtgttagcattattatacagtaggtcagctcagttcttctgtcaaactctctatctgcggtgggaggtcgtgcgccagtgaccatgccctgcagtgcaggcggttttgggcgttactgacttcggg

SEQ ID NO: 36417 - DNA, 577 bp, Zea Mays
gtttgaagcagtctctccatatttgcgaggaaagacttgtctcggtttatgccttcctcagaccacacttatgtgggagcctctgagagaggtctgccggctcgtgccttgttcaaatggtgatcagagagggttccgggatttcataagctatctggtacagaaagaatgcgctggcgtgattaggattcctgctgtgaaggcgatgtggacgagaatactgttcatccttcctcccacatctgatgcatgtggcatggtaggaatcccccctcttccagctgacaccatgattgttgtaactttgcccaaggaaacaacagtcgaagcatcataacaattttgtgtgctacatgtatgtatgttagctttgtcggtgtaagctttttgtggagctttgtgctccatagcagtcatgtaaaaactgtgcataattgttggctactatgcggtgttagcattattatacagtaggtcagctcagttcttctgtcaaactctctatctgcggtgggaggtcgtgcgccagtgaccatgccctgcagtgcaggcggttttgggcgttactgacttcggg

SEQ ID NO: 36418 - DNA, 3431 bp, Zea Mays
gtcatgggttcggagcagcctctctgcatttgtagagagaaggcttgcctctgtttaccccttccctagaccccatttgtgtgggagcctttgacactagggttgtgaaagtgtacagtgttttctatctttgccaatccctcgatttgcctcacgctgtcctactgcactcgaggcggcgactaaagttaccatcaacatgtacaattgcaacatggccactgtaaagagaggggaggatttgaaaagtgtgccatacaagacagctaaagcatgtatcattggcttaacttacatatgctctgcagcatcttctgaagaactcaagtcatctgttatgaaaggaatctgctctgtcgtttatagaactgtcctctccttcttcatttcaaccttggaggggaaggatatctatcgtatggactatacaaaacgtgcaatgcttcaggaccctgtgacgttgttagacactttaaaattggagttggacaatgctaagcaaccaacaattgataatttgtctgagctgggagctatttgcttgctttgcacattccttttgttcccagagaatatactagaagcctgttttaagctgcttgattctgcagaatgtgatgatgtaaaaggagaagggttataccttttaaatcagctgacctgtcatctgacctgtaatgctgcaaatgatgctatgggtgataagatcgatgagcagtgtcctgtgatggaaggaaatttgtccgacaccaataaatttgttgattcaaatcctgttgtttcggaaaatgccatggagccaaatgagtgttacatcacaatggccatctctaggcatccatttctgagacgttggatattatcaaggtacaagaaattatgtgattcctgtaaacctgccgtggtttctgaggtgtcatcttgtttgaaagttttgggctctttgtcagaaccttccgatgataaaagtcacacgggcaatgagtcatcagtgctggagaaacttgataacaatgtcagagaaaatatgcgaccagatgaactaatttcttcatctgagcagggagcacttgcaaaaactgagagtgtcgataattatggaaataagttttcacagaataagaatgtggacatggttcgttctgataatcagaaatctgatgagctcacggacgcaaaattggatgacttcaaaggaggaactgttgtctctgatgcacagcatcaaggttcaagatctgatttgcttatgccaaaatctgtgtatgattctgctggaggatctacatcacttacttctccaggacaacattttggaagggcaaagcatttattttctgaaccatttgatatttatggcacttatgttgcgagggatgtgatttcagtttcaaaggaactttgggttggttcactgggaaatagagcaactgaggcactagtcagatctaagtttgaggagtttggcccattagtaaattttttgttctatccatccagaaaattttctttagttgagtatagaaacatattacatgctgtgcatgcatgtggatatatgcagggttcatctatttggggcggttttcttcaagtaaagtatttagacaggcttataggtagtaagggagttattcgtggtatagctattggtgaaagccgtcatgtttatgttgctaaagtcaagaataaaaaagacaaagatgaggtctttgatgatttaaagatggcagggctgaagtggccatctgggattactgatattcctggagaaaatgctttgcttcttgaattcgagacggcagttgatgcagctactgcaaaattctatattaggcaccaagctcgtccaaatgtttgttccagggatatgaatctacctggtcatcaacttttggtgcaaaatatagaccactcagtccctgacatcgacttaatcaacgccttctctcaattcggtgaggtcatcaggtggcaaatcaatagggctgatagtaactgctttatagtttatagatcacaagatgctgctgcccgtgcgaaatcacacttgcatggagcgcggtttgggttgaagtcaattagtattgaatcaaggacatacagtgcaggatctgttcatgataaaacagtgtcacctgttgctccgttgttaggccagagtgttcctgacaacagcgtgcgccatgagatcaggaatccaatagtcccaggatatcatgcaggatatgcagcaccaggggatcgacctatttatggtccgccacctccaaatacaagcagagctccacaaggaaattttccttgccctcctgtttccacacaccatggttctgtgatgccaccgccacctattcaaacctcttttgttcgtcctatgtatcctggtccagggagtccctgggagaacactactccaaatccaccgcccttcagccacgtttctcctcgcatgatgcctggaagtaacttccgtgttaatccagcttctcttccttttgtaccctcttgtgttacccctgtttcacagcttcctggaggatcagcacagcattctgagaaaatgccaccatcactacctctgccaactgtagctcccccaccatttacacctctagatatgccaccaacacaccctccgccactacctatttcccagccaccttcagtgccgccacccccaaattctcctcctccgcaaccttttgctgattcgtctgactcacaaaagccaagttctcatcctcaatggcagggtcctcttttaaaaagtggcttgcattactgcagaatctatgcaagcagaatagagtttggatgcctgcagatatgaaaatactgtttctgaaccggcagaatggccttcagcgctagatgtgacaaagcgcacagctttccagcatgtgaagacaactttcaacaatacaccgcctaataagagagaggtctgccggctcgtgccttgttcaaatggtgatcagagagggttccgggatttcataagctatctggtacagaaagaatgcgctggcgtgattaggattcctgctgtgaaggcgatgtggacgagaatactgttcatccttcctcccacatctgatgcatgtggcatggtaggaatcccccctcttccagctgacaccatgattgttgtaactttgcccaaggaaacaacagtcgaagcatcataacaattttgtgtgctacatgtatgtatgttagctttgtcggtgtaagctttttgtggagctttgtgctccatagcagtcatgtaaaaactgtgcataattgttggctactatgcggtgttagcattattatacagtaggtcagctcagttcttctgtcaaactctctatctgcggtgggaggtcgtgcgccagtgaccatgccctgcagtgcaggcggttttgggcgttactgacttcggg

SEQ ID NO: 36419 - DNA, 3349 bp, Zea Mays
tgacgtcatacaacaacactggcattacattcgttgttacttgatgttgtgatttgctatagcctgtgttgtgaaagtgtacagtgttttctatctttgccaatccctcgatttgcctcacgctgtcctactgcactcgaggcggcgactaaagttaccatcaacatgtacaattgcaacatggccactgtaaagagaggggaggatttgaaaagtgtgccatacaagacagctaaagcatgtatcattggcttaacttacatatgctctgcagcatcttctgaagaactcaagtcatctgttatgaaaggaatctgctctgtcgtttatagaactgtcctctccttcttcatttcaaccttggaggggaaggatatctatcgtatggactatacaaaacgtgcaatgcttcaggaccctgtgacgttgttagacactttaaaattggagttggacaatgctaagcaaccaacaattgataatttgtctgagctgggagctatttgcttgctttgcacattccttttgttcccagagaatatactagaagcctgttttaagctgcttgattctgcagaatgtgatgatgtaaaaggagaagggttataccttttaaatcagctgacctgtcatctgacctgtaatgctgcaaatgatgctatgggtgataagatcgatgagcagtgtcctgtgatggaaggaaatttgtccgacaccaataaatttgttgattcaaatcctgttgtttcggaaaatgccatggagccaaatgagtgttacatcacaatggccatctctaggcatccatttctgagacgttggatattatcaaggtacaagaaattatgtgattcctgtaaacctgccgtggtttctgaggtgtcatcttgtttgaaagttttgggctctttgtcagaaccttccgatgataaaagtcacacgggcaatgagtcatcagtgctggagaaacttgataacaatgtcagagaaaatatgcgaccagatgaactaatttcttcatctgagcagggagcacttgcaaaaactgagagtgtcgataattatggaaataagttttcacagaataagaatgtggacatggttcgttctgataatcagaaatctgatgagctcacggacgcaaaattggatgacttcaaaggaggaactgttgtctctgatgcacagcatcaaggttcaagatctgatttgcttatgccaaaatctgtgtatgattctgctggaggatctacatcacttacttctccaggacaacattttggaagggcaaagcatttattttctgaaccatttgatatttatggcacttatgttgcgagggatgtgatttcagtttcaaaggaactttgggttggttcactgggaaatagagcaactgaggcactagtcagatctaagtttgaggagtttggcccattagtaaattttttgttctatccatccagaaaattttctttagttgagtatagaaacatattacatgctgtgcatgcatgtggatatatgcagggttcatctatttggggcggttttcttcaagtaaagtatttagacaggcttataggtagtaagggagttattcgtggtatagctattggtgaaagccgtcatgtttatgttgctaaagtcaagaataaaaaagacaaagatgaggtctttgatgatttaaagatggcagggctgaagtggccatctgggattactgatattcctggagaaaatgctttgcttcttgaattcgagacggcagttgatgcagctactgcaaaattctatattaggcaccaagctcgtccaaatgtttgttccagggatatgaatctacctggtcatcaacttttggtgcaaaatatagaccactcagtccctgacatcgacttaatcaacgccttctctcaattcggtgaggtcatcaggtggcaaatcaatagggctgatagtaactgctttatagtttatagatcacaagatgctgctgcccgtgcgaaatcacacttgcatggagcgcggtttgggttgaagtcaattagtattgaatcaaggacatacagtgcaggatctgttcatgataaaacagtgtcacctgttgctccgttgttaggccagagtgttcctgacaacagcgtgcgccatgagatcaggaatccaatagtcccaggatatcatgcaggatatgcagcaccaggggatcgacctatttatggtccgccacctccaaatacaagcagagctccacaaggaaattttccttgccctcctgtttccacacaccatggttctgtgatgccaccgccacctattcaaacctcttttgttcgtcctatgtatcctggtccagggagtccctgggagaacactactccaaatccaccgcccttcagccacgtttctcctcgcatgatgcctggaagtaacttccgtgttaatccagcttctcttccttttgtaccctcttgtgttacccctgtttcacagcttcctggaggatcagcacagcattctgagaaaatgccaccatcactacctctgccaactgtagctcccccaccatttacacctctagatatgccaccaacacaccctccgccactacctatttcccagccaccttcagtgccgccacccccaaattctcctcctccgcaaccttttgctgattcgtctgactcacaaaagccaagttctcatcctcaatggcagggtcctcttttaaaaagtggcttgcattactgcagaatctatgcaagcagaatagagtttggatgcctgcagatatgaaaatactgtttctgaaccggcagaatggccttcagcgctagatgtgacaaagcgcacagctttccagcatgtgaagacaactttcaacaatacaccgcctaataagttccgggatttcataagctatctggtacagaaagaatgcgctggcgtgattaggattcctgctgtgaaggcgatgtggacgagaatactgttcatccttcctcccacatctgatgcatgtggcatggtaggaatcccccctcttccagctgacaccatgattgttgtaactttgcccaaggaaacaacagtcgaagcatcataacaattttgtgtgctacatgtatgtatgttagctttgtcggtgtaagctttttgtggagctttgtgctccatagcagtcatgtaaaaactgtgcataattgttggctactatgcggtgttagcattattatacagtaggtcagctcagttcttctgtcaaactctctatctgcggtgggaggtcgtgcgccagtgaccatgccctgcagtgcaggcggttttgggcgttactgacttcggg

SEQ ID NO: 36420 - DNA, 3577 bp, Zea Mays
gaaccgtcgtcgaattctccccgtggcagcccgatcatggcgtcgccgccggcggatccgcacccgaagaaacgtagggtcgccgacgcccaggacccaagctcctcctccaatcctgcacccacgcggcgtccttcccctgctccgcctcctcccgaaaccctaggtgctgtggcgtcttcaacctcctccccacctccgacagaaaccgcatcgctgccgccggagggggtgaggcttcaaaagcttcgcaaccaagaggagttgagaaatgtcttccagcgctacagccgtatccgcaagtacatacaggagcataaagacggcggcctcacgcccgagctggagcaggactatctctacctcatctccgcctcccgaggttgtgaaagtgtacagtgttttctatctttgccaatccctcgatttgcctcacgctgtcctactgcactcgaggcggcgactaaagttaccatcaacatgtacaattgcaacatggccactgtaaagagaggggaggatttgaaaagtgtgccatacaagacagctaaagcatgtatcattggcttaacttacatatgctctgcagcatcttctgaagaactcaagtcatctgttatgaaaggaatctgctctgtcgtttatagaactgtcctctccttcttcatttcaaccttggaggggaaggatatctatcgtatggactatacaaaacgtgcaatgcttcaggaccctgtgacgttgttagacactttaaaattggagttggacaatgctaagcaaccaacaattgataatttgtctgagctgggagctatttgcttgctttgcacattccttttgttcccagagaatatactagaagcctgttttaagctgcttgattctgcagaatgtgatgatgtaaaaggagaagggttataccttttaaatcagctgacctgtcatctgacctgtaatgctgcaaatgatgctatgggtgataagatcgatgagcagtgtcctgtgatggaaggaaatttgtccgacaccaataaatttgttgattcaaatcctgttgtttcggaaaatgccatggagccaaatgagtgttacatcacaatggccatctctaggcatccatttctgagacgttggatattatcaaggtacaagaaattatgtgattcctgtaaacctgccgtggtttctgaggtgtcatcttgtttgaaagttttgggctctttgtcagaaccttccgatgataaaagtcacacgggcaatgagtcatcagtgctggagaaacttgataacaatgtcagagaaaatatgcgaccagatgaactaatttcttcatctgagcagggagcacttgcaaaaactgagagtgtcgataattatggaaataagttttcacagaataagaatgtggacatggttcgttctgataatcagaaatctgatgagctcacggacgcaaaattggatgacttcaaaggaggaactgttgtctctgatgcacagcatcaaggttcaagatctgatttgcttatgccaaaatctgtgtatgattctgctggaggatctacatcacttacttctccaggacaacattttggaagggcaaagcatttattttctgaaccatttgatatttatggcacttatgttgcgagggatgtgatttcagtttcaaaggaactttgggttggttcactgggaaatagagcaactgaggcactagtcagatctaagtttgaggagtttggcccattagtaaattttttgttctatccatccagaaaattttctttagttgagtatagaaacatattacatgctgtgcatgcatgtggatatatgcagggttcatctatttggggcggttttcttcaagtaaagtatttagacaggcttataggtagtaagggagttattcgtggtatagctattggtgaaagccgtcatgtttatgttgctaaagtcaagaataaaaaagacaaagatgaggtctttgatgatttaaagatggcagggctgaagtggccatctgggattactgatattcctggagaaaatgctttgcttcttgaattcgagacggcagttgatgcagctactgcaaaattctatattaggcaccaagctcgtccaaatgtttgttccagggatatgaatctacctggtcatcaacttttggtgcaaaatatagaccactcagtccctgacatcgacttaatcaacgccttctctcaattcggtgaggtcatcagtgcaggatctgttcatgataaaacagtgtcacctgttgctccgttgttaggccagagtgttcctgacaacagcgtgcgccatgagatcaggaatccaatagtcccaggatatcatgcaggatatgcagcaccaggggatcgacctatttatggtccgccacctccaaatacaagcagagctccacaaggaaattttccttgccctcctgtttccacacaccatggttctgtgatgccaccgccacctattcaaacctcttttgttcgtcctatgtatcctggtccagggagtccctgggagaacactactccaaatccaccgcccttcagccacgtttctcctcgcatgatgcctggaagtaacttccgtgttaatccagcttctcttccttttgtaccctcttgtgttacccctgtttcacagcttcctggaggatcagcacagcattctgagaaaatgccaccatcactacctctgccaactgtagctcccccaccatttacacctctagatatgccaccaacacaccctccgccactacctatttcccagccaccttcagtgccgccacccccaaattctcctcctccgcaaccttttgctgattcgtctgactcacaaaagccaagttctcatcctcaatggcagggtcctcttttaaaaagtggcttgcattactgcagaatctatgcaagcagaatagagtttggatgcctgcagatatgaaaatactgtttctgaaccggcagaatggccttcagcgctagatgtgacaaagcgcacagctttccagcatgtgaagacaactttcaacaatacaccgcctaataagagagaggtctgccggctcgtgccttgttcaaatggtgatcagagagggttccgggatttcataagctatctggtacagaaagaatgcgctggcgtgattaggattcctgctgtgaaggcgatgtggacgagaatactgttcatccttcctcccacatctgatgcatgtggcatggtaggaatcccccctcttccagctgacaccatgattgttgtaactttgcccaaggaaacaacagtcgaagcatcataacaattttgtgtgctacatgtatgtatgttagctttgtcggtgtaagctttttgtggagctttgtgctccatagcagtcatgtaaaaactgtgcataattgttggctactatgcggtgttagcattattatacagtaggtcagctcagttcttctgtcaaactctctatctgcggtgggaggtcgtgcgccagtgaccatgccctgcagtgcaggcggttttgggcgttactgacttcggg

SEQ ID NO: 36421 - DNA, 1056 bp, Zea Mays
gctttctgcagcagcagctggtcaccattatggtagctgttgacaccacattatgaatccaatagtcccaggatatcatgcaggatatgcagcaccaggggatcgacctatttatggtccgccacctccaaatacaagcagagctccacaaggaaattttccttgccctcctgtttccacacaccatggttctgtgatgccaccgccacctattcaaacctcttttgttcgtcctatgtatcctggtccagggagtccctgggagaacactactccaaatccaccgcccttcagccacgtttctcctcgcatgatgcctggaagtaacttccgtgttaatccagcttctcttccttttgtaccctcttgtgttacccctgtttcacagcttcctggaggatcagcacagcattctgagaaaatgccaccatcactacctctgccaactgtagctcccccaccatttacacctctagatatgccaccaacacaccctccgccactacctatttcccagccaccttcagtgccgccacccccaaattctcctcctccgcaaccttttgctgattcgtctgactcacaaaagccaagttctcatcctcaatggcagggtcctcttttaaaaagtggcttgcattactgcagaatctatgcaagcagaatagagtttggatgcctgcagatatgaaaatactgtttctgaaccggcagaatggccttcagcgctagatgtgacaaagcgcacagctttccagcatgtgaagacaactttcaacaatacaccgcctaataagagagaggtctgccggctcgtgccttgttcaaatggtgatcagagaggggagctcggcttttcaattaagaggaaaagatagtttgaatcaacaaaatctggggcaagagaccttttgttgtgatttctttagtagggagaattgaatgaagttggtatttgtggcaaaaaattctttgctgaaattgtcaattgtgaccatgtaatttggagtttgtaggtgttttgtttttgcaagttaatagttcagtaaaccacag

SEQ ID NO: 36422 - DNA, 3746 bp, Zea Mays
attctccccgtggcagcccgatcatggcgtcgccgccggcggatccgcacccgaagaaacgtagggtcgccgacgcccaggacccaagctcctcctccaatcctgcacccacgcggcgtccttcccctgctccgcctcctcccgaaaccctaggtgctgtggcgtcttcaacctcctccccacctccgacagaaaccgcatcgctgccgccggagggggtgaggcttcaaaagcttcgcaaccaagaggagttgagaaatgtcttccagcgctacagccgtatccgcaagtacatacaggagcataaagacggcggcctcacgcccgagctggagcaggactatctctacctcatctccgcctcccgaggttgtgaaagtgtacagtgttttctatctttgccaatccctcgatttgcctcacgctgtcctactgcactcgaggcggcgactaaagttaccatcaacatgtacaattgcaacatggccactgtaaagagaggggaggatttgaaaagtgtgccatacaagacagctaaagcatgtatcattggcttaacttacatatgctctgcagcatcttctgaagaactcaagtcatctgttatgaaaggaatctgctctgtcgtttatagaactgtcctctccttcttcatttcaaccttggaggggaaggatatctatcgtatggactatacaaaacgtgcaatgcttcaggaccctgtgacgttgttagacactttaaaattggagttggacaatgctaagcaaccaacaattgataatttgtctgagctgggagctatttgcttgctttgcacattccttttgttcccagagaatatactagaagcctgttttaagctgcttgattctgcagaatgtgatgatgtaaaaggagaagggttataccttttaaatcagctgacctgtcatctgacctgtaatgctgcaaatgatgctatgggtgataagatcgatgagcagtgtcctgtgatggaaggaaatttgtccgacaccaataaatttgttgattcaaatcctgttgtttcggaaaatgccatggagccaaatgagtgttacatcacaatggccatctctaggcatccatttctgagacgttggatattatcaaggtacaagaaattatgtgattcctgtaaacctgccgtggtttctgaggtgtcatcttgtttgaaagttttgggctctttgtcagaaccttccgatgataaaagtcacacgggcaatgagtcatcagtgctggagaaacttgataacaatgtcagagaaaatatgcgaccagatgaactaatttcttcatctgagcagggagcacttgcaaaaactgagagtgtcgataattatggaaataagttttcacagaataagaatgtggacatggttcgttctgataatcagaaatctgatgagctcacggacgcaaaattggatgacttcaaaggaggaactgttgtctctgatgcacagcatcaaggttcaagatctgatttgcttatgccaaaatctgtgtatgattctgctggaggatctacatcacttacttctccaggacaacattttggaagggcaaagcatttattttctgaaccatttgatatttatggcacttatgttgcgagggatgtgatttcagtttcaaaggaactttgggttggttcactgggaaatagagcaactgaggcactagtcagatctaagtttgaggagtttggcccattagtaaattttttgttctatccatccagaaaattttctttagttgagtatagaaacatattacatgctgtgcatgcatgtggatatatgcagggttcatctatttggggcggttttcttcaagtaaagtatttagacaggcttataggtagtaagggagttattcgtggtatagctattggtgaaagccgtcatgtttatgttgctaaagtcaagaataaaaaagacaaagatgaggtctttgatgatttaaagatggcagggctgaagtggccatctgggattactgatattcctggagaaaatgctttgcttcttgaattcgagacggcagttgatgcagctactgcaaaattctatattaggcaccaagctcgtccaaatgtttgttccagggatatgaatctacctggtcatcaacttttggtgcaaaatatagaccactcagtccctgacatcgacttaatcaacgccttctctcaattcggtgaggtcatcaggtggcaaatcaatagggctgatagtaactgctttatagtttatagatcacaagatgctgctgcccgtgcgaaatcacacttgcatggagcgcggtttgggttgaagtcaattagtattgaatcaaggacatacagtgcaggatctgttcatgataaaacagtgtcacctgttgctccgttgttaggccagagtgttcctgacaacagcgtgcgccatgagatcagttgctttctgcagcagcagctggtcaccattatggtagctgttgacaccacattatgaatccaatagtcccaggatatcatgcaggatatgcagcaccaggggatcgacctatttatggtccgccacctccaaatacaagcagagctccacaaggaaattttccttgccctcctgtttccacacaccatggttctgtgatgccaccgccacctattcaaacctcttttgttcgtcctatgtatcctggtccagggagtccctgggagaacactactccaaatccaccgcccttcagccacgtttctcctcgcatgatgcctggaagtaacttccgtgttaatccagcttctcttccttttgtaccctcttgtgttacccctgtttcacagcttcctggaggatcagcacagcattctgagaaaatgccaccatcactacctctgccaactgtagctcccccaccatttacacctctagatatgccaccaacacaccctccgccactacctatttcccagccaccttcagtgccgccacccccaaattctcctcctccgcaaccttttgctgattcgtctgactcacaaaagccaagttctcatcctcaatggcagggtcctcttttaaaaagtggcttgcattactgcagaatctatgcaagcagaatagagtttggatgcctgcagatatgaaaatactgtttctgaaccggcagaatggccttcagcgctagatgtgacaaagcgcacagctttccagcatgtgaagacaactttcaacaatacaccgcctaataaggtaaggttctataaggccatatcacgtttcagaaatatttgcagccttgtataattttgacatttttgttgtcttgatgaaatgggaaaggactctggtgcagtggtgagagttgtctcactgagtcaccgggtcatgggtttgaagcagtctctccatatttgcgaggaaagacttgtctcggtttatgccttcctcagaccacacttatgtgggagcctctgagagaggtctgccggctcgtgccttgttcaaatggtgatcagagaggggagctcggcttttcaattaagaggaaaagatagtttgaatcaacaaaatctggggcaagagaccttttgttgtgatttctttagtagggagaattgaatgaagttggtatttgtggcaaaaaattctttgctgaaattgtcaattgtgaccatgtaatttggagtttgtaggtgttttgtttttgcaagttaatagttcagtaaaccacag

SEQ ID NO: 36423 - DNA, 3551 bp, Zea Mays
cgggaagttccaccaaccagtcttgaggttgcagcgggaagcactgtcgagagacgccaatcggctgtggccgaaccgtcgtcgaattctccccgtggcagcccgatcatggcgtcgccgccggcggatccgcacccgaagaaacgtagggtcgccgacgcccaggacccaagctcctcctccaatcctgcacccacgcggcgtccttcccctgctccgcctcctcccgaaaccctaggtgctgtggcgtcttcaacctcctccccacctccgacagaaaccgcatcgctgccgccggagggggtgaggcttcaaaagcttcgcaaccaagaggagttgagaaatgtcttccagcgctacagccgtatccgcaagtacatacaggagcataaagacggcggcctcacgcccgagctggagcaggactatctctacctcatctccgcctcccgaggttgtgaaagtgtacagtgttttctatctttgccaatccctcgatttgcctcacgctgtcctactgcactcgaggcggcgactaaagttaccatcaacatgtacaattgcaacatggccactgtaaagagaggggaggatttgaaaagtgtgccatacaagacagctaaagcatgtatcattggcttaacttacatatgctctgcagcatcttctgaagaactcaagtcatctgttatgaaaggaatctgctctgtcgtttatagaactgtcctctccttcttcatttcaaccttggaggggaaggatatctatcgtatggactatacaaaacgtgcaatgcttcaggaccctgtgacgttgttagacactttaaaattggagttggacaatgctaagcaaccaacaattgataatttgtctgagctgggagctatttgcttgctttgcacattccttttgttcccagagaatatactagaagcctgttttaagctgcttgattctgcagaatgtgatgatgtaaaaggagaagggttataccttttaaatcagctgacctgtcatctgacctgtaatgctgcaaatgatgctatgggtgataagatcgatgagcagtgtcctgtgatggaaggaaatttgtccgacaccaataaatttgttgattcaaatcctgttgtttcggaaaatgccatggagccaaatgagtgttacatcacaatggccatctctaggcatccatttctgagacgttggatattatcaaggtacaagaaattatgtgattcctgtaaacctgccgtggtttctgaggtgtcatcttgtttgaaagttttgggctctttgtcagaaccttccgatgataaaagtcacacgggcaatgagtcatcagtgctggagaaacttgataacaatgtcagagaaaatatgcgaccagatgaactaatttcttcatctgagcagggagcacttgcaaaaactgagagtgtcgataattatggaaataagttttcacagaataagaatgtggacatggttcgttctgataatcagaaatctgatgagctcacggacgcaaaattggatgacttcaaaggaggaactgttgtctctgatgcacagcatcaaggttcaagatctgatttgcttatgccaaaatctgtgtatgattctgctggaggatctacatcacttacttctccaggacaacattttggaagggcaaagcatttattttctgaaccatttgatatttatggcacttatgttgcgagggatgtgatttcagtttcaaaggaactttgggttggttcactgggaaatagagcaactgaggcactagtcagatctaagtttgaggagtttggcccattagtaaattttttgttctatccatccagaaaattttctttagttgagtatagaaacatattacatgctgtgcatgcatgtggatatatgcagggttcatctatttggggcggttttcttcaagtaaagtatttagacaggcttataggtagtaagggagttattcgtggtatagctattggtgaaagccgtcatgtttatgttgctaaagtcaagaataaaaaagacaaagatgaggtctttgatgatttaaagatggcagggctgaagtggccatctgggattactgatattcctggagaaaatgctttgcttcttgaattcgagacggcagttgatgcagctactgcaaaattctatattaggcaccaagctcgtccaaatgtttgttccagggatatgaatctacctggtcatcaacttttggtgcaaaatatagaccactcagtccctgacatcgacttaatcaacgccttctctcaattcggtgaggtcatcaggtggcaaatcaatagggctgatagtaactgctttatagtttatagatcacaagatgctgctgcccgtgcgaaatcacacttgcatggagcgcggtttgggttgaagtcaattagtattgaatcaaggacatacagtgcaggatctgttcatgataaaacagtgtcacctgttgctccgttgttaggccagagtgttcctgacaacagcgtgcgccatgagatcaggaatccaatagtcccaggatatcatgcaggatatgcagcaccaggggatcgacctatttatggtccgccacctccaaatacaagcagagctccacaaggaaattttccttgccctcctgtttccacacaccatggttctgtgatgccaccgccacctattcaaacctcttttgttcgtcctatgtatcctggtccagggagtccctgggagaacactactccaaatccaccgcccttcagccacgtttctcctcgcatgatgcctggaagtaacttccgtgttaatccagcttctcttccttttgtaccctcttgtgttacccctgtttcacagcttcctggaggatcagcacagcattctgagaaaatgccaccatcactacctctgccaactgtagctcccccaccatttacacctctagatatgccaccaacacaccctccgccactacctatttcccagccaccttcagtgccgccacccccaaattctcctcctccgcaaccttttgctgattcgtctgactcacaaaagccaagttctcatcctcaatggcagggtcctcttttaaaaagtggcttgcattactgcagaatctatgcaagcagaatagagtttggatgcctgcagatatgaaaatactgtttctgaaccggcagaatggccttcagcgctagatgtgacaaagcgcacagctttccagcatgtgaagacaactttcaacaatacaccgcctaataagagagaggtctgccggctcgtgccttgttcaaatggtgatcagagaggggagctcggcttttcaattaagaggaaaagatagtttgaatcaacaaaatctggggcaagagaccttttgttgtgatttctttagtagggagaattgaatgaagttggtatttgtggcaaaaaattctttgctgaaattgtcaattgtgaccatgtaatttggagtttgtaggtgttttgtttttgcaagttaatagttcagtaaaccacag

SEQ ID NO: 36424 - DNA, 3360 bp, Zea Mays
cgccaatcggctgtggccgaaccgtcgtcgaattctccccgtggcagcccgatcatggcgtcgccgccggcggatccgcacccgaagaaacgtagggtcgccgacgcccaggacccaagctcctcctccaatcctgcacccacgcggcgtccttcccctgctccgcctcctcccgaaaccctaggtgctgtggcgtcttcaacctcctccccacctccgacagaaaccgcatcgctgccgccggagggggtgaggcttcaaaagcttcgcaaccaagaggagttgagaaatgtcttccagcgctacagccgtatccgcaagtacatacaggagcataaagacggcggcctcacgcccgagctggagcaggactatctctacctcatctccgcctcccgaggttgtgaaagtgtacagtgttttctatctttgccaatccctcgatttgcctcacgctgtcctactgcactcgaggcggcgactaaagttaccatcaacatgtacaattgcaacatggccactgtaaagagaggggaggatttgaaaagtgtgccatacaagacagctaaagcatgtatcattggcttaacttacatatgctctgcagcatcttctgaagaactcaagtcatctgttatgaaaggaatctgctctgtcgtttatagaactgtcctctccttcttcatttcaaccttggaggggaaggatatctatcgtatggactatacaaaacgtgcaatgcttcaggaccctgtgacgttgttagacactttaaaattggagttggacaatgctaagcaaccaacaattgataatttgtctgagctgggagctatttgcttgctttgcacattccttttgttcccagagaatatactagaagcctgttttaagctgcttgattctgcagaatgtgatgatgtaaaaggagaagggttataccttttaaatcagctgacctgtcatctgacctgtaatgctgcaaatgatgctatgggtgataagatcgatgagcagtgtcctgtgatggaaggaaatttgtccgacaccaataaatttgttgattcaaatcctgttgtttcggaaaatgccatggagccaaatgagtgttacatcacaatggcatccatttctgagacgttggatattatcaaggtacaagaaattatgtgattcctgtaaacctgccgtggtttctgaggtgtcatcttgtttgaaagttttgggctctttgtcagaaccttccgatgataaaagtcacacgggcaatgagtcatcagtgctggagaaacttgataacaatgtcagagaaaatatgcgaccagatgaactaatttcttcatctgagcagggagcacttgcaaaaactgagagtgtcgataattatggaaataagttttcacagaataagaatgtggacatggttcgttctgataatcagaaatctgatgagctcacggacgcaaaattggatgacttcaaaggaggaactgttgtctctgatgcacagcatcaaggttcaagatctgatttgcttatgccaaaatctgtgtatgattctgctggaggatctacatcacttacttctccaggacaacattttggaagggcaaagcatttattttctgaaccatttgatatttatggcacttatgttgcgagggatgtgatttcagtttcaaaggaactttgggttggttcactgggaaatagagcaactgaggcactagtcagatctaagtttgaggagtttggcccattagtaaattttttgttctatccatccagaaaattttctttagttgagtatagaaacatattacatgctgtgcatgcatgtggatatatgcagggttcatctatttggggcggttttcttcaagtaaagtatttagacaggcttataggtagtaagggagttattcgtggtatagctattggtgaaagccgtcatgtttatgttgctaaagtcaagaataaaaaagacaaagatgaggtctttgatgatttaaagatggcagggctgaagtggccatctgggattactgatattcctggagaaaatgctttgcttcttgaattcgagacggcagttgatgcagctactgcaaaattctatattaggcaccaagctcgtccaaatgtttgttccagggatatgaatctacctggtcatcaacttttggtgcaaaatatagaccactcagtccctgacatcgacttaatcaacgccttctctcaattcggtgaggtcatcaggtggcaaatcaatagggctgatagtaactgctttatagtttatagatcacaagatgctgctgcccgtgcgaaatcacacttgcatggagcgcggtttgggttgaagtcaattagtattgaatcaaggacatacagtgcaggatctgttcatgataaaacagtgtcacctgttgctccgttgttaggccagagtgttcctgacaacagcgtgcgccatgagatcaggaatccaatagtcccaggatatcatgcaggatatgcagcaccaggggatcgacctatttatggtccgccacctccaaatacaagcagagctccacaaggaaattttccttgccctcctgtttccacacaccatggttctgtgatgccaccgccacctattcaaacctcttttgttcgtcctatgtatcctggtccagggagtccctgggagaacactactccaaatccaccgcccttcagccacgtttctcctcgcatgatgcctggaagtaacttccgtgttaatccagcttctcttccttttgtaccctcttgtgttacccctgtttcacagcttcctggaggatcagcacagcattctgagaaaatgccaccatcactacctctgccaactgtagctcccccaccatttacacctctagatatgccaccaacacaccctccgccactacctatttcccagccaccttcagtgccgccacccccaaattctcctcctccgcaaccttttgctgattcgtctgactcacaaaagccaagttctcatcctcaatggcagggtcctcttttaaaaagtggcttgcattactgcagaatctatgcaagcagaatagagtttggatgcctgcagatatgaaaatactgtttctgaaccggcagaatggccttcagcgctagatgtgacaaagcgcacagctttccagcatgtgaagacaactttcaacaatacaccgcctaataagcttttgttggatttcttgatggctgatttggtgaacaaaagctcatcactgaacttgttgtcttataaacttttggcacctaattcagctcacttttatacaaaaaagagagagtagatggagcaacaaatgt

SEQ ID NO: 36425 - DNA, 3847 bp, Zea Mays
cgccaatcggctgtggccgaaccgtcgtcgaattctccccgtggcagcccgatcatggcgtcgccgccggcggatccgcacccgaagaaacgtagggtcgccgacgcccaggacccaagctcctcctccaatcctgcacccacgcggcgtccttcccctgctccgcctcctcccgaaaccctaggtgctgtggcgtcttcaacctcctccccacctccgacagaaaccgcatcgctgccgccggagggggtgaggcttcaaaagcttcgcaaccaagaggagttgagaaatgtcttccagcgctacagccgtatccgcaagtacatacaggagcataaagacggcggcctcacgcccgagctggagcaggactatctctacctcatctccgcctcccgaggttgtgaaagtgtacagtgttttctatctttgccaatccctcgatttgcctcacgctgtcctactgcactcgaggcggcgactaaagttaccatcaacatgtacaattgcaacatggccactgtaaagagaggggaggatttgaaaagtgtgccatacaagacagctaaagcatgtatcattggcttaacttacatatgctctgcagcatcttctgaagaactcaagtcatctgttatgaaaggaatctgctctgtcgtttatagaactgtcctctccttcttcatttcaaccttggaggggaaggatatctatcgtatggactatacaaaacgtgcaatgcttcaggaccctgtgacgttgttagacactttaaaattggagttggacaatgctaagcaaccaacaattgataatttgtctgagctgggagctatttgcttgctttgcacattccttttgttcccagagaatatactagaagcctgttttaagctgcttgattctgcagaatgtgatgatgtaaaaggagaagggttataccttttaaatcagctgacctgtcatctgacctgtaatgctgcaaatgatgctatgggtgataagatcgatgagcagtgtcctgtgatggaaggaaatttgtccgacaccaataaatttgttgattcaaatcctgttgtttcggaaaatgccatggagccaaatgagtgttacatcacaatggccatctctaggcatccatttctgagacgttggatattatcaaggtacaagaaattatgtgattcctgtaaacctgccgtggtttctgaggtgtcatcttgtttgaaagttttgggctctttgtcagaaccttccgatgataaaagtcacacgggcaatgagtcatcagtgctggagaaacttgataacaatgtcagagaaaatatgcgaccagatgaactaatttcttcatctgagcagggagcacttgcaaaaactgagagtgtcgataattatggaaataagttttcacagaataagaatgtggacatggttcgttctgataatcagaaatctgatgagctcacggacgcaaaattggatgacttcaaaggaggaactgttgtctctgatgcacagcatcaaggttcaagatctgatttgcttatgccaaaatctgtgtatgattctgctggaggatctacatcacttacttctccaggacaacattttggaagggcaaagcatttattttctgaaccatttgatatttatggcacttatgttgcgagggatgtgatttcagtttcaaaggaactttgggttggttcactgggaaatagagcaactgaggcactagtcagatctaagtttgaggagtttggcccattagtaaattttttgttctatccatccagaaaattttctttagttgagtatagaaacatattacatgctgtgcatgcatgtggatatatgcagggttcatctatttggggcggttttcttcaagtaaagtatttagacaggcttataggtagtaagggagttattcgtggtatagctattggtgaaagccgtcatgtttatgttgctaaagtcaagaataaaaaagacaaagatgaggtctttgatgatttaaagatggcagggctgaagtggccatctgggattactgatattcctggagaaaatgctttgcttcttgaattcgagacggcagttgatgcagctactgcaaaattctatattaggcaccaagctcgtccaaatgtttgttccagggatatgaatctacctggtcatcaacttttggtgcaaaatatagaccactcagtccctgacatcgacttaatcaacgccttctctcaattcggtgaggtcatcaggtggcaaatcaatagggctgatagtaactgctttatagtttatagatcacaagatgctgctgcccgtgcgaaatcacacttgcatggagcgcggtttgggttgaagtcaattagtattgaatcaaggacatacagtgcaggatctgttcatgataaaacagtgtcacctgttgctccgttgttaggccagagtgttcctgacaacagcgtgcgccatgagatcaggaatccaatagtcccaggatatcatgcaggatatgcagcaccaggggatcgacctatttatggtccgccacctccaaatacaagcagagctccacaaggaaattttccttgccctcctgtttccacacaccatggttctgtgatgccaccgccacctattcaaacctcttttgttcgtcctatgtatcctggtccagggagtccctgggagaacactactccaaatccaccgcccttcagccacgtttctcctcgcatgatgcctggaagtaacttccgtgttaatccagcttctcttccttttgtaccctcttgtgttacccctgtttcacagcttcctggaggatcagcacagcattctgagaaaatgccaccatcactacctctgccaactgtagctcccccaccatttacacctctagatatgccaccaacacaccctccgccactacctatttcccagccaccttcagtgccgccacccccaaattctcctcctccgcaaccttttgctgattcgtctgactcacaaaagccaagttctcatcctcaatggcagggtcctcttttaaaaagtggcttgcattactgcagaatctatgcaagcagaatagagtttggatgcctgcagatatgaaaatactgtttctgaaccggcagaatggccttcagcgctagatgtgacaaagcgcacagctttccagcatgtgaagacaactttcaacaatacaccgcctaataaggactctggtgcagtggtgagagttgtctcactgagtcaccgggtcatgggtttgaagcagtctctccatatttgcgaggaaagacttgtctcggtttatgccttcctcagaccacacttatgtgggagcctctggtattgggtttgcccttttttatgaaataggaaagagtgttttattcatgagtacttagagcatctccaagagctccccagaagtctcacctaaatcaagttttttttgggaaaaacacaaaaacgtgtctccaacagttcccccaaaagttctcacaactttttcatagcctttaaaactccctcatttgtaggtacaaatgtgttttttttgggctcctcagaaacaatctgctgctttaagggatctgttggagaaaggattaaaatctacccccactcattttttagatgccccttaaaactgattttcagtagtcattttctggggagctcttggagatgctcttacaacaacaaagcctttaatcccttaatgcacaaatttcacattccatgtaaagtatacatgaagaatcagacccatgttgcttgaacgatatgattttggtgctcagatactcctacttaatac

SEQ ID NO: 36426 - DNA, 2161 bp, Zea Mays
atcctgagtatggatgagaagcaaacaccatagggatagcgtcggtcagtcaattgccattcccctcgtggacgctggccagccggtgtcaatgccaccgctggatctcgtgtagccgaatctcctagatgatgtacacgacgaattgtcggatgatgtacgcgacgaatcgttggcgccacaacaacgccacagtgcctccatgccgtcaccgccgccgcctcgcgcgccgcgagcgctcttctcacaggtcgcgtggtttctttccacgccggagggaggaggattgtatcccggctaggctgaggtgggaacggccggggtgggccggggtcgaggcccgagcgggattaaacgaacgctgctatcgtgtgggccgggatttcatccaagcggatttggtccacggggtttttaccccaatccagactgttcctgaaccaaacgaacaaggcctcagcatgcatgatatacttgaagataatagtcggttaccctgctttctacctgctccttagagtacccgaacttggaaaggtactcaatggcgttcagaactgcacgcttgtaggccacagatgcgtcaagaaaatgttgcttcccagactcatctacgctgatgccctcaaacactaaccactccgagaaacgtggctccacaggacctatctcaaagatggggctcacatggagtggtgttggaccaactggagtcaagtattccttcatcccacctcttatgatctcacacctgtacagggtgcaagggatttttagaagcaggcaacgaaagttgtgttttacataggcagattttatttttccaattacacttttttttaggaaatatctaattacacattcataactcataagaaccagcatagtgatacgtgttgggtgtgtggttcagaaataattgattccaactacacacaaatggagtgagtctttaagagctagtttggtgacaagggggttttcttcccatggattctctccaatttccttgtcaccaaaacaaccttaagatacaaggaaccaacccctgcaagaagcactgaagatggctagtgccagtattactgaactagtatctttataaaatataacggaatcttaatattaggttttctaaccctggtgaatccaatttttcgatgcaattggttgttaaaggtctgctcgacgaatgcgagatgtcagacacatccataaaacattgtatatcatgtagtgctgaagtgtatataagaacagaattcattacttgagctcaaggaacccgctcatttcaattgctccacacagcgaaatctcgccgtccccctgggagaagtgcatgtcaccagtgctgaggtttgctccttcgacaaacactggtagataaattctggagcctctgcttaggttctttatgtcgcaattcccgccattttcccttccagcaatagttctggccgcttcgtttgcaattatgtgccattcagcagtcccttcttggacctgcaacgcattgtattcgttacaaacatggcacttcagcggaacactttagatctgctagcttagtatctgcacacaaaacctttttacttgtgctctaggaaatgtaaagagattaattgtatagatgtgcttctatgtccttccctaagcgaaggggcatgttaggttattggctaactgccataacttgcataaggttagtcgaccaaattgaaaaataaccttatgcagaaaaagttagacaaactatgacaatctaggcagcaaaccaaacaaacccgcaatgcttaatttgtaggtgacacagacaatctcccatataaccctggcgttatagtgaaaaacaaatgatcatgccttcccaagtaagcaattttcaggggtcggtaaatgagcaaggggcctctggtgtagaacttcacacagtttaatagtctctaggcttgtctcagacaaacttttctctctttcattccatatatttaggagctcaagtgacggtgcagttcccacaacaccaggatgagtcaatcctggaaaacgaacacctggcacatgccaaaatcgaattactgaaggatccaaatcaaatctggaaagcttcattcacggcaaaaatgagaaataagaaaccatacctggtatctgcggg

SEQ ID NO: 36427 - DNA, 5913 bp, Zea Mays
aaggcgtccatgatttgagcagcttagaagatctggaagtcttctcaactgtggtcctccaagtggtctccccttcacgcgttttggctttatatcctacgttggaaatcgaaatgttatgcattttagttttaaaagggaacgacgatcaaaatgcccaaaggcccaaaaacaaactggtacagatcaatatattttttttagtatcgaagtaagcaatttcaatctgcctatagccttgtgctgaaaataataacatgtttcttctccgctgaccgctggtcattgtcacttcttcatacaagttgttcttacactttgcctaatagtaactgtcagcggaaaagtatattctataatatttgggtcgcttttatattgaccggatcacattatcacaagaaacagttaggtgatgcatgccgctgatcaaatgaaccaggcttactcacataagatactttcaataaaatggagagggtgatataaatctagtcttggtgaaccctgaaccttgcccagctcacgttaatcagcatcaaaattgtgtggtttgtttgtacggcctgctcatgagttcacgatatgcaggcagtaacttttgtttcttcagacataacacatgaagtaccagcagcatatatcagacacttggatcaaacatcagagtatcagactaaaggaaaactgtttaactaatctgttgatgaacactttacacttaaaaggagcagcaacgatacagtgcatatgacagtaaaaaagaccaaagaaaattgcgatgggctggactcttggcagcatacctgatcaaatatcgctgtagggatggcaagagttgttacagcattaggagagtccactattccagatatcctaccctcgcatgggcagcatgatagtaaaagatacacctgtataaaatccccaacccccgaggttaagataccactcagggcttgttcggttcacagggattcattccagagagggatacgttccagggagggattaagttaatcccctcctatcacttgaaccccttgggggtataatccccttcaaggctgtaatccctaactccaaaatattgttcggttaatccagggagacatgcactttgtgttctgaatggccacgtaaccaaaaggcgtccagaactgataacggctgcgctgtgggataatctaaaagctcaacccagtctaaatttttgttacggcgaaggcaaccttattacaacgtcttttcaaacaacaaacacaacaatctcatggtttgttaaaactgataagttgctaaacactacatctcctgtaaactaaacatgacgagatcatggatccagataatgatgcatctatctttttgatagaacaagcacgtaacaaccagtgagaaaaggtcttcaatacactaattagaatgacacttagacaatataaatagagaagacattcctcctctgaagactacaactacttcatgcatgcacttgacccctttacttcaaagatataaagctatttaagcgaggtgaatattcagtgttttgctttaaaaataatcaacatactgactaaaacaagtatctcatggtagaaccaaatctacaatttagtatatgccacctgactgaatcaagagtaaaaaaacaaactaagcttcctcttttctggggtttagagctactggtctctgttagggaaaccaatgataccttgatcctaaattaccgtgtgcctttacatatgagtaattgagaatattaaatcatgtctcgtttctatatatccacatattctgattctatttcaagtctaggctcttttaaatttgatcccaattataaaaacatttttagttctgacttttttcaaatccaatcacatttctaaaaaaaaatatagaaacaagaacgaaagactgattttccctgaagatgggatgggttacagacttacagctaaatctgccgcaaatacaaatgtccctttctcttagttatatataaattgtttgttaaaacactaaacaattttattgttgtcgatatcacagctccagttttagtttattccttattctcatagcagatctgcgtttgctgtcatttgattcagaatagcttaaatttgtaatcagaaggattctaaatatgcttgttgccttaacattttgcagaatagcttaaatttgaaatcagaaggattctaaatatgcttgttgctttaacattttgcaaaatagcttaaatttgtaatcagaaggattcttaacatgcttgtttccttaacattttgcagacaaagtaaagggtttgcaaacctcacgtcaaagctcagacagccgacaaaaatccaaagaacaaaactactaccgaagaacaagaaaacaaatgaaggtgtctgcttttggcaccgagcttctgaacttaaaaaatcagatgtccctccattatcacatagtgcattagaacaacattgacaaaagtgccagaactaaaagacatgtagataaactgtgacaatttcaactatagttggaactaaataaaaaaatttgatcggttctttaccggtgctaattcaggtccatcggattgtgtcctcctacaagtacaacctctatgtattaattcactacacatactaaattacgatatgagctaaatttgagtgacaagccatatcagcatgctggtatatacacactcgacttcaagtcaaggacttgaacctcagtggttgggtgcatattttcaaaaggcttggaaatcccagccatctttgaaaacatattttcagaggcaattatgttagtgggtcccgatagagaacatgatagagatggttgtgaattatgtcacttttgtaaaaaaagaggcatctctattatcgtttcttgaatgatatatgttggatattttgccacactaattttgtaagggcatgtggttcttaaacaattgatttttgtgagctaccttacaataacatgggagtagattccaaatatgcctaagaaacaagtttacgtggaccgatgaggcaattgcctaaggctagtcaaaagcttgatatataaactgaaaaaaaaatcagacactttaatttgtcagctttgttcaaaacaaggtacctaatgatccaatttctctttaatcatgcaaggcgatggccaccaatgagtacaagaagaggtgagaccaattagtatactagtatattcgcggtcaggctgactcgatcacaacaaattgcacattgggttcttgttcttgaagctagaaacctagaactagccagtggtatgcttaaacctggacgggtatggtgaattaagcgttctctgatagttgtttcatactataaataacaatgcttatttgttaattgagtttggggtctctgctatcctatgacatctatgcaacaatgaaactatcagattactcttagcaaacctatgcgatatccagaaaatcactttttgcaccaagcaacttcacatattgggtctatgcacgaacatccaagctgcttgctattccaaagactgcaactctatgtctcaagaaaactacagacaaaggaactttctcattgtctagccagtatggtacacaccaatataactcaacttaggccacaacatatgaactcatgagcaatccacatggacccaagaaccctagcaccaagatctctagttcacggtcagtagatggaaaggagttagaggaggaggagaacctgagtatggatgagaagcaaacaccatagggatagcgtcggtcagtcaattgccattcccctcgtggacgctggccagccggtgtcaatgccaccgctggatctcgtgtagccgaatctcctagatgatgtacacgacgaattgtcggatgatgtacgcgacgaatcgttggcgccacaacaacgccacagtgcctccatgccgtcaccgccgccgcctcgcgcgccgcgagcgctcttctcacaggtcgcgtggtttctttccacgccggagggaggaggattgtatcccggctaggctgaggtgggaacggccggggtgggccggggtcgaggcccgagcgggattaaacgaacgctgctatcgtgtgggccgggatttcatccaagcggatttggtccacggggtttttaccccaatccagactgttcctgaaccaaacgaacaaggcctcagcatgcatgatatacttgaagataatagtcggttaccctgctttctacctgctccttagagtacccgaacttggaaaggtactcaatggcgttcagaactgcacgcttgtaggccacagatgcgtcaagaaaatgttgcttcccagactcatctacgctgatgccctcaaacactaaccactccgagaaacgtggctccacaggacctatctcaaagatggggctcacatggagtggtgttggaccaactggagtcaagtattccttcatcccacctcttatgatctcacacctgtacagggtgcaagggatttttagaagcaggcaacgaaagttgtgttttacataggcagattttatttttccaattacacttttttttaggaaatatctaattacacattcataactcataagaaccagcatagtgatacgtgttgggtgtgtggttcagaaataattgattccaactacacacaaatggagtgagtctttaagagctagtttggtgacaagggggttttcttcccatggattctctccaatttccttgtcaccaaaacaaccttaagatacaaggaaccaacccctgcaagaagcactgaagatggctagtgccagtattactgaactagtatctttataaaatataacggaatcttaatattaggttttctaaccctggtgaatccaatttttcgatgcaattggttgttaaaggtctgctcgacgaatgcgagatgtcagacacatccataaaacattgtatatcatgtagtgctgaagtgtatataagaacagaattcattacttgagctcaaggaacccgctcatttcaattgctccacacagcgaaatctcgccgtccccctgggagaagtgcatgtcaccagtgctgaggtttgctccttcgacaaacactggtagataaattctggagcctctgcttaggttctttatgtcgcaattcccgccattttcccttccagcaatagttctggccgcttcgtttgcaattatgtgccattcagcagtcccttcttggacctgcaacgcattgtattcgttacaaacatggcacttcagcggaacactttagatctgctagcttagtatctgcacacaaaacctttttacttgtgctctaggaaatgtaaagagattaattgtatagatgtgcttctatgtccttccctaagcgaaggggcatgttaggttattggctaactgccataacttgcataaggttagtcgaccaaattgaaaaataaccttatgcagaaaaagttagacaaactatgacaatctaggcagcaaaccaaacaaacccgcaatgcttaatttgtaggtgacacagacaatctcccatataaccctggcgttatagtgaaaaacaaatgatcatgccttcccaagtaagcaattttcaggggtcggtaaatgagcaaggggcctctggtgtagaacttcacacagtttaatagtctctaggcttgtctcagacaaacttttctctctttcattccatatatttaggagctcaagtgacggtgcagttcccacaacaccaggatgagtcaatcctggaaaacgaacacctggcacatgccaaaatcgaattactgaaggatccaaatcaaatctggaaagcttcattcacggcaaaaatgagaaataagaaaccatacctggtatctgcggg

SEQ ID NO: 36428 - DNA, 784 bp, Zea Mays
ccttcccctaactccgccgccactgccgtccgcgctcgccgtcgccccgaacctatcgcccactgcatttttccggcggaggtatgcgatgaggctgctgcaagcggaggagctatttcggaaggttctggaggtcgggtcgaagaataaggcggctcggctgctggggctcgacgtcggcagcaagtacgtcggggtggccatctccgatgagaagaacagggtcgctatgcctctgagatttggtaaactgtgcgagtctgttacacccgaccttcatccgttttccctttgctcaatcaggctgggtcaagcagttaagtctgagaagattcgaatatcttcctttccttgtcccttgtgtacttgcctggagttttgcaataattgcctctgttgctgtcacaaatgttttgtgtcggacaaaaacaaacatcaacttgatggcagatgatttcaaaacattggtttcgatgtattccatagctgggttcgttgtgggctatccattcaaaatctatggtcaaccttgtgcaagtgcaatccaagtaagtcttgctggggaactttgtaaaacagggaaacttgatgatctgccctacgcatattgggatgaaaatttcacctcaaagtgtgtagaagccctcttgcatcccctgaatctaaaagacttggacgatgccaaaacaatgacagacaaatttgctgcagtctgtatactccagggtcaaaaccagacgtactcgaccgatccgcgcgccccacaagggaagaatgaatgtcg

SEQ ID NO: 36429 - DNA, 1179 bp, Zea Mays
cccccttcccctaactccgccgccactgccgtccgcgctcgccgtcgccccgaacctatcgcccactgcatttttccggcggaggtatgcgatgaggctgctgcaagcggaggagctatttcggaaggttctggaggtcgggtcgaagaataaggcggctcggctgctggggctcgacgtcggcagcaagtacgtcggggtggccatctccgatgagaagaacagggtcgctatgcctctgagatttggtaaactgtgcgagtctgttacacccgaccttcatccgttttccctttgctcaatcaggctgggtcaagcaggtcagactatatatctgatagggtgttttagtctaaaccttttttctcttatcccttgtgtacttctctggagttttgtaacaatttcctctgttgctgtcacacagttaagtctgagaagattcgaatatcttcctttccttgtcccttgtgtacttgcctggagttttgcaataattgcctctgttgctgtcacaaagttaagtctgagaagattcagattacaagctcaacaagataatttgttgttttatggatattggctatattcctaaaatctacttagtttctttatagccaaatctatatcttgtgaaaaaaatgtaacaactgcaattcagacgatagtttacattcatgtacttgttagaaaaggacatgtatcattatctgtggctaagatccttattgaatgaatcttgcagtgttttgtgtcggacaaaaacaaacatcaacttgatggcagatgatttcaaaacattggtttcgatgtattccatagctgggttcgttgtgggctatccattcaaaatctatggtcaaccttgtgcaagtgcaatccaagtaagtcttgctggggaactttgtaaaacagggaaacttgatgatctgccctacgcatattgggatgaaaatttcacctcaaagtgtgtagaagccctcttgcatcccctgaatctaaaagacttggacgatgccaaaacaatgacagacaaatttgctgcagtctgtatactccagggttatcttgacaacatgaacagaaaactgagatccacagataagtctgaagcataaagggtcaaaaccagacgtactcgaccgatccgcgcgccccacaagggaagaatgaatgtcg

SEQ ID NO: 36430 - DNA, 621 bp, Zea Mays
ccttcccctaactccgccgccactgccgtccgcgctcgccgtcgccccgaacctatcgcccactgcatttttccggcggaggtatgcgatgaggctgctgcaagcggaggagctatttcggaaggttctggaggtcgggtcgaagaataaggcggctcggctgctggggctcgacgtcggcagcaagtacgtcggggtggccatctccgatgagaagaacagggtcgctatgcctctgagtgttttgtgtcggacaaaaacaaacatcaacttgatggcagatgatttcaaaacattggtttcgatgtattccatagctgggttcgttgtgggctatccattcaaaatctatggtcaaccttgtgcaagtgcaatccaagtaagtcttgctggggaactttgtaaaacagggaaacttgatgatctgccctacgcatattgggatgaaaatttcacctcaaagtgtgtagaagccctcttgcatcccctgaatctaaaagacttggacgatgccaaaacaatgacagacaaatttgctgcagtctgtatactccagcgcccgtctcgctcaactgccccgaaatcaactctcactgcatgtcgctgaaaataatgctcgat

SEQ ID NO: 36431 - DNA, 928 bp, Zea Mays
gtcaaaaatacaaatttctcgttgtctaatgcggtggccggttgggcatccagttcgtacttgccgttgtccatctgccatcagatcgtttatcctactaatctaggccgtccaaatcggtagtttcagttccttcacttgtctgcatcccccttcccctaactccgccgccactgccgtccgcgctcgccgtcgccccgaacctatcgcccactgcatttttccggcggaggtatgcgatgaggctgctgcaagcggaggagctatttcggaaggttctggaggtcgggtcgaagaataaggcggctcggctgctggggctcgacgtcggcagcaagtacgtcggggtggccatctccgatgagaagaacagggtcgctatgcctctgagatttggtaaactgtgcgagtctgttacacccgaccttcatccgttttccctttgctcaatcaggctgggtcaagcagttaagtctgagaagattcgaatatcttcctttccttgtcccttgtgtacttgcctggagttttgcaataattgcctctgttgctgtcacaaatgttttgtgtcggacaaaaacaaacatcaacttgatggcagatgatttcaaaacattggcaatccaagtaagtcttgctggggaactttgtaaaacagggaaacttgatgatctgccctacgcatattgggatgaaaatttcacctcaaagtgtgtagaagccctcttgcatcccctgaatctaaaagacttggacgatgccaaaacaatgacagacaaatttgctgcagtctgtatactccagggttatcttgacaacatgaacagaaaactgagatccacagataagtctgaagcataaagcgcccgtctcgctcaactgccccgaaatcaactctcactgcatgtcgctgaaaataatgctcgat

SEQ ID NO: 36432 - DNA, 583 bp, Zea Mays
atcccccttcccctaactccgccgccactgccgtccgcgctcgccgtcgccccgaacctatcgcccactgcatttttccggcggaggtatgcgatgaggctgctgcaagcggaggagctatttcggaaggttctggaggtcgggtcgaagaataaggcggctcggctgctggggctcgacgtcggcagcaagtacgtcggggtggccatctccgatgagaagaacagggtcgctatgcctctgagtgttttgtgtcggacaaaaacaaacatcaacttgatggcagatgatttcaaaacattggtttcgatgtattccatagctgggttcgttgtgggctatccattcaaaatctatggtcaaccttgtgcaagtgcaatccaagtaagtcttgctggggaactttgtaaaacagggaaacttgatgatctgccctacgcatattgggatgaaaatttcacctcaaagtgtgtagaagccctcttgcatcccctgaatctaaaagacttggacgatgccaaaacaatgacagacaaatttgctgcagtctgtatactccaggttttctgaatttggagcaggt

SEQ ID NO: 36433 - DNA, 1378 bp, Zea Mays
ccttcccctaactccgccgccactgccgtccgcgctcgccgtcgccccgaacctatcgcccactgcatttttccggcggaggtatgcgatgaggctgctgcaagcggaggagctatttcggaaggttctggaggtcgggtcgaagaataaggcggctcggctgctggggctcgacgtcggcagcaagtacgtcggggtggccatctccgatgagaagaacagggtcgctatgcctctgagatttggtaaactgtgcgagtctgttacacccgaccttcatccgttttccctttgctcaatcaggctgggtcaagcagtgttttgtgtcggacaaaaacaaacatcaacttgatggcagatgatttcaaaacattggtttcgatgtattccatagctgggttcgttgtgggctatccattcaaaatctatggtcaaccttgtgcaagtgcaatccaagtaagtcttgctggggaactttgtaaaacagggaaacttgatgatctgccctacgcatattgggatgaaaatttcacctcaaagtgtgtagaagccctcttgcatcccctgaatctaaaagacttggacgatgccaaaacaatgacagacaaatttgctgcagtctgtatactccagggttatcttgacaacatgaacagaaaactgagatccacagataagtctgaagcataaaggtggcacctaagattccagtttgaactaaaccaaagagcaagggaaccttttttttgatagaacaggaggggagggcccctactgaaaattttatttaaaatttgaaaagaaaacaaagtttagaacaaacaagaagacaaattacagggggttagggagagtttgtactgccattgttttctactgccattgttgaagccaagtcgggatggcagaatcaaatctacccaaagctctgtgaatgacaaggagcaattcatttgcaaactcctgcttgcaatgttgcaccgttggatctttgttttgaaaaagccaagcattgcggcacttccaaatgctcaaagtcatgagaataataacctccatagagaatgggacattgagttgctgttttaggtttgccgcagcctcctctggattaacaattctaggtggaatcagaccgattgagtgccagcaggccttcgcgaagttgcacctgaggaatagatgataaaaagtttcttccttctggcagatgcagttctcgcaggtgtaaaactcaagagtcatgttcttcctcctaagcatattccttgtgttgagcctattttttagccatagccaataaaagactttatgcttaggttgacatttgttcttccagagcgatctgtaaatctgatgaacttgagactgacccatc

SEQ ID NO: 36434 - DNA, 1229 bp, Zea Mays
ccttcccctaactccgccgccactgccgtccgcgctcgccgtcgccccgaacctatcgcccactgcatttttccggcggaggtatgcgatgaggctgctgcaagcggaggagctatttcggaaggttctggaggtcgggtcgaagaataaggcggctcggctgctggggctcgacgtcggcagcaagtacgtcggggtggccatctccgatgagaagaacagggtcgctatgcctctgagtgttttgtgtcggacaaaaacaaacatcaacttgatggcagatgatttcaaaacattggcaatccaagtaagtcttgctggggaactttgtaaaacagggaaacttgatgatctgccctacgcatattgggatgaaaatttcacctcaaagtgtgtagaagccctcttgcatcccctgaatctaaaagacttggacgatgccaaaacaatgacagacaaatttgctgcagtctgtatactccagggttatcttgacaacatgaacagaaaactgagatccacagataagtctgaagcataaaggtggcacctaagattccagtttgaactaaaccaaagagcaagggaaccttttttttgatagaacaggaggggagggcccctactgaaaattttatttaaaatttgaaaagaaaacaaagtttagaacaaacaagaagacaaattacagggggttagggagagtttgtactgccattgttttctactgccattgttgaagccaagtcgggatggcagaatcaaatctacccaaagctctgtgaatgacaaggagcaattcatttgcaaactcctgcttgcaatgttgcaccgttggatctttgttttgaaaaagccaagcattgcggcacttccaaatgctcaaagtcatgagaataataacctccatagagaatgggacattgagttgctgttttaggtttgccgcagcctcctctggattaacaattctaggtggaatcagaccgattgagtgccagcaggccttcgcgaagttgcacctgaggaatagatgataaaaagtttcttccttctggcagatgcagttctcgcaggtgtaaaactcaagagtcatgttcttcctcctaagcatattccttgtgttgagcctattttttagccatagccaataaaagactttatgcttaggttgacatttgttcttccagagcgatctgtaaatctgatgaacttgagactgacccatc

SEQ ID NO: 36435 - DNA, 1470 bp, Zea Mays
ccttcccctaactccgccgccactgccgtccgcgctcgccgtcgccccgaacctatcgcccactgcatttttccggcggaggtatgcgatgaggctgctgcaagcggaggagctatttcggaaggttctggaggtcgggtcgaagaataaggcggctcggctgctggggctcgacgtcggcagcaagtacgtcggggtggccatctccgatgagaagaacagggtcgctatgcctctgagatttggtaaactgtgcgagtctgttacacccgaccttcatccgttttccctttgctcaatcaggctgggtcaagcagttaagtctgagaagattcgaatatcttcctttccttgtcccttgtgtacttgcctggagttttgcaataattgcctctgttgctgtcacaaatgttttgtgtcggacaaaaacaaacatcaacttgatggcagatgatttcaaaacattggtttcgatgtattccatagctgggttcgttgtgggctatccattcaaaatctatggtcaaccttgtgcaagtgcaatccaagtaagtcttgctggggaactttgtaaaacagggaaacttgatgatctgccctacgcatattgggatgaaaatttcacctcaaagtgtgtagaagccctcttgcatcccctgaatctaaaagacttggacgatgccaaaacaatgacagacaaatttgctgcagtctgtatactccagggttatcttgacaacatgaacagaaaactgagatccacagataagtctgaagcataaaggtggcacctaagattccagtttgaactaaaccaaagagcaagggaaccttttttttgatagaacaggaggggagggcccctactgaaaattttatttaaaatttgaaaagaaaacaaagtttagaacaaacaagaagacaaattacagggggttagggagagtttgtactgccattgttttctactgccattgttgaagccaagtcgggatggcagaatcaaatctacccaaagctctgtgaatgacaaggagcaattcatttgcaaactcctgcttgcaatgttgcaccgttggatctttgttttgaaaaagccaagcattgcggcacttccaaatgctcaaagtcatgagaataataacctccatagagaatgggacattgagttgctgttttaggtttgccgcagcctcctctggattaacaattctaggtggaatcagaccgattgagtgccagcaggccttcgcgaagttgcacctgaggaatagatgataaaaagtttcttccttctggcagatgcagttctcgcaggtgtaaaactcaagagtcatgttcttcctcctaagcatattccttgtgttgagcctattttttagccatagccaataaaagactttatgcttaggttgacatttgttcttccagagcgatctgtaaatctgatgaacttgagactgacccatc

SEQ ID NO: 36436 - DNA, 1696 bp, Zea Mays
ccttcccctaactccgccgccactgccgtccgcgctcgccgtcgccccgaacctatcgcccactgcatttttccggcggaggtatgcgatgaggctgctgcaagcggaggagctatttcggaaggttctggaggtcgggtcgaagaataaggcggctcggctgctggggctcgacgtcggcagcaagtacgtcggggtggccatctccgatgagaagaacagggtcgctatgcctctgagatttggtaaactgtgcgagtctgttacacccgaccttcatccgttttccctttgctcaatcaggctgggtcaagcagttaagtctgagaagattcgaatatcttcctttccttgtcccttgtgtacttgcctggagttttgcaataattgcctctgttgctgtcacaaagttaagtctgagaagattcagattacaagctcaacaagataatttgttgttttatggatattggctatattcctaaaatctacttagtttctttatagccaaatctatatcttgtgaaaaaaatgtaacaactgcaattcagacgatagtttacattcatgtacttgttagaaaaggacatgtatcattatctgtggctaagatccttattgaatgaatcttgcagtgttttgtgtcggacaaaaacaaacatcaacttgatggcagatgatttcaaaacattggtttcgatgtattccatagctgggttcgttgtgggctatccattcaaaatctatggtcaaccttgtgcaagtgcaatccaagtaagtcttgctggggaactttgtaaaacagggaaacttgatgatctgccctacgcatattgggatgaaaatttcacctcaaagtgtgtagaagccctcttgcatcccctgaatctaaaagacttggacgatgccaaaacaatgacagacaaatttgctgcagtctgtatactccagggttatcttgacaacatgaacagaaaactgagatccacagataagtctgaagcataaaggtggcacctaagattccagtttgaactaaaccaaagagcaagggaaccttttttttgatagaacaggaggggagggcccctactgaaaattttatttaaaatttgaaaagaaaacaaagtttagaacaaacaagaagacaaattacagggggttagggagagtttgtactgccattgttttctactgccattgttgaagccaagtcgggatggcagaatcaaatctacccaaagctctgtgaatgacaaggagcaattcatttgcaaactcctgcttgcaatgttgcaccgttggatctttgttttgaaaaagccaagcattgcggcacttccaaatgctcaaagtcatgagaataataacctccatagagaatgggacattgagttgctgttttaggtttgccgcagcctcctctggattaacaattctaggtggaatcagaccgattgagtgccagcaggccttcgcgaagttgcacctgaggaatagatgataaaaagtttcttccttctggcagatgcagttctcgcaggtgtaaaactcaagagtcatgttcttcctcctaagcatattccttgtgttgagcctattttttagccatagccaataaaagactttatgcttaggttgacatttgttcttccagagcgatctgtaaatctgatgaacttgagactgacccatc

SEQ ID NO: 36437 - DNA, 2455 bp, Zea Mays
ccttcccctaactccgccgccactgccgtccgcgctcgccgtcgccccgaacctatcgcccactgcatttttccggcggaggtatgcgatgaggctgctgcaagcggaggagctatttcggaaggttctggaggtcgggtcgaagaataaggcggctcggctgctggggctcgacgtcggcagcaagtacgtcggggtggccatctccgatgagaagaacagggtcgctatgcctctgaggtaagcacctccaacaactgctgcccgcggcacactgtgctcgctgcgataagtgctatgtttagaggatttgattttcttcctatgttaacttgtgtactcactgtggtaatccaacataagctcatatgtgccatctcaagatgcagatgcaggttgaaatatgaatgtgtgtgcaaaaacgttttttggccaattggcctccttaaattatttcagtccaaattttttttggcccgcttaaattgcagtggtaccaattcatatgtaaacttagtcaagatagtattcaatgattggatcgaggtgttttatttgtattctgcatattaaagcgacagaaatggtgtgaattgtcgggtggtagatgtggtgctatcctattatgatcttcttttggatattgtgtatgcacctctgaattggtggggaaaggatatgcaacaacatcctatggaatgcatttggtctactcaaccactttatttgcatcaattgtttaaaactgcatgaataataaaaatgaaaagtataaattatcatattggttgggtaaatggaagactccaatattctgtggaatttgatttctttacatatatatttgattcaaggaccacaagtgtactcatccctatgtgtagtagattagaaatagagatgcaggtactcagaaaacactgctagacatttaacagtacaagataaacatggctactgatccatctgtgtatttgttttttctcatgtataacatagatttggtaaactgtgcgagtctgttacacccgaccttcatccgttttccctttgctcaatcaggctgggtcaagcagttaagtctgagaagattcgaatatcttcctttccttgtcccttgtgtacttgcctggagttttgcaataattgcctctgttgctgtcacaaagttaagtctgagaagattcagattacaagctcaacaagataatttgttgttttatggatattggctatattcctaaaatctacttagtttctttatagccaaatctatatcttgtgaaaaaaatgtaacaactgcaattcagacgatagtttacattcatgtacttgttagaaaaggacatgtatcattatctgtggctaagatccttattgaatgaatcttgcagtgttttgtgtcggacaaaaacaaacatcaacttgatggcagatgatttcaaaacattggtttcgatgtattccatagctgggttcgttgtgggctatccattcaaaatctatggtcaaccttgtgcaagtgcaatccaagtaagtcttgctggggaactttgtaaaacagggaaacttgatgatctgccctacgcatattgggatgaaaatttcacctcaaagtgtgtagaagccctcttgcatcccctgaatctaaaagacttggacgatgccaaaacaatgacagacaaatttgctgcagtctgtatactccagggttatcttgacaacatgaacagaaaactgagatccacagataagtctgaagcataaaggtggcacctaagattccagtttgaactaaaccaaagagcaagggaaccttttttttgatagaacaggaggggagggcccctactgaaaattttatttaaaatttgaaaagaaaacaaagtttagaacaaacaagaagacaaattacagggggttagggagagtttgtactgccattgttttctactgccattgttgaagccaagtcgggatggcagaatcaaatctacccaaagctctgtgaatgacaaggagcaattcatttgcaaactcctgcttgcaatgttgcaccgttggatctttgttttgaaaaagccaagcattgcggcacttccaaatgctcaaagtcatgagaataataacctccatagagaatgggacattgagttgctgttttaggtttgccgcagcctcctctggattaacaattctaggtggaatcagaccgattgagtgccagcaggccttcgcgaagttgcacctgaggaatagatgataaaaagtttcttccttctggcagatgcagttctcgcaggtgtaaaactcaagagtcatgttcttcctcctaagcatattccttgtgttgagcctattttttagccatagccaataaaagactttatgcttaggttgacatttgttcttccagagcgatctgtaaatctgatgaacttgagactgacccatc

SEQ ID NO: 36438 - DNA, 1802 bp, Zea Mays
gaaagggctacatttcaatctctcagacactagacacaacctatctactccaagatccacggcggcgtgctggcctactctaagatccgccggcgcgtcgtggcggctcctccgcgtcccgcctccgaggccgcgggcggcgtcaggctgatctgggtggcgcgcggcgccggggagcgccccatcgtattcgtgcctctcaagcctaggccatggagggggtatcatcagctccagaaatggacgaggctatctcaactgaccaatcaagcagatcaacaaaaagaagggctaaagtgtgggatcatgttgattcagagctaatagatgggaaagagaaggcggtttgcaaatactgtaaggcccacttatcttctgctgcgggtaaagagatttcatttcgaaagtgtgaagatccatcctggaaagaaatgataaattattgtcaaccatcttttcgattagtcggtcgacagactgtccgttcagattgtatgttgttgtatgaagaggagaagttgcagttaattgagcagtttacaaagttgaaatctcatgttagtttgactgctgatctttggtcctctaaccaaaaccttggatatcttggtgtaacagcacatttcattagtgaagattttgagttgcacaaaaagattattgcattcaagaagatttccttcccacatacatcttatgctgtgcaagatggtattacctcttgtttgctagagtggggattggttggtgatttgtttaccctgactttggataatgctagtgtaaacaatagagcaatgaaagatatgcgagatgctttgggcagccagatgtttttcagtggtgaacacctccatgtgaggtgttcttctcatgtgctcaacatcatggttcaagctggactaaaggtcgttccaaatgcagtcgggaaggtgagggacattatcaaggtcgtaatatctacaccatctcgtttacagatcttcaattctattgttcaaacgttgggtcttagaagtaaatcggggctgattcttgatgttccacatcgttggaatgcaacctatgatatgctaaatgaagccctaaaatataaggctgctctgaacagatatgcagtagagcaacaccatgaatgtcccactgaagaagattggtcgaaggcagaagctcttcatggttttctacaagagtttagtgatgcaaccaaagcattctcagcggataggcatcccacagctcatctttttctcaagatgttgctcgttatccgaggtgtgctgcttgatgagaattataactcaaatgaactccttaatgagatggcaaatgttatgtataccaagttccaaaaatattggataaatcctaatattgtgttgctcatagctgctgttctagatccatcaatgaaaactgaatttgtcaagttctatttctacacagttggtgacaatgttgatatgaagatgagggagctcaaaaggtacttgaagaaatattacctagagtacgagaaaatcatgaggagtcatagtttgcatgtctttattactcccgatgatcagatgagaagtgagccttctacctcttcacctctttgtggtaaaagaagggtggaacatgcatttgctcaatttgcatctcaaaatgcgaatgcccgtccagagcgaacagaaatggatacatacttggaggaccctaggatccttatcaagccagatgaatgcttcaatgttttaggatggtggaagaaaaattcagatgcttatccaatattgtctttaatggctagggatttc

SEQ ID NO: 36439 - DNA, 1597 bp, Zea Mays
ctaaagggcataagcccgtggatcatgtgaaagggctacatttcaatctctcagacactagacacaacctatctactccaagatccacggcggcgtgctggcctactctaagatccgccggcgcgtcgtggcggctcctccgcgtcccgcctccgaggccgcgggcggcgtcaggctgatctgggtggcgcgcggcgccggggagcgccccatcgtattcgtgcctctcaaggccatggagggggtatcatcagctccagaaatggacgaggctatctcaactgaccaatcaagcagatcaacaaaaagaagggctaaagtgtgggatcatgttgattcagagctaatagatgggaaagagaaggcggtttgcaaatactgtaaggcccacttatcttctgctgcgggtaaagcacatttcattagtgaagattttgagttgcacaaaaagattattgcattcaagaagatttccttcccacatacatcttatgctgtgcaagatggtattacctcttgtttgctagagtggggattggttggtgatttgtttaccctgactttggataatgctagtgtaaacaatagagcaatgaaagatatgcgagatgctttgggcagccagatgtttttcagtggtgaacacctccatgtgaggtgttcttctcatgtgctcaacatcatggttcaagctggactaaaggtcgttccaaatgcagtcgggaaggtgagggacattatcaaggtcgtaatatctacaccatctcgtttacagatcttcaattctattgttcaaacgttgggtcttagaagtaaatcggggctgattcttgatgttccacatcgttggaatgcaacctatgatatgctaaatgaagccctaaaatataaggctgctctgaacagatatgcagtagagcaacaccatgaatgtcccactgaagaagattggtcgaaggcagaagctcttcatggttttctacaagagtttagtgatgcaaccaaagcattctcagcggataggcatcccacagctcatctttttctcaagatgttgctcgttatccgaggtgtgctgcttgatgagaattataactcaaatgaactccttaatgagatggcaaatgttatgtataccaagttccaaaaatattggataaatcctaatattgtgttgctcatagctgctgttctagatccatcaatgaaaactgaatttgtcaagttctatttctacacagttggtgacaatgttgatatgaagatgagggagctcaaaaggtacttgaagaaatattacctagagtacgagaaaatcatgaggagtcatagtttgcatgtctttattactcccgatgatcagatgagaagtgagccttctacctcttcacctctttgtggtaaaagaagggtggaacatgcatttgctcaatttgcatctcaaaatgcgaatgcccgtccagagcgaacagaaatggatacatacttggaggaccctaggatccttatcaagccagatgaatgcttcaatgttttaggatggtggaagaaaaattcagatgcttatccaatattgtctttaatggctagggatttc

SEQ ID NO: 36440 - DNA, 1584 bp, Zea Mays
atgggcagaaaggggctccaaacttgtgggctaacaaatttgagttttttttgggctttccactgattagggcagagttggatcaggacactccactaaagggccggcacgaatcaatcatcaaacaaagcccaaatatgctactggattgaactaaagggcataagcccgtggatcatgtgaaagggctacatttcaatctctcagacactagacacaacctatctactccaagatccacggcggcgtgctggcctactctaagatccgccggcgcgtcgtggcggctcctccgcgtcccgcctccgaggccgcgggcggcgtcaggctgatctgggtggcgcgcggcgccggggagcgccccatcgtattcgtgcctctcaagcctaggccatggagggggtatcatcagctccagaaatggacgaggctatctcaactgaccaatcaagcagatcaacaaaaagaagggctaaagtgtgggatcatgttgattcagagctaatagatgggaaagagaaggcggtttgcaaatactgtaaggcccacttatcttctgctgcgggtaaagcacatttcattagtgaagattttgagttgcacaaaaagattattgcattcaagaagatttccttcccacatacatcttatgctgtgcaagatggtattacctcttgtttgctagagtggggattggttggtgatttgtttaccctgactttggataatgctagtgtaaacaatagagcaatgaaagatatgcgagatgctttgggcagccagatgtttttcagtggtgaacacctccatgtgaggtgttcttctcatgtgctcaacatcatggttcaagctggactaaaggtcgttccaaatgcagtcgggaaggtgagggacattatcaaggtcgtaatatctacaccatctcgtttacagatcttcaattctattgttcaaacgttgggtcttagaagtaaatcggggctgattcttgatgttccacatcgttggaatgcaacctatgatatgctaaatgaagccctaaaatataaggctgctctgaacagatatgcagtagagcaacaccatgaatgtcccactgaagaagattggtcgaaggcagaagctcttcatggttttctacaagagtttagtgatgcaaccaaagcattctcagcggataggcatcccacagctcatctttttctcaagatgttgctcgttatccgagttggtgacaatgttgatatgaagatgagggagctcaaaaggtacttgaagaaatattacctagagtacgagaaaatcatgaggagtcatagtttgcatgtctttattactcccgatgatcagatgagaagtgagccttctacctcttcacctctttgtggtaaaagaagggtggaacatgcatttgctcaatttgcatctcaaaatgcgaatgcccgtccagagcgaacagaaatggatacatacttggaggaccctaggatccttatcaagccagatgaatgcttcaatgttttaggatggtggaagaaaaattcagatgcttatccaatattgtctttaatggctagggatttc

SEQ ID NO: 36441 - DNA, 769 bp, Zea Mays
atgggtggaagaaaaattcagatgcttatcctaatattgtctttaatgcctagggatttcatggctattcctgtgagtacggggtcctcagaatctgcctttagtgcagctggtagagtccttgaaaaaaataggacatcactatctcctgaaacactttacgctttagtctgtgctaaagactggttgattggattcaatgacgaagaagaaggtgaaccaatgactggaaagcgaatgtttgattcagatgatgaggaatatgattgggaaatttgaagcaggctaaggagttccttggtgcttccggtgacaagcgaaaggaagtcaattaactctgaatcagtggttctgctgcaaggttacacacaacattttattgaatggaaagaggacactcggtgaccacaagatcatcagatgatcatttgatgaactaattctcatcaagcatcaatgtcaccaactgtgtagaaatactgaattttagcatggagcgtctttgtaaacattttagcatggagcagtttctcatcgatcatggctgtcaagttctatttctctacacagttgcactttgtggttgttttctatcatttgtttgtgagcccatggattttactaatttattagcttgtggtggtgcttgcttgtatatgaaggcccttggattggcccgtggatttttaaaaggatcgaggcggattaggatgtcggggcattaaaaaacggattgaattgagttgtatcaaatcaatttggatttaag

SEQ ID NO: 36442 - DNA, 780 bp, Zea Mays
atgggtggaagaaaaattcagatgcttatcctaatattgtctttaatgcctagggatttcatggctattcctgtgagtacggggtcctcagaatctgcctttagtgcagctggtagagtccttgaaaaaaataggacatcactatctcctgaaacactttacgctttagtctgtgctaaagactggttgattggattcaatgacgaagaagaaggtgaaccaatgactggaaagcgaatgtttgattcagatgatgaggaatatgattgggaaatttgaagcaggctaaggagttccttggtgcttccggtgacaagcgaaaggaagtcaattaactctgaatcagtggttctgctgcaagtttgcatgcaggttacacacaacattttattgaatggaaagaggacactcggtgaccacaagatcatcagatgatcatttgatgaactaattctcatcaagcatcaatgtcaccaactgtgtagaaatactgaattttagcatggagcgtctttgtaaacattttagcatggagcagtttctcatcgatcatggctgtcaagttctatttctctacacagttgcactttgtggttgttttctatcatttgtttgtgagcccatggattttactaatttattagcttgtggtggtgcttgcttgtatatgaaggcccttggattggcccgtggatttttaaaaggatcgaggcggattaggatgtcggggcattaaaaaacggattgaattgagttgtatcaaatcaatttggatttaag

SEQ ID NO: 36443 - DNA, 756 bp, Zea Mays
atgggtggaagaaaaattcagatgcttatcctaatattgtctttaatgcctagggatttcatggctattcctgtgagtacggggtcctcagaatctgcctttagtgcagctggtagagtccttgaaaaaaataggacatcactatctcctgaaacactttacgctttagtctgtgctaaagactggttgattggattcaatgacgaagaagaaggtgaaccaatgactggaaagcgaatgtttgattcagatgatgaggaatatgattgggaaatttgaagcaggctaaggagttccttggtgcttccggtgacaagcgaaaggaagtcaattaactctgaatcagtggttacacacaacattttattgaatggaaagaggacactcggtgaccacaagatcatcagatgatcatttgatgaactaattctcatcaagcatcaatgtcaccaactgtgtagaaatactgaattttagcatggagcgtctttgtaaacattttagcatggagcagtttctcatcgatcatggctgtcaagttctatttctctacacagttgcactttgtggttgttttctatcatttgtttgtgagcccatggattttactaatttattagcttgtggtggtgcttgcttgtatatgaaggcccttggattggcccgtggatttttaaaaggatcgaggcggattaggatgtcggggcattaaaaaacggattgaattgagttgtatcaaatcaatttggatttaag

SEQ ID NO: 36444 - DNA, 1105 bp, Zea Mays
ctctagtatatgatggtggctatatcataaacacggttggtatgatctcgtaagactacaagccgatttgacttaactataatggtatgcgcaagggataataggtattctaatgttactaaaacattaggtcttaaagtgtcaagggtttgtaacatacactcctaaaaatggctttgttaaaaggaataatttcactttgatcactgttgcaagaaccataattgatgaacataatacattaaagatttttttggtcgaggcaacatcgcatgtattcatcaaaacgactatttcctcatcgattgcttaagaccccatatatgttgatgaatgagaataaaccagacatcccattctttcgagtgtttgggtgcaaatgctacatcgataagaagtgttaacacctagataagttttaaaagatgtgtgatattgatttcttacttggttacttattgaagtctaaagcatatagagtattcacccattccatcggcttggtagaaggaaatatatgatgtgtaattctgtgaaactaacggcttccaaggagcaaatgagaatcttgatgatgttggtgaatgaaccattaggggaggcaatgaagaatatggaggttggagttgttaagctaaaagatggagatgatgcgcatgtgatcaacatgtcttcatcaaatgtaccacaatacgccaaataagatagaaccaaatgaatatacatatgtctctcaagatcaaatggcagcacaagtacaagatgttgatgctctgcaaccttctccttggttgaaacagtaaactcacctctactacaagctcatccacaagatcttatcatagagaatccattaagggcattgcaaagaatttaatgaattgatgtcaaaggagtttaatatgtcaatgattgttggattacattcttcctcagctttcaagtcaagaaaatgcgagaagaaaacttcatctctcaagaaaagcacaccaatgacttgctcaaaagattcaagattcaattagtggatatcttcacaaagccattagatgaaacacacttttgtatgttgaggaatgagcttggtattcttaatataagcaat

SEQ ID NO: 36445 - DNA, 1213 bp, Zea Mays
acagattatgcagtggttgagaaaccatccttgacaacatggatgaaaggaggacttgattatatagttcttaaaagtttagatacagacgggattcgcataatttcaagcgttcttggtcaaagtatcgcccttgatcactatattcggcaggtcgatgatatggttgaggaattcactgaaattaatcgtgtcatggagaaaaccggtaactttaccatgcaaagaaaaaaactctttcaacttgtgggtaaggccaattctaatcttgcggatgttatcatcagacttggtctttttgacagaaattgcttggaaaaatgcaaattatgcacaaattctagaatatcttcgggaggaatatgaactgaatcagcgttttggaagccttgacttcaaactgaaatttgtggagcataacattcactttcttcaagaggtcctccaaaacagacggtctgatctgctggaatggggtgtcataatactgctgattattgagattgctatctcattatatgaaattgccaaggactccatgatcgattgagagctctgaacaacacctctattcatcctcgatcatcccattatgctaactccagatccactgttttaacaaaaaaaggaaaagaatgaccccagcttccatattttctgactatccatctccaccctttggatttctaaccttagatgaaaggaagttgggaatggcgttctggcttgagtttatttacatcctttaattctacaactccaaacgaaaagaagtttggccaattttcctatgtccaatgagttcccgggcagccaggttttccaatttgagtagaatctagttttcctttcaatattcatgccaggtgttcttgatacatgttcttggtgccactttttagtatcttgataggactgtcagctctttttttttgggggcaaggctgacgccaggcagctgcaactggacctgatggaaaaatcatgaaagtttttatcaaatggctttgtaatttgtacaaatacttagcgtgggaaggttccatttggtttaaccatactgaattgctcgttccattttgcgtggtaattaaccatgcatactgtaagtatgtgtagtacacttgatgcctatgagtgagagtgaattagatatttcttctagtcaaaatctatgcaataaataaactatctgtgtataattatatttttg

SEQ ID NO: 36446 - DNA, 1176 bp, Zea Mays
ttatcatcttaatggcattatcctatgttttgttttgttgggtttgacaaatgttagatgtttctgtatcaattctctccccaccgtttaagtagcctactgtattagtcttgcatttgtttttccatggatgattgtatagtcacaaacaaaagaaggacgtatattaggatctttttatgtcgctgtgggtacgaggttatggggttaaatttaattatttgctttccaatgaatggcatatacgtatacaattgtagatgcacttctaccaggaagaaatttatagccgttgttgttaggtggctggatgcagcaacatgtaaatgttgcaacttgctatctctagctttcatgaaaatagcccttgacagtttcagttaagaatgctaattgaaagttcatggttctgatttcggctaggaagattatgttacgagagattttggagtcaattctgtaatgcctcataagtataaagggatgtgtgatgtggtctacgggtggactggaagggtgtgacatcccatccagcatttgttaaagtcttcctcagcatatgaacggaccaatgaacccgatgcactggtctcctgaagatcccattgttcagtatctgtgtaaaaagaaataacagcagagccttttatcctaagaaagttgggctgtcccggtggcgaggatggccggccgcgggggcagggcaggggcaggaacgccatccatttggggcacccccggcatcgcaacttctctcgcctcctaggaaatcacggagcttccgaacagggctcctacacgatctacatgaagattgtcggggatgacaacgaggagctgagctgcatctcgtttgggttcagcatcagcttcgtcgcgtccgagcctgggcatgagaggcagccagcccatggatgattctgatgaggacgagactgatgattccgatgaggacgagacagatgaaaccaattgccttttaatggtctatgttatcattcaaaattgtcttatgttgacactatgtatatatgctattcacaataatagagccattcatactgttgggcgccttggatgaactatcttttcttcaacaaagatggagctcatgcagattgatttagtccctttcttgcaacgtaaccgtggctgaccagggatcgaactttggat

SEQ ID NO: 36447 - DNA, 955 bp, Zea Mays
gacatgctcctccatcgcagcaagagcgagccaggcagcggcgcccgccgctagcaagcccgaacgagcctggtcgttctcctccccgtcctaataatcagggaaaggctcgccgcgaggctccgcccctatcgcgcgccgccagcgacagagaatgcttgcggtcccggtggcgaggatggccggccgcgggggcagggcaggggccggggcaggaacgccatcgatctggggcgcccccggcatcgcagcttctctcgcctcctaggaaatcacggagcttccgaacaggatctataggattgaacagaaccactgaacactgataatctctcttccttagcatttgttacaacccgatgcactggtctcctgaagatcccattgttcagtatctgtgtaaaaagaaataacagcagagccttttatcctaagaaagttgggctgtcccggtggcgaggatggccggccgcgggggcagggcaggggcaggaacgccatccatttggggcacccccggcatcgcaacttctctcgcctcctaggaaatcacggagcttccgaacagggctcctacacgatctacatgaagattgtcggggatgacaacgaggagctgagctgcatctcgtttgggttcagcatcagcttcgtcgcgtccgagcctgggcatgagaggcagccagcccatggatgattctgatgaggacgagactgatgattccgatgaggacgagacagatgaaaccaattgccttttaatggtctatgttatcattcaaaattgtcttatgttgacactatgtatatatgctattcacaataatagagccattcatactgttgggcgccttggatgaactatcttttcttcaacaaagatggagctcatgcagattgatttagtccctttcttgcaacgtaaccgtggctgaccagggatcgaactttggat

SEQ ID NO: 36448 - DNA, 1155 bp, Zea Mays
gggacatgctcctccatcgcagcaagagcgagccaggcagcggcgcccgccgctagcaagcccgaacgagcctggtcgttctcctccccgtcctaataatcagggaaaggctcgccgcgaggctccgcccctatcgcgcgccgccagcgacagagaatgcttgcggtcccggtggcgaggatggccggccgcgggggcagggcaggggccggggcaggaacgccatcgatctggggcgcccccggcatcgcagcttctctcgcctcctaggaaatcacggagcttccgaacagattatgttacgagagattttggagtcaattctgtaatgcctcataagtataaagggatgtgtgatgtggtctacgggtggactggaagggtgtgacatcccatccagcatttgttaaagtcttcctcagcatatgaacggaccaatgatatcctctttctcagatttatgctacctgcggactggatttctctttcaggatctataggattgaacagaaccactgaacactgataatctctcttccttagcatttgttacaacccgatgcactggtctcctgaagatcccattgttcagtatctgtgtaaaaagaaataacagcagagccttttatcctaagaaagttgggctgtcccggtggcgaggatggccggccgcgggggcagggcaggggcaggaacgccatccatttggggcacccccggcatcgcaacttctctcgcctcctaggaaatcacggagcttccgaacagggctcctacacgatctacatgaagattgtcggggatgacaacgaggagctgagctgcatctcgtttgggttcagcatcagcttcgtcgcgtccgagcctgggcatgagaggcagccagcccatggatgattctgatgaggacgagactgatgattccgatgaggacgagacagatgaaaccaattgccttttaatggtctatgttatcattcaaaattgtcttatgttgacactatgtatatatgctattcacaataatagagccattcatactgttgggcgccttggatgaactatcttttcttcaacaaagatggagctcatgcagattgatttagtccctttcttgcaacgtaaccgtggctgaccagggatcgaactttggat

SEQ ID NO: 36449 - DNA, 1163 bp, Zea Mays
atcagggacatgctcctccatcgcagcaagagcgagccaggcagcggcgcccgccgctagcaagcccgaacgagcctggtcgttctcctccccgtcctaataatcagggaaaggctcgccgcgaggctccgcccctatcgcgcgccgccagcgacagagaatgcttgcggtcccggtggcgaggatggccggccgcgggggcagggcaggggccggggcaggaacgccatcgatctggggcgcccccggcatcgcagcttctctcgcctcctaggaaatcacggagcttccgaacaggaagattatgttacgagagattttggagtcaattctgtaatgcctcataagtataaagggatgtgtgatgtggtctacgggtggactggaagggtgtgacatcccatccagcatttgttaaagtcttcctcagcatatgaacggaccaatgatatcctctttctcagatttatgctacctgcggactggatttctctttcaggatctataggattgaacagaaccactgaacactgataatctctcttccttagcatttgttacaacccgatgcactggtctcctgaagatcccattgttcagtatctgtgtaaaaagaaataacagcagagccttttatcctaagaaagttgggctgtcccggtggcgaggatggccggccgcgggggcagggcaggggcaggaacgccatccatttggggcacccccggcatcgcaacttctctcgcctcctaggaaatcacggagcttccgaacagggctcctacacgatctacatgaagattgtcggggatgacaacgaggagctgagctgcatctcgtttgggttcagcatcagcttcgtcgcgtccgagcctgggcatgagaggcagccagcccatggatgattctgatgaggacgagactgatgattccgatgaggacgagacagatgaaaccaattgccttttaatggtctatgttatcattcaaaattgtcttatgttgacactatgtatatatgctattcacaataatagagccattcatactgttgggcgccttggatgaactatcttttcttcaacaaagatggagctcatgcagattgatttagtccctttcttgcaacgtaaccgtggctgaccagggatcgaactttggat

SEQ ID NO: 36450 - DNA, 909 bp, Zea Mays
atcagggacatgctcctccatcgcagcaagagcgagccaggcagcggcgcccgccgctagcaagcccgaacgagcctggtcgttctcctccccgtcctaataatcagggaaaggctcgccgcgaggctccgcccctatcgcgcgccgccagcgacagagaatgcttgcggtcccggtggcgaggatggccggccgcgggggcagggcaggggccggggcaggaacgccatcgatctggggcgcccccggcatcgcagcttctctcgcctcctaggaaatcacggagcttccgaacagcatttgttacaacccgatgcactggtctcctgaagatcccattgttcagtatctgtgtaaaaagaaataacagcagagccttttatcctaagaaagttgggctgtcccggtggcgaggatggccggccgcgggggcagggcaggggcaggaacgccatccatttggggcacccccggcatcgcaacttctctcgcctcctaggaaatcacggagcttccgaacagggctcctacacgatctacatgaagattgtcggggatgacaacgaggagctgagctgcatctcgtttgggttcagcatcagcttcgtcgcgtccgagcctgggcatgagaggcagccagcccatggatgattctgatgaggacgagactgatgattccgatgaggacgagacagatgaaaccaattgccttttaatggtctatgttatcattcaaaattgtcttatgttgacactatgtatatatgctattcacaataatagagccattcatactgttgggcgccttggatgaactatcttttcttcaacaaagatggagctcatgcagattgatttagtccctttcttgcaacgtaaccgtggctgaccagggatcgaactttggat

SEQ ID NO: 36451 - DNA, 360 bp, Zea Mays
cgacctctcccgcacgtctcggcactgtcgaggatgggagtcggcgctgtgatcggccagagatttgtaccttcatgcctttaacgtctgcttccccgtcctccccatccactattcgcatttgggggctttgcaatttctccatctctgtgttcctcagtccgtcccccttggtttggggctaccggctaccgctgtccaccgaactcatggggttgcctgatttgctgccggtgccgttcgtgacatagatcttgtgctggcctcgtgggcgcaggcatgtatcctaaatgaacggtgtattgctttcatgaaccatggagtagttgccataagttacacagaaaactgccatgtcaa

SEQ ID NO: 36452 - DNA, 652 bp, Zea Mays
ggaccatgttcagctattgtgagagaggatatatgcaaggcagggcgtggtcacgtgctctgcatcgccgacctctcccgcacgtctcggcactgtcgaggatgggagtcggcgctgtgatcggccagagatttgtaccttcatgcctttaacgtctgcttccccgtcctccccatccactattcgcatttgggggctttgcaatttctccatctctgtgttcctcagtccgtcccccttggtttggggctaccggctaccgctgtccaccgaactcatggggttgcctgatttgctgccggtgccgttcgtgacatagatcttgtgctggcctcgtgggcgcagttagcggtgatagagaagttcagcaaaaaatgttggaattattgaatcaactggctgcattcaaccatgttgagatgataatggtcatagctgcaacgaatcgtgctgacatccttgacacttctctgcttaagttgtttgccaaaataaatgtaccatatgttgtttgtattgtaacactactatatggatgatcgaagctatgtttttaatgtaagttttttacagtatatcagatattttctttagcctttatctcgccataatattgtctgttcaccatcaatgttgagagcgtgagattatg

SEQ ID NO: 36453 - DNA, 699 bp, Zea Mays
ggtcgatctgtcgcagctctggtgggcccttgcatccacgtaggaccatgttcagctattgtgagagaggatatatgcaaggcagggcgtggtcacgtgctctgcatcgccgacctctcccgcacgtctcggcactgtcgaggatgggagtcggcgctgtgatcggccagagatttgtaccttcatgcctttaacgtctgcttccccgtcctccccatccactattcgcatttgggggctttgcaatttctccatctctgtgttcctcagtccgtcccccttggtttggggctaccggctaccgctgtccaccgaactcatggggttgcctgatttgctgccggtgccgttcgtgacatagatcttgtgctggcctcgtgggcgcagtgaagttagcggtgatagagaagttcagcaaaaaatgttggaattattgaatcaactggctgcattcaaccatgttgagatgataatggtcatagctgcaacgaatcgtgctgacatccttgacacttctctgcttaagttgtttgccaaaataaatgtaccatatgttgtttgtattgtaacactactatatggatgatcgaagctatgtttttaatgtaagttttttacagtatatcagatattttctttagcctttatctcgccataatattgtctgttcaccatcaatgttgagagcgtgagattatg

SEQ ID NO: 36454 - DNA, 2422 bp, Zea Mays
cgcgtttcccgttggaacggaatgccgcagcctgtcgtccttgactccgtcggggagagggacggacggcgacgggcagctacaggacgatcgagcgacagacccggcaccacggcatcccgttccaattgcgtccgctgaccatccccatctccccaccggtgtcctcccctccctcccgtcgccatcgcttccctcggttgacttgacttgtactgttccacacacctccagtgacctgacaaccacaccgcaataatcgtattcagttctttttctcccttttgtactttggggtttgggcctctctttctcttcccctgcgagcctctttcctcgctcttgtctcctgggcgagttctgaatctgggatcggcggtaacgtgggcgaccgccggagtgggcgaagcgcagcagctcttcggtgccggtggttcataatatgatggccgcagagttagtaaagcagtattcaaacatcactctgggagaagataataagatatgtgatattaaacaagcgcttaaggccttgagaaagaagattcttagtttggattttgacaactccatgcacgtccatgacccacaggactcatttgagtacttggaagtgctgcgcaaaatcaaacaactatctgaaaagttaaggaccttagaccctggtggggaagccaaacaactggatgaactcactgtgtatgcatatgaaatttctgaaatggcaatggcaagacttgaagaggaatttatttatctccttacacatttcaaacaaccattagaacaggaggttctctcttttcgctctacagaggatggtagtgtggaagacttttcaagcagttcatttagtgaggaaccatcggatgggaaggcaacaccgaatgatatcagtggaggaccagaatattttgtgcctgatttaattcaacccggtgcactctctgctgtcaagtccattgctaaattcatgttcctgaatggctatgataaggagtgtttacaggcttatataaactcacggcagactgcaatagatgagtactttgggtctcttcgtctggaaaaactcagtatagaggagcttatgaacacaagctggaataagttgaattcattaataaagagatggaaccgggcaatgcgtggttttattcgagtatatcttgtaagtgagaaacggcttagcaaccatgtctttagtgaacttacagattcaactgctgacttgtgcttctctgagatttcattcaactcagttgtacaacttctgagcttttatgtatctgtagcaattggaccccccaaaacagaaaagctttttcgattgcttgatatgtatgaggtcctggatgatcttctccctgaagttgaatccttgtttgaaccaaagtacggtgatatgatcctgaatgagtatcatgaagcactactgcaactgggagaatctgcaaggaagacatttgcagaattcaagtgtgccatccaatcatacacttcatccaatgcagtagctcgtggagaagtgcatccacttacaaagtatgttatgaactacataaaggctctcactgcatacagcaaacctcttgattcacttctcaaggacacggatcgaagatgcctgacttctgatattcagttgatggcaaatacatatcctaatttcacggcaacagctttgcatctacagtctgttactgcagttttggaggcaaatcttgaagctgggtctagattgtaccgagatgatcgactgcagaacatcttcatgttgaacaacacccactacatggttcagaaagtgaagaactcggatctcaaaagctttcttggtgatgactggatccggattcataacaggaaatttcagcagcaagctatgagatatgagagggcatcatggaataatgttctctcttacctcagtgatgatggcttgtgtgcttctggtgatgctgcttctcgcaaaaccatcagggagaagataaaaaatttcaatctgtcctttgaagaggtttaccgagttcagacagcatggtctgtcccagatgaccaacttcgcgacgacgtccggatttcaatatcactgaaagttatacaggcctataggaccttcgtgggaagatattcaggctttcttgatggctcaaggcatcgagatcgttatgtaaagtacagggcggaggatctggagacacttttgctagacctttttgaaggaactcaaaagacactgcagcattcttgtcgagtgtaagattaaaccagttcttgaagaagagatgcctcagtcttttctgggttccttctttggtttgtaatggactaatggtactgttgaatgagtatagtgatatcctgttctgccaaactagaatgattttgttagagatagcattctactgttcacgaaact

SEQ ID NO: 36455 - DNA, 929 bp, Zea Mays
catcgcttcactatctctgctatttgtcttatttctttgtctctctaaaattcacctcgcctccccatttctttgcttactccggccgactatctctgctatttgtccccttgggagggcgtgctgccgtcggtcggtgctccagcgactgtccctatcggcggcatgatcggatggtaagatgatggctagatgtggctagagttgctgaaagagctaagagtacttgccatcgccagattgttgaaacgcgactggaaactagtggtccggccttcaacaacggtagcgtggcaattcagcaatgtggtggcgtgtctctatctgtcctcaaatcgcggtgcagaggaggatgacccgaaagagggctctggaaagctttaggtgtgggaggcgttgaagggataacggaagattttaaggccacacgacgccgttgaagggataaagaagatcccaaagccacacaagctagagaacaatgcagaatggaagcggtggcggcggcggcctcgctgccggagtgcggctccaccggtggactgctcatcagtggtttcgcctattaacccccctctaggcgacttttaaggtcatcatcgccgctcgctccttggggaaccgccactgccgcacgaagggagcaccgtcgctcgcccgcacctccagggtcatcatctaaattacatgattatttaaattgtgtaaacttgagtaaattagacagaacattagaagattattttaaagtgtatttcataagggtcaaattaagtattttagatgcaggcttatgggggttattttgaactacttttttaaacaatgatggatgtaagaaatttatataaaaatataaggggtattttgaattgcctttgtaatgtcagaagtggttagtatagatgcaaaattagtgtgaaagggcc

SEQ ID NO: 36456 - DNA, 1132 bp, Zea Mays
catcgcttcactatctctgctatttgtcttatttctttgtctctctaaaattcacctcgcctccccatttctttgcttactccggccgactatctctgctatttgtccccttgggagggcgtgctgccgtcggtcggtgctccagcgactgtccctatcggcggcatgatcggatggtaagatgatggctagatgtggctagagttgctgaaagagctaagagtacttgccatcgccagattgttgaaacgcgactggaaactagtggtccggccttcaacaacggtagcgtggcaattcagcaatgtggtggcgtgtctctatctgtcctcaaatcgcggtgcagaggaggatgacccgaaagagggctctggaaagctttaggtgtgggaggcgttgaagggataacggaagattttaaggccacacgacgccgttgaagggataaagaagatcccaaagccacacaagctagagaacaatgcagaatggaagcggtggcggcggcggcctcgctgccggagtgcggctccaccggtggactgctcatcagtggcagcagaagtgcttcactgcagctgcccccgccgacgctcgcgcaagaaggcgttcgtggcgcgcttttgcacggcctcgtcgaagtgatcaccgagaatgcgaggccgccacggagaccagcacgaaggagacgtacgtgctgatggaacccggcatggacgaggcgttcgtgtccagagaggagctagaggagagcctcacaagaactggcccgtggacaccctatccctggacctcgccaggttcggcatggtcgacgaggccgtctcgtacctcgtcaggtccgtgtgtgtgctcgagatcgatggagacgttgggtccgtggagtggtaccaggtccagttggactagttgccaccctagcttggatgtatgtcagtgagaaacccattaagagcctttttcacgcccctcagcttctcgcctctagacggccaccccacgcagatatggcgacgcgaaccgtgagcttcccctcctttgcggtctcttaccagtgccgaggtgcgaggaggatgcatttacgttgcgagggacatgagaagttgcgagtagccgtcactgccaatgcgac

SEQ ID NO: 36457 - DNA, 870 bp, Zea Mays
catcgcttcactatctctgctatttgtcttatttctttgtctctctaaaattcacctcgcctccccatttctttgcttactccggccgactatctctgctatttgtccccttgggagggcgtgctgccgtcggtcggtgctccagcgactgtccctatcggcggcatgatcggatggtaagatgatggctagatgtggctagagttgctgaaagagctaagagtacttgccatcgccagattgttgaaacgcgactggaaactagtggtccggccttcaacaacggtagcgtggcaattcagcaatgtggtggcgtgtctctatctgtcctcaaatcgcggtgcagaggaggatgacccgaaagagggctctggaaagctttaggtgtgggaggcgttgaagggataacggaagattttaaggccacacgacgccgttgaagggataaagaagatcccaaagccacacaagctagagaacaatgcagaatggaagcggtggcggcggcggcctcgctgccggagtgcggctccaccggtggactgctcatcagtgtcactcactgcctgctgccaggggccaagtgcttcatcgtcgtttgaccttgcgttccattgaagactcgttttctcaaaaattccttccgttctagattaagacctgctctagatcgtcacggctttggtaggagaccttgaagcgtcctttaatcgacatcttgaataattcatgtagtcagcttggtcataattgttcgtatttgtgcaactaaacagcacggctcgaagtcttttgactttctaagcgacatgtacaattgtggcatagcaagagccggctacaatctcatcgccggatagtttctctcgg

SEQ ID NO: 36458 - DNA, 194 bp, Zea Mays
ctctgctatttgtcttatttctttgtctctctaaaattcacctcgcctccccatttctttgcttactccggccgactatctctgctatttgtccccttgggagggcgtgctgccgtcggtcggtgctccagcgactgtccctatcggcggcatgggacgtggaacatttccacgcaaaggcgagagagggaggg

SEQ ID NO: 36459 - DNA, 2978 bp, Zea Mays
gaaagatatcaccttctcgacttctgtcagcaatctttgggactgacggcccactctccccacctttgcctttgttcatctgccatgaaatattaaccatattgagtaccatcggtatcatcattgtagagagttttcactggaataaatacatcaccgctcaacattgtttaaaacaagagtaacaaaggtcataaggtcaagttggctgctagaattgaaactggaacattcaactgcagtttcacttacaataaggaaccaaagtcacattccacttgcatctcaataaccttgagtagaaaatgtcagtatattgcatttacatgtacttgagtattcgtttcaaaagaaaacgtaccagatctcatgctctatggttgttaaatacaaccattgccattattcttttatgtagcttaaaagtttttttatgaagacacttaatatactattcgttaatgttacattaagcagaattcagtatctagcaacgctacatatgagatacagatattagaagagtacagataaaattgcccaaacaatgggatttgaatatttgattgtgcatgagaatacacttgagaaaaattattcaattggcaacagtgagaaaatactgatgttttaaaataagatatagcagatcaaaggtcagatcaaacataactgttaattctccagtctccaccaacaagtcagtatcaatattccatattaatgagcctaggtcgatatagcattgttgcattggcttttcagttttcattgtatcgtaaggtttcactggatggaaccttgccaaaacaggaccctagctcgaattccagtgtagctctggagcaaaggttatatatattttgtacaaccaagggtgatacaaatgtttgaaaatttctcaagatataaataccagcagattttgcaaaaaaaaaacaagaataaaaaatatagatgcaaaattcggaaacacagattttgttacatgttcactacatgctcatttatatcatgtttgatctgcctctattgcatagaatgggagtgattggaaccaggtgatgtctcaatatggaagcttccttagccagattgacgagcagcctatcgcaacacaacattctgaatttccagttgatgggcaacccgagggctcaagaacaccagctgttactaaaaagccaactcaaagaactaagctagcaaacttcactgctgaagaggacacaagggtatgccatgcatggcttgctgttagttgtgatcccattattaacacagggcagaaacgtcaaggattttggagtagaattactgaagcatacaactcaagacgaggaacattgcccgaaaggtccacaaaatctttgatgagcagatgggatactatcaaaacacagtgttccacttttgctggatacatgatggcagtcctccgacagaatcctagtggactcagtgacacagacaaggtttgtaagtatgtccctgttgtaaccagttgttttatgtggcagacatcactggcagcttctaggtttgcagcaattgagaagaagcctttccactttttacactgttgggccattcttaaggaccaaccaaaatggatggacaaccacatgggtcaacaaaatcagcaagccaacgctaatcccacacattctaacactgtcgatgtggatgcagaagaatctgtaccatctagcttcacatcgaagaggccactgggtcgagattcttctaaggaaaaggcaaagaggactaaatctgtggacacaacttcgtcagattctgagttcatgacacgcatgggagatctttctttggagcgcctgtcagtgtacaaaacagttgttacaactgaggaaaagaagttggattcaatgaacagaaatgagaggcagaaattgctcctagaaaagaagaagttgaacctacagaaattaaggcttgaaaggcagaaactaaaggaggacaaggaagaggagataatgatcttaagcatggatcagatgtctttcgaaaagcgttgaatgccgagaaaacatagaaaaatgaaaaagaaatggaaaatgtgaatctgttaacactgtagctttagggacggaatttagaggacgctgctagagacggagaatatatagaggacagaatcttttagagtgttctgtaaaggacagagaatattcctttagtggatgaaatttaggggacgctgctggagacagtcttagaagagtacagataaaattgcccaaacaatgggaattgattgtgtatcagaatacacttgagaaaaattattcaattggcaacagtgagaaaatactgaagttttaaactaagatatagcagatcaaaggtcagatcaaacataactgttaattctccggtctccaccaacaagtcagtatcaatattccatatagcctaggtcgatatagcattgttgcattggcttttcagttttcattgtatcgtaaggtttcactggatggaactggaaccttgccaaaacaggaccctagctcaaattccacagtgtagctctggagcaaaggttatatatattttgtacaaccaagggtgatacaaatgtttggaattttctcaagatataaataccagcagattttgcaaaaaaaaaacaagaatgaaaaatatagatgcaaaattcggaaacacaactgtaagtatcagatatccatgaaataagtaaaggacccagagtttatcaaacagtaataaaaaacacaatttccttttcagatccatctccatagtcttaagagggaactataggtaaaggacccaaagtttatcaaacagtaacaatgaaaaaaacaatttccttttcagattcgtggctccaaagtcttatgttaattcagtttctgcatcacgaagactactaattatagaggcaagtgcatacgaacaaaagtttgttcagtgtgaaaagttgaaaaaca

SEQ ID NO: 36460 - DNA, 3018 bp, Zea Mays
aagatctacacttaagggcacaaggcatttggcgatgaccctgctcttatcctttacacaagtggcacaactggtaaacctaaaggagtagttcacacccatgagggcattctttctcaggttcagattctatctgaagcgtggggatatcgaagtgaagaccaatttctgcactgtctcccgctgcaccatgtgcatgggcttttcaatgctctatttgcgcccctttattcaggatcagtggttgagtttataccaaaattcagtgtaagcgggatatggcagagatggcgagaatcatatcccaacgatgcgagtaaaagtacagaggccattacagtatttactggagttccaaccatgtatacacgtctgctgcaagggtatgatagtatggatcctgatcaaaagtcggcctcttcttacgctgcaaagcatctgaggttaatgatgtgtggatcatcagctcttccttccccacttatgaagaggtgggaggaagtgacaggccatcgtcttttggaacgctatggtatgactgagtttgtcatggcactgtctaatccattgcatggtatccgaaaagaaggtacagttggtaaacctcttccacgcattgaggccaagatcattatggaggacggggctgaaactacaactggagttggcgagctctgcattagaagtccatctcttttcaaggagtattggaaaagaccagaggtcaccgcagaatctttcattgatggaggattcttcaagacaggtgatacagtaactgtagatgaggaaggatacttcataattttgggacgcacaaatgccgacattatgaaatttggcggttacaagctgtcagcattagaaattgaggcagtactgttagagcatgatgctgtactggaatgtgctgtccttggcttgcctgatgaagcctatggggaggttatatgtgcaataattgtgcctaaggaggatgcaaagaaaaaggctggacaggactcaaagccagcgctaaccttggaagcattaacaagttggtcgaaagataagcttgctccatacaagattccaacaagactatacttgtgggattctcttcctcggaatgccatgggaaaggttaacaagaaggagctgaagaaattgttaggagcttagccatgtgtatagatgtatttatctcttcatttccttcttaaagtttagcaagtcgggctcattatattgattagcgaataagtgctttcgttaccatggaccaataatcttcgaaacggcctgagttagactgcacacacatttatttatcagaaaagtttctagtcacactgcgcagtatcgatgttatgcattgacttgtaggaagactaataaacctcctctgctggtgaccctgacaagtctaaacaacagtaactaataggctagtaaagttaactagatgttttatactaccacatgcattgaacattcaacctccagaagttcattgtttcagccctacagggctcacaggagtcccagccatacaggactagggctgctccgtgttgtcctcctcttcccactccacgttcttcccctcctcgccatacaaccagcagcaccaagcgaagtacacgaagttcgccacgccgtagcccgtgagcagccagtagtaatagtcgtagcggccgacgttcaagttgtcgacgagccagcccgttcccaccccttgcccgctcgccacctgcaccaccttcacgatgagggcgccggccaggttgcccactccgaaggccatgtacagcagcgacatgctgaagctggccatgctcttgggcagctcggtgtacaagaactcgatctccccgatgacgccgaacgcctcggcgagccccacaagcgcgaactgcggcacgagccagaacgccgagatggtgaccccgcgctgcgccagccgcctccgctcgccctccaccgccgcggagacagccgtcgacgcggtggcgaggagcaggcccccaccgatgcgctgcttcatggtgagcccgtgcgggttgcccgtgtaccgctgcagtgccggcgcgacccacctgtcgtagcaggccgaccacagcgacatggtggccatgttgaagacggccaaggagccgctgggaacgcggaacccgcccgcgccgacgcgccggtccatagcatcggcctgcttaacggcgaagctctggttcatggcaagggcgaggaagatggtggaggaccagatcggcaggacgcggatcgccgacttgagctgctccacctggtccaccgtgcacagcctcgtcccgtcgtggccgtgccgctcggaggccgccgccgccgcgtccgagccgttgcagggcgcgtcgtccttggtggcacggagcaagcacgccttgttcaagaacctgaacgtacgtacgtacgcagctcaaaacgccaacgtgttcgtcacaccacgcatccttctgccagctagctagctgcatgttgggggggacgggacgtgacgtatatacctcagcttgtccgtggggacagcgagcttgcagtccttgaggtgatggtacacgccatcgacggtcttgtccggcaaccgcgccccgtggttcctgatcgccgcggcgacggcggtgcctatcccggcgaacatccgcctctcgcccttctccttgatgtataggctcgatcccagcaagaagctgaccgcggagagcagcatgaggcccatcgggacggcgaacccgacgctccacccgacgttgtcctgcaggtagacgatggccgtgacggcgaccgtgaaggccacgccgatggacgcgtagtaggcgttgaagtaggattgcaggatgctggcccggcgctgcctggggtgcctggagaactggtccgcgccgaacgccatggagcacggccggacgccgccggcgccgagggacaggaacgcgaagccggcgagcagccacgcgaggtgcctcgtccccggcggcgcgcactggtcgccgctgcacggag

SEQ ID NO: 36461 - DNA, 3838 bp, Zea Mays
atccctggtggcagagcccgagcagcgaccgccgaggttgagacttgagagacctatgaaaccgcgaggcgccgcacaccaaccaacccccgggctgcccgtaaatgcggacacaggcgtgggggcgcggggcggtggcgcgcttgatgacgccattcaatcgccgcgcggcccacgcctcttctccccacctgctccgcgcctgctcatccgcctcttataccatcgctctcgctcgcctccgacgccacttcacctcttctgcttccttctccccagcatacagtgccagacaggatacccacacattcatggaggtggttcaagaagtccttaggcatggctcagcagatagtgtccgtgctgtcataagagctaacaaaaagagctacagccttgtccagctcattgcagcctcttttgatgtctacaacattttgtgcagcaaaaatatgacaccaaatgggatgcaagattcttcttccaaaggaagaaatggaacaggattccttcatggagctcgtgttggcattgtggctaaaccctctcctgaatttgttgctggggtatttggaacctggctttctggtggagttgcagtaccccttgcccttagctatccagaagctgagcttcttcatgtcatgaatgactcagatatttcaatggttttaagcaccaaggagcatcacgaaatcatggagaacctttctatcaagtgttctgcttattgttctattcttccatctgtcactagtataccttcagaaatcaatcctcaagaaccttcaagcaatgaggcgatttcatcagtctctactttaataactgagaccaacagttcaaagaaaatcaaaggcgatgaccctgctcttatcctttacacaagtggcacaactggtaaacctaaaggagtagttcacacccatgagggcattctttctcaggttcagattctatctgaagcgtggggatatcgaagtgaagaccaatttctgcactgtctcccgctgcaccatgtgcatgggcttttcaatgctctatttgcgcccctttattcaggatcagtggttgagtttataccaaaattcagtgtaagcgggatatggcagagatggcgagaatcatatcccaacgatgcgagtaaaagtacagaggccattacagtatttactggagttccaaccatgtatacacgtctgctgcaagggtatgatagtatggatcctgatcaaaagtcggcctcttcttacgctgcaaagcatctgagatgtgtggatcatcagctcttccttccccacttatgaagaggtgggaggaagtgacaggccatcgtcttttggaacgctatggtatgactgagtttgtcatggcactgtctaatccattgcatggtatccgaaaagaaggtacagttggtaaacctcttccacgcattgaggccaagatcattatggaggacggggctgaaactacaactggagttggcgagctctgcattagaagtccatctcttttcaaggagtattggaaaagaccagaggtcaccgcagaatctttcattgatggaggattcttcaagacaggtgatacagtaactgtagatgaggaaggatacttcataattttgggacgcacaaatgccgacattatgaaatttggcggttacaagctgtcagcattagaaattgaggcagtactgttagagcatgatgctgtactggaatgtgctgtccttggcttgcctgatgaagcctatggggaggttatatgtgcaataattgtgcctaaggaggatgcaaagaaaaaggctggacaggactcaaagccagcgctaaccttggaagcattaacaagttggtcgaaagataagcttgctccatacaagattccaacaagactatacttgtgggattctcttcctcggaatgccatgggaaaggttaacaagaaggagctgaagaaattgttaggagcttagccatgtgtatagatgtatttatctcttcatttccttcttaaagtttagcaagtcgggctcattatattgattagcgaataagtgctttcgttaccatggaccaataatcttcgaaacggcctgagttagactgcacacacatttatttatcagaaaagtttctagtcacactgcgcagtatcgatgttatgcattgacttgtaggaagactaataaacctcctctgctggtgaccctgacaagtctaaacaacagtaactaataggctagtaaagttaactagatgttttatactaccacatgcattgaacattcaacctccagaagttcattgtttcagccctacagggctcacaggagtcccagccatacaggactagggctgctccgtgttgtcctcctcttcccactccacgttcttcccctcctcgccatacaaccagcagcaccaagcgaagtacacgaagttcgccacgccgtagcccgtgagcagccagtagtaatagtcgtagcggccgacgttcaagttgtcgacgagccagcccgttcccaccccttgcccgctcgccacctgcaccaccttcacgatgagggcgccggccaggttgcccactccgaaggccatgtacagcagcgacatgctgaagctggccatgctcttgggcagctcggtgtacaagaactcgatctccccgatgacgccgaacgcctcggcgagccccacaagcgcgaactgcggcacgagccagaacgccgagatggtgaccccgcgctgcgccagccgcctccgctcgccctccaccgccgcggagacagccgtcgacgcggtggcgaggagcaggcccccaccgatgcgctgcttcatggtgagcccgtgcgggttgcccgtgtaccgctgcagtgccggcgcgacccacctgtcgtagcaggccgaccacagcgacatggtggccatgttgaagacggccaaggagccgctgggaacgcggaacccgcccgcgccgacgcgccggtccatagcatcggcctgcttaacggcgaagctctggttcatggcaagggcgaggaagatggtggaggaccagatcggcaggacgcggatcgccgacttgagctgctccacctggtccaccgtgcacagcctcgtcccgtcgtggccgtgccgctcggaggccgccgccgccgcgtccgagccgttgcagggcgcgtcgtccttggtggcacggagcaagcacgccttgttcaagaacctgaacgtacgtacgtacgcagctcaaaacgccaacgtgttcgtcacaccacgcatccttctgccagctagctagctgcatgttgggggggacgggacgtgacgtatatacctcagcttgtccgtggggacagcgagcttgcagtccttgaggtgatggtacacgccatcgacggtcttgtccggcaaccgcgccccgtggttcctgatcgccgcggcgacggcggtgcctatcccggcgaacatccgcctctcgcccttctccttgatgtataggctcgatcccagcaagaagctgaccgcggagagcagcatgaggcccatcgggacggcgaacccgacgctccacccgacgttgtcctgcaggtagacgatggccgtgacggcgaccgtgaaggccacgccgatggacgcgtagtaggcgttgaagtaggattgcaggatgctggcccggcgctgcctggggtgcctggagaactggtccgcgccgaacgccatggagcacggccggacgccgccggcgccgagggacaggaacgcgaagccggcgagcagccacgcgaggtgcctcgtccccggcggcgcgcactggtcgccgctgcacggag

SEQ ID NO: 36462 - DNA, 3825 bp, Zea Mays
atccctggtggcagagcccgagcagcgaccgccgaggttgagacttgagagacctatgaaaccgcgaggcgccgcacaccaaccaacccccgggctgcccgtaaatgcggacacaggcgtgggggcgcggggcggtggcgcgcttgatgacgccattcaatcgccgcgcggcccacgcctcttctccccacctgctccgcgcctgctcatccgcctcttataccatcgctctcgctcgcctccgacgccacttcacctcttctgcttccttctccccagcatacagtgccagacaggatacccacacattcatggaggtggttcaagaagtccttaggcatggctcagcagatagtgtccgtgctgtcataagagctaacaaaaagagctacagccttgtccagctcattgcagcctcttttgatgtctacaacattttgtgcagcaaaaatatgacaccaaatgggatgcaagattcttcttccaaaggaagaaatggaacaggattccttcatggagctcgtgttggcattgtggctaaaccctctcctgaatttgttgctggggtatttggaacctggctttctggtggagttgcagtaccccttgcccttagctatccagaagctgagcttcttcatgtcatgaatgactcacaccaaggagcatcacgaaatcatggagaacctttctatcaagtgttctgcttattgttctattcttccatctgtcactagtataccttcagaaatcaatcctcaagaaccttcaagcaatgaggcgatttcatcagtctctactttaataactgagaccaacagttcaaagaaaatcaaaggcgatgaccctgctcttatcctttacacaagtggcacaactggtaaacctaaaggagtagttcacacccatgagggcattctttctcaggttcagattctatctgaagcgtggggatatcgaagtgaagaccaatttctgcactgtctcccgctgcaccatgtgcatgggcttttcaatgctctatttgcgcccctttattcaggatcagtggttgagtttataccaaaattcagtgtaagcgggatatggcagagatggcgagaatcatatcccaacgatgcgagtaaaagtacagaggccattacagtatttactggagttccaaccatgtatacacgtctgctgcaagggtatgatagtatggatcctgatcaaaagtcggcctcttcttacgctgcaaagcatctgaggttaatgatgtgtggatcatcagctcttccttccccacttatgaagaggtgggaggaagtgacaggccatcgtcttttggaacgctatggtatgactgagtttgtcatggcactgtctaatccattgcatggtatccgaaaagaaggtacagttggtaaacctcttccacgcattgaggccaagatcattatggaggacggggctgaaactacaactggagttggcgagctctgcattagaagtccatctcttttcaaggagtattggaaaagaccagaggtcaccgcagaatctttcattgatggaggattcttcaagacaggtgatacagtaactgtagatgaggaaggatacttcataattttgggacgcacaaatgccgacattatgaaatttggcggttacaagctgtcagcattagaaattgaggcagtactgttagagcatgatgctgtactggaatgtgctgtccttggcttgcctgatgaagcctatggggaggttatatgtgcaataattgtgcctaaggaggatgcaaagaaaaaggctggacaggactcaaagccagcgctaaccttggaagcattaacaagttggtcgaaagataagcttgctccatacaagattccaacaagactatacttgtgggattctcttcctcggaatgccatgggaaaggttaacaagaaggagctgaagaaattgttaggagcttagccatgtgtatagatgtatttatctcttcatttccttcttaaagtttagcaagtcgggctcattatattgattagcgaataagtgctttcgttaccatggaccaataatcttcgaaacggcctgagttagactgcacacacatttatttatcagaaaagtttctagtcacactgcgcagtatcgatgttatgcattgacttgtaggaagactaataaacctcctctgctggtgaccctgacaagtctaaacaacagtaactaataggctagtaaagttaactagatgttttatactaccacatgcattgaacattcaacctccagaagttcattgtttcagccctacagggctcacaggagtcccagccatacaggactagggctgctccgtgttgtcctcctcttcccactccacgttcttcccctcctcgccatacaaccagcagcaccaagcgaagtacacgaagttcgccacgccgtagcccgtgagcagccagtagtaatagtcgtagcggccgacgttcaagttgtcgacgagccagcccgttcccaccccttgcccgctcgccacctgcaccaccttcacgatgagggcgccggccaggttgcccactccgaaggccatgtacagcagcgacatgctgaagctggccatgctcttgggcagctcggtgtacaagaactcgatctccccgatgacgccgaacgcctcggcgagccccacaagcgcgaactgcggcacgagccagaacgccgagatggtgaccccgcgctgcgccagccgcctccgctcgccctccaccgccgcggagacagccgtcgacgcggtggcgaggagcaggcccccaccgatgcgctgcttcatggtgagcccgtgcgggttgcccgtgtaccgctgcagtgccggcgcgacccacctgtcgtagcaggccgaccacagcgacatggtggccatgttgaagacggccaaggagccgctgggaacgcggaacccgcccgcgccgacgcgccggtccatagcatcggcctgcttaacggcgaagctctggttcatggcaagggcgaggaagatggtggaggaccagatcggcaggacgcggatcgccgacttgagctgctccacctggtccaccgtgcacagcctcgtcccgtcgtggccgtgccgctcggaggccgccgccgccgcgtccgagccgttgcagggcgcgtcgtccttggtggcacggagcaagcacgccttgttcaagaacctgaacgtacgtacgtacgcagctcaaaacgccaacgtgttcgtcacaccacgcatccttctgccagctagctagctgcatgttgggggggacgggacgtgacgtatatacctcagcttgtccgtggggacagcgagcttgcagtccttgaggtgatggtacacgccatcgacggtcttgtccggcaaccgcgccccgtggttcctgatcgccgcggcgacggcggtgcctatcccggcgaacatccgcctctcgcccttctccttgatgtataggctcgatcccagcaagaagctgaccgcggagagcagcatgaggcccatcgggacggcgaacccgacgctccacccgacgttgtcctgcaggtagacgatggccgtgacggcgaccgtgaaggccacgccgatggacgcgtagtaggcgttgaagtaggattgcaggatgctggcccggcgctgcctggggtgcctggagaactggtccgcgccgaacgccatggagcacggccggacgccgccggcgccgagggacaggaacgcgaagccggcgagcagccacgcgaggtgcctcgtccccggcggcgcgcactggtcgccgctgcacggag

SEQ ID NO: 36463 - DNA, 3816 bp, Zea Mays
atccctggtggcagagcccgagcagcgaccgccgaggttgagacttgagagacctatgaaaccgcgaggcgccgcacaccaaccaacccccgggctgcccgtaaatgcggacacaggcgtgggggcgcggggcggtggcgcgcttgatgacgccattcaatcgccgcgcggcccacgcctcttctccccacctgctccgcgcctgctcatccgcctcttataccatcgctctcgctcgcctccgacgccacttcacctcttctgcttccttctccccagcatacagtgccagacaggatacccacacattcatggaggtggttcaagaagtccttaggcatggctcagcagatagtgtccgtgctgtcataagagctaacaaaaagagctacagccttgtccagctcattgcagcctcttttgatgtctacaacattttgtgcagcaaaaatatgacaccaaatgggatgcaagattcttcttccaaaggaagaaatggaacaggattccttcatggagctcgtgttggcattgtggctaaaccctctcctgaatttgttgctggggtatttggaacctggctttctggtggagttgcagtaccccttgcccttagctatccagaagctgagcttcttcatgtcatgaatgactcagatatttcaatggttttaagcaccaaggagcatcacgaaatcatggagaacctttctatcaagtgttctgcttattgttctattcttccatctgtcactagtataccttcagaaatcaatcctcaagaaccttcaagcaatgaggcgatttcatcagtctctactttaataactgagaccaacagttcaaagaaaatcaaaggcgatgaccctgctcttatcctttacacaagtggcacaactggtaaacctaaaggagtagttcacacccatgagggcattctttctcaggttcagattctatctgaagcgtggggatatcgaagtgaagaccaatttctgcactgtctcccgctgcaccatgtgcatgggcttttcaatgctctatttgcgcccctttattcaggatcagtggttgagtttataccaaaattcagtgtaagcgggatatggcagagatggcgagaatcatatcccaacgatgcgagtaaaagttccaaccatgtatacacgtctgctgcaagggtatgatagtatggatcctgatcaaaagtcggcctcttcttacgctgcaaagcatctgaggttaatgatgtgtggatcatcagctcttccttccccacttatgaagaggtgggaggaagtgacaggccatcgtcttttggaacgctatggtatgactgagtttgtcatggcactgtctaatccattgcatggtatccgaaaagaaggtacagttggtaaacctcttccacgcattgaggccaagatcattatggaggacggggctgaaactacaactggagttggcgagctctgcattagaagtccatctcttttcaaggagtattggaaaagaccagaggtcaccgcagaatctttcattgatggaggattcttcaagacaggtgatacagtaactgtagatgaggaaggatacttcataattttgggacgcacaaatgccgacattatgaaatttggcggttacaagctgtcagcattagaaattgaggcagtactgttagagcatgatgctgtactggaatgtgctgtccttggcttgcctgatgaagcctatggggaggttatatgtgcaataattgtgcctaaggaggatgcaaagaaaaaggctggacaggactcaaagccagcgctaaccttggaagcattaacaagttggtcgaaagataagcttgctccatacaagattccaacaagactatacttgtgggattctcttcctcggaatgccatgggaaaggttaacaagaaggagctgaagaaattgttaggagcttagccatgtgtatagatgtatttatctcttcatttccttcttaaagtttagcaagtcgggctcattatattgattagcgaataagtgctttcgttaccatggaccaataatcttcgaaacggcctgagttagactgcacacacatttatttatcagaaaagtttctagtcacactgcgcagtatcgatgttatgcattgacttgtaggaagactaataaacctcctctgctggtgaccctgacaagtctaaacaacagtaactaataggctagtaaagttaactagatgttttatactaccacatgcattgaacattcaacctccagaagttcattgtttcagccctacagggctcacaggagtcccagccatacaggactagggctgctccgtgttgtcctcctcttcccactccacgttcttcccctcctcgccatacaaccagcagcaccaagcgaagtacacgaagttcgccacgccgtagcccgtgagcagccagtagtaatagtcgtagcggccgacgttcaagttgtcgacgagccagcccgttcccaccccttgcccgctcgccacctgcaccaccttcacgatgagggcgccggccaggttgcccactccgaaggccatgtacagcagcgacatgctgaagctggccatgctcttgggcagctcggtgtacaagaactcgatctccccgatgacgccgaacgcctcggcgagccccacaagcgcgaactgcggcacgagccagaacgccgagatggtgaccccgcgctgcgccagccgcctccgctcgccctccaccgccgcggagacagccgtcgacgcggtggcgaggagcaggcccccaccgatgcgctgcttcatggtgagcccgtgcgggttgcccgtgtaccgctgcagtgccggcgcgacccacctgtcgtagcaggccgaccacagcgacatggtggccatgttgaagacggccaaggagccgctgggaacgcggaacccgcccgcgccgacgcgccggtccatagcatcggcctgcttaacggcgaagctctggttcatggcaagggcgaggaagatggtggaggaccagatcggcaggacgcggatcgccgacttgagctgctccacctggtccaccgtgcacagcctcgtcccgtcgtggccgtgccgctcggaggccgccgccgccgcgtccgagccgttgcagggcgcgtcgtccttggtggcacggagcaagcacgccttgttcaagaacctgaacgtacgtacgtacgcagctcaaaacgccaacgtgttcgtcacaccacgcatccttctgccagctagctagctgcatgttgggggggacgggacgtgacgtatatacctcagcttgtccgtggggacagcgagcttgcagtccttgaggtgatggtacacgccatcgacggtcttgtccggcaaccgcgccccgtggttcctgatcgccgcggcgacggcggtgcctatcccggcgaacatccgcctctcgcccttctccttgatgtataggctcgatcccagcaagaagctgaccgcggagagcagcatgaggcccatcgggacggcgaacccgacgctccacccgacgttgtcctgcaggtagacgatggccgtgacggcgaccgtgaaggccacgccgatggacgcgtagtaggcgttgaagtaggattgcaggatgctggcccggcgctgcctggggtgcctggagaactggtccgcgccgaacgccatggagcacggccggacgccgccggcgccgagggacaggaacgcgaagccggcgagcagccacgcgaggtgcctcgtccccggcggcgcgcactggtcgccgctgcacggag

SEQ ID NO: 36464 - DNA, 3744 bp, Zea Mays
atccctggtggcagagcccgagcagcgaccgccgaggttgagacttgagagacctatgaaaccgcgaggcgccgcacaccaaccaacccccgggctgcccgtaaatgcggacacaggcgtgggggcgcggggcggtggcgcgcttgatgacgccattcaatcgccgcgcggcccacgcctcttctccccacctgctccgcgcctgctcatccgcctcttataccatcgctctcgctcgcctccgacgccacttcacctcttctgcttccttctccccagcatacagtgccagacaggatacccacacattcatggaggtggttcaagaagtccttaggcatggctcagcagatagtgtccgtgctgtcataagagctaacaaaaagagctacagccttgtccagctcattgcagcctcttttgatgtctacaacattttgtgcagcaaaaatatgacaccaaatgggatgcaagattcttcttccaaaggaagaaatggaacaggattccttcatggagctcgtgttggcattgtggctaaaccctctcctgaatttgttgctggggtatttggaacctggctttctggtggagttgcagtaccccttgcccttagctatccagaagctgagcttcttcatgtcatgaatgactcatataccttcagaaatcaatcctcaagaaccttcaagcaatgaggcgatttcatcagtctctactttaataactgagaccaacagttcaaagaaaatcaaaggcgatgaccctgctcttatcctttacacaagtggcacaactggtaaacctaaaggagtagttcacacccatgagggcattctttctcaggttcagattctatctgaagcgtggggatatcgaagtgaagaccaatttctgcactgtctcccgctgcaccatgtgcatgggcttttcaatgctctatttgcgcccctttattcaggatcagtggttgagtttataccaaaattcagtgtaagcgggatatggcagagatggcgagaatcatatcccaacgatgcgagtaaaagtacagaggccattacagtatttactggagttccaaccatgtatacacgtctgctgcaagggtatgatagtatggatcctgatcaaaagtcggcctcttcttacgctgcaaagcatctgaggttaatgatgtgtggatcatcagctcttccttccccacttatgaagaggtgggaggaagtgacaggccatcgtcttttggaacgctatggtatgactgagtttgtcatggcactgtctaatccattgcatggtatccgaaaagaaggtacagttggtaaacctcttccacgcattgaggccaagatcattatggaggacggggctgaaactacaactggagttggcgagctctgcattagaagtccatctcttttcaaggagtattggaaaagaccagaggtcaccgcagaatctttcattgatggaggattcttcaagacaggtgatacagtaactgtagatgaggaaggatacttcataattttgggacgcacaaatgccgacattatgaaatttggcggttacaagctgtcagcattagaaattgaggcagtactgttagagcatgatgctgtactggaatgtgctgtccttggcttgcctgatgaagcctatggggaggttatatgtgcaataattgtgcctaaggaggatgcaaagaaaaaggctggacaggactcaaagccagcgctaaccttggaagcattaacaagttggtcgaaagataagcttgctccatacaagattccaacaagactatacttgtgggattctcttcctcggaatgccatgggaaaggttaacaagaaggagctgaagaaattgttaggagcttagccatgtgtatagatgtatttatctcttcatttccttcttaaagtttagcaagtcgggctcattatattgattagcgaataagtgctttcgttaccatggaccaataatcttcgaaacggcctgagttagactgcacacacatttatttatcagaaaagtttctagtcacactgcgcagtatcgatgttatgcattgacttgtaggaagactaataaacctcctctgctggtgaccctgacaagtctaaacaacagtaactaataggctagtaaagttaactagatgttttatactaccacatgcattgaacattcaacctccagaagttcattgtttcagccctacagggctcacaggagtcccagccatacaggactagggctgctccgtgttgtcctcctcttcccactccacgttcttcccctcctcgccatacaaccagcagcaccaagcgaagtacacgaagttcgccacgccgtagcccgtgagcagccagtagtaatagtcgtagcggccgacgttcaagttgtcgacgagccagcccgttcccaccccttgcccgctcgccacctgcaccaccttcacgatgagggcgccggccaggttgcccactccgaaggccatgtacagcagcgacatgctgaagctggccatgctcttgggcagctcggtgtacaagaactcgatctccccgatgacgccgaacgcctcggcgagccccacaagcgcgaactgcggcacgagccagaacgccgagatggtgaccccgcgctgcgccagccgcctccgctcgccctccaccgccgcggagacagccgtcgacgcggtggcgaggagcaggcccccaccgatgcgctgcttcatggtgagcccgtgcgggttgcccgtgtaccgctgcagtgccggcgcgacccacctgtcgtagcaggccgaccacagcgacatggtggccatgttgaagacggccaaggagccgctgggaacgcggaacccgcccgcgccgacgcgccggtccatagcatcggcctgcttaacggcgaagctctggttcatggcaagggcgaggaagatggtggaggaccagatcggcaggacgcggatcgccgacttgagctgctccacctggtccaccgtgcacagcctcgtcccgtcgtggccgtgccgctcggaggccgccgccgccgcgtccgagccgttgcagggcgcgtcgtccttggtggcacggagcaagcacgccttgttcaagaacctgaacgtacgtacgtacgcagctcaaaacgccaacgtgttcgtcacaccacgcatccttctgccagctagctagctgcatgttgggggggacgggacgtgacgtatatacctcagcttgtccgtggggacagcgagcttgcagtccttgaggtgatggtacacgccatcgacggtcttgtccggcaaccgcgccccgtggttcctgatcgccgcggcgacggcggtgcctatcccggcgaacatccgcctctcgcccttctccttgatgtataggctcgatcccagcaagaagctgaccgcggagagcagcatgaggcccatcgggacggcgaacccgacgctccacccgacgttgtcctgcaggtagacgatggccgtgacggcgaccgtgaaggccacgccgatggacgcgtagtaggcgttgaagtaggattgcaggatgctggcccggcgctgcctggggtgcctggagaactggtccgcgccgaacgccatggagcacggccggacgccgccggcgccgagggacaggaacgcgaagccggcgagcagccacgcgaggtgcctcgtccccggcggcgcgcactggtcgccgctgcacggag

SEQ ID NO: 36465 - DNA, 2527 bp, Zea Mays
atccctggtggcagagcccgagcagcgaccgccgaggttgagacttgagagacctatgaaaccgcgaggcgccgcacaccaaccaacccccgggctgcccgtaaatgcggacacaggcgtgggggcgcggggcggtggcgcgcttgatgacgccattcaatcgccgcgcggcccacgcctcttctccccacctgctccgcgcctgctcatccgcctcttataccatcgctctcgctcgcctccgacgccacttcacctcttctgcttccttctccccagcatacagtgccagacaggatacccacacattcatggaggtggttcaagaagtccttaggcatggctcagcagatagtgtccgtgctgtcataagagctaacaaaaagagctacagccttgtccagctcattgcagcctcttttgatgtctacaacattttgtgcagcaaaaatatgacaccaaatgggatgcaagattcttcttccaaaggaagaaatggaacaggattccttcatggagctcgtgttggcattgtggctaaaccctctcctgaatttgttgctggggtatttggaacctggctttctggtggagttgcagtaccccttgcccttagctatccagaagctgagcttcttcatgtcatgaatgactcagatatttcaatggttttaagcaccaaggagcatcacgaaatcatggagaacctttctatcaagtgttctgcttattgttctattcttccatctgtcactagtataccttcagaaatcaatcctcaagaaccttcaagcaatgaggcgatttcatcagtctctactttaataactgagaccaacagttcaaagaaaatcaaaggcgatgaccctgctcttatcctttacacaagtggcacaactggtaaacctaaaggagtagttcacacccatgagggcattctttctcaggttcagattctatctgaagcgtggggatatcgaagtgaagaccaatttctgcactgtctcccgctgcaccatgtgcatgggcttttcaatgctctatttgcgcccctttattcaggatcagtggttgagtttataccaaaattcagtgtaagcgggatatggcagagatggcgagaatcatatcccaacgatgcgagtaaaagtacagaggccattacagtatttactggagttccaaccatgtatacacgtctgctgcaagggtatgatagtatggatcctgatcaaaagtcggcctcttcttacgctgcaaagcatctgaggttaatgatgtgtggatcatcagctcttccttccccacttatgaagaggtgggaggaagtgacaggccatcgtcttttggaacgctatggtatgactgagtttgtcatggcactgtctaatccattgcatggtatccgaaaagaaggtacagttggtaaacctcttccacgcattgaggccaagatcattatggaggacggggctgaaactacaactggagttggcgagctctgcattagaagtccatctcttttcaaggagtattggaaaagaccagaggtcaccgcagaatctttcattgatggaggattcttcaagacaggtgatacagtaactgtagatgaggaaggatacttcataattttgggacgcacaaatgccgacattatgaaatttggcggttacaagctgtcagcattagaaattgaggcagtactgttagaggtaaactcggatacgctggaactactttcgtagtgtagtagccactacatgatatctaaagaatcagctgatgttgtcctcaaatttagtctaacaagtggatgcataatatgtcatgtgcggtcgcacataaacgcgccgcaggcgtgcacgcgatgttcgccgcgccgctgaacgcgcagtgcgcgcgctggaacagccaggcaatcaggattagttgccttgttgggtgcctagaatttaggagtgattagctcctggcggttcagataagttagaaagtcaggattagctgccttgttggttgcctagaatttaggagtgattagctccttgcggtttagatttgggcctatatattgtaattggtgggatgaggaaattatgcagaatttatcaccaacctaatctccccttccccaactctctctactcggtgtcttgggggcataacccagacaacaaagggcgacggcgtgggggaataaccccgccggcgaccatggagcgcaactacgatcttcgtagtcgcggtccggttaccctcggaccggaggtccttgacaacctggtatcatgagttcgacgatcctcgtcatcgacgtcaaccaccaccaccaccaccaccacatccatccactcgcctcgcccaccctcaccgtcctcttccacagcctcgacggccatgggagaccaacccactatcgccgacgtcatgaaaaagctcctggacatgtccgccgagatgacagccctaaaggccgacatggagggcatgaaggagaggaccgcctcgtcctcggcaaatggca

SEQ ID NO: 36466 - DNA, 2993 bp, Zea Mays
gggaaaatccactaatcccccacccaagctcaaaacccgccataaacacgcgtcggagcttgtggcgagcgccgccaccctgcactcggctgcggggcctccgcccccttcgatctgtagccggccgcggcgatcccgcagcggccccccgcggctgccgcgaattggttttgtgttacgttaccggtgggcggtgggcggaggcgttttgatcctgtagctgccggcttgagtagatggagggcaatgaacagggctgtggagggctgccgcaaaggcctcccgtgctcggtgcgtccatgcaaccgccgattaagaagctggtaaggcagctcgacttcaactcggcggcattggcgggaaaccccgcgatggcggtggccgccgccgccgtatctagggttctgcagccgaaggcgtcgtccgtggggttccagcatccgcagcacgtgggggctgccatgccgatgggagtaccgcagcagctgcaccagcgtgtgctgccggtgatgcgcctgcatcaggtggtggggcatgtgccgctggcggtctctgtaccgcagcttcgtccggtgccgccgcagccagtccagcgccccccggtcgccgttcccttgaaaccagagtcaccaaaactacgggcaagactgtacgaagggaaagatagtactcccacgaagaagaagtgctgcaactgcaggaattccaaatgtctgaagttgtactgtgaatgctttgcttctggtacttactgtgatggttgcaactgcaccaactgttttaataatcctgataatgaggttgccaggcgtgaagctgttgaagctatattggatcgtaatccagatgctttcaggcctaagattgggagcagcccacatatgcataggaataatgtatcttctgtggtccaaatattgttcgcttactttctaaaggaacatttattgctattggttttcctttgagtttcagttatagtttatgcaaattgggagagtttgaattaaaggaccattctagctcaagggaaaaaggagaacattccaataaaattataccagaagtttcctgataaatcctgacatcttaaagttattttttgagtaatttatgcctgcaattcattttctctaaattactgaagcatcatgcctctttggaaatgtgtatcaatgtagttagatttgtgtgtgtgcttggcagtttgtaaatccaaatttgaatcctcaaagtttaaatcaacataccatatttgacattgtctgaaatggaaatttgctgttgttgaaccttaatcaagctcttgtctctttattaaactattattgataagttttctgtaaaaaatataacctggtaaagtaggaagaagacaaggtttgtaaaaagtcaagattcagtctccctgcaaaatatttgtcacctctgtcctcataaacaagcgcatgatttctttccttttgcttatactaatattaagcccacctccagccaaaaaaaagctgttctagaatacgccaacttttataatttgttcacctcttcacaaaatatacttatatttgttaaaaaaaatcatggattcaccagcaaaagtgcttcagtgtaattataatgttattgattttctataggcgcgtcagagactgtattgtcaccttaggtaacaagaaatttggactgtaggacacatgtagtattttagctgaaaaggataatgtttccaataggaaggtcacatccatattttctcttgttatccatagctagcagtagtaattgggatctgatgagattttgataaatcaaatatgctattgcattaaccttagaccctaaccctattctatttattatcaattacaggcattatatcattattgcatttcatttcggccatgttattgtgctgccttgacacgtcacattaattctagtccatgaaattttgccaggaggtgcctagtgatctccctttagtagggaagcataataaagggtgccattgcaagaagtcaggatgtctcaagaagtactgtgagtgcttccaagctaatatactatgctctgaaaactgcaagtgcatggattgcaagaattttgaaggaagtgaagagagaagaaatcttttccaaggggatcacaaaaatgcaattaacatgcagcaggtgacaaatgcagcagtaaatggtgctattggagcaacaggattcccttctccttccacatcaaggaagaggaaacataatgatccttcacttgaccatttcaataaggaacatatagcgcacaagaattatcacatacctcaggagcaagctgaagtgccttgttacattactaggagtgtgagttttttcccatgatgaattggattgatgaatagcgcctcaaaacttttctttttacgtgacaaagcagtgttagctccttatcctctacttctaatagataaatgtgcaagcacaccagtagtctagtgattgtgtagagaattaggaaacaactcacacccattagggaggggtgactttcgtatatacaaccaggatacaacttggagtacaagtaaggagtgactttcgtgtatatatagctaggatacaacttggagtacaagtaagatacaaacacatatgtagactatatatctctaatacacatccgcagtcacaacaggagggaattggatgcagagaatgggtcggaagccactaaacacctgtacatacagtccctttgtcatgatgtctgcaaatgatgtgcagaggggacatgtaacactcgaacctgccccaaagtaactttcttatggacgaagtggatgttaatctcagtgtgcttcgtgtgacgatgatgaaccaaattgttagtcatatagatagactgcactataactgtcgcaatagacaatggtcactgaaggaatcgagacatgaagcttctgaagcagctgtagcaaccaacaacactcgccaactgtatgtgca

SEQ ID NO: 36467 - DNA, 2562 bp, Zea Mays
cttgtgccttgtgttcactgtccaataattcttgtctgcatcttctagggagtacactgtgtaggttgatgttgaacaacggttctggcttgctagttgctagcgcactgcttttaggctgctagctggtgcatgctaggttgctggcgtgagtttgcagcacggacagggctagagcgcgctgctgctggtctgaatccgccactggttgcttcgatggttagtgcttcattgaattacgcgtccaaggtacaatagctaatagtaatgccatgccatccatttatgtcatcgttatcatatccatggttgatggtagtacaagcctccaaggagagacctgacggcgcatctccggcaaagagtagcgagagggcttcttcttcctccaagcccccactccccgaccgttcaatacacgggaagcacaagcacatgcaggggaaggaggctaagaatggcaggcgcctttctaataataaagcgagtgccactcccaaaataaaactcactcctgtctaaccctgccagcggtccggggcctcctcccctattcggacaggaaaggggcagatgacgatccatagaaaccgattcatggattgcagacacccacaggaatcatccatcattcggagctaatcattcatcgggcctttcggctctttctgctcgcgcacaatcttggctagctcgtcctttccggcgacacccgcgctacgttcgaggccgcgaaagctgccgcacactttacagatcgctcgatgaacgccggtgcgcagcttgagcggcggagctcggtgcggcggtcgcagagcatggtgcaggaggaggacaggggccagccgcccgacgaggagctcatgtcccggagccagggctccagcacggagccgtcgggcggggcgctcaggaccggcggcgccgtgcccgacaaggacagcgcgacgcccaagccgcgcctcgccgaacagagcgcgggaccttccgagatggacctgatgaaggagaagttcgccaagctgctgctcggggaggacatgtccgggtccgggaaaggggtgccctcggcgctcgccctctccaacgccgtcaccaacctcgcagcttctgtgttcggcgagcaacggaagctggagcccatggccccggacagaaaggggaggtggaagagagaagtgggctggcttctgtccgtcgctgaccacatcgtcgagttcgtcgccaagaaacaagtcctggacaacggcaccgaaatggaggtgatgggcacgcagcagagacgggatctccaggccaacattccagcattgcgtaaactggacacgatgcttctcgactacctggataacttcaaggaacgcaacgagttctggtacgtgaagcgcgactcgtgctcagagagcgagaacgaggagaggtccgacgagaaatggtggatcccgatcgtcaaggtgccccccggcgggctttccaagacctctagaggctggctcctgcaccagaaggagctggtgaaccaggtgctcaaggcggccatggccatcaatgccaactgcctcatggagatgagcatcccggacacgtatatagacacgctccctaagaacgggagagccagcctcggggacgcgctgtaccgaatcatcacagatgtggagttcgacccggacgacttcctgtcgacggtggacctgacgtcggagcacaagatcctggacctcaaggaccggatcgaggcatcggtcatcatctggaacaggaaggtgcacaacaaggacggcaagtcctcttggggctccgccgtcagccaggagaagagggagcagttcgaggagcgggcgcagacactgctgctcatcatcaagcacaggttccccggaatcccccagtccacgctcgacatcgcaaagatccaagagaacagggacgtcgggtttgcgctgcttgagagctactccagggtcctggagagcctggcgttcaacgtcatgtcccggatagaggacgtcatccaggccgacaacctggctagggagaaggccaagaagaacgcgccgcccgcagcagaccccgccgccggacgccgcggcccgcaggaggccggtggcgacgacgacgaccagagcaagacgaccctgctggacttcatggggtggactggggactccgagggcaagaacgacgacgcatctcccccgccgccacccgagctgccggcgcaggacgacggcaggctgatgaagctgccaaacatcatgaccaacctcaagcagacgtacatggataagctggacttcctcagcgggaacagaagcccctcaggtcgccattagagacgcgacacgacacgagatttttgcatgtatcgtgtgaggtagtgtacatatatatttttggattgtgtcaaactgggctctctcttgagtagcccgtgccgtgtcacttcctgattttgcagacacgtgacattctcttctcatgtacgagtacgattccaagggattggccattgtatcaggtacatcaataaatagacaaaaaatagagctaacagaactt

SEQ ID NO: 36468 - DNA, 616 bp, Zea Mays
cttgaggaggcattccatcgaacaccgtccttgcctcgcccaggtcgccgcatttcagcctccaacgaccgctcctccccgcagagctgaacgaccgtgcagtagctccgcacatctacgccgccgtcagagcccagcagcctcagagcgcatgcgaggtcacccgcctgacagaggcgctggattcgcaggttcacgtcggagctcagggctcgacttggcggattcttggtgctccatgagcttggagcagtggtgggggaagtgcccccgagatccgacccgctttcatcattggatcgggcgggcgcggcgcggaggggaggacgtcgggggcggccatggcgcggtggaggaggatgtcgcgggggatccgcagactgctttcctggatctcatcgcggcgtgtgcggcgggcgtggtggagacgcacgacgtgaggcgtgcacggcgtggtgggggaggatgtcggggtgggacagactaggcgtgcgcgatgagatcctggacggtgagcggagggggaggatgtcgaggcaggtagccgatgatggcggagatgaaagcgtgaccgagatgcatggagcgtcgggaggcagaacgcgcacggtgtgga

SEQ ID NO: 36469 - DNA, 984 bp, Zea Mays
cttttgtgaagcttgttaactgaaaggtcaggggcgcatgtggaatatccttttgtgaagcttgttaactgaaagaagctgaaatgaagcgtgaagttgagaggaaggaacaggagaagaaaaggagcccaaaagttgaatttattactggagtacaacccccaatcaatgcatcaataccgaagatcccaggtttggctggtgtctgtacactaccggtacctacagaaggtgtacagaaagagactagaccaaacaagaaatcaaaatgggataaggttgatggtgatgttaagaaccatgtggttcctagtggacacgacaacttatcagcaactactgcggcactcttgacttcagctaatgttggtgctggatacgctggttttgcgcaacaaaagagaaaagaggccgaagaaaagaaaaacgatcataagtcagacagaagatcgtagcaccaccttttgtttcattctgagcagtcagcgtatcatttattttttttcagtgacatagttttgtaatgtggatagagaaaagaaggaaacaattaaaaccaatcctagggaaatggtttcagaaaagccctctgggcaacttggtagtcttgtattatacaggtaccagaaacttaacattttagaccaagaaaaagagaaccgtgagcgttctgcacttctgccgcctgttacagtggtcaattatgtgtttttgcattcagctcattggtctgccgcttgaatgctgggattttaaatcgccaaccatttatttatcatcgatggtcacctaatctttatgtcttgatcgtttatttttatttcatatcgattgggtgcgacatatatatttggacttgatatagatttaaactgacttaattctactcaattttagatcaaaatgaatgaccctttaggggtgttgactaaattttagtctctttattttagtttttaaacataaaaactaaaataaatataa

SEQ ID NO: 36470 - DNA, 2085 bp, Zea Mays
cctaaaatcctccgcctccttcctcgccgtttcgggcctcgcctcgtccccaaatccaacccttcgtactcagtttccatcattggcatggcgtccgataccgagggcatcgccgccctcttctcgatgtacaacgacgacgaggaagaggaggatgccgacgagcccagccctcctttcccagcgcttcccgccgccgtcacctcctcctcgccgctgtcccctcaagccggggccgaggaccccaacccttctgtggcgcctccgtcaccttcccgtcccgaggaattggccagtctcaaaaccctagcgagtccccacccttccccggcgcgggggctgcttccgccacttccctcgcggcgctcttcatcaccctttgcagtgtcgtccccctccccgctacggggaccgttcttcgcgccgccggcagacctgccgcgccctccgcggcgcggggcgcttgcaatcgtggactatgcgcacgacgagacggctatgtcgcccgagcaggagtatggattgcttgtaggatggggagatcacgagcaacacatacggatttggctcagatgctcaggctgcagaggggaatcttgaagaacgaacttactccggcacagttcatgttatgaccccaaatactctagcagaattgtctcagcatcctgatgcacccgagcagaaccaagtagggacagacatggcagtggacgtaactagaacagaaattaaaggtgcccaggtggaaggaactactgatatttcaactaatggtgaaagtgatgatccatcaaatcgtttccttcctccacccgtgactacaaaatgctctgcagcattacagcaaaaaattaacaggttccttgcatacagaagggctggaaagagctttaatgctgaagtgcgcaacaggaaggactacagaaatcctgactttttgcagcatgctgtgggataccaagaaattgatcagatagggacctgtttcagtaaatatgtttttgatccttatgggtacgacaaaggcgactactatgatgagatagggacagatatttcagccgttaaagacaatttggcaccaatacggaacattcagttttgtctgtttggtgatacataatggtattccaatttacaattttacatcttatctgttctatttgagtgcagaagctgaaatgaagcgtgaagttgagaggaaggaacaggagaagaaaaggagcccaaaagttgaatttattactggagtacaacccccaatcaatgcatcaataccgaagatcccaggtttggctggtgtctgtacactaccggtacctacagaaggtgtacagaaagagactagaccaaacaagaaatcaaaatgggataaggttgatggtgatgttaagaaccatgtggttcctagtggacacgacaacttatcagcaactactgcggcactcttgacttcagctaatgttggtgctggatacgctggttttgcgcaacaaaagagaaaagaggccgaagaaaagaaaaacgatcataagtcagacagaagatcgtagcaccaccttttgtttcattctgagcagtcagcgtatcatttattttttttcagtgacatagttttgtaatgtggatagagaaaagaaggaaacaattaaaaccaatcctagggaaatggtttcagaaaagccctctgggcaacttggtagtcttgtattatacaggtaccagaaacttaacattttagaccaagaaaaagagaaccgtgagcgttctgcacttctgccgcctgttacagtggtcaattatgtgtttttgcattcagctcattggtctgccgcttgaatgctgggattttaaatcgccaaccatttatttatcatcgatggtcacctaatctttatgtcttgatcgtttatttttatttcatatcgattgggtgcgacatatatatttggacttgatatagatttaaactgacttaattctactcaattttagatcaaaatgaatgaccctttaggggtgttgactaaattttagtctctttattttagtttttaaacataaaaactaaaataaatataa

SEQ ID NO: 36471 - DNA, 1996 bp, Zea Mays
cctaaaatcctccgcctccttcctcgccgtttcgggcctcgcctcgtccccaaatccaacccttcgtactcagtttccatcattggcatggcgtccgataccgagggcatcgccgccctcttctcgatgtacaacgacgacgaggaagaggaggatgccgacgagcccagccctcctttcccagcgcttcccgccgccgtcacctcctcctcgccgctgtcccctcaagccggggccgaggaccccaacccttctgtggcgcctccgtcaccttcccgtcccgaggaattggccagtctcaaaaccctagcgagtccccacccttccccggcgcgggggctgcttccgccacttccctcgcggcgctcttcatcaccctttgcagtgtcgtccccctccccgctacggggaccgttcttcgcgccgccggcagacctgccgcgccctccgcggcgcggggcgcttgcaatcgtggactatgcgcacgacgagacggctatgtcgcccgagcaggaggatggggagatcacgagcaacacatacggatttggctcagatgctcaggctgcagaggggaatcttgaagaacgaacttactccggcacagttcatgttatgaccccaaatactctagcagaattgtctcagcatcctgatgcacccgagcagaaccaagtagggacagacatggcagtggacgtaactagaacagaaattaaaggtgcccaggtggaaggaactactgatatttcaactaatggtgaaagtgatgatccatcaaatcgtttccttcctccacccgtgactacaaaatgctctgcagcattacagttctcttctcttttcatgtttcgtggaagcgtcatggcaatgttgctattcaggcatctacacaccttcacattaattcttgtaagggctggaaagagctttaatgctgaagtgcgcaacaggaaggactacagaaatcctgactttttgcagcatgctgtgggataccaagaaattgatcagatagggacctgtttcagtaaatatgtttttgatccttatgggtacgacaaaggcgactactatgatgagatagaagctgaaatgaagcgtgaagttgagaggaaggaacaggagaagaaaaggagcccaaaagttgaatttattactggagtacaacccccaatcaatgcatcaataccgaagatcccaggtttggctggtgtctgtacactaccggtacctacagaaggtgtacagaaagagactagaccaaacaagaaatcaaaatgggataaggttgatggtgatgttaagaaccatgtggttcctagtggacacgacaacttatcagcaactactgcggcactcttgacttcagctaatgttggtgctggatacgctggttttgcgcaacaaaagagaaaagaggccgaagaaaagaaaaacgatcataagtcagacagaagatcgtagcaccaccttttgtttcattctgagcagtcagcgtatcatttattttttttcagtgacatagttttgtaatgtggatagagaaaagaaggaaacaattaaaaccaatcctagggaaatggtttcagaaaagccctctgggcaacttggtagtcttgtattatacaggtaccagaaacttaacattttagaccaagaaaaagagaaccgtgagcgttctgcacttctgccgcctgttacagtggtcaattatgtgtttttgcattcagctcattggtctgccgcttgaatgctgggattttaaatcgccaaccatttatttatcatcgatggtcacctaatctttatgtcttgatcgtttatttttatttcatatcgattgggtgcgacatatatatttggacttgatatagatttaaactgacttaattctactcaattttagatcaaaatgaatgaccctttaggggtgttgactaaattttagtctctttattttagtttttaaacataaaaactaaaataaatataa

SEQ ID NO: 36472 - DNA, 1958 bp, Zea Mays
cctaaaatcctccgcctccttcctcgccgtttcgggcctcgcctcgtccccaaatccaacccttcgtactcagtttccatcattggcatggcgtccgataccgagggcatcgccgccctcttctcgatgtacaacgacgacgaggaagaggaggatgccgacgagcccagccctcctttcccagcgcttcccgccgccgtcacctcctcctcgccgctgtcccctcaagccggggccgaggaccccaacccttctgtggcgcctccgtcaccttcccgtcccgaggaattggccagtctcaaaaccctagcgagtccccacccttccccggcgcgggggctgcttccgccacttccctcgcggcgctcttcatcaccctttgcagtgtcgtccccctccccgctacggggaccgttcttcgcgccgccggcagacctgccgcgccctccgcggcgcggggcgcttgcaatcgtggactatgcgcacgacgagacggctatgtcgcccgagcaggagtatggattgcttgtaggatggggagatcacgagcaacacatacggatttggctcagatgctcaggctgcagaggggaatcttgaagaacgaacttactccggcacagttcatgttatgaccccaaatactctagcagaattgtctcagcatcctgatgcacccgagcagaaccaagtagggacagacatggcagtggacgtaactagaacagaaattaaaggtgcccaggtggaaggaactactgatatttcaactaatggtgaaagtgatgatccatcaaatcgtttccttcctccacccgtgactacaaaatgctctgcagcattacagcaaaaaattaacaggttccttgcatacagaagggctggaaagagctttaatgctgaagtgcgcaacaggaaggactacagaaatcctgactttttgcagcatgctgtgggataccaagaaattgatcagatagggacctgtttcagtaaatatgtttttgatccttatgggtacgacaaaggcgactactatgatgagatagaagctgaaatgaagcgtgaagttgagaggaaggaacaggagaagaaaaggagcccaaaagttgaatttattactggagtacaacccccaatcaatgcatcaataccgaagatcccaggtttggctggtgtctgtacactaccggtacctacagaaggtgtacagaaagagactagaccaaacaagaaatcaaaatgggataaggttgatggtgatgttaagaaccatgtggttcctagtggacacgacaacttatcagcaactactgcggcactcttgacttcagctaatgttggtgctggatacgctggttttgcgcaacaaaagagaaaagaggccgaagaaaagaaaaacgatcataagtcagacagaagatcgtagcaccaccttttgtttcattctgagcagtcagcgtatcatttattttttttcagtgacatagttttgtaatgtggatagagaaaagaaggaaacaattaaaaccaatcctagggaaatggtttcagaaaagccctctgggcaacttggtagtcttgtattatacaggtaccagaaacttaacattttagaccaagaaaaagagaaccgtgagcgttctgcacttctgccgcctgttacagtggtcaattatgtgtttttgcattcagctcattggtctgccgcttgaatgctgggattttaaatcgccaaccatttatttatcatcgatggtcacctaatctttatgtcttgatcgtttatttttatttcatatcgattgggtgcgacatatatatttggacttgatatagatttaaactgacttaattctactcaattttagatcaaaatgaatgaccctttaggggtgttgactaaattttagtctctttattttagtttttaaacataaaaactaaaataaatataa

SEQ ID NO: 36473 - DNA, 1927 bp, Zea Mays
cctaaaatcctccgcctccttcctcgccgtttcgggcctcgcctcgtccccaaatccaacccttcgtactcagtttccatcattggcatggcgtccgataccgagggcatcgccgccctcttctcgatgtacaacgacgacgaggaagaggaggatgccgacgagcccagccctcctttcccagcgcttcccgccgccgtcacctcctcctcgccgctgtcccctcaagccggggccgaggaccccaacccttctgtggcgcctccgtcaccttcccgtcccgaggaattggccagtctcaaaaccctagcgagtccccacccttccccggcgcgggggctgcttccgccacttccctcgcggcgctcttcatcaccctttgcagtgtcgtccccctccccgctacggggaccgttcttcgcgccgccggcagacctgccgcgccctccgcggcgcggggcgcttgcaatcgtggactatgcgcacgacgagacggctatgtcgcccgagcaggaggtagaatcggtgaagatggggagatcacgagcaacacatacggatttggctcagatgctcaggctgcagaggggaatcttgaagaacgaacttactccggcacagttcatgttatgaccccaaatactctagcagaattgtctcagcatcctgatgcacccgagcagaaccaagtagggacagacatggcagtggacgtaactagaacagaaattaaaggtgcccaggtggaaggaactactgatatttcaactaatggtgaaagtgatgatccatcaaatcgtttccttcctccacccgtgactacaaaatgctctgcagcattacagaagggctggaaagagctttaatgctgaagtgcgcaacaggaaggactacagaaatcctgactttttgcagcatgctgtgggataccaagaaattgatcagatagggacctgtttcagtaaatatgtttttgatccttatgggtacgacaaaggcgactactatgatgagatagaagctgaaatgaagcgtgaagttgagaggaaggaacaggagaagaaaaggagcccaaaagttgaatttattactggagtacaacccccaatcaatgcatcaataccgaagatcccaggtttggctggtgtctgtacactaccggtacctacagaaggtgtacagaaagagactagaccaaacaagaaatcaaaatgggataaggttgatggtgatgttaagaaccatgtggttcctagtggacacgacaacttatcagcaactactgcggcactcttgacttcagctaatgttggtgctggatacgctggttttgcgcaacaaaagagaaaagaggccgaagaaaagaaaaacgatcataagtcagacagaagatcgtagcaccaccttttgtttcattctgagcagtcagcgtatcatttattttttttcagtgacatagttttgtaatgtggatagagaaaagaaggaaacaattaaaaccaatcctagggaaatggtttcagaaaagccctctgggcaacttggtagtcttgtattatacaggtaccagaaacttaacattttagaccaagaaaaagagaaccgtgagcgttctgcacttctgccgcctgttacagtggtcaattatgtgtttttgcattcagctcattggtctgccgcttgaatgctgggattttaaatcgccaaccatttatttatcatcgatggtcacctaatctttatgtcttgatcgtttatttttatttcatatcgattgggtgcgacatatatatttggacttgatatagatttaaactgacttaattctactcaattttagatcaaaatgaatgaccctttaggggtgttgactaaattttagtctctttattttagtttttaaacataaaaactaaaataaatataa

SEQ ID NO: 36474 - DNA, 1930 bp, Zea Mays
cctaaaatcctccgcctccttcctcgccgtttcgggcctcgcctcgtccccaaatccaacccttcgtactcagtttccatcattggcatggcgtccgataccgagggcatcgccgccctcttctcgatgtacaacgacgacgaggaagaggaggatgccgacgagcccagccctcctttcccagcgcttcccgccgccgtcacctcctcctcgccgctgtcccctcaagccggggccgaggaccccaacccttctgtggcgcctccgtcaccttcccgtcccgaggaattggccagtctcaaaaccctagcgagtccccacccttccccggcgcgggggctgcttccgccacttccctcgcggcgctcttcatcaccctttgcagtgtcgtccccctccccgctacggggaccgttcttcgcgccgccggcagacctgccgcgccctccgcggcgcggggcgcttgcaatcgtggactatgcgcacgacgagacggctatgtcgcccgagcaggaggatggggagatcacgagcaacacatacggatttggctcagatgctcaggctgcagaggaacgaacttactccggcacagttcatgttatgaccccaaatactctagcagaattgtctcagcatcctgatgcacccgagcagaaccaagtagggacagacatggcagtggacgtaactagaacagaaattaaaggtgcccaggtggaaggaactactgatatttcaactaatggtgaaagtgatgatccatcaaatcgtttccttcctccacccgtgactacaaaatgctctgcagcattacagcaaaaaattaacaggttccttgcatacagaagggctggaaagagctttaatgctgaagtgcgcaacaggaaggactacagaaatcctgactttttgcagcatgctgtgggataccaagaaattgatcagatagggacctgtttcagtaaatatgtttttgatccttatgggtacgacaaaggcgactactatgatgagatagaagctgaaatgaagcgtgaagttgagaggaaggaacaggagaagaaaaggagcccaaaagttgaatttattactggagtacaacccccaatcaatgcatcaataccgaagatcccaggtttggctggtgtctgtacactaccggtacctacagaaggtgtacagaaagagactagaccaaacaagaaatcaaaatgggataaggttgatggtgatgttaagaaccatgtggttcctagtggacacgacaacttatcagcaactactgcggcactcttgacttcagctaatgttggtgctggatacgctggttttgcgcaacaaaagagaaaagaggccgaagaaaagaaaaacgatcataagtcagacagaagatcgtagcaccaccttttgtttcattctgagcagtcagcgtatcatttattttttttcagtgacatagttttgtaatgtggatagagaaaagaaggaaacaattaaaaccaatcctagggaaatggtttcagaaaagccctctgggcaacttggtagtcttgtattatacaggtaccagaaacttaacattttagaccaagaaaaagagaaccgtgagcgttctgcacttctgccgcctgttacagtggtcaattatgtgtttttgcattcagctcattggtctgccgcttgaatgctgggattttaaatcgccaaccatttatttatcatcgatggtcacctaatctttatgtcttgatcgtttatttttatttcatatcgattgggtgcgacatatatatttggacttgatatagatttaaactgacttaattctactcaattttagatcaaaatgaatgaccctttaggggtgttgactaaattttagtctctttattttagtttttaaacataaaaactaaaataaatataa

SEQ ID NO: 36475 - DNA, 2023 bp, Zea Mays
gcctaactttggcgagtgggcgagccgacctaaaatcctccgcctccttcctcgccgtttcgggcctcgcctcgtccccaaatccaacccttcgtactcagtttccatcattggcatggcgtccgataccgagggcatcgccgccctcttctcgatgtacaacgacgacgaggaagaggaggatgccgacgagcccagccctcctttcccagcgcttcccgccgccgtcacctcctcctcgccgctgtcccctcaagccggggccgaggaccccaacccttctgtggcgcctccgtcaccttcccgtcccgaggaattggccagtctcaaaaccctagcgagtccccacccttccccggcgcgggggctgcttccgccacttccctcgcggcgctcttcatcaccctttgcagtgtcgtccccctccccgctacggggaccgttcttcgcgccgccggcagacctgccgcgccctccgcggcgcggggcgcttgcaatcgtggactatgcgcacgacgagacggctatgtcgcccgagcaggaggatggggagatcacgagcaacacatacggatttggctcagatgctcaggctgcagaggggaatcttgaagaacgaacttactccggcacagttcatgttatgaccccaaatactctagcagaattgtctcagcatcctgatgcacccgagcagaaccaagtagggacagacatggcagtggacgtaactagaacagaaattaaaggtgcccaggtggaaggaactactgatatttcaactaatggtgaaagtgatgatccatcaaatcgtttccttcctccacccgtgactacaaaatgctctgcagcattacagttctcttctcttttcatgtttcgtggaagcgtcatggcaatgttgctattcagcaaaaaattaacaggttccttgcatacagaagggctggaaagagctttaatgctgaagtgcgcaacaggaaggactacagaaatcctgactttttgcagcatgctgtgggataccaagaaattgatcagatagggacctgtttcagtaaatatgtttttgatccttatgggtacgacaaaggcgactactatgatgagatagaagctgaaatgaagcgtgaagttgagaggaaggaacaggagaagaaaaggagcccaaaagttgaatttattactggagtacaacccccaatcaatgcatcaataccgaagatcccaggtttggctggtgtctgtacactaccggtacctacagaaggtgtacagaaagagactagaccaaacaagaaatcaaaatgggataaggttgatggtgatgttaagaaccatgtggttcctagtggacacgacaacttatcagcaactactgcggcactcttgacttcagctaatgttggtgctggatacgctggttttgcgcaacaaaagagaaaagaggccgaagaaaagaaaaacgatcataagtcagacagaagatcgtagcaccaccttttgtttcattctgagcagtcagcgtatcatttattttttttcagtgacatagttttgtaatgtggatagagaaaagaaggaaacaattaaaaccaatcctagggaaatggtttcagaaaagccctctgggcaacttggtagtcttgtattatacaggtaccagaaacttaacattttagaccaagaaaaagagaaccgtgagcgttctgcacttctgccgcctgttacagtggtcaattatgtgtttttgcattcagctcattggtctgccgcttgaatgctgggattttaaatcgccaaccatttatttatcatcgatggtcacctaatctttatgtcttgatcgtttatttttatttcatatcgattgggtgcgacatatatatttggacttgatatagatttaaactgacttaattctactcaattttagatcaaaatgaatgaccctttaggggtgttgactaaattttagtctctttattttagtttttaaacataaaaactaaaataaatataa

SEQ ID NO: 36476 - DNA, 1881 bp, Zea Mays
ccgcggcaatggagtccgacaccgagcgagacgtccacaactcctcccgctccactaaccctagcggccaccaccagcgaccgcttcggttagtcaagtctacggcgttcaagcgggaggagcgccgcaagcgcaaggaccgcaagcggcagaggcacctcgttgacgagctcgtgcggtggcaacctctcggcgccccgacgcccctcccagccgccaccggatccgtgtccccctcccaagcgcagcccgatacgccttggccgtgtgacccgccgccgcctccggaccccgcggaagccgactcctggagctggggcccgcccgccgtaccctcgccgacgccgacgcaacccacagtcgacgtggcgggcgcggtccccttgcaccctcaggtcgtcgccgtaaggtcctgccgcgcgttctttgaatcgcagttcgaagaggacgaggaggaggagaacgagggcagtgcggctcgattcttcagcgagctgctgggcagcgacgcggcgctgagggggttctacgaggcggagcgggacaaggggcacttcctgtgcctggtgtgcgaggggagcggcgccaggctgggcaagaggtttgccggatgcgccgcgctcgttcagcacgccgggtcgatcgcccggaccaagtggaggctggcgcaccgcgcgttcgccgactccgtcggcctgctgctcggatggggcgcaggccggattgctcctccgccggtaccgccaccgattctgacagcgacggttcttttgatcaagtaggcagctctcagatggtagaaatggagctgtcgtgactcctgatgactgcagtctactgcaacaaggtttgtagttttctcgtaactacgcgttgttacagagtggagactgatcaggatggaaacagtggctagcatggtttaatcatcttgacctcaataatcatcacattgcggcatatctgatactatctcgacctgatgggctggggttgctgccttgctggccagacgggttctattttggtgtccggttatgatgccgaagatgtgaaatcatcatcctcgatttttccgactggagcaataagctggaagttcttcacagagccaaccataacccgaccatgaacattcaaacaccagcaccgcagatcctcaagcgaacgtggtgctttaatgtacagaaccattgtggtgtcgacgtgtcgtcatttacagggcactggataccgcagtgtattcttctcgatcctcttcaggacacttctcccgtttcaacattaccgaatgggtctgtctgtttgtttccttgcaaaccacggtctgtatcagctgattggcaccttcatcatattgtagctgcagagcattagtgaacctttgttctcgtgaagtcagacctgaaagcaggttgctctatcaatgaaggttttgggcacctcgtcagcttaactccgtgcggtctggttctcatatctgagccaggctggccagaagcgaaacaatcattcactgacgaagcagctctaatgaagacagtatacggtcagtggggcctcaccttataaacagaaactcttgagaagggtttttggaaactgggaggttcgattagactttttgggtttcgaaagcccgagatgatattatgggatgtttggtttggataaaaccctaggtgcatttacgaacacttaaactcgttatccatatagagacaaggcatgaaaatgcaattgattacgaacattttagaaactaatatttttcattctctaaattgacaagcacttaattaaatcctgacaaacttttataaaaatactaaaaccataaattttatttaatgtttttatttacaatataaaatagaaatg

SEQ ID NO: 36477 - DNA, 1773 bp, Zea Mays
ccggtttctggtggttttcgaacggtttttgaaacccttgctccagtgcgtcgtcagccgcgtcacccaccgcggcaatggagtccgacaccgagcgagacgtccacaactcctcccgctccactaaccctagcggccaccaccagcgaccgcttcggttagtcaagtctacggcgttcaagcgggaggagcgccgcaagcgcaaggaccgcaagcggcagaggcacctcgttgacgagctcgtgcggtggcaacctctcggcgccccgacgcccctcccagccgccaccggatccgtgtccccctcccaagcgcagcccgatacgccttggccgtgtgacccgccgccgcctccggaccccgcggaagccgactcctggagctggggcccgcccgccgtaccctcgccgacgccgacgcaacccacagtcgacgtggcgggcgcggtccccttgcaccctcaggtcgtcgccgtaaggtcctgccgcgcgttctttgaatcgcagttcgaagaggacgaggaggaggagaacgagggcagtgcggctcgattcttcagcgagctgctgggcagcgacgcggcgctgagggggttctacgaggcggagcgggacaaggggcacttcctgtgcctggtgtgcgaggggagcggcgccaggctgggcaagaggtttgccggatgcgccgcgctcgttcagcacgccgggtcgatcgcccggaccaagtggaggctggcgcaccgcgcgttcgccgactccgtcggcctgctgctcggatggggcgcaggccggattgctcctccgccggtaccgccaccggcagattctgacagcgacggttcttttgatcaagtaggcagctctcagatggtagaaatggagctgtcgtgactcctgatgactgcagtctactgcaacaaggtttgtagttttctcgtaactacgcgttgttacagagtggagactgatcaggatggaaacagtggctagcatggtttaatcatcttgacctcaataatcatcacattgcggcatatctgatactatctcgacctgatgggctggggttgctgccttgctggccagacgggttctattttggtgtccggttatgatgccgaagatgtgaaatcatcatcctcgatttttccgactggagcaataagctggaagttcttcacagagccaaccataacccgaccatgaacattcaaacaccagcaccgcagatcctcaagcgaacgtggtgctttaatctgcagagcattagtgaacctttgttctcgtgaagtcagacctgaaagcaggttgctctatcaatgaaggttttgggcacctcgtcagcttaactccgtgcggtctggttctcatatctgagccaggctggccagaagcgaaacaatcattcactgacgaagcagctctaatgaagacagtatacggtcagtggggcctcaccttataaacagaaactcttgagaagggtttttggaaactgggaggttcgattagactttttgggtttcgaaagcccgagatgatattatgggatgtttggtttggataaaaccctaggtgcatttacgaacacttaaactcgttatccatatagagacaaggcatgaaaatgcaattgattacgaacattttagaaactaatatttttcattctctaaattgacaagcacttaattaaatcctgacaaacttttataaaaatactaaaaccataaattttatttaatgtttttatttacaatataaaatagaaatg

SEQ ID NO: 36478 - DNA, 3146 bp, Zea Mays
ccgggcgccgccccaccgcactagtgaagtggagctggagccgcggaggcggctggctgggctcgcgggagagtctattatttccatcggcaccatcacggcagggcggcgcgcggcgcgcggccagcgggtttacagacccttctgtctctctcgctcgcttccaacgctcgcgaccggctctccctgcgcccgttcccggcggccgaagcgagtcgcgaacccctttccgtggctcccgagcgagtcctacgggcgatgcgggcggatcgcgcgatgggggaggggagcggcaaccagcggatcgacctgggcgcgccgctccgctcggcgcgcctcgccgacgcgccgacgcagtacaaggccggcctcaactccgggcccctgcgccacccgggcaccgtgcccttcgcgtgggagcagcgcccgggccagcccaagagcgtccgcacacgccgcgcggcgccgccgacgcccccgcgggaaacttcccgggcgcggccgggcgagacaggcggcagcccctactacgacgccgttgcggagctcgatctccaggcgcttcgtggcgtcgccgaccaaggttcccggactgccgccgcatcgcgcaaggtggtggtgggggagaacgagcttgcggtggcggtggaatcgaccaaggatgtgaagaagcacgaggcgctcccggcggctgcggtcctacagaagcaggacggcatagtagaagaggaagaggagaggttctccgacgcgctcgacacgctctcccgcaccgagtcctttgccatgaactgcagcgtcagcggcctcagcggcgctctggaccccggacatggcgccgagccaggctcccggggcttcatgatggaccggttccttccggccgcgcaggctgtcgccgtgggctccccgcagtacaccttccggaaggccggcgccgccggtggcaccggcaattctggcagcgggcacgcgcgcgcggctgcggtgaaggcaggcgtgggcaatggcgaggatcgaatgaggagagcgcctgtccagctcccataccagcacctgccgcccaattacttgtcctgcgcctatccaagacacgaagagcatgaagaggaggatgaaggggatgacgatgacgatgactatgatgtgcatagtacccgggggttttcagccaaggggtgtggtttgctccctagcctatgtgcgaaaacttccttgttgctcttaaatccaatgcctgcaatgaagcgcggcaaggtgcgagggcgagttagaggctggcagttaccgtgcaaaggccaaggccaaggccaaatggcgcagagtccgcttgcgcggagctcgcagaacaagcacctgggatgtgattccaacgggcaatcatgggaggatgtgtataagcataagttggagcagaagtatcttggtcaaggagaggatgataggaggagcaagctgacaagtgagtcgaatcagcttactttctggagtgattcaccgactggggatggatcttcaccatattaccattccatagctggtggcatgtctccatatcgcagttatgctgtgatgtcaccatcaagtaaaccaaatgggtcgtctggaacaggagataaggatgataaagcaagtaggagcaatggttctggttcgtttgggaaagaccatgatcgaacctcgttggttggatcagatgatagtagcttcaagcgatcaagttccatgagctcaggaccagatggaacagtgcatgaagattcaatggatcaccacagagatactgattcagacacatgtcacttgggtgtgcttgtgcatacaaaagcagcattggatgcaaacatatatgacactcaacctggagggcgaaagacagttggaaataatttgattgtgaaagatcaagtcaatgatccattgactgaaaagatcgctgaacttagagaacccacatttccattggatgatggaaaagatttgcagcgtaatgctagtcatgagttaccacaacatctcgaagacaatgatgttgccaaaaaggaaatcataccattacaatctctgctccctttaccagtacccaaatcaccttcagagtcgtggctttctcgcactttgccatccgtgacaaataggtcacctctgccatcttttcttggaattcaagtacactcaaagaaacaggctccctgggtcataacgcaaccaaaggagaatgatcataaaccttccaggccacgacagataagatttgcagattagaaaaaccaacttcgttggattcggagatatgatatcttctcgcaaaaccagtatctatccattcatggtgttgccttgaaggctatcaaggtcatatacctcactggcacttacgagttcctaggatgtgcctctgctttttacagatgtggtcacttgatacagctgctggttaccacttaccatgttggtaattggagttcacatgccatgtttgctggactgtggtcagtatgtttctcatggtaagctggtaggtggtggtttaggtttggagtaaatcttatattcgtacaggatgacttcagctttcttccttactgtcgatagtgaaataaagcaatagtacccaaaaccaaaaaaggccgagttgttgcaaaatgtaatgcatcccaaagaataagaagatgtcaaaacagattaggcttccattcctggtacattttctattcgtaattgtatcagctggatatgtcagtacttgtgcttgatagaatcatagaactgtatctagtgccatatgttgtgtcagttgtgtctgacagtaagtatattcagcatatttcatatctatagtaaatttatttgctacattgttgtcattgattgacatcaagatggaagattatatagcagaagcagcaacgttccaactgtaaaagctttagagattctccaaaaagtgttgccatgtgatgagctcatgagcagaaccttatgaattgacgcatgacctcaacaattgactatcggatgtgggtcaactgccgaatgggttgtagtgctgttcaactagaacactcgtggggcttttcatttgtcgcctcacagatattttcttgtgctctgtaaacatcatatgaattctgtgggcaacttat

SEQ ID NO: 36479 - DNA, 2974 bp, Zea Mays
ccgggcgccgccccaccgcactagtgaagtggagctggagccgcggaggcggctggctgggctcgcgggagagtctattatttccatcggcaccatcacggcagggcggcgcgcggcgcgcggccagcgggtttacagacccttctgtctctctcgctcgcttccaacgctcgcgaccggctctccctgcgcccgttcccggcggccgaagcgagtcgcgaacccctttccgtggctcccgagcgagtcctacgggcgatgcgggcggatcgcgcgatgggggaggggagcggcaaccagcggatcgacctgggcgcgccgctccgctcggcgcgcctcgccgacgcgccgacgcagtacaaggccggcctcaactccgggcccctgcgccacccgggcaccgtgcccttcgcgtgggagcagcgcccgggccagcccaagagcgtccgcacacgccgcgcggcgccgccgacgcccccgcgggaaacttcccgggcgcggccgggcgagacaggcggcagcccctactacgacgccgttgcggagctcgatctccaggcgcttcgtggcgtcgccgaccaaggttcccggactgccgccgcatcgcgcaaggtggtggtgggggagaacgagcttgcggtggcggtggaatcgaccaaggatgtgaagaagcacgaggcgctcccggcggctgcggtcctacagaagcaggacggcatagtagaagaggaagaggagaggttctccgacgcgctcgacacgctctcccgcaccgagtcctttgccatgaactgcagcgtcagcggcctcagcggcgctctggaccccggacatggcgccgagccaggctcccggggcttcatgatggaccggttccttccggccgcgcaggctgtcgccgtgggctccccgcagtacaccttccggaaggccggcgccgccggtggcaccggcaattctggcagcgggcacgcgcgcgcggctgcggtgaaggcaggcgtgggcaatggcgaggatcgaatgaggagagcgcctgtccagctcccataccagcacctgccgcccaattacttgtcctgcgcctatccaagacacgaagagcatgaagaggaggatgaaggggatgacgatgacgatgactatgatgtgcatagtacccgggggttttcagccaaggggtgtggtttgctccctagcctatcaatcatgggaggatgtgtataagcataagttggagcagaagtatcttggtcaaggagaggatgataggaggagcaagctgacaagtgagtcgaatcagcttactttctggagtgattcaccgactggggatggatcttcaccatattaccattccatagctggtggcatgtctccatatcgcagttatgctgtgatgtcaccatcaagtaaaccaaatgggtcgtctggaacaggagataaggatgataaagcaagtaggagcaatggttctggttcgtttgggaaagaccatgatcgaacctcgttggttggatcagatgatagtagcttcaagcgatcaagttccatgagctcaggaccagatggaacagtgcatgaagattcaatggatcaccacagagatactgattcagacacatgtcacttgggtgtgcttgtgcatacaaaagcagcattggatgcaaacatatatgacactcaacctggagggcgaaagacagttggaaataatttgattgtgaaagatcaagtcaatgatccattgactgaaaagatcgctgaacttagagaacccacatttccattggatgatggaaaagatttgcagcgtaatgctagtcatgagttaccacaacatctcgaagacaatgatgttgccaaaaaggaaatcataccattacaatctctgctccctttaccagtacccaaatcaccttcagagtcgtggctttctcgcactttgccatccgtgacaaataggtcacctctgccatcttttcttggaattcaagtacactcaaagaaacaggctccctgggtcataacgcaaccaaaggagaatgatcataaaccttccaggccacgacagataagatttgcagatgtagtagaaaaaccaacttcgttggattcggagatatgatatcttctcgcaaaaccagtatctatccattcatggtgttgccttgaaggctatcaaggtcatatacctcactggcacttacgagttcctaggatgtgcctctgctttttacagatgtggtcacttgatacagctgctggttaccacttaccatgttggtaattggagttcacatgccatgtttgctggactgtggtcagtatgtttctcatggtaagctggtaggtggtggtttaggtttggagtaaatcttatattcgtacaggatgacttcagctttcttccttactgtcgatagtgaaataaagcaatagtacccaaaaccaaaaaaggccgagttgttgcaaaatgtaatgcatcccaaagaataagaagatgtcaaaacagattaggcttccattcctggtacattttctattcgtaattgtatcagctggatatgtcagtacttgtgcttgatagaatcatagaactgtatctagtgccatatgttgtgtcagttgtgtctgacagtaagtatattcagcatatttcatatctatagtaaatttatttgctacattgttgtcattgattgacatcaagatggaagattatatagcagaagcagcaacgttccaactgtaaaagctttagagattctccaaaaagtgttgccatgtgatgagctcatgagcagaaccttatgaattgacgcatgacctcaacaattgactatcggatgtgggtcaactgccgaatgggttgtagtgctgttcaactagaacactcgtggggcttttcatttgtcgcctcacagatattttcttgtgctctgtaaacatcatatgaattctgtgggcaacttat

SEQ ID NO: 36480 - DNA, 2934 bp, Zea Mays
gccaagctttcctcaaaaactcgaaaaaggaacggagaaggcgtcctcgacgactgcccatggccgccgcccggacctaggctagggattgctgtctcctgagtcccgacctaccaaggcggaaagggagagggggcgctgtggcgtcaggaaataactggaagccgagggctgagggcgagttcagagtcaggtggttatcgctttctttttcgttttctttttccggagggtagtattggggatgccggttgctaggccggagccgcaggagccccgggtgatcgcccatgtcgacatggactgcttctatgttcaaggtcgtaacttcggacgaaatggttgtgcttattctgtattcaggtccatgcgcggagatgaggccaagagggtttgtcctggtattaatcttgttcaggtcccagtggcgcgtggcaaggctgaccttaatctttacagaagtgctggtgctgaggttgttgcaatccttgcaagcaaagggaagtgcgagcgggcatccatcgacgaagtttatcttgaccttactgatgcagcaaatgaaatggtcttacaagctcccccagattcaccagaggggatttttatggaggcggcaaagtcaaatatcttgggccttccggctgatgccagcgagaaggaaaagaatgtgagggcatggctttgtcaatcagaagctgattaccaggacaagttactggcatgtggagctataattgttgcacagttacgagtcagagttctggaggaaacccaattcacatgctctgctgggattgctcacaataagatgttagctaaacttgtcagtggaatgcacaagcctgctcagcaaacagttgtcccttcttcatcagttcaagacttactagcatcactacctgtgaagaagatgaaacagcttggtggtaagcttggaagttccttgcaggatgatcttggggttgagaccattggtgatctcctaagttttacagaggaaaaattacaagagcagtatggagtaaatactggaacttggttatggaagactgccaggggcattagcggggaagaagttgaggaccgtcttctcccaaagagtcacgggtgtggaaagacatttcctggcccaagagcactgaagtacagtgcttctgtcaaaggctggctggatcaactatgtgaagaattaagtgaacgtatccagtctgacctgaaccagaacaagagaattgctcaaacgctaactcttcatgccagagcatttaagaaaaatgaacatgattcaatgaagaaattcccttccaaatcctgtcctttgcgctatgggactgggaaaattcaggaggatgcaatgaggctatttgaatctggccttcatgagtttttagaatctcagaacactggatggggcataacatctctttctgtcactgcaagcaaaatatttgatatacctagtggaacaagctcaatcctgagatacattaaaggtccaagttctgctgcagctctgactatacctgattctccaagttctgctgcagctctggctatacctgattcttcatttgtacctgaggatccatctcttggtgatgttccttagctgaagtgtgcctactgtttgccatttttgtttgttcttacttaaggatcttccaatatttttctgtagataatgatgtatttgtggagccaattcatgaagaagaatgccaaccatcaacctctgagaaagaagacgacaataatacacattctgcgtctgcattttcagctaaaaaatgccgagcaaatgaagaaaaaagaatatcaaagaaattgcctggagttcaggtcagctgctcttttctccttggtggataccatcaaactgattttttgttggttattctcaagctgttggtgaatgaagatcttattttccttttgttgctgtttgcttgtttccgtgcaacaaagcagcaccaatgtctaatattcaagttggaaggtggcataacatccccaaaattaatgcttggcattgccttttgtatcagaaatgatcaaatcgagggcttttatttctgagtcagctgcagtttctttcttacattatgttgcctatcatgattacggtcttgtacttgctttttattcagtgaaattagtactctattgtgccattttgccatgtactgaacttgttcacttctctttttttctcatttcttttgtgttggtagtacaagattttcaaactaatttttagtttccatgtcattaactcgcccaaggtgtttcattaccatagggaacttcctcgatattgaagtttctttcacggggccaatctaccttacatgagaaaagaaaatctgatggactaatttgcagtcatcaaggtcccgggagttcttcggaagcatacaaagctggagcacacaatgtgcccgcggaagctgaggataggaacaacaccaacagttgtgctgaaccctctggcagtaacacatggacgttcaaccttcaagacattgatccagcggtggtagaggagctgccaccagagatccaaagagaaatacaggggtgggtccgtccatcgaagcacccgatcacgaagagacgtggttctacaatttcttcatactttccacccgcgaggtcttagatacgttgatacgttagttcttgattgtatattctttattttctacacacaacggcctcgctctgtgtattgtaattgtaagatgtgaagatgtttaggtagccctatatgtgattaacagcttgacgggacctctgagaatggtaagtttatttacgtggggtatggaaacatgaacattaaagcatgtgcaattgagttgaggtcctagggttgcatctacttatgttcatgttggaaaatgatttgagtacagtactcaaacaccacctgac

SEQ ID NO: 36481 - DNA, 2545 bp, Zea Mays
gccaagctttcctcaaaaactcgaaaaaggaacggagaaggcgtcctcgacgactgcccatggccgccgcccggacctaggctagggattgctgtctcctgagtcccgacctaccaaggcggaaagggagagggggcgctgtggcgtcaggaaataactggaagccgagggctgagggcgagttcagagtcaggtggttatcgctttctttttcgttttctttttccggagggtagtattggggatgccggttgctaggccggagccgcaggagccccgggtgatcgcccatgtcgacatggactgcttctatgttcaaggtcgtaacttcggacgaaatggttgtgcttattctgtattcaggtccatgcgcggagatgaggccaagagggtttgtcctggtattaatcttgttcaggtcccagtggcgcgtggcaaggctgaccttaatctttacagaagtgctggtgctgaggttgttgcaatccttgcaagcaaagggaagtgcgagcgggcatccatcgacgaagtttatcttgaccttactgatgcagcaaatgaaatggtcttacaagctcccccagattcaccagaggggatttttatggaggcggcaaagtcaaatatcttgggccttccggctgtaagaatgctctcacagttagatttgttactgctctgctatttgatgtagcatggtcataggccatgatatattcaggatgccagcgagaaggaaaagaatgtgagggcatggctttgtcaatcagaagctgattaccaggacaagttactggcatgtggagctataattgttgcacagttacgagtcagagttctggaggaaacccaattcacatgctctgctgggattgctcacaataagatgttagctaaacttgtcagtggaatgcacaagcctgctcagcaaacagttgtcccttcttcatcagttcaagacttactagcatcactacctgtgaagaagatcttggtggtaagcttggaagttccttgcaggatgatcttggggttgagaccattggtgatctcctaagttttacagaggaaaaattacaagagcagtatggagtaaatactggaacttggttatggaagactgccaggggcattagcggggaagaagttgaggaccgtcttctcccaaagagtcacgggtgtggaaagacatttcctggcccaagagcactgaagtacagtgcttctgtcaaaggctggctggatcaactatgtgaagaattaagtgaacgtatccagtctgacctgaaccagaacaagagaattgctcaaacgctaactcttcatgccagagcatttaagaaaaatgaacatgattcaatgaagaaattcccttccaaatcctgtcctttgcgctatgggactgggaaaattcaggaggatgcaatgaggctatttgaatctggccttcatgagtttttagaatctcagaacactggatggggcataacatctctttctgtcactgcaagcaaaatatttgatatacctagtggaacaagctcaatcctgagatacattaaaggtccaagttctgctgcagctctgactatacctgattctccaagttctgctgcagctctggctatacctgattcttcatttgtacctgaggatccatctcttggtgatgttccttagctgaagtgtgcctactgtttgccatttttgtttgttcttacttaaggatcttccaatatttttctgtagataatgatgtatttgtggagccaattcatgaagaagaatgccaaccatcaacctctgagaaagaagacgacaataatacacattctgcgtctgcattttcagctaaaaaatgccgagcaaatgaagaaaaaagaatatcaaagaaattgcctggagttcagggaacttcctcgatattgaagtttctttcacggggccaatctaccttacatgagaaaagaaaatctgatggactaatttgcagtcatcaaggtcccgggagttcttcggaagcatacaaagctggagcacacaatgtgcccgcggaagctgaggataggaacaacaccaacagttgtgctgaaccctctggcagtaacacatggacgttcaaccttcaagacattgatccagcggtggtagaggagctgccaccagagatccaaagagaaatacaggggtgggtccgtccatcgaagcacccgatcacgaagagacgtggttctacaatttcttcatactttccacccgcgaggtcttagatacgttgatacgttagttcttgattgtatattctttattttctacacacaacggcctcgctctgtgtattgtaattgtaagatgtgaagatgtttaggtagccctatatgtgattaacagcttgacgggacctctgagaatggtaagtttatttacgtggggtatggaaacatgaacattaaagcatgtgcaattgagttgaggtcctagggttgcatctacttatgttcatgttggaaaatgatttgagtacagtactcaaacaccacctgac

SEQ ID NO: 36482 - DNA, 2795 bp, Zea Mays
gccaagctttcctcaaaaactcgaaaaaggaacggagaaggcgtcctcgacgactgcccatggccgccgcccggacctaggctagggattgctgtctcctgagtcccgacctaccaaggcggaaagggagagggggcgctgtggcgtcaggaaataactggaagccgagggctgagggcgagttcagagtcaggtggttatcgctttctttttcgttttctttttccggagggtagtattggggatgccggttgctaggccggagccgcaggagccccgggtgatcgcccatgtcgacatggactgcttctatgttcaaggtcgtaacttcggacgaaatggttgtgcttattctgtattcaggtccatgcgcggagatgaggccaagagggtttgtcctggtattaatcttgttcaggtcccagtggcgcgtggcaaggctgaccttaatctttacagaagtgctggtgctgaggttgttgcaatccttgcaagcaaagggaagtgcgagcgggcatccatcgacgaagtttatcttgaccttactgatgcagcaaatgaaatggtcttacaagctcccccagattcaccagaggggatttttatggaggcggcaaagtcaaatatcttgggccttccggctgatgccagcgagaaggaaaagaatgtgagggcatggctttgtcaatcagaagctgattaccaggacaagttactggcatgtggagctataattgttgcacagttacgagtcagagttctggaggaaacccaattcacatgctctgctgggattgctcacaataaggtttataatgagtcgtactaatgttagctaaacttgtcagtggaatgcacaagcctgctcagcaaacagttgtcccttcttcatcagttcaagacttactagcatcactacctgtgaagaagatgatgatcttggggttgagaccattggtgatctcctaagttttacagaggaaaaattacaagagcagtatggagtaaatactggaacttggttatggaagactgccaggggcattagcggggaagaagttgaggaccgtcttctcccaaagagtcacgggtgtggaaagacatttcctggcccaagagcactgaagtacagtgcttctgtcaaaggctggctggatcaactatgtgaagaattaagtgaacgtatccagtctgacctgaaccagaacaagagaattgctcaaacgctaactcttcatgccagagcatttaagaaaaatgaacatgattcaatgaagaaattcccttccaaatcctgtcctttgcgctatgggactgggaaaattcaggaggatgcaatgaggctatttgaatctggccttcatgagtttttagaatctcagaacactggatggggcataacatctctttctgtcactgcaagcaaaatatttgatatacctagtggaacaagctcaatcctgagatacattaaaggtccaagttctgctgcagctctgactatacctgattctccaagttctgctgcagctctggctatacctgattcttcatttgtacctgaggatccatctcttgataatgatgtatttgtggagccaattcatgaagaagaatgccaaccatcaacctctgagaaagaagacgacaataatacacattctgcgtctgcattttcagctaaaaaatgccgagcaaatgaagaaaaaagaatatcaaagaaattgcctggagttcagcaccaatgtctaatattcaagttggaaggtggcataacatccccaaaattaatgcttggcattgccttttgtatcagaaatgatcaaatcgagggcttttatttctgagtcagctgcagtttctttcttacattatgttgcctatcatgattacggtcttgtacttgctttttattcagtgaaattagtactctattgtgccattttgccatgtactgaacttgttcacttctctttttttctcatttcttttgtgttggtagtacaagattttcaaactaatttttagtttccatgtcattaactcgcccaaggtgtttcattaccatagggaacttcctcgatattgaagtttctttcacggggccaatctaccttacatgagaaaagaaaatctgatggactaatttgcagtcatcaaggtttgctggactgtaagatgcaatgatgcagacattgattaagccactgccacgtttttttcgtttgctgaatattcatgatgacattaggtcccgggagttcttcggaagcatacaaagctggagcacacaatgtgcccgcggaagctgaggataggaacaacaccaacagttgtgctgaaccctctggcagtaacacatggacgttcaaccttcaagacattgatccagcggtggtagaggagctgccaccagagatccaaagagaaatacaggggtgggtccgtccatcgaagcacccgatcacgaagagacgtggttctacaatttcttcatactttccacccgcgaggtcttagatacgttgatacgttagttcttgattgtatattctttattttctacacacaacggcctcgctctgtgtattgtaattgtaagatgtgaagatgtttaggtagccctatatgtgattaacagcttgacgggacctctgagaatggtaagtttatttacgtggggtatggaaacatgaacattaaagcatgtgcaattgagttgaggtcctagggttgcatctacttatgttcatgttggaaaatgatttgagtacagtactcaaacaccacctgac

SEQ ID NO: 36483 - DNA, 2403 bp, Zea Mays
gccaagctttcctcaaaaactcgaaaaaggaacggagaaggcgtcctcgacgactgcccatggccgccgcccggacctaggctagggattgctgtctcctgagtcccgacctaccaaggcggaaagggagagggggcgctgtggcgtcaggaaataactggaagccgagggctgagggcgagttcagagtcaggtggttatcgctttctttttcgttttctttttccggagggtagtattggggatgccggttgctaggccggagccgcaggagccccgggtgatcgcccatgtcgacatggactgcttctatgttcaaggtcgtaacttcggacgaaatggttgtgcttattctgtattcaggtccatgcgcggagatgaggccaagagggtttgtcctggtattaatcttgttcaggtcccagtggcgcgtggcaaggctgaccttaatctttacagaagtgctggtgctgaggttgttgcaatccttgcaagcaaagggaagtgcgagcgggcatccatcgacgaagtttatcttgaccttactgatgcagcaaatgaaatggtcttacaagctcccccagattcaccagaggggatttttatggaggcggcaaagtcaaatatcttgggccttccggctgatgccagcgagaaggaaaagaatgtgagggcatggctttgtcaatcagaagctgattaccaggacaagttactggcatgtggagctataattgttgcacagttacgagtcagagttctggaggaaacccaattcacatgctctgctgggattgctcacaataagatgttagctaaacttgtcagtggaatgcacaagcctgctcagcaaacagttgtcccttcttcatcagttcaagacttactagcatcactacctgtgaagaagatgaaacagcttggtggtaagcttggaagttccttgcaggatgatcttggggttgagaccattggtgatctcctaagttttacagaggaaaaattacaagagcagtatggagtaaatactggaacttggttatggaagactgccaggggcattagcggggaagaagttgaggaccgtcttctcccaaagagtcacgggtgtggaaagacatttcctggcccaagagcactgaagtacagtgcttctgtcaaaggctggctggatcaactatgtgaagaattaagtgaacgtatccagtctgacctgaaccagaacaagagaattgctcaaacgctaactcttcatgccagagcatttaagaaaaatgaacatgattcaatgaagaaattcccttccaaatcctgtcctttgcgctatgggactgggaaaattcaggaggatgcaatgaggctatttgaatctggccttcatgagtttttagaatctcagaacactggatggggcataacatctctttctgtcactgcaagcaaaatatttgatatacctagtggaacaagctcaatcctgagatacattaaaggtccaagttctgctgcagctctgactatacctgattctccaagttctgctgcagctctggctatacctgattcttcatttgtacctgaggatccatctcttgataatgatgtatttgtggagccaattcatgaagaagaatgccaaccatcaacctctgagaaagaagacgacaataatacacattctgcgtctgcattttcagctaaaaaatgccgagcaaatgaagaaaaaagaatatcaaagaaattgcctggagttcagggaacttcctcgatattgaagtttctttcacggggccaatctaccttacatgagaaaagaaaatctgatggactaatttgcagtcatcaaggtttgctggactgtcccgggagttcttcggaagcatacaaagctggagcacacaatgtgcccgcggaagctgaggataggaacaacaccaacagttgtgctgaaccctctggcagtaacacatggacgttcaaccttcaagacattgatccagcggtggtagaggagctgccaccagagatccaaagagaaatacaggggtgggtccgtccatcgaagcacccgatcacgaagagacgtggttctacaatttcttcatactttccacccgcgaggtcttagatacgttgatacgttagttcttgattgtatattctttattttctacacacaacggcctcgctctgtgtattgtaattgtaagatgtgaagatgtttaggtagccctatatgtgattaacagcttgacgggacctctgagaatggtaagtttatttacgtggggtatggaaacatgaacattaaagcatgtgcaattgagttgaggtcctagggttgcatctacttatgttcatgttggaaaatgatttgagtacagtactcaaacaccacctgac

SEQ ID NO: 36484 - DNA, 2915 bp, Zea Mays
gccaagctttcctcaaaaactcgaaaaaggaacggagaaggcgtcctcgacgactgcccatggccgccgcccggacctaggctagggattgctgtctcctgagtcccgacctaccaaggcggaaagggagagggggcgctgtggcgtcaggaaataactggaagccgagggctgagggcgagttcagagtcaggtggttatcgctttctttttcgttttctttttccggagggtagtattggggatgccggttgctaggccggagccgcaggagccccgggtgatcgcccatgtcgacatggactgcttctatgttcaaggtcgtaacttcggacgaaatggttgtgcttattctgtattcaggtccatgcgcggagatgaggccaagagggtttgtcctggtattaatcttgttcaggtcccagtggcgcgtggcaaggctgaccttaatctttacagaagtgctggtgctgaggttgttgcaatccttgcaagcaaagggaagtgcgagcgggcatccatcgacgaagtttatcttgaccttactgatgcagcaaatgaaatggtcttacaagctcccccagattcaccagaggggatttttatggaggcggcaaagtcaaatatcttgggccttccggctgtaagaatgctctcacagttagatttgttactgctctgctatttgatgtagcatggtcataggccatgatatattcaggatgccagcgagaaggaaaagaatgtgagggcatggctttgtcaatcagaagctgattaccaggacaagttactggcatgtggagctataattgttgcacagttacgagtcagagttctggaggaaacccaattcacatgctctgctgggattgctcacaataaggtttataatgagtcgtactaatgttagctaaacttgtcagtggaatgcacaagcctgctcagcaaacagttgtcccttcttcatcagttcaagacttactagcatcactacctgtgaagaagatgaaacagcttggtggtaagcttggaagttccttgcaggatgatcttggggttgagaccattggtgatctcctaagttttacagaggaaaaattacaagagcagtatggagtaaatactggaacttggttatggaagactgccaggggcattagcggggaagaagttgaggaccgtcttctcccaaagagtcacgggtgtggaaagacatttcctggcccaagagcactgaagtacagtgcttctgtcaaaggctggctggatcaactatgtgaagaattaagtgaacgtatccagtctgacctgaaccagaacaagagaattgctcaaacgctaactcttcatgccagagcatttaagaaaaatgaacatgattcaatgaagaaattcccttccaaatcctgtcctttgcgctatgggactgggaaaattcaggaggatgcaatgaggctatttgaatctggccttcatgagtttttagaatctcagaacactggatggggcataacatctctttctgtcactgcaagcaaaatatttgatatacctagtggaacaagctcaatcctgagatacattaaaggtccaagttctgctgcagctctgactatacctgattctccaagttctgctgcagctctggctatacctgattcttcatttgtacctgaggatccatctcttggtgatgttccttagctgaagtgtgcctactgtttgccatttttgtttgttcttacttaaggatcttccaatatttttctgtagataatgatgtatttgtggagccaattcatgaagaagaatgccaaccatcaacctctgagaaagaagacgacaataatacacattctgcgtctgcattttcagctaaaaaatgccgagcaaatgaagaaaaaagaatatcaaagaaattgcctggagttcagcaccaatgtctaatattcaagttggaaggtggcataacatccccaaaattaatgcttggcattgccttttgtatcagaaatgatcaaatcgagggcttttatttctgagtcagctgcagtttctttcttacattatgttgcctatcatgattacggtcttgtacttgctttttattcagtgaaattagtactctattgtgccattttgccatgtactgaacttgttcacttctctttttttctcatttcttttgtgttggtagtacaagattttcaaactaatttttagtttccatgtcattaactcgcccaaggtgtttcattaccatagggaacttcctcgatattgaagtttctttcacggggccaatctaccttacatgagaaaagaaaatctgatggactaatttgcagtcatcaaggtttgctggactgtcccgggagttcttcggaagcatacaaagctggagcacacaatgtgcccgcggaagctgaggataggaacaacaccaacagttgtgctgaaccctctggcagtaacacatggacgttcaaccttcaagacattgatccagcggtggtagaggagctgccaccagagatccaaagagaaatacaggggtgggtccgtccatcgaagcacccgatcacgaagagacgtggttctacaatttcttcatactttccacccgcgaggtcttagatacgttgatacgttagttcttgattgtatattctttattttctacacacaacggcctcgctctgtgtattgtaattgtaagatgtgaagatgtttaggtagccctatatgtgattaacagcttgacgggacctctgagaatggtaagtttatttacgtggggtatggaaacatgaacattaaagcatgtgcaattgagttgaggtcctagggttgcatctacttatgttcatgttggaaaatgatttgagtacagtactcaaacaccacctgac

SEQ ID NO: 36485 - DNA, 2583 bp, Zea Mays
cgttcatcttcttcatcttgccaagctttcctcaaaaactcgaaaaaggaacggagaaggcgtcctcgacgactgcccatggccgccgcccggacctaggctagggattgctgtctcctgagtcccgacctaccaaggcggaaagggagagggggcgctgtggcgtcaggaaataactggaagccgagggctgagggcgagttcagagtcaggtggttatcgctttctttttcgttttctttttccggagggtagtattggggatgccggttgctaggccggagccgcaggagccccgggtgatcgcccatgtcgacatggactgcttctatgttcaagcggaggaacccggcgctcaggggacagccgaccgccgtggtgcagtacaacggctggaaaggcggcggcttgattgccgtcagctacgaggctcgtggatttggtgtgaagaggtccatgcgcggagatgaggccaagagggtttgtcctggtattaatcttgttcaggtcccagtggcgcgtggcaaggctgaccttaatctttacagaagtgctggtgctgaggttgttgcaatccttgcaagcaaagggaagtgcgagcgggcatccatcgacgaagtttatcttgaccttactgatgcagcaaatgaaatggtcttacaagctcccccagattcaccagaggggatttttatggaggcggcaaagtcaaatatcttgggccttccggctgatgccagcgagaaggaaaagaatgtgagggcatggctttgtcaatcagaagctgattaccaggacaagttactggcatgtggagctataattgttgcacagttacgagtcagagttctggaggaaacccaattcacatgctctgctgggattgctcacaataaggtttataatgagtcgtactaatgttagctaaacttgtcagtggaatgcacaagcctgctcagcaaacagttgtcccttcttcatcagttcaagacttactagcatcactacctgtgaagaagatgaaacagcttggtggtaagcttggaagttccttgcaggatgatcttggggttgagaccattggtgatctcctaagttttacagaggaaaaattacaagagcagtatggagtaaatactggaacttggttatggaagactgccaggggcattagcggggaagaagttgaggaccgtcttctcccaaagagtcacgggtgtggaaagacatttcctggcccaagagcactgaagtacagtgcttctgtcaaaggctggctggatcaactatgtgaagaattaagtgaacgtatccagtctgacctgaaccagaacaagagaattgctcaaacgctaactcttcatgccagagcatttaagaaaaatgaacatgattcaatgaagaaattcccttccaaatcctgtcctttgcgctatgggactgggaaaattcaggaggatgcaatgaggctatttgaatctggccttcatgagtttttagaatctcagaacactggatggggcataacatctctttctgtcactgcaagcaaaatatttgatatacctagtggaacaagctcaatcctgagatacattaaaggtccaagttctgctgcagctctgactatacctgattctccaagttctgctgcagctctggctatacctgattcttcatttgtacctgaggatccatctcttggtgatgttccttagctgaagtgtgcctactgtttgccatttttgtttgttcttacttaaggatcttccaatatttttctgtagataatgatgtatttgtggagccaattcatgaagaagaatgccaaccatcaacctctgagaaagaagacgacaataatacacattctgcgtctgcattttcagctaaaaaatgccgagcaaatgaagaaaaaagaatatcaaagaaattgcctggagttcagggaacttcctcgatattgaagtttctttcacggggccaatctaccttacatgagaaaagaaaatctgatggactaatttgcagtcatcaaggtcccgggagttcttcggaagcatacaaagctggagcacacaatgtgcccgcggaagctgaggataggaacaacaccaacagttgtgctgaaccctctggcagtaacacatggacgttcaaccttcaagacattgatccagcggtggtagaggagctgccaccagagatccaaagagaaatacaggggtgggtccgtccatcgaagcacccgatcacgaagagacgtggttctacaatttcttcatactttccacccgcgaggtcttagatacgttgatacgttagttcttgattgtatattctttattttctacacacaacggcctcgctctgtgtattgtaattgtaagatgtgaagatgtttaggtagccctatatgtgattaacagcttgacgggacctctgagaatggtaagtttatttacgtggggtatggaaacatgaacattaaagcatgtgcaattgagttgaggtcctagggttgcatctacttatgttcatgttggaaaatgatttgagtacagtactcaaacaccacctgac

SEQ ID NO: 36486 - DNA, 2825 bp, Zea Mays
gttgcccgttcatcttcttcatcttgccaagctttcctcaaaaactcgaaaaaggaacggagaaggcgtcctcgacgactgcccatggccgccgcccggacctaggctagggattgctgtctcctgagtcccgacctaccaaggcggaaagggagagggggcgctgtggcgtcaggaaataactggaagccgagggctgagggcgagttcagagtcaggtggttatcgctttctttttcgttttctttttccggagggtagtattggggatgccggttgctaggccggagccgcaggagccccgggtgatcgcccatgtcgacatggactgcttctatgttcaagtcgagcagcggaggaacccggcgctcaggggacagccgaccgccgtggtgcagtacaacggctggaaaggcggcggcttgattgccgtcagctacgaggctcgtggatttggtgtgaagaggtccatgcgcggagatgaggccaagagggtttgtcctggtattaatcttgttcaggtcccagtggcgcgtggcaaggctgaccttaatctttacagaagtgctggtgctgaggttgttgcaatccttgcaagcaaagggaagtgcgagcgggcatccatcgacgaagtttatcttgaccttactgatgcagcaaatgaaatggtcttacaagctcccccagattcaccagaggggatttttatggaggcggcaaagtcaaatatcttgggccttccggctgatgccagcgagaaggaaaagaatgtgagggcatggctttgtcaatcagaagctgattaccaggacaagttactggcatgtggagctataattgttgcacagttacgagtcagagttctggaggaaacccaattcacatgctctgctgggattgctcacaataagatgttagctaaacttgtcagtggaatgcacaagcctgctcagcaaacagttgtcccttcttcatcagttcaagacttactagcatcactacctgtgaagaagatgaaacagcttggtggtaagcttggaagttccttgcaggatgatcttggggttgagaccattggtgatctcctaagttttacagaggaaaaattacaagagcagtatggagtaaatactggaacttggttatggaagactgccaggggcattagcggggaagaagttgaggaccgtcttctcccaaagagtcacgggtgtggaaagacatttcctggcccaagagcactgaagtacagtgcttctgtcaaaggctggctggatcaactatgtgaagaattaagtgaacgtatccagtctgacctgaaccagaacaagagaattgctcaaacgctaactcttcatgccagagcatttaagaaaaatgaacatgattcaatgaagaaattcccttccaaatcctgtcctttgcgctatgggactgggaaaattcaggaggatgcaatgaggctatttgaatctggccttcatgagtttttagaatctcagaacactggatggggcataacatctctttctgtcactgcaagcaaaatatttgatatacctagtggaacaagctcaatcctgagatacattaaaggtccaagttctgctgcagctctgactatacctgattctccaagttctgctgcagctctggctatacctgattcttcatttgtacctgaggatccatctcttgataatgatgtatttgtggagccaattcatgaagaagaatgccaaccatcaacctctgagaaagaagacgacaataatacacattctgcgtctgcattttcagctaaaaaatgccgagcaaatgaagaaaaaagaatatcaaagaaattgcctggagttcagcaccaatgtctaatattcaagttggaaggtggcataacatccccaaaattaatgcttggcattgccttttgtatcagaaatgatcaaatcgagggcttttatttctgagtcagctgcagtttctttcttacattatgttgcctatcatgattacggtcttgtacttgctttttattcagtgaaattagtactctattgtgccattttgccatgtactgaacttgttcacttctctttttttctcatttcttttgtgttggtagtacaagattttcaaactaatttttagtttccatgtcattaactcgcccaaggtgtttcattaccatagggaacttcctcgatattgaagtttctttcacggggccaatctaccttacatgagaaaagaaaatctgatggactaatttgcagtcatcaaggtcccgggagttcttcggaagcatacaaagctggagcacacaatgtgcccgcggaagctgaggataggaacaacaccaacagttgtgctgaaccctctggcagtaacacatggacgttcaaccttcaagacattgatccagcggtggtagaggagctgccaccagagatccaaagagaaatacaggggtgggtccgtccatcgaagcacccgatcacgaagagacgtggttctacaatttcttcatactttccacccgcgaggtcttagatacgttgatacgttagttcttgattgtatattctttattttctacacacaacggcctcgctctgtgtattgtaattgtaagatgtgaagatgtttaggtagccctatatgtgattaacagcttgacgggacctctgagaatggtaagtttatttacgtggggtatggaaacatgaacattaaagcatgtgcaattgagttgaggtcctagggttgcatctacttatgttcatgttggaaaatgatttgagtacagtactcaaacaccacctgac

SEQ ID NO: 36487 - DNA, 2536 bp, Zea Mays
gccttatgtagttgcccgttcatcttcttcatcttgccaagctttcctcaaaaactcgaaaaaggaacggagaaggcgtcctcgacgactgcccatggccgccgcccggacctaggctagggattgctgtctcctgagtcccgacctaccaaggcggaaagggagagggggcgctgtggcgtcaggaaataactggaagccgagggctgagggcgagttcagagtcaggtggttatcgctttctttttcgttttctttttccggagggtagtattggggatgccggttgctaggccggagccgcaggagccccgggtgatcgcccatgtcgacatggactgcttctatgttcaagtcgagcagcggaggaacccggcgctcaggggacagccgaccgccgtggtgcagtacaacggctggaaaggcggcggcttgattgccgtcagctacgaggctcgtggatttggtgtgaagaggtccatgcgcggagatgaggccaagagggtttgtcctggtattaatcttgttcaggtcccagtggcgcgtggcaaggctgaccttaatctttacagaagtgctggtgctgaggttgttgcaatccttgcaagcaaagggaagtgcgagcgggcatccatcgacgaagtttatcttgaccttactgatgcagcaaatgaaatggtcttacaagctcccccagattcaccagaggggatttttatggaggcggcaaagtcaaatatcttgggccttccggctgatgccagcgagaaggaaaagaatgtgagggcatggctttgtcaatcagaagctgattaccaggacaagttactggcatgtggagctataattgttgcacagttacgagtcagagttctggaggaaacccaattcacatgctctgctgggattgctcacaataaggtttataatgagtcgtactaatgttagctaaacttgtcagtggaatgcacaagcctgctcagcaaacagttgtcccttcttcatcagttcaagacttactagcatcactacctgtgaagaagatgaaacagcttggtggtaagcttggaagttccttgcaggatgatcttggggttgagaccattggtgatctcctaagttttacagaggaaaaattacaagagcagtatggagtaaatactggaacttggttatggaagactgccaggggcattagcggggaagaagttgaggaccgtcttctcccaaagagtcacgggtgtggaaagacatttcctggcccaagagcactgaagtacagtgcttctgtcaaaggctggctggatcaactatgtgaagaattaagtgaacgtatccagtctgacctgaaccagaacaagagaattgctcaaacgctaactcttcatgccagagcatttaagaaaaatgaacatgattcaatgaagaaattcccttccaaatcctgtcctttgcgctatgggactgggaaaattcaggaggatgcaatgaggctatttgaatctggccttcatgagtttttagaatctcagaacactggatggggcataacatctctttctgtcactgcaagcaaaatatttgatatacctagtggaacaagctcaatcctgagatacattaaaggtccaagttctgctgcagctctgactatacctgattctccaagttctgctgcagctctggctatacctgattcttcatttgtacctgaggatccatctcttgataatgatgtatttgtggagccaattcatgaagaagaatgccaaccatcaacctctgagaaagaagacgacaataatacacattctgcgtctgcattttcagctaaaaaatgccgagcaaatgaagaaaaaagaatatcaaagaaattgcctggagttcagggaacttcctcgatattgaagtttctttcacggggccaatctaccttacatgagaaaagaaaatctgatggactaatttgcagtcatcaaggtttgctggactgtcccgggagttcttcggaagcatacaaagctggagcacacaatgtgcccgcggaagctgaggataggaacaacaccaacagttgtgctgaaccctctggcagtaacacatggacgttcaaccttcaagacattgatccagcggtggtagaggagctgccaccagagatccaaagagaaatacaggggtgggtccgtccatcgaagcacccgatcacgaagagacgtggttctacaatttcttcatactttccacccgcgaggtcttagatacgttgatacgttagttcttgattgtatattctttattttctacacacaacggcctcgctctgtgtattgtaattgtaagatgtgaagatgtttaggtagccctatatgtgattaacagcttgacgggacctctgagaatggtaagtttatttacgtggggtatggaaacatgaacattaaagcatgtgcaattgagttgaggtcctagggttgcatctacttatgttcatgttggaaaatgatttgagtacagtactcaaacaccacctgac

SEQ ID NO: 36488 - DNA, 2589 bp, Zea Mays
ggctggtctagtaaatgagccttatgtagttgcccgttcatcttcttcatcttgccaagctttcctcaaaaactcgaaaaaggaacggagaaggcgtcctcgacgactgcccatggccgccgcccggacctaggctagggattgctgtctcctgagtcccgacctaccaaggcggaaagggagagggggcgctgtggcgtcaggaaataactggaagccgagggctgagggcgagttcagagtcaggtggttatcgctttctttttcgttttctttttccggagggtagtattggggatgccggttgctaggccggagccgcaggagccccgggtgatcgcccatgtcgacatggactgcttctatgttcaagtcgagcagcggaggaacccggcgctcaggggacagccgaccgccgtggtgcagtacaacggctggaaaggcggcggcttgattgccgtcagctacgaggctcgtggatttggtgtgaagaggtccatgcgcggagatgaggccaagagggtttgtcctggtattaatcttgttcaggtcccagtggcgcgtggcaaggctgaccttaatctttacagaagtgctggtgctgaggttgttgcaatccttgcaagcaaagggaagtgcgagcgggcatccatcgacgaagtttatcttgaccttactgatgcagcaaatgaaatggtcttacaagctcccccagattcaccagaggggatttttatggaggcggcaaagtcaaatatcttgggccttccggctgtaagaatgctctcacagttagatttgttactgctctgctatttgatgtagcatggtcataggccatgatatattcaggatgccagcgagaaggaaaagaatgtgagggcatggctttgtcaatcagaagctgattaccaggacaagttactggcatgtggagctataattgttgcacagttacgagtcagagttctggaggaaacccaattcacatgctctgctgggattgctcacaataaggtttataatgagtcgtactaatgttagctaaacttgtcagtggaatgcacaagcctgctcagcaaacagttgtcccttcttcatcagttcaagacttactagcatcactacctgtgaagaagatgaaacagcttggtggtaagcttggaagttccttgcaggatgatcttggggttgagaccattggtgatctcctaagttttacagaggaaaaattacaagagcagtatggagtaaatactggaacttggttatggaagactgccaggggcattagcggggaagaagttgaggaccgtcttctcccaaagagtcacgggtgtggaaagacatttcctggcccaagagcactgaagtacagtgcttctaaaaatgaacatgattcaatgaagaaattcccttccaaatcctgtcctttgcgctatgggactgggaaaattcaggaggatgcaatgaggctatttgaatctggccttcatgagtttttagaatctcagaacactggatggggcataacatctctttctgtcactgcaagcaaaatatttgatatacctagtggaacaagctcaatcctgagatacattaaaggtccaagttctgctgcagctctgactatacctgattctccaagttctgctgcagctctggctatacctgattcttcatttgtacctgaggatccatctcttggtgatgttccttagctgaagtgtgcctactgtttgccatttttgtttgttcttacttaaggatcttccaatatttttctgtagataatgatgtatttgtggagccaattcatgaagaagaatgccaaccatcaacctctgagaaagaagacgacaataatacacattctgcgtctgcattttcagctaaaaaatgccgagcaaatgaagaaaaaagaatatcaaagaaattgcctggagttcagggaacttcctcgatattgaagtttctttcacggggccaatctaccttacatgagaaaagaaaatctgatggactaatttgcagtcatcaaggtcccgggagttcttcggaagcatacaaagctggagcacacaatgtgcccgcggaagctgaggataggaacaacaccaacagttgtgctgaaccctctggcagtaacacatggacgttcaaccttcaagacattgatccagcggtggtagaggagctgccaccagagatccaaagagaaatacaggggtgggtccgtccatcgaagcacccgatcacgaagagacgtggttctacaatttcttcatactttccacccgcgaggtcttagatacgttgatacgttagttcttgattgtatattctttattttctacacacaacggcctcgctctgtgtattgtaattgtaagatgtgaagatgtttaggtagccctatatgtgattaacagcttgacgggacctctgagaatggtaagtttatttacgtggggtatggaaacatgaacattaaagcatgtgcaattgagttgaggtcctagggttgcatctacttatgttcatgttggaaaatgatttgagtacagtactcaaacaccacctgac

SEQ ID NO: 36489 - DNA, 2479 bp, Zea Mays
attcaatgggccgtgggctggtctagtaaatgagccttatgtagttgcccgttcatcttcttcatcttgccaagctttcctcaaaaactcgaaaaaggaacggagaaggcgtcctcgacgactgcccatggccgccgcccggacctaggctagggattgctgtctcctgagtcccgacctaccaaggcggaaagggagagggggcgctgtggcgtcaggaaataactggaagccgagggctgagggcgagttcagagtcaggtggttatcgctttctttttcgttttctttttccggagggtagtattggggatgccggttgctaggccggagccgcaggagccccgggtgatcgcccatgtcgacatggactgcttctatgttcaaggtcgtaacttcggacgaaatggttgtgcttattctgtattcaggtccatgcgcggagatgaggccaagagggtttgtcctggtattaatcttgttcaggtcccagtggcgcgtggcaaggctgaccttaatctttacagaagtgctggtgctgaggttgttgcaatccttgcaagcaaagggaagtgcgagcgggcatccatcgacgaagtttatcttgaccttactgatgcagcaaatgaaatggtcttacaagctcccccagattcaccagaggggatttttatggaggcggcaaagtcaaatatcttgggccttccggctgatgccagcgagaaggaaaagaatgtgagggcatggctttgtcaatcagaagctgattaccaggacaagttactggcatgtggagctataattgttgcacagttacgagtcagagttctggaggaaacccaattcacatgctctgctgggattgctcacaataaggtttataatgagtcgtactaatgttagctaaacttgtcagtggaatgcacaagcctgctcagcaaacagttgtcccttcttcatcagttcaagacttactagcatcactacctgtgaagaagatgaaacagcttggtggtaagcttggaagttccttgcaggatgatcttggggttgagaccattggtgatctcctaagttttacagaggaaaaattacaagagcagtatggagtaaatactggaacttggttatggaagactgccaggggcattagcggggaagaagttgaggaccgtcttctcccaaagagtcacgggtgtggaaagacatttcctggcccaagagcactgaagtacagtgcttctgtcaaaggctggctggatcaactatgtgaagaattaagtgaacgtatccagtctgacctgaaccagaacaagagaattgctcaaacgctaactcttcatgccagagcatttaagaaaaatgaacatgattcaatgaagaaattcccttccaaatcctgtcctttgcgctatgggactgggaaaattcaggaggatgcaatgaggctatttgaatctggccttcatgagtttttagaatctcagaacactggatggggcataacatctctttctgtcactgcaagcaaaatatttgatatacctagtggaacaagctcaatcctgagatacattaaaggtccaagttctgctgcagctctgactatacctgattctccaagttctgctgcagctctggctatacctgattcttcatttgtacctgaggatccatctcttgataatgatgtatttgtggagccaattcatgaagaagaatgccaaccatcaacctctgagaaagaagacgacaataatacacattctgcgtctgcattttcagctaaaaaatgccgagcaaatgaagaaaaaagaatatcaaagaaattgcctggagttcagggaacttcctcgatattgaagtttctttcacggggccaatctaccttacatgagaaaagaaaatctgatggactaatttgcagtcatcaaggtcccgggagttcttcggaagcatacaaagctggagcacacaatgtgcccgcggaagctgaggataggaacaacaccaacagttgtgctgaaccctctggcagtaacacatggacgttcaaccttcaagacattgatccagcggtggtagaggagctgccaccagagatccaaagagaaatacaggggtgggtccgtccatcgaagcacccgatcacgaagagacgtggttctacaatttcttcatactttccacccgcgaggtcttagatacgttgatacgttagttcttgattgtatattctttattttctacacacaacggcctcgctctgtgtattgtaattgtaagatgtgaagatgtttaggtagccctatatgtgattaacagcttgacgggacctctgagaatggtaagtttatttacgtggggtatggaaacatgaacattaaagcatgtgcaattgagttgaggtcctagggttgcatctacttatgttcatgttggaaaatgatttgagtacagtactcaaacaccacctgac

SEQ ID NO: 36490 - DNA, 2783 bp, Zea Mays
gggctttgtattcaatgggccgtgggctggtctagtaaatgagccttatgtagttgcccgttcatcttcttcatcttgccaagctttcctcaaaaactcgaaaaaggaacggagaaggcgtcctcgacgactgcccatggccgccgcccggacctaggctagggattgctgtctcctgagtcccgacctaccaaggcggaaagggagagggggcgctgtggcgtcaggaaataactggaagccgagggctgagggcgagttcagagtcaggtggttatcgctttctttttcgttttctttttccggagggtagtattggggatgccggttgctaggccggagccgcaggagccccgggtgatcgcccatgtcgacatggactgcttctatgttcaagtcgagcagcggaggaacccggcgctcaggggacagccgaccgccgtggtgcagtacaacggctggaaaggcggcggcttgattgccgtcagctacgaggctcgtggatttggtgtgaagaggtccatgcgcggagatgaggccaagagggtttgtcctggtattaatcttgttcaggtcccagtggcgcgtggcaaggctgaccttaatctttacagaagtgctggtgctgaggttgttgcaatccttgcaagcaaagggaagtgcgagcgggcatccatcgacgaagtttatcttgaccttactgatgcagcaaatgaaatggtcttacaagctcccccagattcaccagaggggatttttatggaggcggcaaagtcaaatatcttgggccttccggctgatgccagcgagaaggaaaagaatgtgagggcatggctttgtcaatcagaagctgattaccaggacaagttactggcatgtggagctataattgttgcacagttacgagtcagagttctggaggaaacccaattcacatgctctgctgggattgctcacaataagatgttagctaaacttgtcagtggaatgcacaagcctgctcagcaaacagttgtcccttcttcatcagttcaagacttactagcatcactacctgtgaagaagatgaaacagcttggtggtaagcttggaagttccttgcaggatgatcttggggttgagaccattggtgatctcctaagttttacagaggaaaaattacaagagcagtatggagtaaatactggaacttggttatggaagactgccaggggcattagcggggaagaagttgaggaccgtcttctcccaaagagtcacgggtgtggaaagacatttcctggcccaagagcactgaagtacagtgcttctgtcaaaggctggctggatcaactatgtgaagaattaagtgaacgtatccagtctgacctgaaccagaacaagagaattgctcaaacgctaactcttcatgccagagcatttaagaaaaatgaacatgattcaatgaagaaattcccttccaaatcctgtcctttgcgctatgggactgggaaaattcaggaggatgcaatgaggctatttgaatctggccttcatgagtttttagaatctcagaacactggatggggcataacatctctttctgtcactgcaagcaaaatatttgatatacctagtggaacaagctcaatcctgagatacattaaaggtccaagttctgctgcagctctgactatacctgattctccaagttctgctgcagctctggctatacctgattcttcatttgtacctgaggatccatctcttgataatgatgtatttgtggagccaattcatgaagaagaatgccaaccatcaacctctgagaaagaagacgacaataatacacattctgcgtctgcattttcagctaaaaaatgccgagcaaatgaagaaaaaagaatatcaaagaaattgcctggagttcaggtcagctgctcttttctccttggtggataccatcaaactgattttttgttggttattctcaagctgttggtgaatgaagatcttattttccttttgttgctgtttgcttgtttccgtgcaacaaagcagcaccaatgtctaatattcaagttggaaggtggcataacatccccaaaattaatgcttggcattgccttttgtatcagaaatgatcaaatcgagggcttttatttctgaggaacttcctcgatattgaagtttctttcacggggccaatctaccttacatgagaaaagaaaatctgatggactaatttgcagtcatcaaggtcccgggagttcttcggaagcatacaaagctggagcacacaatgtgcccgcggaagctgaggataggaacaacaccaacagttgtgctgaaccctctggcagtaacacatggacgttcaaccttcaagacattgatccagcggtggtagaggagctgccaccagagatccaaagagaaatacaggggtgggtccgtccatcgaagcacccgatcacgaagagacgtggttctacaatttcttcatactttccacccgcgaggtcttagatacgttgatacgttagttcttgattgtatattctttattttctacacacaacggcctcgctctgtgtattgtaattgtaagatgtgaagatgtttaggtagccctatatgtgattaacagcttgacgggacctctgagaatggtaagtttatttacgtggggtatggaaacatgaacattaaagcatgtgcaattgagttgaggtcctagggttgcatctacttatgttcatgttggaaaatgatttgagtacagtactcaaacaccacctgac

SEQ ID NO: 36491 - DNA, 2987 bp, Zea Mays
gggctttgtattcaatgggccgtgggctggtctagtaaatgagccttatgtagttgcccgttcatcttcttcatcttgccaagctttcctcaaaaactcgaaaaaggaacggagaaggcgtcctcgacgactgcccatggccgccgcccggacctaggctagggattgctgtctcctgagtcccgacctaccaaggcggaaagggagagggggcgctgtggcgtcaggaaataactggaagccgagggctgagggcgagttcagagtcaggtggttatcgctttctttttcgttttctttttccggagggtagtattggggatgccggttgctaggccggagccgcaggagccccgggtgatcgcccatgtcgacatggactgcttctatgttcaagtcgagcagcggaggaacccggcgctcaggggacagccgaccgccgtggtgcagtacaacggctggaaaggcggcggcttgattgccgtcagctacgaggctcgtggatttggtgtgaagaggtccatgcgcggagatgaggccaagagggtttgtcctggtattaatcttgttcaggtcccagtggcgcgtggcaaggctgaccttaatctttacagaagtgctggtgctgaggttgttgcaatccttgcaagcaaagggaagtgcgagcgggcatccatcgacgaagtttatcttgaccttactgatgcagcaaatgaaatggtcttacaagctcccccagattcaccagaggggatttttatggaggcggcaaagtcaaatatcttgggccttccggctgatgccagcgagaaggaaaagaatgtgagggcatggctttgtcaatcagaagctgattaccaggacaagttactggcatgtggagctataattgttgcacagttacgagtcagagttctggaggaaacccaattcacatgctctgctgggattgctcacaataaggtttataatgagtcgtactaatgttagctaaacttgtcagtggaatgcacaagcctgctcagcaaacagttgtcccttcttcatcagttcaagacttactagcatcactacctgtgaagaagatgaaacagcttggtggtaagcttggaagttccttgcaggatgatcttggggttgagaccattggtgatctcctaagttttacagaggaaaaattacaagagcagtatggagtaaatactggaacttggttatggaagactgccaggggcattagcggggaagaagttgaggaccgtcttctcccaaagagtcacgggtgtggaaagacatttcctggcccaagagcactgaagtacagtgcttctgtcaaaggctggctggatcaactatgtgaagaattaagtgaacgtatccagtctgacctgaaccagaacaagagaattgctcaaacgctaactcttcatgccagagcatttaagaaaaatgaacatgattcaatgaagaaattcccttccaaatcctgtcctttgcgctatgggactgggaaaattcaggaggatgcaatgaggctatttgaatctggccttcatgagtttttagaatctcagaacactggatggggcataacatctctttctgtcactgcaagcaaaatatttgatatacctagtggaacaagctcaatcctgagatacattaaaggtccaagttctgctgcagctctgactatacctgattctccaagttctgctgcagctctggctatacctgattcttcatttgtacctgaggatccatctcttgataatgatgtatttgtggagccaattcatgaagaagaatgccaaccatcaacctctgagaaagaagacgacaataatacacattctgcgtctgcattttcagctaaaaaatgccgagcaaatgaagaaaaaagaatatcaaagaaattgcctggagttcagcaccaatgtctaatattcaagttggaaggtggcataacatccccaaaattaatgcttggcattgccttttgtatcagaaatgatcaaatcgagggcttttatttctgagtcagctgcagtttctttcttacattatgttgcctatcatgattacggtcttgtacttgctttttattcagtgaaattagtactctattgtgccattttgccatgtactgaacttgttcacttctctttttttctcatttcttttgtgttggtagtacaagattttcaaactaatttttagtttccatgtcattaactcgcccaaggtgtttcattaccatagggaacttcctcgatattgaagtttctttcacggggccaatctaccttacatgagaaaagaaaatctgatggactaatttgcagtcatcaaggtttgctggactgtaagatgcaatgatgcagacattgattaagccactgccacgtttttttcgtttgctgaatattcatgatgacattaggtcccgggagttcttcggaagcatacaaagctggagcacacaatgtgcccgcggaagctgaggataggaacaacaccaacagttgtgctgaaccctctggcagtaacacatggacgttcaaccttcaagacattgatccagcggtggtagaggagctgccaccagagatccaaagagaaatacaggggtgggtccgtccatcgaagcacccgatcacgaagagacgtggttctacaatttcttcatactttccacccgcgaggtcttagatacgttgatacgttagttcttgattgtatattctttattttctacacacaacggcctcgctctgtgtattgtaattgtaagatgtgaagatgtttaggtagccctatatgtgattaacagcttgacgggacctctgagaatggtaagtttatttacgtggggtatggaaacatgaacattaaagcatgtgcaattgagttgaggtcctagggttgcatctacttatgttcatgttggaaaatgatttgagtacagtactcaaacaccacctgac

SEQ ID NO: 36492 - DNA, 2558 bp, Zea Mays
gggctttgtattcaatgggccgtgggctggtctagtaaatgagccttatgtagttgcccgttcatcttcttcatcttgccaagctttcctcaaaaactcgaaaaaggaacggagaaggcgtcctcgacgactgcccatggccgccgcccggacctaggctagggattgctgtctcctgagtcccgacctaccaaggcggaaagggagagggggcgctgtggcgtcaggaaataactggaagccgagggctgagggcgagttcagagtcaggtggttatcgctttctttttcgttttctttttccggagggtagtattggggatgccggttgctaggccggagccgcaggagccccgggtgatcgcccatgtcgacatggactgcttctatgttcaagtcgagcagcggaggaacccggcgctcaggggacagccgaccgccgtggtgcagtacaacggctggaaaggcggcggcttgattgccgtcagctacgaggctcgtggatttggtgtgaagaggtccatgcgcggagatgaggccaagagggtttgtcctggtattaatcttgttcaggtcccagtggcgcgtggcaaggctgaccttaatctttacagaagtgctggtgctgaggttgttgcaatccttgcaagcaaagggaagtgcgagcgggcatccatcgacgaagtttatcttgaccttactgatgcagcaaatgaaatggtcttacaagctcccccagattcaccagaggggatttttatggaggcggcaaagtcaaatatcttgggccttccggctgatgccagcgagaaggaaaagaatgtgagggcatggctttgtcaatcagaagctgattaccaggacaagttactggcatgtggagctataattgttgcacagttacgagtcagagttctggaggaaacccaattcacatgctctgctgggattgctcacaataagatgttagctaaacttgtcagtggaatgcacaagcctgctcagcaaacagttgtcccttcttcatcagttcaagacttactagcatcactacctgtgaagaagatgaaacagcttggtggtaagcttggaagttccttgcaggatgatcttggggttgagaccattggtgatctcctaagttttacagaggaaaaattacaagagcagtatggagtaaatactggaacttggttatggaagactgccaggggcattagcggggaagaagttgaggaccgtcttctcccaaagagtcacgggtgtggaaagacatttcctggcccaagagcactgaagtacagtgcttctgtcaaaggctggctggatcaactatgtgaagaattaagtgaacgtatccagtctgacctgaaccagaacaagagaattgctcaaacgctaactcttcatgccagagcatttaagaaaaatgaacatgattcaatgaagaaattcccttccaaatcctgtcctttgcgctatgggactgggaaaattcaggaggatgcaatgaggctatttgaatctggccttcatgagtttttagaatctcagaacactggatggggcataacatctctttctgtcactgcaagcaaaatatttgatatacctagtggaacaagctcaatcctgagatacattaaaggtccaagttctgctgcagctctgactatacctgattctccaagttctgctgcagctctggctatacctgattcttcatttgtacctgaggatccatctcttgataatgatgtatttgtggagccaattcatgaagaagaatgccaaccatcaacctctgagaaagaagacgacaataatacacattctgcgtctgcattttcagctaaaaaatgccgagcaaatgaagaaaaaagaatatcaaagaaattgcctggagttcagggaacttcctcgatattgaagtttctttcacggggccaatctaccttacatgagaaaagaaaatctgatggactaatttgcagtcatcaaggtttgctggactgtcccgggagttcttcggaagcatacaaagctggagcacacaatgtgcccgcggaagctgaggataggaacaacaccaacagttgtgctgaaccctctggcagtaacacatggacgttcaaccttcaagacattgatccagcggtggtagaggagctgccaccagagatccaaagagaaatacaggggtgggtccgtccatcgaagcacccgatcacgaagagacgtggttctacaatttcttcatactttccacccgcgaggtcttagatacgttgatacgttagttcttgattgtatattctttattttctacacacaacggcctcgctctgtgtattgtaattgtaagatgtgaagatgtttaggtagccctatatgtgattaacagcttgacgggacctctgagaatggtaagtttatttacgtggggtatggaaacatgaacattaaagcatgtgcaattgagttgaggtcctagggttgcatctacttatgttcatgttggaaaatgatttgagtacagtactcaaacaccacctgac

SEQ ID NO: 36493 - DNA, 2628 bp, Zea Mays
cgcacagcgaaagcttgcaatcccccaaggatttatctttcaatgttattttttcacactgctggtgtataagctggggcttgggctttgtattcaatgggccgtgggctggtctagtaaatgagccttatgtagttgcccgttcatcttcttcatcttgccaagctttcctcaaaaactcgaaaaaggaacggagaaggcgtcctcgacgactgcccatggccgccgcccggacctaggctagggattgctgtctcctgagtcccgacctaccaaggcggaaagggagagggggcgctgtggcgtcaggaaataactggaagccgagggctgagggcgagttcagagtcaggtggttatcgctttctttttcgttttctttttccggagggtagtattggggatgccggttgctaggccggagccgcaggagccccgggtgatcgcccatgtcgacatggactgcttctatgttcaagtcgagcagcggaggaacccggcgctcaggggacagccgaccgccgtggtgcagtacaacggctggaaaggcggcggcttgattgccgtcagctacgaggctcgtggatttggtgtgaagaggtccatgcgcggagatgaggccaagagggtttgtcctggtattaatcttgttcaggtcccagtggcgcgtggcaaggctgaccttaatctttacagaagtgctggtgctgaggttgttgcaatccttgcaagcaaagggaagtgcgagcgggcatccatcgacgaagtttatcttgaccttactgatgcagcaaatgaaatggtcttacaagctcccccagattcaccagaggggatttttatggaggcggcaaagtcaaatatcttgggccttccggctgatgccagcgagaaggaaaagaatgtgagggcatggctttgtcaatcagaagctgattaccaggacaagttactggcatgtggagctataattgttgcacagttacgagtcagagttctggaggaaacccaattcacatgctctgctgggattgctcacaataagatgttagctaaacttgtcagtggaatgcacaagcctgctcagcaaacagttgtcccttcttcatcagttcaagacttactagcatcactacctgtgaagaagatgaaacagcttggtggtaagcttggaagttccttgcaggatgatcttggggttgagaccattggtgatctcctaagttttacagaggaaaaattacaagagcagtatggagtaaatactggaacttggttatggaagactgccaggggcattagcggggaagaagttgaggaccgtcttctcccaaagagtcacgggtgtggaaagacatttcctggcccaagagcactgaagtacagtgcttctgtcaaaggctggctggatcaactatgtgaagaattaagtgaacgtatccagtctgacctgaaccagaacaagagaattgctcaaacgctaactcttcatgccagagcatttaagaaaaatgaacatgattcaatgaagaaattcccttccaaatcctgtcctttgcgctatgggactgggaaaattcaggaggatgcaatgaggctatttgaatctggccttcatgagtttttagaatctcagaacactggatggggcataacatctctttctgtcactgcaagcaaaatatttgatatacctagtggaacaagctcaatcctgagatacattaaaggtccaagttctgctgcagctctgactatacctgattctccaagttctgctgcagctctggctatacctgattcttcatttgtacctgaggatccatctcttgataatgatgtatttgtggagccaattcatgaagaagaatgccaaccatcaacctctgagaaagaagacgacaataatacacattctgcgtctgcattttcagctaaaaaatgccgagcaaatgaagaaaaaagaatatcaaagaaattgcctggagttcagggaacttcctcgatattgaagtttctttcacggggccaatctaccttacatgagaaaagaaaatctgatggactaatttgcagtcatcaaggtcccgggagttcttcggaagcatacaaagctggagcacacaatgtgcccgcggaagctgaggataggaacaacaccaacagttgtgctgaaccctctggcagtaacacatggacgttcaaccttcaagacattgatccagcggtggtagaggagctgccaccagagatccaaagagaaatacaggggtgggtccgtccatcgaagcacccgatcacgaagagacgtggttctacaatttcttcatactttccacccgcgaggtcttagatacgttgatacgttagttcttgattgtatattctttattttctacacacaacggcctcgctctgtgtattgtaattgtaagatgtgaagatgtttaggtagccctatatgtgattaacagcttgacgggacctctgagaatggtaagtttatttacgtggggtatggaaacatgaacattaaagcatgtgcaattgagttgaggtcctagggttgcatctacttatgttcatgttggaaaatgatttgagtacagtactcaaacaccacctgac

SEQ ID NO: 36494 - DNA, 2658 bp, Zea Mays
cgaccgcaaccgcacagcgaaagcttgcaatcccccaaggatttatctttcaatgttattttttcacactgctggtgtataagctggggcttgggctttgtattcaatgggccgtgggctggtctagtaaatgagccttatgtagttgcccgttcatcttcttcatcttgccaagctttcctcaaaaactcgaaaaaggaacggagaaggcgtcctcgacgactgcccatggccgccgcccggacctaggctagggattgctgtctcctgagtcccgacctaccaaggcggaaagggagagggggcgctgtggcgtcaggaaataactggaagccgagggctgagggcgagttcagagtcaggtggttatcgctttctttttcgttttctttttccggagggtagtattggggatgccggttgctaggccggagccgcaggagccccgggtgatcgcccatgtcgacatggactgcttctatgttcaagtcgagcagcggaggaacccggcgctcaggggacagccgaccgccgtggtgcagtacaacggctggaaaggcggcggcttgattgccgtcagctacgaggctcgtggatttggtgtgaagaggtccatgcgcggagatgaggccaagagggtttgtcctggtattaatcttgttcaggtcccagtggcgcgtggcaaggctgaccttaatctttacagaagtgctggtgctgaggttgttgcaatccttgcaagcaaagggaagtgcgagcgggcatccatcgacgaagtttatcttgaccttactgatgcagcaaatgaaatggtcttacaagctcccccagattcaccagaggggatttttatggaggcggcaaagtcaaatatcttgggccttccggctgatgccagcgagaaggaaaagaatgtgagggcatggctttgtcaatcagaagctgattaccaggacaagttactggcatgtggagctataattgttgcacagttacgagtcagagttctggaggaaacccaattcacatgctctgctgggattgctcacaataaggtttataatgagtcgtactaatgttagctaaacttgtcagtggaatgcacaagcctgctcagcaaacagttgtcccttcttcatcagttcaagacttactagcatcactacctgtgaagaagatgaaacagcttggtggtaagcttggaagttccttgcaggatgatcttggggttgagaccattggtgatctcctaagttttacagaggaaaaattacaagagcagtatggagtaaatactggaacttggttatggaagactgccaggggcattagcggggaagaagttgaggaccgtcttctcccaaagagtcacgggtgtggaaagacatttcctggcccaagagcactgaagtacagtgcttctgtcaaaggctggctggatcaactatgtgaagaattaagtgaacgtatccagtctgacctgaaccagaacaagagaattgctcaaacgctaactcttcatgccagagcatttaagaaaaatgaacatgattcaatgaagaaattcccttccaaatcctgtcctttgcgctatgggactgggaaaattcaggaggatgcaatgaggctatttgaatctggccttcatgagtttttagaatctcagaacactggatggggcataacatctctttctgtcactgcaagcaaaatatttgatatacctagtggaacaagctcaatcctgagatacattaaaggtccaagttctgctgcagctctgactatacctgattctccaagttctgctgcagctctggctatacctgattcttcatttgtacctgaggatccatctcttgataatgatgtatttgtggagccaattcatgaagaagaatgccaaccatcaacctctgagaaagaagacgacaataatacacattctgcgtctgcattttcagctaaaaaatgccgagcaaatgaagaaaaaagaatatcaaagaaattgcctggagttcagggaacttcctcgatattgaagtttctttcacggggccaatctaccttacatgagaaaagaaaatctgatggactaatttgcagtcatcaaggtcccgggagttcttcggaagcatacaaagctggagcacacaatgtgcccgcggaagctgaggataggaacaacaccaacagttgtgctgaaccctctggcagtaacacatggacgttcaaccttcaagacattgatccagcggtggtagaggagctgccaccagagatccaaagagaaatacaggggtgggtccgtccatcgaagcacccgatcacgaagagacgtggttctacaatttcttcatactttccacccgcgaggtcttagatacgttgatacgttagttcttgattgtatattctttattttctacacacaacggcctcgctctgtgtattgtaattgtaagatgtgaagatgtttaggtagccctatatgtgattaacagcttgacgggacctctgagaatggtaagtttatttacgtggggtatggaaacatgaacattaaagcatgtgcaattgagttgaggtcctagggttgcatctacttatgttcatgttggaaaatgatttgagtacagtactcaaacaccacctgac

SEQ ID NO: 36495 - DNA, 875 bp, Zea Mays
cttgccaatgctggctttctaaaacgaatgcacaagccatcagtgagtgtcgcgtaggtggctggtggcctagtgctgctcaaatctctggtttcaaccccgaaaaatccgctcgtcaggagaaatcatagcatgagtagtaaccaagcagccgccaggcaggcttgtgatgaactcggtttgactccatggagattaacaaagtccagtccatcaaggtttacctgatgccatggtttaatgagaccctgtttggccgtgctcctctggctcccccctccctgctaccgtaccagagccgcaaatggttagcggtacagtacagaaagccaaaagctgtcgcgtccaatcagagaacgaacctacaaaggcagtacactgaatggggcccagtccacaacctgccatccggcctatgcggaaacactgccattacccttgggccttggcgtggttccagaatggaatcgggttcaatgtccgtgattgcaaccgatcagcgggcgtcggcactcggctggcagccgtcggcatgagaggacgagcctgcttcaaccatcttgagctccagtaaaaaaaacatcttcgaactcatcgttatcacgacgtgagtccatggggacacaaacaatcggcgcgcaaaatggcttgtgccggcctggtgggagttggctgcgccgagaatgcttcgttttaggattctggacaccttgaaagtcaaaactatcaggtggtcctatggatattcaccaagacgatgctactgacatactgctccaatccgctgctcaaatcaaaatctggttgcatccatcggatgcaatcataattcataggctggaagtatcatgaacagccaccatacaatcagcaag

SEQ ID NO: 36496 - DNA, 996 bp, Zea Mays
ccaaaaagcccttccattgcttctgcagttctgcgtttctgcagcatcgcgctgtgacagtgaaaacatacacgcgtgtaaatgggtgcgcttttggatgcctttgcttgtgaaaactccacacgtttttagccggccgtttttgcagccttcaggtggtccatcccgacggcctttgcacgagtgttgagtctttagactcttgccaatgctggctttctaaaacgaatgcacaagccatcagtgagtgtcgcgtaggtggctggtggcctagtgctgctcaaatctctggtttcaaccccgaaaaatccgctcgtcaggagaaatcatagcatgagtagtaaccaagcagccgccaggcaggcttgtgatgaactcggtttgactccatggagattaacaaagtccagtccatcaaggtttacctggttagcggtacagtacagaaagccaaaagctgtcgcgtccaatcagagaacgaacctacaaaggcagtacactgaatggggcccagtccacaacctgccatccggcctatgcggaaacactgccattacccttgggccttggcgtggttccagaatggaatcgggttcaatgtccgtgattgcaaccgatcagcgggcgtcggcactcggctggcagccgtcggcatgagaggacgagcctgcttcaaccatcttgagctccagtaaaaaaaacatcttcgaactcatcgttatcacgacgtgagtccatggggacacaaacaatcggcgcgcaaaatggcttgtgccggcctggtgggagttggctgcgccgagaatgcttcgttttaggattctggacaccttgaaagtcaaaactatcaggtggtcctatggatattcaccaagacgatgctactgacatactgctccaatccgctgctcaaatcaaaatctggttgcatccatcggatgcaatcataattcataggctggaagtatcatgaacagccaccatacaatcagcaag

SEQ ID NO: 36497 - DNA, 2407 bp, Zea Mays
cctgcgaccacaacgatgtttcctgcgacagcaacgatgtttgttgggttggtgaagcgagggagttcgaataatcagtcctcagttcctcacgcatgtggcacgcgatgggccggatctgaggttgagacgttgagtgtgcgatcccgttggcatctcgacaaagtttggtgggtcccaccgcagatcccggcccggtaggtactagttccgccgtcccccctccctagtctccggggaggaccgtctcggccgagagagtgcgctcgtcgactccactcagctctctcgctcactctcctcccccaaggtcctagagacaggcagccggcgaggcgcgccgccgcgaagcaatggatttcaaggggttctgggagtccagattcggtggcaagaaggaacccgagccggagcagaacgggcacgccaacggggtccagaaccagaagaggacctccgatctggcggtctacgagcagttcgagcagcaggccaggcagacccaggtccgagccgccgcgattcgcgacggagacgctgatgtcatccagaagccccttctaccttcatttgagtcagctgaaatgcgtaatctcgcagagacattgttgagggatattattcgcgggagcccagatgtgaaatgggagagcatcaaaggactggaaaatgcaaaacgccttctaaaagaggctgttgtcatgcccataaagtacccaaaatacttcactggtctcctttctccatggaaaggcatcttactttttggccccccagggacaggaaagacaatgctggcaaaagcggtcgctactgagtgcaaaaccaccttcttcaacatttcagcatcatcaattgtcagcaaatggcgtggagattcagagaagcttgtcaaagttctgtttgagcttgctaggcatcatgcaccatccacaatattccttgatgaaatagatgctatcatcagccagcgtggtgaagctcgcagtgagcatgaagctagtcgtcgcttgaagactgagctacttattcagatggatggtttgacaaagacaaacgacttggtatttgtacttgcagctacaaatcttccctgggaattggatgcagccatgctccgccggcttgagaagcggattcttgtaccgcttcctgaaggtgaagcaagatattcgtctcgtgtgcaaagaagctgccatgcaaccactgagacgtctcatgtcagttcttgaagccagtgacgagttggttccggaggaagaactgcctgaggttggccctctgaaacctgatgatattgaacttgcattaaggaacactaggccgtcagcacatctccatgcgcatcgctatgagaagttcaaccaggactacggtagccatgtcgtttgttcagagctagcatgatcttattatcgggttgatgtttcgttcaatcatggaaccagagcagagctaatatatgtcctgctccggcgcatcagtttgttggcatgttgatgggggtcgcgtgttgtcaaaacggttgctgcgctggtaacgcgactcccaacatattgcagtttccctctggccgcagtaccttgcattttgcatgggttaaagtgcgaggtgcaggtgcttgctgctcagatctatgtgggcatgtggctttgttcatgcaatctgagattttcccgaatccttgaactcagaaaaaaaagattcgttctctagttacgtgtctaataaatgttagttaccctgcagaaaagtacactctggtttatatttaaaggaaaacgagccagagagcttgtataagtttcttctgattgttggtgtaattacccagctcgttaaaccaagctttaacaacaaattcttgcatgttgtggtcaactgctatccaatgtccagtgtggcttgttgctcttggctagtcagcgaagcatcccgtgcgccgccacgtccagtgcctttcaagtttcaacacccctgcagtcgctttcttcccagttccaggcgagagcctcgctttcctgtttgacatcggccgtggcagacgagcaatctgcgtatactcgagcgctcattctcaaccggagcctggtatcaccaccaggtagactggcagagcgtcgcttgaaagaggcctggggctgcttgtgcccgccgccaagggtcacggagccgttcgatttatctggctagccggtaatcagtggtggccggttttgtgttaccgatttttatagtttgaatttagaatattttgtaaattttgataaaataaataatgtcagtttttgtataaatactatggattatttgatgactttctaaaaaaccaaaatttaaaatcgcaacaaaatgaaactaaaaaccaaacaagttttgtaaaatttaaaaataaaaaagaaaactc

SEQ ID NO: 36498 - DNA, 2405 bp, Zea Mays
cctgcgaccacaacgatgtttcctgcgacagcaacgatgtttgttgggttggtgaagcgagggagttcgaataatcagtcctcagttcctcacgcatgtggcacgcgatgggccggatctgaggttgagacgttgagtgtgcgatcccgttggcatctcgacaaagtttggtgggtcccaccgcagatcccggcccggtaggtactagttccgccgtcccccctccctagtctccggggaggaccgtctcggccgagagagtgcgctcgtcgactccactcagctctctcgctcactctcctcccccaaggtcctagagacaggcagccggcgaggcgcgccgccgcgaagcaatggatttcaaggggttctgggagtccagattcggtggcaagaaggaacccgagccggagcagaacgggcacgccaacggggtccagaaccagaagaggacctccgatctggcggtctacgagcagttcgagcagcaggccaggcagacccaggtccgagccgccgcgattcgcgacggagacgctgatgtcatccagaagccccttctaccttcatttgagtcagctgaaatgcgtaatctcgcagagacattgttgagggatattattcgcgggagcccagatgtgaaatgggagagcatcaaaggactggaaaatgcaaaacgccttctaaaagaggctgttgtcatgcccataaagtacccaaaatacttcactggtctcctttctccatggaaaggcatcttactttttggccccccagggacaggaaagacaatgctggcaaaagcggtcgctactgagtgcaaaaccaccttcttcaacatttcagcatcatcaattgtcagcaaatggcgtggagattcagagaagcttgtcaaagttctgtttgagcttgctaggcatcatgcaccatccacaatattccttgatgaaatagatgctatcatcagccagcgtggtgaagctcgcagtgagcatgaagctagtcgtcgcttgaagactgagctacttattcagatggatggtttgacaaagacaaacgacttggtatttgtacttgcagctacaaatcttccctgggaattggatgcagccatgctccgccggcttgagaagcggattcttgtaccgcttcctgaaggtgaagcaaggcaagcgatgtttgaggaacttctgccagcaactacctcaaagttagaaatcccgtacgacatactagttgaaaagactgaaggttactctggttcagatattcgtctcgtgtgcaaagaagctgccatgcaaccactgagacgtctcatgtcagttcttgaagccagtgacgagttggttccggaggaagaactgcctgaggttggccctctgaaacctgatgatattgaacttgcattaaggaacactaggccgtcagcacatctccatgcgcatcgctatgagaagttcaaccaggactacggtagccatgtcgtttgttcagagctagcatgatcttattatcgggtaaagctttcaagcctgacgaaatctgcccaacatattgcagtttccctctggccgcagtaccttgcattttgcatgggttaaagtgcgaggtgcaggtgcttgctgctcagatctatgtgggcatgtggctttgttcatgcaatctgagattttcccgaatccttgaactcagaaaaaaaagattcgttctctagttacgtgtctaataaatgttagttaccctgcagaaaagtacactctggtttatatttaaaggaaaacgagccagagagcttgtataagtttcttctgattgttggtgtaattacccagctcgttaaaccaagctttaacaacaaattcttgcatgttgtggtcaactgctatccaatgtccagtgtggcttgttgctcttggctagtcagcgaagcatcccgtgcgccgccacgtccagtgcctttcaagtttcaacacccctgcagtcgctttcttcccagttccaggcgagagcctcgctttcctgtttgacatcggccgtggcagacgagcaatctgcgtatactcgagcgctcattctcaaccggagcctggtatcaccaccaggtagactggcagagcgtcgcttgaaagaggcctggggctgcttgtgcccgccgccaagggtcacggagccgttcgatttatctggctagccggtaatcagtggtggccggttttgtgttaccgatttttatagtttgaatttagaatattttgtaaattttgataaaataaataatgtcagtttttgtataaatactatggattatttgatgactttctaaaaaaccaaaatttaaaatcgcaacaaaatgaaactaaaaaccaaacaagttttgtaaaatttaaaaataaaaaagaaaactc

SEQ ID NO: 36499 - DNA, 1840 bp, Zea Mays
aaacaatgcaacacacacatacaaacgtagtttacacaaataaatccatggtttttttaattattttaaagttgaaacacgcgcctactcactttcaataggtgttttatttatggcaccaccgctaaagggcgagatcaaagtcaaaaggaaatccgggctgctgtagtaaactcagatctagagggagcagcaaggcacagctgacctttgcatactgctgcagagcgctcattgaaccctgttcgcgagggtcaaataacttgttcagaggatggcccagtgccgtggaggtccatgcctatctttttatgtcgtaccttcatcaccacacatccacgccatgatctatagtgctctggactttggaccactacatggggtacccagttggaggacagttggtagatgtttcactttcacggcctcaccacataagatcgatgggcatagtcacatggccgtccttgtgagaacaatgaagcatggcctgctcagcaatggtgactttgagacagcaccaagtggtggttttgtaaaatctgcttctgttgctgagggtgcatcgtcaatccctggttggacgatcaacggcacggttgaactcatttcagcaggccaacaccagggtggcatgatcctgattgttccacaggcaggtggtggacgttgagaagggttcggagtatgctatcacattcagtgctgcccggacatgtgcacaactggaggcactgaatgtttccgtgctaggtggcgtgtctcagacagtagacttgcagacgttgtacaacatagaaggctgggatgcgtacgcgttggcttttcaggcgacggaagagcaggcacatcttcaattcatgaaccctggcatggaggatgatccaacttgtggtcctatcctagacaacgttgccgtcaagaagctcttcaccccagacaaaccaaaggataacgtggtgctgaatggagactttgaggagggtccatggatgttccccaacacgagcttcggcgtgctgctcccaactaaccttgacgagcaaacgtctgccatacctggttggatgatcgagtcaaaccgcgccgtccgctacatagactctgatgagtacaaggttccccagggaaagcgtgccattgagcttctgtcaggcaaggaaggtatcatctcccagatggttgagaccacccctcagaaggtttacagcctgacgttcacactgggcacggcgggggactcgtgccaaccaccaatggccgtcatggcattcgcgggggatcaggcccagaacttccactactccccaatgggcaacgccaccagccaggctgcgaatgtgacgttcactgcacgcgctgagagaacacgtgtggcgttctatagcgtgtattacaacacgaggagtgacgaccacagctcgctgtgtggcccggtgattgacgatgtccgggtatgggcattgaacgccgcggctgggttgaaggcaagtattgggctggttcttggcattgttggtgtcgttggcatggtgttgttctgaaatctgaatctctcggtgccagtggtcttgggaagtatggatgtataacttcttctgttagttggaggcttactagttttggtagtaagcttgaagtttgttgagtgatatgagcttaggttaaaaagctacgagaacctacatggtattgcttgtgttacttcattggtgacatgcagttgtatggtattgtgtggcttgtttgccctagcttgtaatatgagatgtcagaattattcgaagatcatctcttcaatatattagaaaagagtaaagtgcaacatcaattgtccaat

SEQ ID NO: 36500 - DNA, 1417 bp, Zea Mays
cagcgaggatcaaccagatactaggcctgctcagcaatggtgactttgagacagcaccaagtggtggttttgtaaaatctgcttctgttgctgagggtgcatcgtcaatccctggttggacgatcaacggcacggttgaactcatttcagcaggccaacaccagggtggcatgatcctgattgttccacagggggaccatgcagtaaggctagggaatgatgctagcgttgggcaggtggtggacgttgagaagggttcggagtatgctatcacattcagtgctgcccggacatgtgcacaactggaggcactgaatgtttccgtgctaggtggcgtgtctcagacagtagacttgcagacgttgtacaacatagaaggctgggatgcgtacgcgttggcttttcaggcgacggaagagcaggcacatcttcaattcatgaaccctggcatggaggatgatccaacttgtggtcctatcctagacaacgttgccgtcaagaagctcttcaccccagacaaaccaaaggataacgtggtgctgaatggagactttgaggagggtccatggatgttccccaacacgagcttcggcgtgctgctcccaactaaccttgacgagcaaacgtctgccatacctggttggatgatcgagtcaaaccgcgccgtccgctacatagactctgatgagtacaaggttccccagggaaagcgtgccattgagcttctgtcaggcaaggaaggtatcatctcccagatggttgagaccacccctcagaaggtttacagcctgacgttcacactgggcacggcgggggactcgtgccaaccaccaatggccgtcatggcattcgcgggggatcaggcccagaacttccactactccccaatgggcaacgccaccagccaggctgcgaatgtgacgttcactgcacgcgctgagagaacacgtgtggcgttctatagcgtgtattacaacacgaggagtgacgaccacagctcgctgtgtggcccggtgattgacgatgtccgggtatgggcattgaacgccgcggctgggttgaaggcaagtattgggctggttcttggcattgttggtgtcgttggcatggtgttgttctgaaatctgaatctctcggtgccagtggtcttgggaagtatggatgtataacttcttctgttagttggaggcttactagttttggtagtaagcttgaagtttgttgagtgatatgagcttaggttaaaaagctacgagaacctacatggtattgcttgtgttacttcattggtgacatgcagttgtatggtattgtgtggcttgtttgccctagcttgtaatatgagatgtcagaattattcgaagatcatctcttcaatatattagaaaagagtaaagtgcaacatcaattgtccaat

SEQ ID NO: 36501 - DNA, 1377 bp, Zea Mays
caggcagcgaggatcaaccagatactaggcctgctcagcaatggtgactttgagacagcaccaagtggtggttttgtaaaatctgcttctgttgctgagggtgcatcgtcaatccctggttggacgatcaacggcacggttgaactcatttcagcaggccaacaccagggtggcatgatcctgattgttccacagggtggtggacgttgagaagggttcggagtatgctatcacattcagtgctgcccggacatgtgcacaactggaggcactgaatgtttccgtgctaggtggcgtgtctcagacagtagacttgcagacgttgtacaacatagaaggctgggatgcgtacgcgttggcttttcaggcgacggaagagcaggcacatcttcaattcatgaaccctggcatggaggatgatccaacttgtggtcctatcctagacaacgttgccgtcaagaagctcttcaccccagacaaaccaaaggataacgtggtgctgaatggagactttgaggagggtccatggatgttccccaacacgagcttcggcgtgctgctcccaactaaccttgacgagcaaacgtctgccatacctggttggatgatcgagtcaaaccgcgccgtccgctacatagactctgatgagtacaaggttccccagggaaagcgtgccattgagcttctgtcaggcaaggaaggtatcatctcccagatggttgagaccacccctcagaaggtttacagcctgacgttcacactgggcacggcgggggactcgtgccaaccaccaatggccgtcatggcattcgcgggggatcaggcccagaacttccactactccccaatgggcaacgccaccagccaggctgcgaatgtgacgttcactgcacgcgctgagagaacacgtgtggcgttctatagcgtgtattacaacacgaggagtgacgaccacagctcgctgtgtggcccggtgattgacgatgtccgggtatgggcattgaacgccgcggctgggttgaaggcaagtattgggctggttcttggcattgttggtgtcgttggcatggtgttgttctgaaatctgaatctctcggtgccagtggtcttgggaagtatggatgtataacttcttctgttagttggaggcttactagttttggtagtaagcttgaagtttgttgagtgatatgagcttaggttaaaaagctacgagaacctacatggtattgcttgtgttacttcattggtgacatgcagttgtatggtattgtgtggcttgtttgccctagcttgtaatatgagatgtcagaattattcgaagatcatctcttcaatatattagaaaagagtaaagtgcaacatcaattgtccaat

SEQ ID NO: 36502 - DNA, 1494 bp, Zea Mays
ccccaccaacaactacccgcgctacgcgtacgtagcgcactccactggaatactggatcgctctcggagcagggaaggagctagctagctagctggcgcaggctgtcctcatgttccaaaagtctcgtcccatgtgacccctccaattccaattcccgtccgtctccatcccctcgccccggcacaagctacccgggggccaggacggtggtgccgtgcggtctcgtagctactgcactgcatcactataaagctaagctccaggcgccgcgccgcccatctatcgcgagatctagcgagcgagcgcgcacactgctggcggcaccaggctacgacgatcgagagagccgccgtgccagcacattgtccattgtccgcgcggcgggggatcgggcggacgcgcacataatatggcgcagctgccgcccagggtcccgaccgcggtgcaccgctggccggagggcggccaccacggcgcggcggcgtgggccgatgacttcgccgagttcgctgcgtcgcggcggggcgcgcaccgcaggtccctgagcgactcggtcgccttcgtcgaggtggcgcccgcggccggcgagttcgacaggctcgacgacgaccagctcatgtccatgttccccgacgaggccgccgccggcggcggcggcggcgggtcgtccgcggcagggtccgagaacaacggcggcagcagcgacagttacggcgataggcgcggcggcggtggccctgcggcgggaggcaccagcaccaccaccagctgcaatggcttcgatggtggcgagcacaacgaagccgcggacgcgcaggcgacggggcaagctgccgccgccgccgccgcctccacggagctgatccgggaccccaagagggtgaagaggatccttgccaaccggcagtcagctcagaggtcgcgggtgaggaagctgcagtacatctccgagctcgagcgcagcgtcacaacactgcagaacgaggtgtccgcgctgtctccccgtgtggcatttctggatcagcagcgtaccatactgaccgtcggcaacagccacctcaagcagcggatcgcagctcttgctcaggacaagattttcaaggatgctcatcaagaggcgttgaagaaggagatcgagaggctgcgccaggtctacgagcagcagaacctcaagatgtcagccggcgctgctgcctctgaccatggcccgccaccggtgcgcgcggagaaagagctcatgagctagctacccagtcgatccacgcgtgcccgctgtgcagtgcagcccgcccgccttatcattaattaacatggagggaacattgcatcatgatttctctttttttcggattatgtggatgttttcttctttctttctttcttcttccattgacacgtgtgcgttaattctttgtatgttgattttgggatttggttcactgtgcaaattgtggtaaagtcatcagggaaactgatcttttcaaaaaaaaaaa

SEQ ID NO: 36503 - DNA, 1259 bp, Zea Mays
aaactaatccagaagtggggaggaaaatcatcttagtgatgatgaataaaacatgtcttaccaaacagaacaaaaaacacaagcagaatagcttatctactagtcgcaaatagtttggatcacctgcttccctctcttagagatgttgcttgtattcaattcataccatccaataactaagtctaaacatttatgtaagtggcacaacaatgagaggaacaatgcaccttaaaaaattttaggttatttgacattcatacccccggttttagggtttgtggtgattttgaacctattttttgaactttgtgtttttgcccctgttatttcaaatcgaagcaagactttgcccctattctgttaagtcattataacagtgttaatcctgacgtgagataacaattttgcccttgcagatttgccctcgcttttgttggttctttgtgattttacttttacccatgtttggattcaaaggttttgacattatttttgcagatttgacaaggattttggcaacaacatttaacacaagtggctgcatgtattttaaatgttgcaaattttgacaaattttgcaaaattttaacagcatttatgcaaaactattgacatacacaacacacaaatcattatcacacaacttgcattaatcatgaaatgcatagacaacaaccatgatatgagtacccacaccctatgcataaggatacagcttacagctcgctcgcttcaactaatgcaggtccctcacgactcaggaaccaagtccatctgcatgtgcagggtgcctgagactaagagtaaagtgctacagttgcacagtatcatccccatgcagctctagtttgccctcgatcctccccttaaggagcgatcgtttatgacgtgaacacgactacagtattgcaaatcaccaatggcatggcatcatcccttctcgattcgcgaatcatgggatgagactagagaaaaaaaaactacacacacgcacacacaaaaataaaaggtgggatcagacccgaatacaaataccaaataggctgagttagggttcggtgctcggtttcgcgcagctggaaggggggagggggtgcgcatacctggtggtgcccgtcgccggcgaaggacccgactaacacttggtgaaggggccgacaagacaccttggcacctggtgagtggtgattgccgttggcctagtgccggggcggagagagcgcgcgcggggaattgctactcatagcagtagaatgaaa

SEQ ID NO: 36504 - DNA, 366 bp, Zea Mays
atgtcccgcgcgatggagtggtgcagcacgtcggcggggtggtcggtggggagggtgccgcctgcgcggagctgcgcgttggcgaggaggagcacgaggtgctcccgctggttgcggacgttgtcgagctggaagccgaaggtggcgccgagccagtcgaagaggtcggcacggaaggcgtcccaggcgcgggctagcggaggcggcggcaggtccgccgcgtgcgccagcgcctccacggccgcgcgcacctccgggaaccgcagcgacgggtgctccccgtgcatcaccacgtcgtggatcgggatgatgttgtaagccggcggctccgggtacccccctcctcccgccgccgccgccgctgca

SEQ ID NO: 36505 - DNA, 691 bp, Zea Mays
gtacggtttattggcgtctcgctccgtctccgcactgtcctgttgcgccggccaccacagtgcagaagaacacacagcatccgcctgcctcgccgccgcaatggccgccgtggcgagatcctttctccggtccagcggctcatcgtccctccgcagcgcggcggccagagccgcctcgcgggccggaccggttccgctgccgaggcggatacccagttctgggccccgggtactcctaagcgtgtgcctggagtccctgatgcccatgcacagcgccacggcttcggcgctcatgacgtcgctactcgctgccccggcttgcaagggattgggttggctatcagaagctggtaatgatgacttgtgacactctctagatggaatgtagcagattattatcctgtcacctcagatctacagatggatgatttgtcattattggagacctgcagtgatggtatctggtctggattatgcaatacctcgtgaatttatagtacttggttggcgtctcagttaacatgttttgtgctctgggattccagtttgtatgaaatttacataattcttcctgagatttattttggcccactagctgtcaaaaagactttggtcttgacgaccaggctgatcatgtacatctggaatgaataagcttgattaaaggcttttcacatttcacatattttgc

SEQ ID NO: 36506 - DNA, 795 bp, Zea Mays
gtacggtttattggcgtctcgctccgtctccgcactgtcctgttgcgccggccaccacagtgcagaagaacacacagcatccgcctgcctcgccgccgcaatggccgccgtggcgagatcctttctccggtccagcggctcatcgtccctccgcagcgcggcggccagagccgcctcgcgggccggaccggttccgctgccgaggcggatacccagttctgggccccgggtactcctaagcgtgtgcctggagtccctgatgcccatgcacagcgccacggcttcggcgctcatgacgtcgctactcgctgccccggcttgcaagggattgggttggctatcagaagctggtaatgatgacttgtgacactctctagatggaatgtagcagattattatcctgtcacctcagatctacaggcctgtggttagtgcgatggaggtcatctttgatgaggactagaccgcgtgctatttgttttgccctctgttgccttgattttgctcattataaatgaaacagaatggatgatttgtcattattggagacctgcagtgatggtatctggtctggattatgcaatacctcgtgaatttatagtacttggttggcgtctcagttaacatgttttgtgctctgggattccagtttgtatgaaatttacataattcttcctgagatttattttggcccactagctgtcaaaaagactttggtcttgacgaccaggctgatcatgtacatctggaatgaataagcttgattaaaggcttttcacatttcacatattttgc

SEQ ID NO: 36507 - DNA, 1994 bp, Zea Mays
aatacatcttgatctattccagggttgtacataagttattgtgctgaagaagggcactagagctaaaggaggctagtgcaatcccgtttgctgctttgactgcatggcgcgctttacatgacaaagagttcttgtgattggtggaggaggagcggttggattagctgctgttcaacttgcggtggctgctgggtgtgtggtttctgctacctgtggaacacaaagtattgagcgagttatgggagttggtgctgaacaagctattgactacactgctgaggtaagtagcctttggtgctcttgtccttgtacaatcttttaaggtaataatgttgcatcttgagatattagtttgtgatgcaacagcatacacaggctatttaacattcgtttgcagttgtcgtcttgtaaaatcttgctgcagatgtaagctgtattctttgtctaccctttacagaattatataaaatgatgtattctatattagtgatcatgtgatagctgcatggtattcaatacacttcatgtgatcttcacggccttctttattgctcaagctatattattcttcatggagtagaaggggactctggcgagctctttgccactttgctctatgaagctggcagctgcttgatgctttgcattgtaattcttcatggatgcttccatttcatgacaaacctgtaatattatacttgcagatctgcaggattccacggacacttaaatctgttcccctcctcctaggtttaatgtagctattttttcttcatgtaataagatgaaaatccaatatatatgcacttgttcggggatgccacagatgctcctggaatccattagttttgtgtgctggcttgagttgcacaactatgtggagcaaacttgcaattgaagacccccaggccccaccacaccgcaaaaaaaggaaaaaagaaaatatttaacagaaggcacctaaatctttgcttattcttctggaccagaagtttgcgccagcttccactaatgaataaatggctagtatttatctttaattgcattgcatttttattccccttgcattgggtgctatcttgtttgtcttctatttataacctaccttacaggatactgaagcagcaattaaaggaaagtttgatgctgttttagacaccataggagtacctgagacagaaagaattggcatcaatgttcttaggagaggtggacactatatgacccttcagggagaagcagctgccctagcagataggtatggattggctgtagggcttcctgctgctactgctgttttactaaagaaacagatgcagtatcgttattctcatggaatagagtattggtggacatacatgagagctgacgccgaaggccttcacgagatccaaaggctatctggagctgggaaactacagatacctgtggagaagacctttcccatcagccatgtaagagaagctcatgcggccaaggagaaaaagttggctcctggcaaggtggttctggaattcgattaatgttattaagattttgtccattgggacctgaagggctgtgcgtttgcaaatcatgatagttttttttgtaaaaaaataaatctgaatctctctgccgacttcaggttccattttatcgttccgtttcagtagaaatacggtaaataatcatatcagctatggcctatgggcacgattttcctgatgaaattcttctgtcacagtgtatccatacttgcatcgagatactcgatgtttcgcggtgcatcttcaccacgcccatgctgttccacagtatcaaagcgccacagtgccacgttcaccttcgcaggcaattttagtgctccgtttatttttataagccttattagttatgaggaagctatgctttataacatcgatttcttctacaatatactttatcggttaatgcaagacccaatgtctttctgaaagatgaaatacagatctggtgatgtcacacctgaattt

SEQ ID NO: 36508 - DNA, 1211 bp, Zea Mays
gttctactgtctagtctgaacttgggagagcctgttgtctcttgcacacaatacatcttgatctattccagggttgtacataagttattgtgctgaagaagggcactagagctaaaggaggctagtgcaatcccgtttgctgctttgactgcatggcgcgctttacatgacaaagagttcttgtgattggtggaggaggagcggttggattagctgctgttcaacttgcggtggctgctgggtgtgtggtttctgctacctgtggaacacaaagtattgagcgagttatgggagttggtgctgaacaagctattgactacactgctgaggatactgaagcagcaattaaaggaaagtttgatgctgttttagacaccataggagtacctgagacagaaagaattggcatcaatgttcttaggagaggtggacactatatgacccttcagggagaagcagctgccctagcagataggtatggattggctgtagggcttcctgctgctactgctgttttactaaagaaacagatgcagtatcgttattctcatggaatagagtattggtggacatacatgagagctgacgccgaaggccttcacgagatccaaaggctatctggagctgggaaactacagatacctgtggagaagacctttcccatcagccatgtaagagaagctcatgcggccaaggagaaaaagttggctcctggcaaggtggttctggaattcgattaatgttattaagattttgtccattgggacctgaagggctgtgcgtttgcaaatcatgatagttttttttgtaaaaaaataaatctgaatctctctgccgacttcaggttccattttatcgttccgtttcagtagaaatacggtaaataatcatatcagctatggcctatgggcacgattttcctgatgaaattcttctgtcacagtgtatccatacttgcatcgagatactcgatgtttcgcggtgcatcttcaccacgcccatgctgttccacagtatcaaagcgccacagtgccacgttcaccttcgcaggcaattttagtgctccgtttatttttataagccttattagttatgaggaagctatgctttataacatcgatttcttctacaatatactttatcggttaatgcaagacccaatgtctttctgaaagatgaaatacagatctggtgatgtcacacctgaattt

SEQ ID NO: 36509 - DNA, 1452 bp, Zea Mays
attttcacataaaccgatatacttaaccctttctcacacactccttcgcctcccatcccaccccgaagggcgtcgccgagctagccattgccgcctcccggctcgcgactcgcgagtcacaggcgcagccgagcgttccttggggacgaggctacatcgcgatgtggtggagggcggtgaggcgccggtgggtcgcgacggcgcggcccgcgtcctccgcggcggcgggggcggagaagagctgccgcgccgtggtggtgccgcgtttcggtgggccggaggtgctcgaggtcaggcagggcatgcctgtgcccgatctgaagccgcaggagatgcgatgtggctatgggcgctccatattcgaaccactcctacctctgatcattggtcgggacattagcggtgaagttgcggccaccggaactttggcatcgtctttttctattggccaagaagtgtttggttcgttgcatccaactgctctcagagggacatatgctgattatgctatcctgtcactggacgagcttactctcaaaccatctacactcagtcatgtggaggctagtgcaatcccgtttgctgctttgactgcatggcgcgctttacatggtacggctcgtatttctgaaggacaaagagttcttgtgattggtggaggaggagcggttggattagctgctgttcaacttgcggtggctgctgggtgtgtggtttctgctacctgtggaacacaaagtattgagcgagttatgggagttggtgctgaacaagctattgactacactgctgaggatactgaagcagcaattaaaggaaagtttgatgctgttttagacaccataggagtacctgagacagaaagaattggcatcaatgttcttaggagaggtggacactatatgacccttcagggagaagcagctgccctagcagataggtatggattggctgtagggcttcctgctgctactgctgttttactaaagaaacagatgcagtatcgttattctcatggaatagagtattggtggacatacatgagagctgacgccgaaggccttcacgagatccaaaggctatctggagctgggaaactacagatacctgtggagaagacctttcccatcagccatgtaagagaagctcatgcggccaaggagaaaaagttggctcctggcaagtgtatccatacttgcatcgagatactcgatgtttcgcggtgcatcttcaccacgcccatgctgttccacagtatcaaagcgccacagtgccacgttcaccttcgcaggcaattttagtgctccgtttatttttataagccttattagttatgaggaagctatgctttataacatcgatttcttctacaatatactttatcggttaatgcaagacccaatgtctttctgaaagatgaaatacagatctggtgatgtcacacctgaattt

SEQ ID NO: 36510 - DNA, 2284 bp, Zea Mays
attttcacataaaccgatatacttaaccctttctcacacactccttcgcctcccatcccaccccgaagggcgtcgccgagctagccattgccgcctcccggctcgcgactcgcgagtcacaggcgcagccgagcgttccttggggacgaggctacatcgcgatgtggtggagggcggtgaggcgccggtgggtcgcgacggcgcggcccgcgtcctccgcggcggcgggggcggagaagagctgccgcgccgtggtggtgccgcgtttcggtgggccggaggtgctcgaggtcaggcagggcatgcctgtgcccgatctgaagccgcaggagatgcgatgtggctatgggcgctccatattcgaaccactcctacctctgatcattggtcgggacattagcggtgaagttgcggccaccggaactttggcatcgtctttttctattggccaagaagtgtttggttcgttgcatccaactgctctcagagggacatatgctgattatgctatcctgtcactggacgagcttactctcaaaccatctacactcagtcatgtggaggctagtgcaatcccgtttgctgctttgactgcatggcgcgctttacatggtacggctcgtatttctgaaggacaaagagttcttgtgattggtggaggaggagcggttggattagctgctgttcaacttgcggtggctgctgggtgtgtggtttctgctacctgtggaacacaaagtattgagcgagttatgggagttggtgctgaacaagctattgactacactgctgaggtaagtagcctttggtgctcttgtccttgtacaatcttttaaggtaataatgttgcatcttgagatattagtttgtgatgcaacagcatacacaggctatttaacattcgtttgcagttgtcgtcttgtaaaatcttgctgcagatgtaagctgtattctttgtctaccctttacagaattatataaaatgatgtattctatattagtgatcatgtgatagctgcatggtattcaatacacttcatgtgatcttcacggccttctttattgctcaagctatattattcttcatggagtagaaggggactctggcgagctctttgccactttgctctatgaagctggcagctgcttgatgctttgcattgtaattcttcatggatgcttccatttcatgacaaacctgtaatattatacttgcagatctgcaggattccacggacacttaaatctgttcccctcctcctaggtttaatgtagctattttttcttcatgtaataagatgaaaatccaatatatatgcacttgttcggggatgccacagatgctcctggaatccattagttttgtgtgctggcttgagttgcacaactatgtggagcaaacttgcaattgaagacccccaggccccaccacaccgcaaaaaaaggaaaaaagaaaatatttaacagaaggcacctaaatctttgcttattcttctggaccagaagtttgcgccagcttccactaatgaataaatggctagtatttatctttaattgcattgcatttttattccccttgcattgggtgctatcttgtttgtcttctatttataacctaccttacaggatactgaagcagcaattaaaggaaagtttgatgctgttttagacaccataggagtacctgagacagaaagaattggcatcaatgttcttaggagaggtggacactatatgacccttcagggagaagcagctgccctagcagataggtatggattggctgtagggcttcctgctgctactgctgttttactaaagaaacagatgcagtatcgttattctcatggaatagagtattggtggacatacatgagagctgacgccgaaggccttcacgagatccaaaggctatctggagctgggaaactacagatacctgtggagaagacctttcccatcagccatgtaagagaagctcatgcggccaaggagaaaaagttggctcctggcaagtgtatccatacttgcatcgagatactcgatgtttcgcggtgcatcttcaccacgcccatgctgttccacagtatcaaagcgccacagtgccacgttcaccttcgcaggcaattttagtgctccgtttatttttataagccttattagttatgaggaagctatgctttataacatcgatttcttctacaatatactttatcggttaatgcaagacccaatgtctttctgaaagatgaaatacagatctggtgatgtcacacctgaattt

SEQ ID NO: 36511 - DNA, 2357 bp, Zea Mays
attttcacataaaccgatatacttaaccctttctcacacactccttcgcctcccatcccaccccgaagggcgtcgccgagctagccattgccgcctcccggctcgcgactcgcgagtcacaggcgcagccgagcgttccttggggacgaggctacatcgcgatgtggtggagggcggtgaggcgccggtgggtcgcgacggcgcggcccgcgtcctccgcggcggcgggggcggagaagagctgccgcgccgtggtggtgccgcgtttcggtgggccggaggtgctcgaggtcaggcagggcatgcctgtgcccgatctgaagccgcaggaggtgctcgtgcgcgcacgcgctgtctctatcaaccccctggacctccgaatgcgatgtggctatgggcgctccatattcgaaccactcctacctctgatcattggtcgggacattagcggtgaagttgcggccaccggaactttggcatcgtctttttctattggccaagaagtgtttggttcgttgcatccaactgctctcagagggacatatgctgattatgctatcctgtcactggacgagcttactctcaaaccatctacactcagtcatgtggaggctagtgcaatcccgtttgctgctttgactgcatggcgcgctttacatgacaaagagttcttgtgattggtggaggaggagcggttggattagctgctgttcaacttgcggtggctgctgggtgtgtggtttctgctacctgtggaacacaaagtattgagcgagttatgggagttggtgctgaacaagctattgactacactgctgagaattatataaaatgatgtattctatattagtgatcatgtgatagctgcatggtattcaatacacttcatgtgatcttcacggccttctttattgctcaagctatattattcttcatggagtagaaggggactctggcgagctctttgccactttgctctatgaagctggcagctgcttgatgctttgcattgtaattcttcatggatgcttccatttcatgacaaacctgtaatattatacttgcagatctgcaggattccacggacacttaaatctgttcccctcctcctaggtttaatgtagctattttttcttcatgtaataagatgaaaatccaatatatatgcacttgttcggggatgccacagatgctcctggaatccattagttttgtgtgctggcttgagttgcacaactatgtggagcaaacttgcaattgaagacccccaggccccaccacaccgcaaaaaaaggaaaaaagaaaatatttaacagaaggcacctaaatctttgcttattcttctggaccagaagtttgcgccagcttccactaatgaataaatggctagtatttatctttaattgcattgcatttttattccccttgcattgggtgctatcttgtttgtcttctatttataacctaccttacaggatactgaagcagcaattaaaggaaagtttgatgctgttttagacaccataggagtacctgagacagaaagaattggcatcaatgttcttaggagaggtggacactatatgacccttcagggagaagcagctgccctagcagataggtatggattggctgtagggcttcctgctgctactgctgttttactaaagaaacagatgcagtatcgttattctcatggaatagagtattggtggacatacatgagagctgacgccgaaggccttcacgagatccaaaggctatctggagctgggaaactacagatacctgtggagaagacctttcccatcagccatgtaagagaagctcatgcggccaaggagaaaaagttggctcctggcaaggtggttctggaattcgattaatgttattaagattttgtccattgggacctgaagggctgtgcgtttgcaaatcatgatagttttttttgtaaaaaaataaatctgaatctctctgccgacttcaggttccattttatcgttccgtttcagtagaaatacggtaaataatcatatcagctatggcctatgggcacgattttcctgatgaaattcttctgtcacagtgtatccatacttgcatcgagatactcgatgtttcgcggtgcatcttcaccacgcccatgctgttccacagtatcaaagcgccacagtgccacgttcaccttcgcaggcaattttagtgctccgtttatttttataagccttattagttatgaggaagctatgctttataacatcgatttcttctacaatatactttatcggttaatgcaagacccaatgtctttctgaaagatgaaatacagatctggtgatgtcacacctgaattt

SEQ ID NO: 36512 - DNA, 1702 bp, Zea Mays
attttcacataaaccgatatacttaaccctttctcacacactccttcgcctcccatcccaccccgaagggcgtcgccgagctagccattgccgcctcccggctcgcgactcgcgagtcacaggcgcagccgagcgttccttggggacgaggctacatcgcgatgtggtggagggcggtgaggcgccggtgggtcgcgacggcgcggcccgcgtcctccgcggcggcgggggcggagaagagctgccgcgccgtggtggtgccgcgtttcggtgggccggaggtgctcgaggtcaggcagggcatgcctgtgcccgatctgaagccgcaggaggtgctcgtgcgcgcacgcgctgtctctatcaaccccctggacctccgaatgcgatgtggctatgggcgctccatattcgaaccactcctacctctgatcattggtcgggacattagcggtgaagttgcggccaccggaactttggcatcgtctttttctattggccaagaagtgtttggttcgttgcatccaactgctctcagagggacatatgctgattatgctatcctgtcactggacgagcttactctcaaaccatctacactcagtcatgtggaggctagtgcaatcccgtttgctgctttgactgcatggcgcgctttacatgacaaagagttcttgtgattggtggaggaggagcggttggattagctgctgttcaacttgcggtggctgctgggtgtgtggtttctgctacctgtggaacacaaagtattgagcgagttatgggagttggtgctgaacaagctattgactacactgctgaggatactgaagcagcaattaaaggaaagtttgatgctgttttagacaccataggagtacctgagacagaaagaattggcatcaatgttcttaggagaggtggacactatatgacccttcagggagaagcagctgccctagcagataggtatggattggctgtagggcttcctgctgctactgctgttttactaaagaaacagatgcagtatcgttattctcatggaatagagtattggtggacatacatgagagctgacgccgaaggccttcacgagatccaaaggctatctggagctgggaaactacagatacctgtggagaagacctttcccatcagccatgtaagagaagctcatgcggccaaggagaaaaagttggctcctggcaaggtggttctggaattcgattaatgttattaagattttgtccattgggacctgaagggctgtgcgtttgcaaatcatgatagttttttttgtaaaaaaataaatctgaatctctctgccgacttcaggttccattttatcgttccgtttcagtagaaatacggtaaataatcatatcagctatggcctatgggcacgattttcctgatgaaattcttctgtcacagtgtatccatacttgcatcgagatactcgatgtttcgcggtgcatcttcaccacgcccatgctgttccacagtatcaaagcgccacagtgccacgttcaccttcgcaggcaattttagtgctccgtttatttttataagccttattagttatgaggaagctatgctttataacatcgatttcttctacaatatactttatcggttaatgcaagacccaatgtctttctgaaagatgaaatacagatctggtgatgtcacacctgaattt

SEQ ID NO: 36513 - DNA, 399 bp, Zea Mays
atgaagtatcgcggtggcccgggacgcttagtcggtttgggacgtgttgctgatgaaggcaggtatcacggctgtcgcaacagcgacggcaggcgaagcgaccggtacgtgtggccgagcgaccacggctgtggaggcgatagtacggtccgcgggacgtggcatgctgaggcaaacgaacggacctggtcagtccacattggaaggaggagggagcgaagggatatggcggataggtttggcgaaaacttacatgccaggggcggaggggagcatgaactcggaactcggaagggatggagagtcgccttcttcgacatggcggccatggccggcgtgatggccgggacaaagcgtttgaggcgatgcagcttggcggagacggacgacggcgtctga

SEQ ID NO: 36514 - DNA, 2628 bp, Zea Mays
gtctgcttctctcacttccgccgtattcacgcttagggaatgtgtagagaagctgaaattgctaagcactcctgaggagcgtgctcgtaggctcaatgaagaacctgaaatacatgctgaccctgcaatggatccatattatgaatctccggaagaacaggagcaggagattgaaagaagtagcttcaataagtccagaagttctttcttgaggaaagatggtagtcttgtgtctccaggtaaaggagatggtagaaatgctgcacagcgagatccaaaaactaactgggaatctaatcgaaacacaagggctgaatcgagttctcatatggaatcacccctttcacggaggtccacatattcttctcaaggagaaagtgttggttatacaaataagccagagggcttgaacattgatgcacaaaccgttagactggaaggcaccacgcgcagtgctccacaagggtcacctggtgcctcatctggaagtctagctactaacataggttcaggggcaaaaactgcatctcaatcagccattaacgagtctgagaagatctggctgtacatggatccttctaataaaatccaaggtcctttctcaatcatacagctgcggaaatggaacagcaatgggtacttccctcctagtttgaaaatatggaaagctagtgagaagcaggatgattccattctattgactgatgctttggcagggaagtttgagaaagaccttcctccatgggaaccaccacatgttagtttgtctcaaattaacaaaacccctcttgagcaaagcacaatagctgatgaacaaactccaaaatcagtaattgcaaagtctttctcaagcagtgatcaaagacatgattatagttcaacgaaccttggaacaaccatgatccattctggctcacaaggttattatggaatgcaaaattcccatgcagcatacacaagccagcaatctcttactgggagttggaatgccacgtcaagtcagtttggggttgcaataagtcctttgacacctacccagcctgccatgcaaagcctttcaggacaaaatattgtggctgcagaaaatatgggtcatttaactactggaatggctcctgcaactgcaaatgcagaaatggttaattcagatttgacttcccagaaccaaatgttgtcttctttaccgcaaacggatgacagattagctgatggaattgaatccaaatcaggagaagatgtttcacatggaagagtgaggtcttcggctgaagctatcggaccacaggatgcacagcttggaccagtgcaactaaacgctcagcaacttgaaaacacaagaaaccatatgtcatcaattgatctctccaagtcaatgatgccatcacagatgatgtcagcaccatctgctgcatcagtacagccttcattgacaaccactgctcgcagtgataatcaaagcagtgggtgggctgtacctgcacaaatggcgaacacacctggccagtctcagataactggaaatctaacctggggaaatacacctcagggtgacgcaagcttaggttggggaatggtgggacagagcaatatgaatatgccttgggtagcatcagctcaaggtgcttcaggctacaacatgggtgtagccatgccgacgcagccaaatgcagttccaaacatgggctggttaccaaatccaggaaacaccagcatgaacatgatctgggctgcaactcaaggccaggggactccaaatgcggctcctatgatgggaggtcagatgcaaggagtcccaatggccccttggggtggtgttgcagcaggaagtgcaaattcttatcctgcctggggaaaccaacaagctggaaacatgaaccaaaatgttggctggagtgctcctgtgcagggaaatccaggtcaggcaaataacaacatgaactggaacgcaccaaatggtaatcctaattggaataatcaacagagagagaatgggggcaggcactctggacaccgcggtgcttttagtggtggtgactcaggcggaaggtcatggaagtcacgctctggtggcgatggggggtcaaggggacatagcagattctcccattcaacaaacacagagggatatccatccaggactgatcggcattacgataggcagaattcaggcaacgagaggcgatatgagaatcacaatgagagaaatggtcgacagtttgataggcagccttcggataatgaaaggaaccatgataggcctgatggcagacatggtggcagggatgacgataggcaggctgataggtccgagtcaagagagctgcgttagaactggtttctgtttcttacattcgtttccttgtatgtgcagtagcaaactagcatagtagcttccgtgcatgttttgaactttatgctctgtagcgatctgcatacatgtgcagatcaccgtgtataacatttgtagtttaatgctgtgtgcatcctagttccgaatttgtaatttacttgaataaatcgtcttgtctgatttctgatgtaaagcaggggctacacgcccaggttcttggactagggttgttggagcatcaatggaagacaagggagagccagtggtggttggagtag

SEQ ID NO: 36515 - DNA, 2609 bp, Zea Mays
agttggtctgcttctctcacttccgccgagaagctgaaattgctaagcactcctgaggagcgtgctcgtaggctcaatgaagaacctgaaatacatgctgaccctgcaatggatccatattatgaatctccggaagaacaggagcaggagattgaaagaagtagcttcaataagtccagaagttctttcttgaggaaagatggtagtcttgtgtctccaggtaaaggagatggtagaaatgctgcacagcgagatccaaaaactaactgggaatctaatcgaaacacaagggctgaatcgagttctcatatggaatcacccctttcacggaggtccacatattcttctcaaggagaaagtgttggttatacaaataagccagagggcttgaacattgatgcacaaaccgttagactggaaggcaccacgcgcagtgctccacaagggtcacctggtgcctcatctggaagtctagctactaacataggttcaggggcaaaaactgcatctcaatcagccattaacgagtctgagaagatctggctgtacatggatccttctaataaaatccaaggtcctttctcaatcatacagctgcggaaatggaacagcaatgggtacttccctcctagtttgaaaatatggaaagctagtgagaagcaggatgattccattctattgactgatgctttggcagggaagtttgagaaagaccttcctccatgggaaccaccacatgttagtttgtctcaaattaacaaaacccctcttgagcaaagcacaatagctgatgaacaaactccaaaatcagtaattgcaaagtctttctcaagcagtgatcaaagacatgattatagttcaacgaaccttggaacaaccatgatccattctggctcacaaggttattatggaatgcaaaattcccatgcagcatacacaagccagcaatctcttactgggagttggaatgccacgtcaagtcagtttggggttgcaataagtcctttgacacctacccagcctgccatgcaaagcctttcaggacaaaatattgtggctgcagaaaatatgggtcatttaactactggaatggctcctgcaactgcaaatgcagaaatggttaattcagatttgacttcccagaaccaaatgttgtcttctttaccgcaaacggatgacagattagctgatggaattgaatccaaatcaggagaagatgtttcacatggaagagtgaggtcttcggctgaagctatcggaccacaggatgcacagcttggaccagtgcaactaaacgctcagcaacttgaaaacacaagaaaccatatgtcatcaattgatctctccaagtcaatgatgccatcacagatgatgtcagcaccatctgctgcatcagtacagccttcattgacaaccactgctcgcagtgataatcaaagcagtgggtgggctgtacctgcacaaatggcgaacacacctggccagtctcagataactggaaatctaacctggggaaatacacctcagggtgacgcaagcttaggttggggaatggtgggacagagcaatatgaatatgccttgggtagcatcagctcaaggtgcttcaggctacaacatgggtgtagccatgccgacgcagccaaatgcagttccaaacatgggctggttaccaaatccaggaaacaccagcatgaacatgatctgggctgcaactcaaggccaggggactccaaatgcggctcctatgatgggaggtcagatgcaaggagtcccaatggccccttggggtggtgttgcagcaggaagtgcaaattcttatcctgcctggggaaaccaacaagctggaaacatgaaccaaaatgttggctggagtgctcctgtgcagggaaatccaggtcaggcaaataacaacatgaactggaacgcaccaaatggtaatcctaattggaataatcaacagagagagaatgggggcaggcactctggacaccgcggtgcttttagtggtggtgactcaggcggaaggtcatggaagtcacgctctggtggcgatggggggtcaaggggacatagcagattctcccattcaacaaacacagagggatatccatccaggactgatcggcattacgataggcagaattcaggcaacgagaggcgatatgagaatcacaatgagagaaatggtcgacagtttgataggcagccttcggataatgaaaggaaccatgataggcctgatggcagacatggtggcagggatgacgataggcaggctgataggtccgagtcaagagagctgcgttagaactggtttctgtttcttacattcgtttccttgtatgtgcagtagcaaactagcatagtagcttccgtgcatgttttgaactttatgctctgtagcgatctgcatacatgtgcagatcaccgtgtataacatttgtagtttaatgctgtgtgcatcctagttccgaatttgtaatttacttgaataaatcgtcttgtctgatttctgatgtaaagcaggggctacacgcccaggttcttggactagggttgttggagcatcaatggaagacaagggagagccagtggtggttggagtag

SEQ ID NO: 36516 - DNA, 2623 bp, Zea Mays
gtcagttggtctgcttctctcacttccgccgggaatgtgtagagaagctgaaattgctaagcactcctgaggagcgtgctcgtaggctcaatgaagaacctgaaatacatgctgaccctgcaatggatccatattatgaatctccggaagaacaggagcaggagattgaaagaagtagcttcaataagtccagaagttctttcttgaggaaagatggtagtcttgtgtctccaggtaaaggagatggtagaaatgctgcacagcgagatccaaaaactaactgggaatctaatcgaaacacaagggctgaatcgagttctcatatggaatcacccctttcacggaggtccacatattcttctcaaggagaaagtgttggttatacaaataagccagagggcttgaacattgatgcacaaaccgttagactggaaggcaccacgcgcagtgctccacaagggtcacctggtgcctcatctggaagtctagctactaacataggttcaggggcaaaaactgcatctcaatcagccattaacgagtctgagaagatctggctgtacatggatccttctaataaaatccaaggtcctttctcaatcatacagctgcggaaatggaacagcaatgggtacttccctcctagtttgaaaatatggaaagctagtgagaagcaggatgattccattctattgactgatgctttggcagggaagtttgagaaagaccttcctccatgggaaccaccacatgttagtttgtctcaaattaacaaaacccctcttgagcaaagcacaatagctgatgaacaaactccaaaatcagtaattgcaaagtctttctcaagcagtgatcaaagacatgattatagttcaacgaaccttggaacaaccatgatccattctggctcacaaggttattatggaatgcaaaattcccatgcagcatacacaagccagcaatctcttactgggagttggaatgccacgtcaagtcagtttggggttgcaataagtcctttgacacctacccagcctgccatgcaaagcctttcaggacaaaatattgtggctgcagaaaatatgggtcatttaactactggaatggctcctgcaactgcaaatgcagaaatggttaattcagatttgacttcccagaaccaaatgttgtcttctttaccgcaaacggatgacagattagctgatggaattgaatccaaatcaggagaagatgtttcacatggaagagtgaggtcttcggctgaagctatcggaccacaggatgcacagcttggaccagtgcaactaaacgctcagcaacttgaaaacacaagaaaccatatgtcatcaattgatctctccaagtcaatgatgccatcacagatgatgtcagcaccatctgctgcatcagtacagccttcattgacaaccactgctcgcagtgataatcaaagcagtgggtgggctgtacctgcacaaatggcgaacacacctggccagtctcagataactggaaatctaacctggggaaatacacctcagggtgacgcaagcttaggttggggaatggtgggacagagcaatatgaatatgccttgggtagcatcagctcaaggtgcttcaggctacaacatgggtgtagccatgccgacgcagccaaatgcagttccaaacatgggctggttaccaaatccaggaaacaccagcatgaacatgatctgggctgcaactcaaggccaggggactccaaatgcggctcctatgatgggaggtcagatgcaaggagtcccaatggccccttggggtggtgttgcagcaggaagtgcaaattcttatcctgcctggggaaaccaacaagctggaaacatgaaccaaaatgttggctggagtgctcctgtgcagggaaatccaggtcaggcaaataacaacatgaactggaacgcaccaaatggtaatcctaattggaataatcaacagagagagaatgggggcaggcactctggacaccgcggtgcttttagtggtggtgactcaggcggaaggtcatggaagtcacgctctggtggcgatggggggtcaaggggacatagcagattctcccattcaacaaacacagagggatatccatccaggactgatcggcattacgataggcagaattcaggcaacgagaggcgatatgagaatcacaatgagagaaatggtcgacagtttgataggcagccttcggataatgaaaggaaccatgataggcctgatggcagacatggtggcagggatgacgataggcaggctgataggtccgagtcaagagagctgcgttagaactggtttctgtttcttacattcgtttccttgtatgtgcagtagcaaactagcatagtagcttccgtgcatgttttgaactttatgctctgtagcgatctgcatacatgtgcagatcaccgtgtataacatttgtagtttaatgctgtgtgcatcctagttccgaatttgtaatttacttgaataaatcgtcttgtctgatttctgatgtaaagcaggggctacacgcccaggttcttggactagggttgttggagcatcaatggaagacaagggagagccagtggtggttggagtag

SEQ ID NO: 36517 - DNA, 4170 bp, Zea Mays
atgacccccactgtccattctctcatggtcgacgccgctccctgcttcgccggcgcgggttgcccttgtagctgctgccgtggcacccccgatgctccactgccctccttcaactccggcggtgctccccggcttcatctcgacgaccgcctcgcgcatggcccaagttacccatggcgtccctcctgccgcccggggccctacctttgtcctggccgctggtgccacctcctttctcgcttcacccagtttcgccgtgaccgctgaggtggattttgatgacaaaagcagctggtggtatttgttcaaggactattggttaaatttgaagacaaacttgtcattgacagttgaggaaatatcagcagccaagtctcaaaagagtggagaattacctgatactaatgacgaaattaattcagagagttcatcagggcgtcatctagaaaacaatacatcgaaaaagaggggcaggaaccgatctaaacaagctgccatcgagcagggctctgaaggaaaagagaccactgggaaatctgccaaactaggtctgtcaggcattcgtgatgctcagacttcttcagggaaaaaggttagaaaattatccaggcgttctttgagcagccagcattcaccaaaagattctgaaagtgttgggacatcaacatcctcagctgacgaggtcagctgggcttctaaggagctcataaactttgtagctcatgcgagaaatggtgataaatctgtgatcaatcagtatgacgtccaaccccttttacttgactatatcaaacgcaacaatctgcgcgatcctcgtcggaaaagccagataatttgtgattctttgctccaaagtctcttcgggaaagaccgtgttgggcattttgagatgcttaagcttcttgaatcacattttcccacgagtgaggtttcaccaattgatgctgatgaaaatcatggtggtgtagtagaccctgatcctagtcaggatgctgatggtaacagtgaagcttcagttgttatgagttcagaaaaaagaagaaaatcacgtaagtatgacctgaaacatcagcctaatatcgatgactatgcggcaatagataaccataacattggcttgatgtacttacgtcgcaacctaatggaagaattgattgatgacgttgacacttttgatgagaaagttgttggatcgtttgtgagaataagaattcctggtacagggcaaagacaggacatttatagacttgtacaaattgttggcactggaagatctgcagaaaaatataaatctgggaaaaggactactgatataacgctagtgatactaaacttagacaagcgggaggcagtaactattgacataatctcaaaccaggagttcactgaagaggagtgcaaacgcttgcgtcagagcataaagtatggattcattccaaggctgacagtgggagaggttcaggagaaggcaaaggttctccaaactctgaaagtcaatgattggattgaaagcgaaaagatgcgacttgggcatcttcgtgaccgtgcaagtgatatgggacgtagaaaagagcttagggaatgtgtagagaagctgaaattgctaagcactcctgaggagcgtgctcgtaggctcaatgaagaacctgaaatacatgctgaccctgcaatggatccatattatgaatctccggaagaacaggagcaggagattgaaagaagtagcttcaataagtccagaagttctttcttgaggaaagatggtagtcttgtgtctccaggtaaaggagatggtagaaatgctgcacagcgagatccaaaaactaactgggaatctaatcgaaacacaagggctgaatcgagttctcatatggaatcacccctttcacggaggtccacatattcttctcaaggagaaagtgttggttatacaaataagccagagggcttgaacattgatgcacaaaccgttagactggaaggcaccacgcgcagtgctccacaagggtcacctggtgcctcatctggaagtctagctactaacataggttcaggggcaaaaactgcatctcaatcagccattaacgagtctgagaagatctggctgtacatggatccttctaataaaatccaaggtcctttctcaatcatacagctgcggaaatggaacagcaatgggtacttccctcctagtttgaaaatatggaaagctagtgagaagcaggatgattccattctattgactgatgctttggcagggaagtttgagaaagaccttcctccatgggaaccaccacatgttagtttgtctcaaattaacaaaacccctcttgagcaaagcacaatagctgatgaacaaactccaaaatcagtaattgcaaagtctttctcaagcagtgatcaaagacatgattatagttcaacgaaccttggaacaaccatgatccattctggctcacaaggttattatggaatgcaaaattcccatgcagcatacacaagccagcaatctcttactgggagttggaatgccacgtcaagtcagtttggggttgcaataagtcctttgacacctacccagcctgccatgcaaagcctttcaggacaaaatattgtggctgcagaaaatatgggtcatttaactactggaatggctcctgcaactgcaaatgcagaaatggttaattcagatttgacttcccagaaccaaatgttgtcttctttaccgcaaacggatgacagattagctgatggaattgaatccaaatcaggagaagatgtttcacatggaagagtgaggtcttcggctgaagctatcggaccacaggatgcacagcttggaccagtgcaactaaacgctcagcaacttgaaaacacaagaaaccatatgtcatcaattgatctctccaagtcaatgatgccatcacagatgatgtcagcaccatctgctgcatcagtacagccttcattgacaaccactgctcgcagtgataatcaaagcagtgggtgggctgtacctgcacaaatggcgaacacacctggccagtctcagataactggaaatctaacctggggaaatacacctcagggtgacgcaagcttaggttggggaatggtgggacagagcaatatgaatatgccttgggtagcatcagctcaaggtgcttcaggctacaacatgggtgtagccatgccgacgcagccaaatgcagttccaaacatgggctggttaccaaatccaggaaacaccagcatgaacatgatctgggctgcaactcaaggccaggggactccaaatgcggctcctatgatgggaggtcagatgcaaggagtcccaatggccccttggggtggtgttgcagcaggaagtgcaaattcttatcctgcctggggaaaccaacaagctggaaacatgaaccaaaatgttggctggagtgctcctgtgcagggaaatccaggtcaggcaaataacaacatgaactggaacgcaccaaatggtaatcctaattggaataatcaacagagagagaatgggggcaggcactctggacaccgcggtgcttttagtggtggtgactcaggcggaaggtcatggaagtcacgctctggtggcgatggggggtcaaggggacatagcagattctcccattcaacaaacacagagggatatccatccaggactgatcggcattacgataggcagaattcaggcaacgagaggcgatatgagaatcacaatgagagaaatggtcgacagtttgataggcagccttcggataatgaaaggaaccatgataggcctgatggcagacatggtggcagggatgacgataggcaggctgataggtccgagtcaagagagctgcgttagaactggtttctgtttcttacattcgtttccttgtatgtgcagtagcaaactagcatagtagcttccgtgcatgttttgaactttatgctctgtagcgatctgcatacatgtgcagatcaccgtgtataacatttgtagtttaatgctgtgtgcatcctagttccgaatttgtaatttacttgaataaatcgtcttgtctgatttctgatgtaaagcaggggctacacgcccaggttcttggactagggttgttggagcatcaatggaagacaagggagagccagtggtggttggagtag

SEQ ID NO: 36518 - DNA, 4243 bp, Zea Mays
gtattgtacttgagtgttttaatttgttcctgaatatggagactagtgaaatcagtcttgatttgtttaacttatatggattagaaaagtatgttatctcttgctgtatatgagttaagaaatatgtttagtttttgcactggacactcttagatgctagcttacttctaagacctgatattgttctgttattctggcttctgaaacaaggactcagggtttatttgatcttatttactttactgccagggtggcacatttgtagcaactgtcagaaacctgcccgccatatgtgctacacctgcaccttttcattatgcaaggcatgcatgaaagatgcaaagtttagctgtgtcagagaaaacaagggcttttgtgctacgtgcatgaacactgtgatgttgatagagaacagagaggaggctgcagacccaatggaggtggattttgatgacaaaagcagctggtggtatttgttcaaggactattggttaaatttgaagacaaacttgtcattgacagttgaggaaatatcagcagccaagtctcaaaagagtggagaattacctgatactaatgacgaaattaattcagagagttcatcagggcgtcatctagaaaacaatacatcgaaaaagaggggcaggaaccgatctaaacaagctgccatcgagcagggctctgaaggaaaagagaccactgggaaatctgccaaactaggtctgtcaggcattcgtgatgctcagacttcttcagggaaaaaggttagaaaattatccaggcgttctttgagcagccagcattcaccaaaagattctgaaagtgttgggacatcaacatcctcagctgacgaggtcagctgggcttctaaggagctcataaactttgtagctcatgcgagaaatggtgataaatctgtgatcaatcagtatgacgtccaaccccttttacttgactatatcaaacgcaacaatctgcgcgatcctcgtcggaaaagccagataatttgtgattctttgctccaaagtctcttcgggaaagaccgtgttgggcattttgagatgcttaagcttcttgaatcacattttcccacgagtgaggtttcaccaattgatgctgatgaaaatcatggtggtgtagtagaccctgatcctagtcaggatgctgatggtaacagtgaagcttcagttgttatgagttcagaaaaaagaagaaaatcacaattgattgatgacgttgacacttttgatgagaaagttgttggatcgtttgtgagaataagaattcctggtacagggcaaagacaggacatttatagacttgtacaaattgttggcactggaagatctgcagaaaaatataaatctgggaaaaggactactgatataacgctagtgatactaaacttagacaagcgggaggcagtaactattgacataatctcaaaccaggagttcactgaagaggagtgcaaacgcttgcgtcagagcataaagtatggattcattccaaggctgacagtgggagaggttcaggagaaggcaaaggttctccaaactctgaaagtcaatgattggattgaaagcgaaaagatgcgacttgggcatcttcgtgaccgtgcaagtgatatgggacgtagaaaagagcttagggaatgtgtagagaagctgaaattgctaagcactcctgaggagcgtgctcgtaggctcaatgaagaacctgaaatacatgctgaccctgcaatggatccatattatgaatctccggaagaacaggagcaggagattgaaagaagtagcttcaataagtccagaagttctttcttgaggaaagatggtagtcttgtgtctccaggtaaaggagatggtagaaatgctgcacagcgagatccaaaaactaactgggaatctaatcgaaacacaagggctgaatcgagttctcatatggaatcacccctttcacggaggtccacatattcttctcaaggagaaagtgttggttatacaaataagccagagggcttgaacattgatgcacaaaccgttagactggaaggcaccacgcgcagtgctccacaagggtcacctggtgcctcatctggaagtctagctactaacataggttcaggggcaaaaactgcatctcaatcagccattaacgagtctgagaagatctggctgtacatggatccttctaataaaatccaaggtcctttctcaatcatacagctgcggaaatggaacagcaatgggtacttccctcctagtttgaaaatatggaaagctagtgagaagcaggatgattccattctattgactgatgctttggcagggaagtttgagaaagaccttcctccatgggaaccaccacatgttagtttgtctcaaattaacaaaacccctcttgagcaaagcacaatagctgatgaacaaactccaaaatcagtaattgcaaagtctttctcaagcagtgatcaaagacatgattatagttcaacgaaccttggaacaaccatgatccattctggctcacaaggttattatggaatgcaaaattcccatgcagcatacacaagccagcaatctcttactgggagttggaatgccacgtcaagtcagtttggggttgcaataagtcctttgacacctacccagcctgccatgcaaagcctttcaggacaaaatattgtggctgcagaaaatatgggtcatttaactactggaatggctcctgcaactgcaaatgcagaaatggttaattcagatttgacttcccagaaccaaatgttgtcttctttaccgcaaacggatgacagattagctgatggaattgaatccaaatcaggagaagatgtttcacatggaagagtgaggtcttcggctgaagctatcggaccacaggatgcacagcttggaccagtgcaactaaacgctcagcaacttgaaaacacaagaaaccatatgtcatcaattgatctctccaagtcaatgatgccatcacagatgatgtcagcaccatctgctgcatcagtacagccttcattgacaaccactgctcgcagtgataatcaaagcagtgggtgggctgtacctgcacaaatggcgaacacacctggccagtctcagataactggaaatctaacctggggaaatacacctcagggtgacgcaagcttaggttggggaatggtgggacagagcaatatgaatatgccttgggtagcatcagctcaaggtgcttcaggctacaacatgggtgtagccatgccgacgcagccaaatgcagttccaaacatgggctggttaccaaatccaggaaacaccagcatgaacatgatctgggctgcaactcaaggccaggggactccaaatgcggctcctatgatgggaggtcagatgcaaggagtcccaatggccccttggggtggtgttgcagcaggaagtgcaaattcttatcctgcctggggaaaccaacaagctggaaacatgaaccaaaatgttggctggagtgctcctgtgcagggaaatccaggtcaggcaaataacaacatgaactggaacgcaccaaatggtaatcctaattggaataatcaacagagagagaatgggggcaggcactctggacaccgcggtgcttttagtggtggtgactcaggcggaaggtcatggaagtcacgctctggtggcgatggggggtcaaggggacatagcagattctcccattcaacaaacacagagggatatccatccaggactgatcggcattacgataggcagaattcaggcaacgagaggcgatatgagaatcacaatgagagaaatggtcgacagtttgataggcagccttcggataatgaaaggaaccatgataggcctgatggcagacatggtggcagggatgacgataggcaggctgataggtccgagtcaagagagctgcgttagaactggtttctgtttcttacattcgtttccttgtatgtgcagtagcaaactagcatagtagcttccgtgcatgttttgaactttatgctctgtagcgatctgcatacatgtgcagatcaccgtgtataacatttgtagtttaatgctgtgtgcatcctagttccgaatttgtaatttacttgaataaatcgtcttgtctgatttctgatgtaaagcaggggctacacgcccaggttcttggactagggttgttggagcatcaatggaagacaagggagagccagtggtggttggagtag

SEQ ID NO: 36519 - DNA, 5976 bp, Zea Mays
aactcgacaccaatcccccaatcacaaaccctaggccgacaggcgcaacgacgcgacggtgcaacaagcggacaacggcgaccgcgcggccaccgcttagtgtgcgaactctgcagcgcgccagcggaagcagaggaggcgtgcagcatctggcgtcccggcctcccggggtcgagttcgagcgccgcgcgcacacgtccgccagatggtgtgtagtagcggtggttgggaatatctaatcacccaaatcctggtctgacactgttccactgatagaatcagtatgtccgacgctgagccacctcctgcaatggaggaggccacgctgacaacgccggatgttgtgctaggcgagggatacaaagatatcgagggtcagaaggatggccgaacttgttatggtgaaggtggcgatgttatagtggctgatgagttcgcgggtattgttgaagaccccaaccaacccgatgtttttaaggctaaagagccagaggagggtgttgatgtaggggggcaaactaatgtcattagtgctgctgtgcatgttctcacagaggtggatgctgctgtgtcatcctccacactggtggatgatcccatggaggttggcatgcaaaccaaagaggttagtgctgctgcggatgatctcatagaggtgggtgctgccctggtaccatctgcacaggatcacacagcagtggctgcttgcctggttaatgatgactgcaatatagttatcactggtggtgtgcataggtcggatgaccaaactgttcaggagtttgggggtgactcccttgacgctgatgaggttgctcccttggtaaatgatgtacaagatgacagtgcaaggattgatatggatgttgcagctaatgatcatgtgcatgctcaggatcaggaaagctcacagttggatgtggctacagctctgttaaatgaggtggaaacagagattgccgaagctggagaccatgttgtacaggactgcacaaatatggatatgcagatccaaactggagatgacaaacatgttggcactattgcggacactgccacagatgaggagggcaagcacatgggtgaagataccatgggcagagatggtagtgagaaacatgatggggcagtcggtgttgatgtgtctgatgagagggtagaaatgggtaggggtggactgtctggagatgataacgagcaaaaggaagttgcaacagctgatgaagatcgtgtggaagaggaagacatgcaggtggatgccgtaagcattactggagacatggttgaggaaggcagaattgctgttgaatacattgcaggcgaagctgtaaatggcaaggatggtattgatgtccctgaagaaaagactcctcagatagacaaggctggtaatgatatccctgaagaagagggtctccaaatggggggagctggcttgattggcaataaaaatgggccgaaagaggctgtgatagctgattaccatggagtggaagaaaataccatactgatggaggcagctaccacgactaacaatgatgatgatgatgacaacaaaattgttggtgaagatgttgcagaagctgtcaatgacataactggtgatggtgtccctgaacaagaggctgcacatatggatgacgatgatgacgatgagccacctcctttagtggcaaagaaaggtggagggcgtcgtaagaggggccgtccatcttccaaggtccaggctgtggtgaaaccatctgtaaaggggaaagatgaagaggaggtttgcttcatttgctttgatggtggtgatcttgtgatttgtgatcgtaggggctgccctaaagcttaccatccttcttgtgttaatcgggatgacgacttcttcaagtcaaagggtcggtggaactgtgggtggcacatttgtagcaactgtcagaaacctgcccgccatatgtgctacacctgcaccttttcattatgcaaggcatgcatgaaagatgcaaagtttagctgtgtcagagaaaacaagggcttttgtgctacgtgcatgaacactgtgatgttgatagagaacagagaggaggctgcagacccaatggaggtggattttgatgacaaaagcagctggtggtatttgttcaaggactattggttaaatttgaagacaaacttgtcattgacagttgaggaaatatcagcagccaagtctcaaaagagtggagaattacctgatactaatgacgaaattaattcagagagttcatcagggcgtcatctagaaaacaatacatcgaaaaagaggggcaggaaccgatctaaacaagctgccatcgagcagggctctgaaggaaaagagaccactgggaaatctgccaaactaggtctgtcaggcattcgtgatgctcagacttcttcagggaaaaaggttagaaaattatccaggcgttctttgagcagccagcattcaccaaaagattctgaaagtgttgggacatcaacatcctcagctgacgaggtcagctgggcttctaaggagctcataaactttgtagctcatgcgagaaatggtgataaatctgtgatcaatcagtatgacgtccaaccccttttacttgactatatcaaacgcaacaatctgcgcgatcctcgtcggaaaagccagataatttgtgattctttgctccaaagtctcttcgggaaagaccgtgttgggcattttgagatgcttaagcttcttgaatcacattttcccacgagtgaggtttcaccaattgatgctgatgaaaatcatggtggtgtagtagaccctgatcctagtcaggatgctgatggtaacagtgaagcttcagttgttatgagttcagaaaaaagaagaaaatcacgtaagtatgacctgaaacatcagcctaatatcgatgactatgcggcaatagataaccataacattggcttgatgtacttacgtcgcaacctaatggaagaattgattgatgacgttgacacttttgatgagaaagttgttggatcgtttgtgagaataagaattcctggtacagggcaaagacaggacatttatagacttgtacaaattgttggcactggaagatctgcagaaaaatataaatctgggaaaaggactactgatataacgctagtgatactaaacttagacaagcgggaggcagtaactattgacataatctcaaaccaggagttcactgaagaggagtgcaaacgcttgcgtcagagcataaagtatggattcattccaaggctgacagtgggagaggttcaggagaaggcaaaggttctccaaactctgaaagtcaatgattggattgaaagcgaaaagatgcgacttgggcatcttcgtgaccgtgcaatattcacgcttagggaatgtgtagagaagctgaaattgctaagcactcctgaggagcgtgctcgtaggctcaatgaagaacctgaaatacatgctgaccctgcaatggatccatattatgaatctccggaagaacaggagcaggagattgaaagaagtagcttcaataagtccagaagttctttcttgaggaaagatggtagtcttgtgtctccaggtaaaggagatggtagaaatgctgcacagcgagatccaaaaactaactgggaatctaatcgaaacacaagggctgaatcgagttctcatatggaatcacccctttcacggaggtccacatattcttctcaaggagaaagtgttggttatacaaataagccagagggcttgaacattgatgcacaaaccgttagactggaaggcaccacgcgcagtgctccacaagggtcacctggtgcctcatctggaagtctagctactaacataggttcaggggcaaaaactgcatctcaatcagccattaacgagtctgagaagatctggctgtacatggatccttctaataaaatccaaggtcctttctcaatcatacagctgcggaaatggaacagcaatgggtacttccctcctagtttgaaaatatggaaagctagtgagaagcaggatgattccattctattgactgatgctttggcagggaagtttgagaaagaccttcctccatgggaaccaccacatgttagtttgtctcaaattaacaaaacccctcttgagcaaagcacaatagctgatgaacaaactccaaaatcagtaattgcaaagtctttctcaagcagtgatcaaagacatgattatagttcaacgaaccttggaacaaccatgatccattctggctcacaaggttattatggaatgcaaaattcccatgcagcatacacaagccagcaatctcttactgggagttggaatgccacgtcaagtcagtttggggttgcaataagtcctttgacacctacccagcctgccatgcaaagcctttcaggacaaaatattgtggctgcagaaaatatgggtcatttaactactggaatggctcctgcaactgcaaatgcagaaatggttaattcagatttgacttcccagaaccaaatgttgtcttctttaccgcaaacggatgacagattagctgatggaattgaatccaaatcaggagaagatgtttcacatggaagagtgaggtcttcggctgaagctatcggaccacaggatgcacagcttggaccagtgcaactaaacgctcagcaacttgaaaacacaagaaaccatatgtcatcaattgatctctccaagtcaatgatgccatcacagatgatgtcagcaccatctgctgcatcagtacagccttcattgacaaccactgctcgcagtgataatcaaagcagtgggtgggctgtacctgcacaaatggcgaacacacctggccagtctcagataactggaaatctaacctggggaaatacacctcagggtgacgcaagcttaggttggggaatggtgggacagagcaatatgaatatgccttgggtagcatcagctcaaggtgcttcaggctacaacatgggtgtagccatgccgacgcagccaaatgcagttccaaacatgggctggttaccaaatccaggaaacaccagcatgaacatgatctgggctgcaactcaaggccaggggactccaaatgcggctcctatgatgggaggtcagatgcaaggagtcccaatggccccttggggtggtgttgcagcaggaagtgcaaattcttatcctgcctggggaaaccaacaagctggaaacatgaaccaaaatgttggctggagtgctcctgtgcagggaaatccaggtcaggcaaataacaacatgaactggaacgcaccaaatggtaatcctaattggaataatcaacagagagagaatgggggcaggcactctggacaccgcggtgcttttagtggtggtgactcaggcggaaggtcatggaagtcacgctctggtggcgatggggggtcaaggggacatagcagattctcccattcaacaaacacagagggatatccatccaggactgatcggcattacgataggcagaattcaggcaacgagaggcgatatgagaatcacaatgagagaaatggtcgacagtttgataggcagccttcggataatgaaaggaaccatgataggcctgatggcagacatggtggcagggatgacgataggcaggctgataggtccgagtcaagagagctgcgttagaactggtttctgtttcttacattcgtttccttgtatgtgcagtagcaaactagcatagtagcttccgtgcatgttttgaactttatgctctgtagcgatctgcatacatgtgcagatcaccgtgtataacatttgtagtttaatgctgtgtgcatcctagttccgaatttgtaatttacttgaataaatcgtcttgtctgatttctgatgtaaagcaggggctacacgcccaggttcttggactagggttgttggagcatcaatggaagacaagggagagccagtggtggttggagtag

SEQ ID NO: 36520 - DNA, 5988 bp, Zea Mays
aactcgacaccaatcccccaatcacaaaccctaggccgacaggcgcaacgacgcgacggtgcaacaagcggacaacggcgaccgcgcggccaccgcttagtgtgcgaactctgcagcgcgccagcggaagcagaggaggcgtgcagcatctggcgtcccggcctcccggggtcgagttcgagcgccgcgcgcacacgtccgccagatggtgtgtagtagcggtggttgggaatatctaatcacccaaatcctggtctgacactgttccactgatagaatcagtatgtccgacgctgagccacctcctgcaatggaggaggccacgctgacaacgccggatgttgtgctaggcgagggatacaaagatatcgagggtcagaaggatggccgaacttgttatggtgaaggtggcgatgttatagtggctgatgagttcgcgggtattgttgaagaccccaaccaacccgatgtttttaaggctaaagagccagaggagggtgttgatgtaggggggcaaactaatgtcattagtgctgctgtgcatgttctcacagaggtggatgctgctgtgtcatcctccacactggtggatgatcccatggaggttggcatgcaaaccaaagaggttagtgctgctgcggatgatctcatagaggtgggtgctgccctggtaccatctgcacaggatcacacagcagtggctgcttgcctggttaatgatgactgcaatatagttatcactggtggtgtgcataggtcggatgaccaaactgttcaggagtttgggggtgactcccttgacgctgatgaggttgctcccttggtaaatgatgtacaagatgacagtgcaaggattgatatggatgttgcagctaatgatcatgtgcatgctcaggatcaggaaagctcacagttggatgtggctacagctctgttaaatgaggtggaaacagagattgccgaagctggagaccatgttgtacaggactgcacaaatatggatatgcagatccaaactggagatgacaaacatgttggcactattgcggacactgccacagatgaggagggcaagcacatgggtgaagataccatgggcagagatggtagtgagaaacatgatggggcagtcggtgttgatgtgtctgatgagagggtagaaatgggtaggggtggactgtctggagatgataacgagcaaaaggaagttgcaacagctgatgaagatcgtgtggaagaggaagacatgcaggtggatgccgtaagcattactggagacatggttgaggaaggcagaattgctgttgaatacattgcaggcgaagctgtaaatggcaaggatggtattgatgtccctgaagaaaagactcctcagatagacaaggctggtaatgatatccctgaagaagagggtctccaaatggggggagctggcttgattggcaataaaaatgggccgaaagaggctgtgatagctgattaccatggagtggaagaaaataccatactgatggaggcagctaccacgactaacaatgatgatgatgatgacaacaaaattgttggtgaagatgttgcagaagctgtcaatgacataactggtgatggtgtccctgaacaagaggctgcacatatggatgacgatgatgacgatgagccacctcctttagtggcaaagaaaggtggagggcgtcgtaagaggggccgtccatcttccaaggtccaggctgtggtgaaaccatctgtaaaggggaaagatgaagaggaggtttgcttcatttgctttgatggtggtgatcttgtgatttgtgatcgtaggggctgccctaaagcttaccatccttcttgtgttaatcgggatgacgacttcttcaagtcaaagggtcggtggaactgtgggtggcacatttgtagcaactgtcagaaacctgcccgccatatgtgctacacctgcaccttttcattatgcaaggcatgcatgaaagatgcaaagtttagctgtgtcagagaaaacaagggcttttgtgctacgtgcatgaacactgtgatgttgatagagaacagagaggaggctgcagacccaatggaggtggattttgatgacaaaagcagctggtggtatttgttcaaggactattggttaaatttgaagacaaacttgtcattgacagttgaggaaatatcagcagccaagtctcaaaagagtggagaattacctgatactaatgacgaaattaattcagagagttcatcagggcgtcatctagaaaacaatacatcgaaaaagaggggcaggaaccgatctaaacaagctgccatcgagcagggctctgaaggaaaagagaccactgggaaatctgccaaactaggtctgtcaggcattcgtgatgctcagacttcttcagggaaaaaggttagaaaattatccaggcgttctttgagcagccagcattcaccaaaagattctgaaagtgttgggacatcaacatcctcagctgacgaggtcagctgggcttctaaggagctcataaactttgtagctcatgcgagaaatggtgataaatctgtgatcaatcagtatgacgtccaaccccttttacttgactatatcaaacgcaacaatctgcgcgatcctcgtcggaaaagccagataatttgtgattctttgctccaaagtctcttcgggaaagaccgtgttgggcattttgagatgcttaagcttcttgaatcacattttcccacgagtgaggtttcaccaattgatgctgatgaaaatcatggtggtgtagtagaccctgatcctagtcaggatgctgatggtaacagtgaagcttcagttgttatgagttcagaaaaaagaagaaaatcacgtaagtatgacctgaaacatcagcctaatatcgatgactatgcggcaatagataaccataacattggcttgatgtacttacgtcgcaacctaatggaagaattgattgatgacgttgacacttttgatgagaaagttgttggatcgtttgtgagaataagaattcctggtacagggcaaagacaggacatttatagacttgtacaaattgttggcactggaagatctgcagaaaaatataaatctgggaaaaggactactgatataacgctagtgatactaaacttagacaagcgggaggcagtaactattgacataatctcaaaccaggagttcactgaagaggagtgcaaacgcttgcgtcagagcataaagtatggattcattccaaggctgacagtgggagaggttcaggagaaggcaaaggttctccaaactctgaaagtcaatgattggattgaaagcgaaaagatgcgacttgggcatcttcgtgaccgtgcaagtgatatgggactattcacgcttagggaatgtgtagagaagctgaaattgctaagcactcctgaggagcgtgctcgtaggctcaatgaagaacctgaaatacatgctgaccctgcaatggatccatattatgaatctccggaagaacaggagcaggagattgaaagaagtagcttcaataagtccagaagttctttcttgaggaaagatggtagtcttgtgtctccaggtaaaggagatggtagaaatgctgcacagcgagatccaaaaactaactgggaatctaatcgaaacacaagggctgaatcgagttctcatatggaatcacccctttcacggaggtccacatattcttctcaaggagaaagtgttggttatacaaataagccagagggcttgaacattgatgcacaaaccgttagactggaaggcaccacgcgcagtgctccacaagggtcacctggtgcctcatctggaagtctagctactaacataggttcaggggcaaaaactgcatctcaatcagccattaacgagtctgagaagatctggctgtacatggatccttctaataaaatccaaggtcctttctcaatcatacagctgcggaaatggaacagcaatgggtacttccctcctagtttgaaaatatggaaagctagtgagaagcaggatgattccattctattgactgatgctttggcagggaagtttgagaaagaccttcctccatgggaaccaccacatgttagtttgtctcaaattaacaaaacccctcttgagcaaagcacaatagctgatgaacaaactccaaaatcagtaattgcaaagtctttctcaagcagtgatcaaagacatgattatagttcaacgaaccttggaacaaccatgatccattctggctcacaaggttattatggaatgcaaaattcccatgcagcatacacaagccagcaatctcttactgggagttggaatgccacgtcaagtcagtttggggttgcaataagtcctttgacacctacccagcctgccatgcaaagcctttcaggacaaaatattgtggctgcagaaaatatgggtcatttaactactggaatggctcctgcaactgcaaatgcagaaatggttaattcagatttgacttcccagaaccaaatgttgtcttctttaccgcaaacggatgacagattagctgatggaattgaatccaaatcaggagaagatgtttcacatggaagagtgaggtcttcggctgaagctatcggaccacaggatgcacagcttggaccagtgcaactaaacgctcagcaacttgaaaacacaagaaaccatatgtcatcaattgatctctccaagtcaatgatgccatcacagatgatgtcagcaccatctgctgcatcagtacagccttcattgacaaccactgctcgcagtgataatcaaagcagtgggtgggctgtacctgcacaaatggcgaacacacctggccagtctcagataactggaaatctaacctggggaaatacacctcagggtgacgcaagcttaggttggggaatggtgggacagagcaatatgaatatgccttgggtagcatcagctcaaggtgcttcaggctacaacatgggtgtagccatgccgacgcagccaaatgcagttccaaacatgggctggttaccaaatccaggaaacaccagcatgaacatgatctgggctgcaactcaaggccaggggactccaaatgcggctcctatgatgggaggtcagatgcaaggagtcccaatggccccttggggtggtgttgcagcaggaagtgcaaattcttatcctgcctggggaaaccaacaagctggaaacatgaaccaaaatgttggctggagtgctcctgtgcagggaaatccaggtcaggcaaataacaacatgaactggaacgcaccaaatggtaatcctaattggaataatcaacagagagagaatgggggcaggcactctggacaccgcggtgcttttagtggtggtgactcaggcggaaggtcatggaagtcacgctctggtggcgatggggggtcaaggggacatagcagattctcccattcaacaaacacagagggatatccatccaggactgatcggcattacgataggcagaattcaggcaacgagaggcgatatgagaatcacaatgagagaaatggtcgacagtttgataggcagccttcggataatgaaaggaaccatgataggcctgatggcagacatggtggcagggatgacgataggcaggctgataggtccgagtcaagagagctgcgttagaactggtttctgtttcttacattcgtttccttgtatgtgcagtagcaaactagcatagtagcttccgtgcatgttttgaactttatgctctgtagcgatctgcatacatgtgcagatcaccgtgtataacatttgtagtttaatgctgtgtgcatcctagttccgaatttgtaatttacttgaataaatcgtcttgtctgatttctgatgtaaagcaggggctacacgcccaggttcttggactagggttgttggagcatcaatggaagacaagggagagccagtggtggttggagtag

SEQ ID NO: 36521 - DNA, 5905 bp, Zea Mays
cttctgagtcgacaactcgacaccaatcccccaatcacaaaccctaggccgacaggcgcaacgacgcgacggtgcaacaagcggacaacggcgaccgcgcggccaccgcttagtgtgcgaactctgcagcgcgccagcggaagcagaggaggcgtgcagcatctggcgtcccggcctcccggggtcgagttcgagcgccgcgcgcacacgtccgccagatggtgtgtagtagcggtggttgggaatatctaatcacccaaatcctggtctgacactgttccactgatagaatcagtatgtccgacgctgagccacctcctgcaatggaggaggccacgctgacaacgccggatgttgtgctaggcgagggatacaaagatatcgagggtcagaaggatggccgaacttgttatggtgaaggtggcgatgttatagtggctgatgagttcgcgggtattgttgaagaccccaaccaacccgatgtttttaaggctaaagagccagaggagggtgttgatgtaggggggcaaactaatgtcattagtgctgctgtgcatgttctcacagaggtggatgctgctgtgtcatcctccacactggtggatgatcccatggaggttggcatgcaaaccaaagaggttagtgctgctgcggatgatctcatagaggtgggtgctgccctggtaccatctgcacaggatcacacagcagtggctgcttgcctggttaatgatgactgcaatatagttatcactggtggtgtgcataggtcggatgaccaaactgttcaggagtttgggggtgactcccttgacgctgatgaggttgctcccttggtaaatgatgtacaagatgacagtgcaaggattgatatggatgttgcagctaatgatcatgtgcatgctcaggatcaggaaagctcacagttggatgtggctacagctctgttaaatgaggtggaaacagagattgccgaagctggagaccatgttgtacaggactgcacaaatatggatatgcagatccaaactggagatgacaaacatgttggcactattgcggacactgccacagatgaggagggcaagcacatgggtgaagataccatgggcagagatggtagtgagaaacatgatggggcagtcggtgttgatgtgtctgatgagagggtagaaatgggtaggggtggactgtctggagatgataacgagcaaaaggaagttgcaacagctgatgaagatcgtgtggaagaggaagacatgcaggtggatgccgtaagcattactggagacatggttgaggaaggcagaattgctgttgaatacattgcaggcgaagctgtaaatggcaaggatggtattgatgtccctgaagaaaagactcctcagatagacaaggctggtaatgatatccctgaagaagagggtctccaaatggggggagctggcttgattggcaataaaaatgggccgaaagaggctgtgatagctgattaccatggagtggaagaaaataccatactgatggaggcagctaccacgactaacaatgatgatgatgatgacaacaaaattgttggtgaagatgttgcagaagctgtcaatgacataactggtgatggtgtccctgaacaagaggctgcacatatggatgacgatgatgacgatgagccacctcctttagtggcaaagaaaggtggagggcgtcgtaagaggggccgtccatcttccaaggtccaggctgtggtgaaaccatctgtaaaggggaaagatgaagaggaggtttgcttcatttgctttgatggtggtgatcttgtgatttgtgatcgtaggggctgccctaaagcttaccatccttcttgtgttaatcgggatgacgacttcttcaagtcaaagggtcggtggaactgtgggtggcacatttgtagcaactgtcagaaacctgcccgccatatgtgctacacctgcaccttttcattatgcaaggcatgcatgaaagatgcaaagtttagctgtgtcagagaaaacaagggcttttgtgctacgtgcatgaacactgtgatgttgatagagaacagagaggaggctgcagacccaatggaggtggattttgatgacaaaagcagctggtggtatttgttcaaggactattggttaaatttgaagacaaacttgtcattgacagttgaggaaatatcagcagccaagtctcaaaagagtggagaattacctgatactaatgacgaaattaattcagagagttcatcagggcgtcatctagaaaacaatacatcgaaaaagaggggcaggaaccgatctaaacaagctgccatcgagcagggctctgaaggaaaagagaccactgggaaatctgccaaactaggtctgtcaggcattcgtgatgctcagacttcttcagggaaaaaggttagaaaattatccaggcgttctttgagcagccagcattcaccaaaagattctgaaagtgttgggacatcaacatcctcagctgacgaggtcagctgggcttctaaggagctcataaactttgtagctcatgcgagaaatggtgataaatctgtgatcaatcagtatgacgtccaaccccttttacttgactatatcaaacgcaacaatctgcgcgatcctcgtcggaaaagccagataatttgtgattctttgctccaaagtctcttcgggaaagaccgtgttgggcattttgagatgcttaagcttcttgaatcacattttcccacgagtgaggtttcaccaattgatgctgatgaaaatcatggtggtgtagtagaccctgatcctagtcaggatgctgatggtaacagtgaagcttcagttgttatgagttcagaaaaaagaagaaaatcacaattgattgatgacgttgacacttttgatgagaaagttgttggatcgtttgtgagaataagaattcctggtacagggcaaagacaggacatttatagacttgtacaaattgttggcactggaagatctgcagaaaaatataaatctgggaaaaggactactgatataacgctagtgatactaaacttagacaagcgggaggcagtaactattgacataatctcaaaccaggagttcactgaagaggagtgcaaacgcttgcgtcagagcataaagtatggattcattccaaggctgacagtgggagaggttcaggagaaggcaaaggttctccaaactctgaaagtcaatgattggattgaaagcgaaaagatgcgacttgggcatcttcgtgaccgtgcaagtgatatgggacgtagaaaagagcttagggaatgtgtagagaagctgaaattgctaagcactcctgaggagcgtgctcgtaggctcaatgaagaacctgaaatacatgctgaccctgcaatggatccatattatgaatctccggaagaacaggagcaggagattgaaagaagtagcttcaataagtccagaagttctttcttgaggaaagatggtagtcttgtgtctccaggtaaaggagatggtagaaatgctgcacagcgagatccaaaaactaactgggaatctaatcgaaacacaagggctgaatcgagttctcatatggaatcacccctttcacggaggtccacatattcttctcaaggagaaagtgttggttatacaaataagccagagggcttgaacattgatgcacaaaccgttagactggaaggcaccacgcgcagtgctccacaagggtcacctggtgcctcatctggaagtctagctactaacataggttcaggggcaaaaactgcatctcaatcagccattaacgagtctgagaagatctggctgtacatggatccttctaataaaatccaaggtcctttctcaatcatacagctgcggaaatggaacagcaatgggtacttccctcctagtttgaaaatatggaaagctagtgagaagcaggatgattccattctattgactgatgctttggcagggaagtttgagaaagaccttcctccatgggaaccaccacatgttagtttgtctcaaattaacaaaacccctcttgagcaaagcacaatagctgatgaacaaactccaaaatcagtaattgcaaagtctttctcaagcagtgatcaaagacatgattatagttcaacgaaccttggaacaaccatgatccattctggctcacaaggttattatggaatgcaaaattcccatgcagcatacacaagccagcaatctcttactgggagttggaatgccacgtcaagtcagtttggggttgcaataagtcctttgacacctacccagcctgccatgcaaagcctttcaggacaaaatattgtggctgcagaaaatatgggtcatttaactactggaatggctcctgcaactgcaaatgcagaaatggttaattcagatttgacttcccagaaccaaatgttgtcttctttaccgcaaacggatgacagattagctgatggaattgaatccaaatcaggagaagatgtttcacatggaagagtgaggtcttcggctgaagctatcggaccacaggatgcacagcttggaccagtgcaactaaacgctcagcaacttgaaaacacaagaaaccatatgtcatcaattgatctctccaagtcaatgatgccatcacagatgatgtcagcaccatctgctgcatcagtacagccttcattgacaaccactgctcgcagtgataatcaaagcagtgggtgggctgtacctgcacaaatggcgaacacacctggccagtctcagataactggaaatctaacctggggaaatacacctcagggtgacgcaagcttaggttggggaatggtgggacagagcaatatgaatatgccttgggtagcatcagctcaaggtgcttcaggctacaacatgggtgtagccatgccgacgcagccaaatgcagttccaaacatgggctggttaccaaatccaggaaacaccagcatgaacatgatctgggctgcaactcaaggccaggggactccaaatgcggctcctatgatgggaggtcagatgcaaggagtcccaatggccccttggggtggtgttgcagcaggaagtgcaaattcttatcctgcctggggaaaccaacaagctggaaacatgaaccaaaatgttggctggagtgctcctgtgcagggaaatccaggtcaggcaaataacaacatgaactggaacgcaccaaatggtaatcctaattggaataatcaacagagagagaatgggggcaggcactctggacaccgcggtgcttttagtggtggtgactcaggcggaaggtcatggaagtcacgctctggtggcgatggggggtcaaggggacatagcagattctcccattcaacaaacacagagggatatccatccaggactgatcggcattacgataggcagaattcaggcaacgagaggcgatatgagaatcacaatgagagaaatggtcgacagtttgataggcagccttcggataatgaaaggaaccatgataggcctgatggcagacatggtggcagggatgacgataggcaggctgataggtccgagtcaagagagctgcgttagaactggtttctgtttcttacattcgtttccttgtatgtgcagtagcaaactagcatagtagcttccgtgcatgttttgaactttatgctctgtagcgatctgcatacatgtgcagatcaccgtgtataacatttgtagtttaatgctgtgtgcatcctagttccgaatttgtaatttacttgaataaatcgtcttgtctgatttctgatgtaaagcaggggctacacgcccaggttcttggactagggttgttggagcatcaatggaagacaagggagagccagtggtggttggagtag

SEQ ID NO: 36522 - DNA, 1837 bp, Zea Mays
ttgctgtcccctaaccacaactccacgatggcacctacctgaggaacgggccgggcctgtggaacctgggcgactacggcttccggcacctgttcgacggctacgccacgctggtccgcgtgtcgttccgcgacgggcaggcggtgggcgcgcaccggcagatcgagtcggaggcgtacaaggcggcgcgcgcgcacggcaaggtgtgctaccgcgagttctcggaggtgcccaaggcggaggggttcctctcccacgtgggccagctcgccaccctcttctcgggctcctcgctcaccgacaactccaacacgggcgtcgtcaggctcggcgacggccgcgtcctctgcctgacagagaccatcaagggctccatcgtggtcgacccggacacgctcgacaccatcggcaagttcgagtacacggacaggctgggcggcctcatccactcggcgcaccccatcgtgacggacaccgagttctggacgctcatcccggacctcatccgcccgggctactcggtggtgaggatggacgccgggaccaacgagcggcggttcgtcggcagggtggactgtcggggcgggccggcgcccgggtgggtgcactcgttccccatcaccgaccactacgtggtggtgccggagatgccgctccggtactgcgccaggaacctcctccgcgcggagcccacgccgctgtacaagttcgagtggcacctcgagtccggcagctacatgcacgtcatgtgcaaggctagcggcagggtcgtggcgaccgtggaggtgccgccgttcgtcacgttccacttcatcaacgcgtacgaggagaaggacgacgagggccgcgtcaccgcgatcatcgccgactgctgcgagcacaacgccaacacctccatcctcgacaagctccggctccagaacctgcgctcttccaccggccaggacgtcctccccgacgccaggtacggtaccaagtttagatcagagagggaaaggctggtgtctgagtctgacgtacgggccgtggtgttgggcgggacgggacgggacatacagggtgggccgcttcaggatcccgctggacgggagcccgttcggcgagctggagccggcgctggacccggaccagcacggccgcgggatggacatgtgcagcatcaacccggcccacgtcggcaagaagtaccggtacgcctacgcctgcggagcccaccggccgtgcaacttccccaacaccctcaccaagatcgacctggtggagaagacggccaagaactggtacgaggagggcgccgtgccgtcagagcccttcttcgtgccgcgccccggcgccgtggaggaggacgacggcgtcgcgatctcgatggtgagcgccaaggacggatcggcctacgcgttggtgctggacgccaagacgttccacgagatcgcgcgggccaagttcccgtacgcgatgccctacggcttgcactgctgctgggtgcctaggagtacctcagacgcgtagcgctagcagatcgttcgactctgctgctcacatctcccacaccgtacgtgccgactcgaccgacagacatgggcatagtagtacaaacagaaaggtgtctctgctgctttatttcctggccttcggctgaatgggaaaaaggtatacacgtcgtagtgatgtattgacagacatcgtatacgtcttcccagcaaaatgtggctgtagcaattacacgcgtttaattgtacagagctagctcatgtgagcgagcccatagtattgttcattatgtacacatgtagtacagtgttttgtttttttaaaaaagatgcccagtacagtaata

SEQ ID NO: 36523 - DNA, 2185 bp, Zea Mays
gatcatactagtacacaccacactcccccggctagcaccgtgctctctagctagctagctaagctactactgccctctcctttccaggcgactttgcaaccctagcaagagcattttcgccatgtctcccactatggcttcgtcgttgtgcgtatttgcagcgatgtctggcgccagcggcaggccgtcggccggtggctcggcggtaccgggccgtctgtccagcagcacacaggggggcaagggaaagcgggccgtggtgcagccgctcgcggctagcgtggtgacggagacgccagcgccggccgtagctccggctcggcccgtcgtcgacgccccgccgcgccgccgtgggggccgcggcaccgtcgagcacgcggcgtggaagagcgtccggcaggagaggtgggagggggcgctggagctggagggagagctgccgctctggctgcttgtttgtgcttgcaggatggcacctacctgaggaacgggccgggcctgtggaacctgggcgactacggcttccggcacctgttcgacggctacgccacgctggtccgcgtgtcgttccgcgacgggcaggcggtgggcgcgcaccggcagatcgagtcggaggcgtacaaggcggcgcgcgcgcacggcaaggtgtgctaccgcgagttctcggaggtgcccaaggcggaggggttcctctcccacgtgggccagctcgccaccctcttctcgggctcctcgctcaccgacaactccaacacgggcgtcgtcaggctcggcgacggccgcgtcctctgcctgacagagaccatcaagggctccatcgtggtcgacccggacacgctcgacaccatcggcaagttcgagtacacggacaggctgggcggcctcatccactcggcgcaccccatcgtgacggacaccgagttctggacgctcatcccggacctcatccgcccgggctactcggtggtgaggatggacgccgggaccaacgagcggcggttcgtcggcagggtggactgtcggggcgggccggcgcccgggtgggtgcactcgttccccatcaccgaccactacgtggtggtgccggagatgccgctccggtactgcgccaggaacctcctccgcgcggagcccacgccgctgtacaagttcgagtggcacctcgagtccggcagctacatgcacgtcatgtgcaaggctagcggcagggtcgtggcgaccgtggaggtgccgccgttcgtcacgttccacttcatcaacgcgtacgaggagaaggacgacgagggccgcgtcaccgcgatcatcgccgactgctgcgagcacaacgccaacacctccatcctcgacaagctccggctccagaacctgcgctcttccaccggccaggacgtcctccccgacgccagggtgggccgcttcaggatcccgctggacgggagcccgttcggcgagctggagccggcgctggacccggaccagcacggccgcgggatggacatgtgcagcatcaacccggcccacgtcggcaagaagtaccggtacgcctacgcctgcggagcccaccggccgtgcaacttccccaacaccctcaccaagatcgacctggtggagaagacggccaagaactggtacgaggagggcgccgtgccgtcagagcccttcttcgtgccgcgccccggcgccgtggaggaggacgacggcgtcgcgatctcgatggtgagcgccaaggacggatcggcctacgcgttggtgctggacgccaagacgttccacgagatcgcgcgggccaagttcccgtacgcgatgccctacggcttgcactgctgctgggtgcctaggagtacctcagacgcgtagcgctagcagatcgttcgactctgctgctcacatctcccacaccgtacgtgccgactcgaccgacagacatgggcatagtagtacaaacagaaaggtgtctctgctgctttatttcctggccttcggctgaatgggaaaaaggtatacacgtcgtagtgatgtattgacagacatcgtatacgtcttcccagcaaaatgtggctgtagcaattacacgcgtttaattgtacagagctagctcatgtgagcgagcccatagtattgttcattatgtacacatgtagtacagtgttttgtttttttaaaaaagatgcccagtacagtaata

SEQ ID NO: 36524 - DNA, 2110 bp, Zea Mays
ggaaccacttgtcccgtcgtccactccactccaggtcccagcccctcctcctacttcactacttcttcaagagtccaatctgctccctgcgcatcctctattcctcttcccctcccactccccagctcctgccgccccgctccacgttccagaacatctgggggggtatcccactcgcatggtcaccccatagccccccgagaaaccaccccaccgacgcacaggcagcaatggcggtgggcagcggcctggccctgtaccacgtcctcggagtggccacctgcgtggcgctgctgtacttcaccttcggcgaggtggacctccgccacatctcgctcccgtccttgcccgtctcccgcccgtcccccttccgcgcggctgccgtggcggcgccattcgtggagcggcgcggcgcgcagctgttcctggccggccggcccttctacgtgaacgggtggaactcctactggctcatggaccaggccgtggagccgaggtcccgggaccgcgtctcccgcatgttccgcaccggcgccgagatgggcctcaccgtgtgccgctcctgggcgttcaatgacggcgcctacaacgccctccaggtctcccccggccacttcgacgagcgcgtcttcaaggcgctggaccgggtggtcgtggaggccgggcggcacggggtgcggctgatcctgagcctggcgaacaacctggaggcgtacggtggcaagacgcagtacgtgcggtgggcgtgggaagagggcgtcggcatgtccgcctccaacgattccttcttctacgatccagccatccgcgactacttcaaagtctacctcaagacgctgctgacgaggaagaaccacttgacaggggtggagtacagggacgaccccaccatcctcgcgtgggagctgatgaacgagccccgctgcaccacggacccctccggcgacacgctgcagcgctggatggaggagatgtcggcgtacgtcaagtccatcgacaagaagcatctgctcaccgtcggcaccgaggggttctacgggccgacgagcccccaggagaagctggacgtcaatccgggcacgtggaaggacaacaactacggttcggacttcatccgcaacgccaagatcccagacatcgacttcgcttccatccacctctaccctgacacctgcagcacgccacggtggacgagaagctcaagttcgtgaagcggtgggtggcgtcccacatcgaggacggggacaaggagctgggcaagccggtcctcgccaccgagttcgggctgtcgcaccgcgccaagggcttccaccactcccaccgcgacgtcttctacaaggccgtctacgacaccgtctaccggtcggccgcccgcggcggcgccggcgccggcgccttcgtgtggcagctcgccgtggaggacatggaggagttccacgacgacttctccgtcgtgcccagcgagcacccctcgctgcacaggctcatcaagtcgcaatcgtgcaggctggccaagcttaggcacggggtcggggaggaggccaagcggacgctgtcggtgtgcgccgccggctcgtcctaggaacgaccgacgagcggtgctgcgcaggcagaagccatttccacgcgtccccctttcagctttgttgcgcccagtccgagggttttgtctttgtttctgtcgtccgaatggagcgagtggtgatggtgaagtgtgtcagaaatagatcggagaaaaatgaaatagaaagcagcaacagcaacaagaaaaaaaaagtgtgttacctcgtgaggctttggtaatgctgctggttagattcgtttgtggccacagcaccgacgcctcacgcagtcacgcctgcccgtggaatggcagatcggcatagataagctacagtttccgtcctgtgcaactgtacgttagatgcccttgacctttgatatatagagtcatcgtcgggtggcatccaatggtaatagtcctccatatagtgtatttctgcaatctggacattggacctatatttatatatagctgtaagcataagaggacaaaaaaacacaacatcttcgctttaaactttaatctgtaccggttgcttctacaata

SEQ ID NO: 36525 - DNA, 2728 bp, Zea Mays
gaacaccacgcagcacatggccagcttccccagggtcgtcgaggagagctccagcgtcgtcgaggagaggaggagcgctcggggagaggagaggagcgcccagagagaggaccgctcggggaggagctcctcggggagaagaccaactcaagctggagcaaagatcttctaagctacggacaatgagatggactgccgtaacagcgactgcggattggctaaatcacaccccgatagcaaaattccgaatttaaaaggattataatactaaaattccaataccgacgttcgggataccaatttttagaagctctgtgttggtgatatcttggttccaataagctcgcctagtcacgaccttgggcccgcctgactgttgtgactgaacccgaacctgtgtgtgaaaaaatacccaagttcctcctgacctcctatcctgctcgtcgagtcgtcgtcagtggtcgctcgaattcgccctccggcgcgatcgcgatgaccacgatcctccgccatctcctccgcgtggctctacctcccgcccccgcttccctctccagtcacctccccttctccaccagatctcgccgcacccctcaccgcttccgccgcagtcccaaaccggcgccgccctcccccgacgccgtgtccgcagctatcgcatccctcccgtcccgcctcaccccgcccgtgctcgcctccttcctagcctccacctccgacgcccgcctcctcctcccgctgctcacccactccctccgcatccccgcattccgtcccgaccccgcccccttcctcgtcgccatcaagcgcctcgccacctccgacctctacgaggacttcgaccgcacctgcgcgctatccttctctctccttccctcgctctcttctcctggccccctcctccgcaacgcgctttacttctactgccagttcggcaggctcggcaaggccttccacgtctacaccctcatgcgcgcttccgccgaccccgcagcgcgcccttcctccgacacctaccacgcgctcttcaccgcgctgctgtcgcgcggaggcggcgacaccttggtccattacatgtacatggacaacgtgtcggcgctgttcaggcagatgctcgaggaggggatcccgccggacacgcgcacgctcaacgtgctcatcaggggctacgcgcagtcgctgcatctcaacgacgctctgcgcctgttccatcagatgcggcccctgtacgggtgcgagccggatgcgttcacgtacagctacctcgtgcacgggctgagcgcgcagggtcgcaccaggaacgcgcgggagctgttcggtgaaatgcgcgggagcggtctcctgccgacggagccagcgtgcaatgcgttcgtaggtgcgctggctatggctggggaggctgcggacgcagagcgggtgatgtgggagatggccagggccgggagggtggtggatgacatcacaaggagagcattggtggatgagttgtccagggccgggaagcgggaggatgctgacagactagcgagggagatggagcagaagggcatcgtgagtgctcgcgagctacgagcactgctgagttcaatccgcgacgatggtgatgacaatttggatgtgtatggtagtgggaggaatacatggtgacacttctatttctcgggagaccagcggccctcggcagccttgtaacttgtccacgtcacccttatgggatatggattgcgtggtattgaatccgtttaaatttatagtaagtcaatattcatctcaatcaatttcaatacacactaatctatatgaaaaggaataaccgaacaaggtctagtagatttttttatatttagcatctatattgtttgattcaatccttgattgttgtatctacagctttttttccccaaacacgcttatctccaccttcatcatgcttgacatcaacggggaaaccttataatgttccataagtcattttcactgttgacattaaaatcattgacatttctttatgttgctttagtttagtgtgtgtctgtgagtgggttttgggtgtgtgttttgtgcgtgagcgtgtgtctggtctgtgttttgtcttgtgttagactctcgcgtgtttgagaaaaaaaaatcattgacattgttttttcagactcctatgtttgtttcatcttctctgacccaaatccaagacgcttatatgttgcttctgcacagaggaagggcactgtctattcagcatttcacaacactgctcgctctaaccacatatccttgtttctgtttcttacgaaatagatgctcctgtaggaagtgagcggtgcctaccagcggctgagcagcacaacggggagatctagagtccaaccatggatatcttcagtattgtgtccactagactaccatcctgccagcatggccatgcttccaagttccaaggtgtttgatcaatgcctgtaaattagatttgtatccgccagtcatgcccgcgtgaggctggccggatggatacggttgtttctgacatgtgaatggatgcagccaaatggtctccaaatagcttgttttgcatctgttcatgtagattatgtccctcgtgtgcagtcaaccaaacaagtgcttaaacatggtcaacccatgtgatgatgcagaacaagacggtacaggatatttggcctatgaattatgatgcatttgaatgttacttctctcttcagattaaatagatgag

SEQ ID NO: 36526 - DNA, 1777 bp, Zea Mays
cttggttccaataagctcgcctagtcacgaccttgggcccgcctgactgttgtgactgaacccgaacctgtgtgtgaaaaaatacccaagttcctcctgacctcctatcctgctcgtcgagtcgtcgtcagtggtcgctcgaattcgccctccggcgcgatcgcgatgaccacgatcctccgccatctcctccgcgtggctctacctcccgcccccgcttccctctccagtcacctccccttctccaccagatctcgccgcacccctcaccgcttccgccgcagtcccaaaccggcgccgccctcccccgacgccgtgtccgcagctatcgcatccctcccgtcccgcctcaccccgcccgtgctcgcctccttcctagcctccacctccgacgcccgcctcctcctcccgctgctcacccactccctccgcatccccgcattccgtcccgaccccgcccccttcctcgtcgccatcaagcgcctcgccacctccgacctctacgaggacttcgaccgcacctgcgcgctatccttctctctccttccctcgctctcttctcctggccccctcctccgcaacgcgctttacttctactgccagttcggcaggctcggcaaggccttccacgtctacaccctcatgcgcgcttccgccgaccccgcagcgcgcccttcctccgacacctaccacgcgctcttcaccgcgctgctgtcgcgcggaggcggcgacaccttggtccattacatgtacatggacaacgtgtcggcgctgttcaggcagatgctcgaggaggggatcccgccggacacgcgcacgctcaacgtgctcatcaggggctacgcgcagtcgctgcatctcaacgacgctctgcgcctgttccatcagatgcggcccctgtacgggtgcgagccggatgcgttcacgtacagctacctcgtgcacgggctgagcgcgcagggtcgcaccaggaacgcgcgggagctgttcggtgaaatgcgcgggagcggtctcctgccgacggagccagcgtgcaatgcgttcgtaggtgcgctggctatggctggggaggctgcggacgcagagcgggtgatgtgggagatggccagggccgggagggtggtggatgacatcacaaggagagcattggtggatgagttgtccagggccgggaagcgggaggatgctgacagactagcgagggagatggagcagaagggcatcgtgagtgctcgcgagctacgagcactgctgagttcaatccgcgacgatggtgatgacaatttggatgtgtatggtagtgggaggaatacatggtgacacttctatttctcgggagaccagcggccctcggcagccttgtaacttgtccacgtcacccttatgggatatggattgcgtggtattgaatccgtttaaatttatagaagtgagcggtgcctaccagcggctgagcagcacaacggggagatctagagtccaaccatggatatcttcagtattgtgtccactagactaccatcctgccagcatggccatgcttccaagttccaaggtgtttgatcaatgcctgtaaattagatttgtatccgccagtcatgcccgcgtgaggctggccggatggatacggttgtttctgacatgtgaatggatgcagccaaatggtctccaaatagcttgttttgcatctgttcatgtagattatgtccctcgtgtgcagtcaaccaaacaagtgcttaaacatggtcaacccatgtgatgatgcagaacaagacgg

SEQ ID NO: 36527 - DNA, 8920 bp, Zea Mays
aaattaataaaaaaaagttagaagcgagaagacgatggaagaatccatttctcaaacaaaaatgctattaatgatcgcactcgacttgacactggagtcaatcttggttcatcaaagtaaaaaaggcagaaaacagacacgatgacatctgtttttgacgccttgattaaacacgtggccagcggcctgctacagcctactgcctacagatgcaaatcagtaccaggcgtgctctccgtgagctctacgcctctacctgtgtcttggcgacgactgggcgaccgacgacgcagccgtaggacaggcgaccgacgacgcagccgtaggataggcgaccaggtcttcctgttggctcttgcccttcgccggcgacgagcacccgccaggtcttgacacatctatcttgactggataacttaccttgttaatgaaggtttctctgatattccggtggcctagcagttactgtggaggatattcatttgtgtttatcatttatttggtcttgttcagggccacaacgacattgggaacaagtgtatgacatacaaacagtaaaatgggaaggaaagggtcagaagtatcaccaagcaaaaggtatcccttgaggtctgcacatagtagtggtagagttcttcgctctgccttagccaataataataaggacagtgagcctctgaatgcggctgctgctacccaagcagctgtgaaaaaaagaagtggcaaccagctagatagtcctaatagcactgtcaggctacttcgttctacatcaaaaaataaggacgaggcacatagcgggcctctaaatgacaggatcattgataagccagctgcaaataaaagaaaacatgccaatccctcacaggttggaagtcccagcagcagtgtcagggtgcttcgctctgcaataaaaaataaagatatggcgcgcagtgagcctcaaagtgacaggaccgctggtgaggcagctacaaataaaagaaaaaacgccaattcctcaaaggtggggagtctgagctctggtctcagtgtgcttcggtctgcttcaaaagctaaggatgagacatgtatcaaacctttaaatgatagtgctgctgttgaaccagcttcaagtaaaagaaaatgcaccagtccgtcaaaggtgggaagtcccagcaacagtgtcagggtgcttcgatctacttcaaaatataagaatgagacatgtaccgagcctttaaatgatagtggtgctgttgaaccagctgcaaatagaaggaaaggtgtcagtcgttcaaaggagggaagtcccaatagcagtgtcagggtgcttcgctctgcctcaaataataagattgatgtatctattgagccactaaataatagtactactggtcaaccagctgcgaaaagaagaaagaatggcagttcctttaagagcagtgccagggtgctttgctctacctcagaaagggcaaatgaggcatctagtgagcctttaaatgatagtactgctgctcagccagctgcgaggaaaaagaaaggtggtgcaatgccaaagactgataacccaaagattggtgtcagggttcttcgctctgcctcaggaaagaagaatgagacatgtactgagcctgtaaatggcagtacttctgctgaaccaactgtgacaaaaaaaagaaattgcaagccttcaaaggatcgcagtcccaagaaggactacttaaaaatttgtcaaagaattaaatatattttgaatcgaatgaagtatgaacaagcctttattcaggcttatgcaagtgaaggttggaaaggccaaagtttggaaaaaataagacccgagaaggagcttgaacgagccaaggcagaaatccttcaatgcaagttaagaatccgggaagcttttcgaaatatggactctcttttatcgaaggggaagcttgaagaatctttgtttgattcagcaggacaaatttcaagcgaagatatattttgtgccatatgtggctcaaaggatgttacttcacaaaatgacatcattctttgtgatggagcctgtgacagaggattccaccagaattgtttgagccctcctttgctaactgaagaattcctccgggggatgaaggatggctttgccctgcatgtgtgtgcaaagcagactatatagatgcgttaaatgaacttcaaggaagcaaactctccattcatgactcatgggtgaaagttttccctgaggcagcttcaactgccaatggttctaaacaagttgatgcttctgatctgctgccagatcatataaaggacagtgctaaccttgcattggttggaacgcacatggtgaatgaaatcaggttttctgaagaggatgatagcaaagcggatgacctcggcttgccttcggaggactcaggggatggtgacttcgatccagcaggtccagattctagtgaagaccaaaatgatggattgaactcagaagagtcagatttcacatctgactctgattatttttgtgctgagattgctaaatcttgcggccaggatgaagtctcggcatctccattatcaaatgtgataaaccgtactgatagaatgaaactcagggcctacagtagacgctctaatgaagaaaaccacaatcatgcatttatggacatggagctagagcaagacatagtgctaccagttccaagcaggcggcaggttgaacggttggattacaaaaaactatacgatgaggcatatgaggaagaatcatctaattcaagtgatgaagaagagtggtctggaaaagaactcttagaaggcagtggaacagattcacttgatgagcgacttcgtcctgtaaaacggtgctctagaagagcaccagcagggcagcagaataatgaacttacaccacagagccggcctcatggttctaacagtgagcagaaaactgaagttcttcgctccaatggcagtagtagcacaggacggaagtatgatcctgaagttacccagaaattgaaggtgcattttgagaaagatccatatcctagccgtgaaacaaaagaaaatctatcagaagaactaggcttgacatttaatcaggtctccaaatggttctctagtactcgtcactattcaagggttgcttctgccaaaaaagaaatgcatcctgacagccatacttgtgagaataatgatgagacaactgtagacagcatgcaagcaaaacaacccaatgctggggtgatggaaaagttgacgggggatagaaatggcattgttcctgagaaaccgatggtgcaggacaatcttaaccaaggagcgatggaaaagttaactagggataaaaatgacattgttcctgagaaaccggtgatgcagagcagtcttaaccaatgtaataatgaagatataccgctttctggaacagaaattgagatggagtcttacgaacaagaatcatctgactcaagtgatgaagagtggtccatacttagcacaccacgaaaaacaagattacaagaccatggaaaatcatcagttactgaatcacttcgttctgcaaaacggtgttccagaagagcaccagctagggagcagaataatgaacgtattcagagtgagcagcttcatggttctgcaagtgagcagcaaactgaatttcttcgctccaatgtcagcagtggcaaggtctcaaaatatcattttggccctatagttagtcagaagcttaaggaacattttgaaaaagatccatatccttgccgtgcaacaaaagagagtctggcacaagagctaggactgacatttaatcagatcagtaagtggttctctggcactcgtcattattcaagagatgctgttgccaagaatcagaaacgcccgggagaaaatactactgtgaataataatagcacaacctttgatgacatacaagtaatagaacccaatgttgggttgatagataaaccagctgcagatgtaaatgacatgatttctgaaaagttgatggtccaaataaatcttaacgaaggcattgaagaagatatcccaccgagccaatatgccaggtgtgaagagaaaataactatgactccagctgccatctcaagggaagctggtcttccaggatatggtcctggtcctggagaaaactttcttcaggtcagttcaaggaatactagctgtgagcagagtgtgatactggctcctaccgctatcgcaagagaagttggtccaccaggatatgcgactggagaaaaccagggcaatggggctccatggaatacaagttatgagcgaagactatttatgaatcctgtgaccagctcaagagcagtcagtcctccaggatatgggcctgaagaaagccgaggcagtggcatttcctggaatacaagcagtgaacaaatattgtttatgagtcctacaaccatctcaagagaacttggtccaccaggatatgggcctagagaagaccagtgcagtggcacttcatggaatgcaagctgcgagttgggagtatttatgagtcctgtgaccacctcaagagaagacagtccgccaggatatgggcctcgagaaaaccaggagaatgacaatatgagatgcgagttgagaatgtttacaagtcctacaaccatctccagagaagttggcccaccaggatatgagcttactggaaaaaacaagggcaacggcgcttcatgtactacgaattaccagcagggagcgtttacgagtcctgaagccttcccaagagaagcctgtcctccaggatttgtgtctggagagaaccagggtaacgacactccatggtatatgagcagcaaacagatggcgtttacgagtcctacgaccaaccctagagtaggtccgccagggtatggacaggaaaaccagggcagtcgtgtttcttggaatacgagttatgagcagggagtgtttatgagttctacaaacatctcaagagaagccggtccgccaggttatgggcctggggaaagtcagggcaatatcacttcatggatttcgacaggcgggcagagaatgtttacaggtccttcaactatcccgaacgaagtcgggcagcaaggatatggcccttcaggaatcccgggaacggatggctcaaggagtatggacttgaaagcctttccaccaggatatggacctgctggagaaaaccagggcggtggtgcttcagggagcgtcataagcccccaagctcggtctgcagagaacgtagagttttcagacgacgctagaaaaaaggctatacagcgggagctgagacggcggcagaagttcaggtgatggccgtgatgcgaatttctgatcttgctcatcgaattttgactacggattactactttttaagactacatatccagtcttgatggctgaatgagtgacgaccctagttgtcgagacgcaaaaccttttgttgtatgtgttccttttacagacttccttggcttgtcatgaatttctaatgtgaacttgtgctgtgaacttgttgcaaaacctcttgaacctgaagcattcaacatgatgtgagcttgtgcagttactcttcttctgcatgagttcatgttatctgggttgcacggcatgcaatttcacattgctagaagggtcagataacactgactcgggaactgctctatttaaggtgcctggatttttttatagaaaatttgaggcgacagtcttacacaagcagcaaatacaacaaccttgagctcttagatcgattttcaagtatatctcagcaaatacaacaaccttgagctcttagatcgatttttcaagtataggagatatgaaacagatttcatgatatagctctgaacctctagattataaatatagttaataaataatatatacaaagagtagagcggtgtagagacagattttttttttcaattaagacatgcctaaaagaacagctcacaagatatagaaaaactgttgtcagttctatccagccgttctgaacttctgaagccgcattattaccaatgggggctagttgggctgtacaactccgtgccagcccagcccatctgatccattaatataacggccatcccgaacccgaacggctcccatcccatctgatccctcgccgcatttcaaattcaaatcccctcttcacccaagtgctgccttcgcatcgcatggcggccagttccctctcgtccccggcggccagccggacgccgaacctgaaatcggccgtggctccgtcaccttctccatccactcgccgggcgccagcagatgcggcgtcggcgtcgatcacggcggagtcgaaggcacggttcgaggcttacaaccggctgcaggcagcggccgtggcgttcggcgagaagcttcccatcccggagatagtagtgattggaggccagtcggatgggaagagctccctcctagaggcgctccttggcttccgcttcaacgtccgcgaggtcgagatgggcacccgccgtcctctcgtcctccagatggtccacgaccccactgccctcgagcccagatgccgattccaggaggaggattccgaggagtatgggagcccgatggtggtggctacggccatcgcggacctcatcaagcagcgcactgaatcacacctccggaagatccaggctgctgtctcatccaagcccatcgtcatgagggctgagtacgcccactgccccaacctcacaatcatcgacaccccaggcttcgtgcttaaggctaagagaggcgagccagagagcacaccggatgagatacggtcgatggtgaagtcactcgcgacccctccccaccgcctcgttctgttcctccagcagagcagcgttgagtggtgctcgtcgatctggctcgacacgcttaaggagatcgatcccactttcaggcgcaccatgatagtcatctccaagtttgacaaccgcctcaaggaattcacggagaggtgggaggttgatgccttcttgagtgcgagtggataccttggggataacatccacccgttcttcgtggctcttccaaaggaccgtggaacaatttccaatgaggagttccgcaggcagatctgtcatgttgatattgatgtactacgtcacttgcgagataatgtaaaaggggggttcaatgaagagaaatatggatcacacattgggttcagctgcctgaggaagtacctcgaatctgaacttcagaagaggtacaaagaagcagctccagctaccctggcattgttagagcagaggtgcactgatgtctcaatggacctaacgagattagattccaaactacaagcaacgtctgatgtctctcagctccggagatcggcaatgcttcatgcagcttctatttgcacacacttgcatgcattacttgatggatctgctgatccagatccagaaatatgggggaagactacggaggaggaacaaatgcatagtgctattggcagctggcctggcattaatacgcctgtaaaacctgccaactccagccttaagctgtatggtggtgcagcttttgagagagtaatgcatgaatttcgctgtgcaacatattcaatggaatgccctcaagtgtcaagggagaaggttgcgaacatactacttgcccatgctggaagaggtggaagcagtaggttgactgaggcagcagctgagatagctcgggcggctgcaagatcatggcttgctcctcttattgatactgcatgtgaccggcttgcatttgtcctacaaagtctgtttgaccttgctatggagcgtaaccgcgataaggattcacaacatcatcagaatgttgaagatatggatagttatgttggctttcttgctgctctccggtgctcatattataagtttgtcaaagaattgtccaagcaatgcaagcagatagtgcgtcatcaccttgattcagttacgagcccttactcccatatttgctatgacaacgactttttgagtgatgttggatccgtagcaaaccccatgagtaggtttagtcactttactggagttacatcctttgatctagcagacagtggatcagcactagaggaagctcaggagaacttgcctccaagagatcagcagcattcgacaccgcctactagtaaagggaatgagtcaaaggaggttctcagagaaagccagctaacagtacctgagacgccttctcctgatctgccatctgatatacatggtggtaggaagaaagaaaatgggatcccaaatgacggtggcccaaggaaaagacatgcaaggatggcagcgtatacaaacagaaatcaccataacagtatgattgttggagatgacatgggctcaaagtcagggtcatcatactccaccatatgcgcaatatctgctcaatattttgccaagatgcgagaagtcctgattgaaagaaatgtcccctctgcattgaactctggattcttaacaccatgccgtgaaaggttatttctggcactcggctttgagctattcgctgtgagtgatgacaagttcatggacatgtttgtcgcgcctggggcagttgatgctattcagaacgagcgcaattctcttctcaaacgtcagaagattttgctgtcctgtctgcatgagtttaagaacatatcccgggctctgtagtgatgatctttctggaattcctcaggcatgtgtattcatgtggttaacgaatcctctcagacggtacactatgccgggggcttattgcaatggcccattctttttttatccccattctcatgtcatgtatctttcttggccttaccctgttttcttgagctctgtatcactctgtcagttccttgttgacaaggtctgtatcactaacgtttgttcagattcaatactttgattatgctcgacgacaccaatacaaaaatgttcatatgaaattggaataaccgaat

SEQ ID NO: 36528 - DNA, 5161 bp, Zea Mays
aaattaataaaaaaaagttagaagcgagaagacgatggaagaatccatttctcaaacaaaaatgctattaatgatcgcactcgacttgacactggagtcaatcttggttcatcaaagtaaaaaaggcagaaaacagacacgatgacatctgtttttgacgccttgattaaacacgtggccagcggcctgctacagcctactgcctacagatgcaaatcagtaccaggcgtgctctccgtgagctctacgcctctacctgtgtcttggcgacgactgggcgaccgacgacgcagccgtaggacaggcgaccgacgacgcagccgtaggataggcgaccaggtcttcctgttggctcttgcccttcgccggcgacgagcacccgccagttcaaggaatactagctgtgagcagagtgtgatactggctcctaccgctatcgcaagagaagttggtccaccaggatatgcgactggagaaaaccagggcaatggggctccatggaatacaagttatgagcgaagactatttatgaatcctgtgaccagctcaagagcagtcagtcctccaggatatgggcctgaagaaagccgaggcagtggcatttcctggaatacaagcagtgaacaaatattgtttatgagtcctacaaccatctcaagagaacttggtccaccaggatatgggcctagagaagaccagtgcagtggcacttcatggaatgcaagctgcgagttgggagtatttatgagtcctgtgaccacctcaagagaagacagtccgccaggatatgggcctcgagaaaaccaggagaatgacaatatgagatgcgagttgagaatgtttacaagtcctacaaccatctccagagaagttggcccaccaggatatgagcttactggaaaaaacaagggcaacggcgcttcatgtactacgaattaccagcagggagcgtttacgagtcctgaagccttcccaagagaagcctgtcctccaggatttgtgtctggagagaaccagggtaacgacactccatggtatatgagcagcaaacagatggcgtttacgagtcctacgaccaaccctagagtaggtccgccagggtatggacaggaaaaccagggcagtcgtgtttcttggaatacgagttatgagcagggagtgtttatgagttctacaaacatctcaagagaagccggtccgccaggttatgggcctggggaaagtcagggcaatatcacttcatggatttcgacaggcgggcagagaatgtttacaggtccttcaactatcccgaacgaagtcgggcagcaaggatatggcccttcaggaatcccgggaacggatggctcaaggagtatggacttgaaagcctttccaccaggatatggacctgctggagaaaaccagggcggtggtgcttcagggagcgtcataagcccccaagctcggtctgcagagaacgtagagttttcagacgacgctagaaaaaaggctatacagcgggagctgagacggcggcagaagttcaggtgatggccgtgatgcgaatttctgatcttgctcatcgaattttgactacggattactactttttaagactacatatccagtcttgatggctgaatgagtgacgaccctagttgtcgagacgcaaaaccttttgttgtatgtgttccttttacagacttccttggcttgtcatgaatttctaatgtgaacttgtgctgtgaacttgttgcaaaacctcttgaacctgaagcattcaacatgatgtgagcttgtgcagttactcttcttctgcatgagttcatgttatctgggttgcacggcatgcaatttcacattgctagaagggtcagataacactgactcgggaactgctctatttaaggtgcctggatttttttatagaaaatttgaggcgacagtcttacacaagcagcaaatacaacaaccttgagctcttagatcgattttcaagtatatctcagcaaatacaacaaccttgagctcttagatcgatttttcaagtataggagatatgaaacagatttcatgatatagctctgaacctctagattataaatatagttaataaataatatatacaaagagtagagcggtgtagagacagattttttttttcaattaagacatgcctaaaagaacagctcacaagatatagaaaaactgttgtcagttctatccagccgttctgaacttctgaagccgcattattaccaatgggggctagttgggctgtacaactccgtgccagcccagcccatctgatccattaatataacggccatcccgaacccgaacggctcccatcccatctgatccctcgccgcatttcaaattcaaatcccctcttcacccaagtgctgccttcgcatcgcatggcggccagttccctctcgtccccggcggccagccggacgccgaacctgaaatcggccgtggctccgtcaccttctccatccactcgccgggcgccagcagatgcggcgtcggcgtcgatcacggcggagtcgaaggcacggttcgaggcttacaaccggctgcaggcagcggccgtggcgttcggcgagaagcttcccatcccggagatagtagtgattggaggccagtcggatgggaagagctccctcctagaggcgctccttggcttccgcttcaacgtccgcgaggtcgagatgggcacccgccgtcctctcgtcctccagatggtccacgaccccactgccctcgagcccagatgccgattccaggaggaggattccgaggagtatgggagcccgatggtggtggctacggccatcgcggacctcatcaagcagcgcactgaatcacacctccggaagatccaggctgctgtctcatccaagcccatcgtcatgagggctgagtacgcccactgccccaacctcacaatcatcgacaccccaggcttcgtgcttaaggctaagagaggcgagccagagagcacaccggatgagatacggtcgatggtgaagtcactcgcgacccctccccaccgcctcgttctgttcctccagcagagcagcgttgagtggtgctcgtcgatctggctcgacacgcttaaggagatcgatcccactttcaggcgcaccatgatagtcatctccaagtttgacaaccgcctcaaggaattcacggagaggtgggaggttgatgccttcttgagtgcgagtggataccttggggataacatccacccgttcttcgtggctcttccaaaggaccgtggaacaatttccaatgaggagttccgcaggcagatctgtcatgttgatattgatgtactacgtcacttgcgagataatgtaaaaggggggttcaatgaagagaaatatggatcacacattgggttcagctgcctgaggaagtacctcgaatctgaacttcagaagaggtacaaagaagcagctccagctaccctggcattgttagagcagaggtgcactgatgtctcaatggacctaacgagattagattccaaactacaagcaacgtctgatgtctctcagctccggagatcggcaatgcttcatgcagcttctatttgcacacacttgcatgcattacttgatggatctgctgatccagatccagaaatatgggggaagactacggaggaggaacaaatgcatagtgctattggcagctggcctggcattaatacgcctgtaaaacctgccaactccagccttaagctgtatggtggtgcagcttttgagagagtaatgcatgaatttcgctgtgcaacatattcaatggaatgccctcaagtgtcaagggagaaggttgcgaacatactacttgcccatgctggaagaggtggaagcagtaggttgactgaggcagcagctgagatagctcgggcggctgcaagatcatggcttgctcctcttattgatactgcatgtgaccggcttgcatttgtcctacaaagtctgtttgaccttgctatggagcgtaaccgcgataaggattcacaacatcatcagaatgttgaagatatggatagttatgttggctttcttgctgctctccggtgctcatattataagtttgtcaaagaattgtccaagcaatgcaagcagatagtgcgtcatcaccttgattcagttacgagcccttactcccatatttgctatgacaacgactttttgagtgatgttggatccgtagcaaaccccatgagtaggtttagtcactttactggagttacatcctttgatctagcagacagtggatcagcactagaggaagctcaggagaacttgcctccaagagatcagcagcattcgacaccgcctactagtaaagggaatgagtcaaaggaggttctcagagaaagccagctaacagtacctgagacgccttctcctgatctgccatctgatatacatggtggtaggaagaaagaaaatgggatcccaaatgacggtggcccaaggaaaagacatgcaaggatggcagcgtatacaaacagaaatcaccataacagtatgattgttggagatgacatgggctcaaagtcagggtcatcatactccaccatatgcgcaatatctgctcaatattttgccaagatgcgagaagtcctgattgaaagaaatgtcccctctgcattgaactctggattcttaacaccatgccgtgaaaggttatttctggcactcggctttgagctattcgctgtgagtgatgacaagttcatggacatgtttgtcgcgcctggggcagttgatgctattcagaacgagcgcaattctcttctcaaacgtcagaagattttgctgtcctgtctgcatgagtttaagaacatatcccgggctctgtagtgatgatctttctggaattcctcaggcatgtgtattcatgtggttaacgaatcctctcagacggtacactatgccgggggcttattgcaatggcccattctttttttatccccattctcatgtcatgtatctttcttggccttaccctgttttcttgagctctgtatcactctgtcagttccttgttgacaaggtctgtatcactaacgtttgttcagattcaatactttgattatgctcgacgacaccaatacaaaaatgttcatatgaaattggaataaccgaat

SEQ ID NO: 36529 - DNA, 10511 bp, Zea Mays
cgatcaacccagcccgcaccgcaacgcaaagcggtgctctctttcgctggttcgtgcagagccatcgactcatcggtatgcatctctccgcggcctccacctgtgcctgccgagtacataccatccctcgaccggccacctcttcccaattgcatcgcatccccaggacttgccggccggtccagagacggcgataatgggggcttctgaggtgtggtcaccggtgccggcctggctggcgatcgccgtcggcttggcggccgtggtttcctcgtcggaggctcacgtcttctacgccggtggccgcgacggctgggtccttgaccccaccgagagctacaaccattgggccgggcgcagccggttccaagtgaacgacaccatcgtgttcacgcacgaggagggcgtcgactctgtgctgctggtgacggagcaggacttcgacacgtgcaacacgcgcaacccggtccggcggctccaggccgtcggcagcagcggcagttcggagcgttcggtgttcaagctcgaccggtccggcccgttcttcttcatcagcagcgacgaggaacggtgccaaaagggccagaagctgtacataatcgtgatggcggttcgccggtcgacgacgccggcggcaccggcacccgacgcggcgttcccgccggcggcttcaccggtacccgattcggcgttcccgccggcgccttcaccggtgtgggcctcggcgcccgacaacgcgcacgctccaccaccgacggcgggtgcgtcacgtttggacgacggagcgatcatcggctctgtgcttggggttataggagctttggtgctctgtaccgtgtactagatcagaaatcaagactccaaggggcgttccgtctgtgtggttttcaccgtctcttttgctaatcatgtttcttaaaatcatgattttacaatacaatagtataatacagtagttttgattacttccaaaaataccatggttttaagatttaagaacattgtaaacgtatttaaacaacaactagccatgctatatatattttttattttggattagagtagagtttctaatactctaaaaatatcgtattatctagaataacatggtcataaaagttctactccaacctaattgttttgtttataattagcttctagcacaacatgtacactaaatatcatagttttagatactttgtctccaaacaaatattggttagagtgatataaataaaacttttgttgtgtcacgacattttaaaaccttagcattctaaaactatggtttttgaaataccttgccaaacacgtcataagttttaggaatatttgacataattacttaccaaacacgtcataagttttaggaatatttgacataattatgctccactttaaagtaatttggactaaatctactttagagtggagcaaagttacgccaaacgctttctgctctagtcataacacgagctttggaataggatatagccgatattggaataggatatagccggtagagcaatttattactggagtgtttggttcgaagaatcaatccatttttaataaggtgaggtggtgcatcataaattcattacacaaatttgatggaataaactcatttatcatgttagaactaattattagtcgatgagaaatgaaatgcgatggatcaacttgttctattctacaaattaataaaaaaaagttagaagcgagaagacgatggaagaatccatttctcaaacaaaaatgctattaatgatcgcactcgacttgacactggagtcaatcttggttcatcaaagtaaaaaaggcagaaaacagacacgatgacatctgtttttgacgccttgattaaacacgtggccagcggcctgctacagcctactgcctacagatgcaaatcagtaccaggcgtgctctccgtgagctctacgcctctacctgtgtcttggcgacgactgggcgaccgacgacgcagccgtaggacaggcgaccgacgacgcagccgtaggataggcgaccaggtcttcctgttggctcttgcccttcgccggcgacgagcacccgccaggtcttgacacatctatcttgactggataacttaccttgttaatgaaggtttctctgatattccggtggcctagcagttactgtggaggatattcatttgtgtttatcatttatttggtcttgttcagggccacaacgacattgggaacaagtgtatgacatacaaacagtaaaatgggaaggaaagggtcagaagtatcaccaagcaaaaggtatcccttgaggtctgcacatagtagtggtagagttcttcgctctgccttagccaataataataaggacagtgagcctctgaatgcggctgctgctacccaagcagctgtgaaaaaaagaagtggcaaccagctagatagtcctaatagcactgtcaggctacttcgttctacatcaaaaaataaggacgaggcacatagcgggcctctaaatgacaggatcattgataagccagctgcaaataaaagaaaacatgccaatccctcacaggttggaagtcccagcagcagtgtcagggtgcttcgctctgcaataaaaaataaagatatggcgcgcagtgagcctcaaagtgacaggaccgctggtgaggcagctacaaataaaagaaaaaacgccaattcctcaaaggtggggagtctgagctctggtctcagtgtgcttcggtctgcttcaaaagctaaggatgagacatgtatcaaacctttaaatgatagtgctgctgttgaaccagcttcaagtaaaagaaaatgcaccagtccgtcaaaggtgggaagtcccagcaacagtgtcagggtgcttcgatctacttcaaaatataagaatgagacatgtaccgagcctttaaatgatagtggtgctgttgaaccagctgcaaatagaaggaaaggtgtcagtcgttcaaaggagggaagtcccaatagcagtgtcagggtgcttcgctctgcctcaaataataagattgatgtatctattgagccactaaataatagtactactggtcaaccagctgcgaaaagaagaaagaatggcagttcctttaagagcagtgccagggtgctttgctctacctcagaaagggcaaatgaggcatctagtgagcctttaaatgatagtactgctgctcagccagctgcgaggaaaaagaaaggtggtgcaatgccaaagactgataacccaaagattggtgtcagggttcttcgctctgcctcaggaaagaagaatgagacatgtactgagcctgtaaatggcagtacttctgctgaaccaactgtgacaaaaaaaagaaattgcaagccttcaaaggatcgcagtcccaagaaggactacttaaaaatttgtcaaagaattaaatatattttgaatcgaatgaagtatgaacaagcctttattcaggcttatgcaagtgaaggttggaaaggccaaagtttggaaaaaataagacccgagaaggagcttgaacgagccaaggcagaaatccttcaatgcaagttaagaatccgggaagcttttcgaaatatggactctcttttatcgaaggggaagcttgaagaatctttgtttgattcagcaggacaaatttcaagcgaagatatattttgtgccatatgtggctcaaaggatgttacttcacaaaatgacatcattctttgtgatggagcctgtgacagaggattccaccagaattgtttgagccctcctttgctaactgaagaaattcctccgggggatgaaggatggctttgccctgcatgtgtgtgcaaagcagactatatagatgcgttaaatgaacttcaaggaagcaaactctccattcatgactcatgggtgaaagttttccctgaggcagcttcaactgccaatggttctaaacaagttgatgcttctgatctgctgccagatcatataaaggacagtgctaaccttgcattggttggaacgcacatggtgaatgaaatcaggttttctgaagaggatgatagcaaagcggatgacctcggcttgccttcggaggactcaggggatggtgacttcgatccagcaggatgaagtctcggcatctccattatcaaatgtgataaaccgtactgatagaatgaaactcagggcctacagtagacgctctaatgaagaaaaccacaatcatgcatttatggacatggagctagagcaagacatagtgctaccagttccaagcaggcggcaggttgaacggttggattacaaaaaactatacgatgaggcatatgaggaagaatcatctaattcaagtgatgaagaagagtggtctggaaaagaactcttagaaggcagtggaacagattcacttgatgagcgacttcgtcctgtaaaacggtgctctagaagagcaccagcagggcagcagaataatgaacttacaccacagagccggcctcatggttctaacagtgagcagaaaactgaagttcttcgctccaatggcagtagtagcacaggacggaagtatgatcctgaagttacccagaaattgaaggtgcattttgagaaagatccatatcctagccgtgaaacaaaagaaaatctatcagaagaactaggcttgacatttaatcaggtctccaaatggttctctagtactcgtcactattcaagggttgcttctgccaaaaaagaaatgcatcctgacagccatacttgtgagaataatgatgagacaactgtagacagcatgcaagcaaaacaacccaatgctggggtgatggaaaagttgacgggggatagaaatggcattgttcctgagaaaccgatggtgcaggacaatcttaaccaaggagcgatggaaaagttaactagggataaaaatgacattgttcctgagaaaccggtgatgcagagcagtcttaaccaatgtaataatgaagatataccgctttctggaacagaaattgagatggagtcttacgaacaagaatcatctgactcaagtgatgaagagtggtccatacttagcacaccacgaaaaacaagattacaagaccatggaaaatcatcagttactgaatcacttcgttctgcaaaacggtgttccagaagagcaccagctagggagcagaataatgaacgtattcagagtgagcagcttcatggttctgcaagtgagcagcaaactgaatttcttcgctccaatgtcagcagtggcaaggtctcaaaatatcattttggccctatagttagtcagaagcttaaggaacattttgaaaaagatccatatccttgccgtgcaacaaaagagagtctggcacaagagctaggactgacatttaatcagatcagtaagtggttctctggcactcgtcattattcaagagatgctgttgccaagaatcagaaacgcccgggagaaaatactactgtgaataataatagcacaacctttgatgacatacaagtaatagaacccaatgttgggttgatagataaaccagctgcagatgtaaatgacatgatttctgaaaagttgatggtccaaataaatcttaacgaaggcattgaagaagatatcccaccgagccaatatgccaggtgtgaagagaaaataactatgactccagctgccatctcaagggaagctggtcttccaggatatggtcctggtcctggagaaaactttcttcaggtcagttcaaggaatactagctgtgagcagagtgtgatactggctcctaccgctatcgcaagagaagttggtccaccaggatatgcgactggagaaaaccagggcaatggggctccatggaatacaagttatgagcgaagactatttatgaatcctgtgaccagctcaagagcagtcagtcctccaggatatgggcctgaagaaagccgaggcagtggcatttcctggaatacaagcagtgaacaaatattgtttatgagtcctacaaccatctcaagagaacttggtccaccaggatatgggcctagagaagaccagtgcagtggcacttcatggaatgcaagctgcgagttgggagtatttatgagtcctgtgaccacctcaagagaagacagtccgccaggatatgggcctcgagaaaaccaggagaatgacaatatgagatgcgagttgagaatgtttacaagtcctacaaccatctccagagaagttggcccaccaggatatgagcttactggaaaaaacaagggcaacggcgcttcatgtactacgaattaccagcagggagcgtttacgagtcctgaagccttcccaagagaagcctgtcctccaggatttgtgtctggagagaaccagggtaacgacactccatggtatatgagcagcaaacagatggcgtttacgagtcctacgaccaaccctagagtaggtccgccagggtatggacaggaaaaccagggcagtcgtgtttcttggaatacgagttatgagcagggagtgtttatgagttctacaaacatctcaagagaagccggtccgccaggttatgggcctggggaaagtcagggcaatatcacttcatggatttcgacaggcgggcagagaatgtttacaggtccttcaactatcccgaacgaagtcgggcagcaaggatatggcccttcaggaatcccgggaacggatggctcaaggagtatggacttgaaagcctttccaccaggatatggacctgctggagaaaaccagggcggtggtgcttcagggagcgtcataagcccccaagctcggtctgcagagaacgtagagttttcagacgacgctagaaaaaaggctatacagcgggagctgagacggcggcagaagttcaggtgatggccgtgatgcgaatttctgatcttgctcatcgaattttgactacggattactactttttaagactacatatccagtcttgatggctgaatgagtgacgaccctagttgtcgagacgcaaaaccttttgttgtatgtgttccttttacagacttccttggcttgtcatgaatttctaatgtgaacttgtgctgtgaacttgttgcaaaacctcttgaacctgaagcattcaacatgatgtgagcttgtgcagttactcttcttctgcatgagttcatgttatctgggttgcacggcatgcaatttcacattgctagaagggtcagataacactgactcgggaactgctctatttaaggtgcctggatttttttatagaaaatttgaggcgacagtcttacacaagcagcaaatacaacaaccttgagctcttagatcgattttcaagtatatctcagcaaatacaacaaccttgagctcttagatcgatttttcaagtataggagatatgaaacagatttcatgatatagctctgaacctctagattataaatatagttaataaataatatatacaaagagtagagcggtgtagagacagattttttttttcaattaagacatgcctaaaagaacagctcacaagatatagaaaaactgttgtcagttctatccagccgttctgaacttctgaagccgcattattaccaatgggggctagttgggctgtacaactccgtgccagcccagcccatctgatccattaatataacggccatcccgaacccgaacggctcccatcccatctgatccctcgccgcatttcaaattcaaatcccctcttcacccaagtgctgccttcgcatcgcatggcggccagttccctctcgtccccggcggccagccggacgccgaacctgaaatcggccgtggctccgtcaccttctccatccactcgccgggcgccagcagatgcggcgtcggcgtcgatcacggcggagtcgaaggcacggttcgaggcttacaaccggctgcaggcagcggccgtggcgttcggcgagaagcttcccatcccggagatagtagtgattggaggccagtcggatgggaagagctccctcctagaggcgctccttggcttccgcttcaacgtccgcgaggtcgagatgggcacccgccgtcctctcgtcctccagatggtccacgaccccactgccctcgagcccagatgccgattccaggaggaggattccgaggagtatgggagcccgatggtggtggctacggccatcgcggacctcatcaagcagcgcactgaatcacacctccggaagatccaggctgctgtctcatccaagcccatcgtcatgagggctgagtacgcccactgccccaacctcacaatcatcgacaccccaggcttcgtgcttaaggctaagagaggcgagccagagagcacaccggatgagatacggtcgatggtgaagtcactcgcgacccctccccaccgcctcgttctgttcctccagcagagcagcgttgagtggtgctcgtcgatctggctcgacacgcttaaggagatcgatcccactttcaggcgcaccatgatagtcatctccaagtttgacaaccgcctcaaggaattcacggagaggtgggaggttgatgccttcttgagtgcgagtggataccttggggataacatccacccgttcttcgtggctcttccaaaggaccgtggaacaatttccaatgaggagttccgcaggcagatctgtcatgttgatattgatgtactacgtcacttgcgagataatgtaaaaggggggttcaatgaagagaaatatggatcacacattgggttcagctgcctgaggaagtacctcgaatctgaacttcagaagaggtacaaagaagcagctccagctaccctggcattgttagagcagaggtgcactgatgtctcaatggacctaacgagattagattccaaactacaagcaacgtctgatgtctctcagctccggagatcggcaatgcttcatgcagcttctatttgcacacacttgcatgcattacttgatggatctgctgatccagatccagaaatatgggggaagactacggaggaggaacaaatgcatagtgctattggcagctggcctggcattaatacgcctgtaaaacctgccaactccagccttaagctgtatggtggtgcagcttttgagagagtaatgcatgaatttcgctgtgcaacatattcaatggaatgccctcaagtgtcaagggagaaggttgcgaacatactacttgcccatgctggaagaggtggaagcagtaggttgactgaggcagcagctgagatagctcgggcggctgcaagatcatggcttgctcctcttattgatactgcatgtgaccggcttgcatttgtcctacaaagtctgtttgaccttgctatggagcgtaaccgcgataaggattcacaacatcatcagaatgttgaagatatggatagttatgttggctttcttgctgctctccggtgctcatattataagtttgtcaaagaattgtccaagcaatgcaagcagatagtgcgtcatcaccttgattcagttacgagcccttactcccatatttgctatgacaacgactttttgagtgatgttggatccgtagcaaaccccatgagtaggtttagtcactttactggagttacatcctttgatctagcagacagtggatcagcactagaggaagctcaggagaacttgcctccaagagatcagcagcattcgacaccgcctactagtaaagggaatgagtcaaaggaggttctcagagaaagccagctaacagtacctgagacgccttctcctgatctgccatctgatatacatggtggtaggaagaaagaaaatgggatcccaaatgacggtggcccaaggaaaagacatgcaaggatggcagcgtatacaaacagaaatcaccataacagtatgattgttggagatgacatgggctcaaagtcagggtcatcatactccaccatatgcgcaatatctgctcaatattttgccaagatgcgagaagtcctgattgaaagaaatgtcccctctgcattgaactctggattcttaacaccatgccgtgaaaggttatttctggcactcggctttgagctattcgctgtgagtgatgacaagttcatggacatgtttgtcgcgcctggggcagttgatgctattcagaacgagcgcaattctcttctcaaacgtcagaagattttgctgtcctgtctgcatgagtttaagaacatatcccgggctctgtagtgatgatctttctggaattcctcaggcatgtgtattcatgtggttaacgaatcctctcagacggtacactatgccgggggcttattgcaatggcccattctttttttatccccattctcatgtcatgtatctttcttggccttaccctgttttcttgagctctgtatcactctgtcagttccttgttgacaaggtctgtatcactaacgtttgttcagattcaatactttgattatgctcgacgacaccaatacaaaaatgttcatatgaaattggaataaccgaat

SEQ ID NO: 36530 - DNA, 2256 bp, Zea Mays
catcatcacttgtccgttttcctctgacgacaccccgagcccgaagaggcgactcgttcccctccctctggcgatctgtctcctctgctccccgtgcgtcgagccgtcgaggcttggaggtctcatggtacccgatcccccctccccgctgcagagaaacaagcagccggcaaagcagatgagcaagtcctcctcgcatcggccgagcaagtcatcgacaccatcccacgctccgggacggttaactctgagtctgaccagccccttcgcgtcgccgctgcttctcttacttacggccgccgccgccgccgctgtgttcctctactccctgaccgccgcccgctcgtacggggcccgcggggaggctcctccgctctcctccccgacggtggagaccatggagagagcgcgcgccatctgggagctacccgccgcggggccggccagggcggtcctcttcgtcgcccacggctgccgctgccgcccggagaacttctggccgccgtccccgcgctgcccggggtgcgtcggcctgccagaggacgtcgccatcacggaccgcgcgctgcggaggcggttcgcggtgctggccgtcgcgagcgccggggagtgctggtcgccggggaaggaggctggcggccaagatgagcctcgccgccgtcgtgattatgatcgccgagggcgcgttcggcagctcagctggcgcgcttccggcggtttaccctcccgcgatgttcatccacatgccgaaagataagcggagggcagtgctggtggataagaattccaagatgctgatgaagaatggcgttgaggtgaaggagctccagagcctcgagctccctttgacgcctactctgctttccgagaggatacctgggctggaccgcgggctatcagaaaggatctggacagtgttcagggaagaagctttcgttgatgacaaaggatacatgaaagaggatggccgggaaacgccatggaaggatgcattggtcaagaggggcctctgggaagaggtgtctgcgttggctgatcacatccaggaagagctaaatcttgcttatggataccacgagatgacgagcttacacgctgatgagatgtttgattgggttgacaagcacttgagatgagggggctatggtggatcatttcagcatcggtgcagcttctattaaactagttggagaaatgtaggggaatgaaaatcataaactggtgacacagaagacacgcacaacatatccatcctaacattcggatgaactgactttattatgtgaaatgtgtcgtgttcactacttccagcttgctcttgtgcaatggatttgtgaaaagaagtactctatccgtcctaaaatattagttgttttaactttttaacttttatgtctatgttcaaatagatgatgatgaatatagagacatatataaaataaatacattagttattgtatgaataactaaaaatgtaaaacaaattttattttgggacaaagggagtatatatagagatagttcggtgagatctttctctgatatgcaatgtggactttctgttaatcaaagatgagattttgcataaaaatgatcttgtttgtatctgaataatcacatgggatcatcttttttgtaagctgaggataagatcctgcattcatgctgcttgaaataaccttttgatctgtggaattagttttcctttctgaacttggttcctctctttcagacacttgtgaactgttgtcttcattctccaatggtccaaataagggggtgtttggtttatttagtcatccttctaaactttagaaactaaactttagtccctacaatttctatttgggaggcgcctttaattatattgattggcaatttagggactaaaagtgtatccctcttttgaattggctggatttgcaggctcccccgtgggctttcctcaatccgtcctcttttgctcacccttatcctttcttcgttccaaattctatacatttgtgaacacatggttgatatgtgctcttatggtttagattgtgatgagtgattgtcaacaagtgtaacgtcttgggttgagttgtgtggactaactagggcatggacgtgattgtgtaacatgtcttttggtttatgatgtgcaggtgtggagtctggagacaatggtcaatgacgaagttcatatgggttcatgtcgagggatcaaaagcgatgaaggacgaacattgggtcttgatcgaggacctagagaag

SEQ ID NO: 36531 - DNA, 1559 bp, Zea Mays
catcatcacttgtccgttttcctctgacgacaccccgagcccgaagaggcgactcgttcccctccctctggcgatctgtctcctctgctccccgtgcgtcgagccgtcgaggcttggaggtctcatggtacccgatcccccctccccgctgcagagaaacaagcagccggcaaagcagatgagcaagtcctcctcgcatcggccgagcaagtcatcgacaccatcccacgctccgggacggttaactctgagtctgaccagccccttcgcgtcgccgctgcttctcttacttacggccgccgccgccgccgctgtgttcctctactccctgaccgccgcccgctcgtacggggcccgcggggaggctcctccgctctcctccccgacggtggagaccatggagagagcgcgcgccatctgggagctacccgccgcggggccggccagggcggtcctcttcgtcgcccacggctgccgctgccgcccggagaacttctggccgccgtccccgcgctgcccggggtgcgtcggcctgccagaggacgtcgccatcacggaccgcgcgctgcggaggcggttcgcggtgctggccgtcgcgagcgccggggagtgctggtcgccggggaaggaggtcgacgtcgccaagcgggtgatccggtcctgggccgccaagaacgggctcgaaggcctgccggtagtcgccctcggcgcttcgtccggcgggtacttcgtgtccaggctggcggccaagatgagcctcgccgccgtcgtgattatgatcgccgagggcgcgttcggcagctcagctggcgcgcttccggcggtttaccctcccgcgatgttcatccacatgccgaaagataagcggagggcagtgctggtggataagaattccaagatgctgatgaagaatggcgttgaggtgaaggagctccagagcctcgagctccctttgacgcctactctgctttccgagaggatacctgggctggaccgcgggctatcagaaaggatctggacagtgttcagggaagaagctttcgttgatgacaaaggatacatgaaagaggatggccgggaaacgccatggaaggatgcattggtcaagaggggcctctgggaagaggtgtctgcgttggctgatcacatccaggaagagctaaatcttgcttatggataccacgagatgacgagcttacacgctgatgagatgtttgattgggttgacaagcacttgagatgagggggctatggtggatcatttcagcatcggtgcagcttctattaaactagttggagaaatgtaggggaatgaaaatcataaactggtgacacagaagacacgcacaacatatccatcctaacattcggatgaactgactttattatgtgaaatgtgtcgtgttcactacttccagcttgctcttgtgcaatggatttgtgaaaagaagtgtggagtctggagacaatggtcaatgacgaagttcatatgggttcatgtcgagggatcaaaagcgatgaaggacgaacattgggtcttgatcgaggacctagagaag

SEQ ID NO: 36532 - DNA, 1412 bp, Zea Mays
catcatcacttgtccgttttcctctgacgacaccccgagcccgaagaggcgactcgttcccctccctctggcgatctgtctcctctgctccccgtgcgtcgagccgtcgaggcttggaggtctcatggtacccgatcccccctccccgctgcagagaaacaagcagccggcaaagcagatgagcaagtcctcctcgcatcggccgagcaagtcatcgacaccatcccacgctccgggacggttaactctgagtctgaccagccccttcgcgtcgccgctgcttctcttacttacggccgccgccgccgccgctgtgttcctctactccctgaccgccgcccgctcgtacggggcccgcggggaggctcctccgctctcctccccgacggtggagaccatggagagagcgcgcgccatctgggagctacccgccgcggggccggccagggcggtcctcttcgtcgcccacggctgccgctgccgcccggagaacttctggccgccgtccccgcgctgcccggggtgcgtcggcctgccagaggacgtcgccatcacggaccgcgcgctgcggaggcggttcgcggtgctggccgtcgcgagcgccggggagtgctggtcgccggggaaggaggtcgacgtcgccaagcgggtgatccggtcctgggccgccaagaacgggctcgaaggcctgccggtagtcgccctcggcgcttcgtccggcgggtacttcgtgtccaggctggcggccaagatgagcctcgccgccgtcgtgattatgatcgccgagggcgcgttcggcagctcagctggcgcgcttccggcggtttaccctcccgcgatgttcatccacatgccgaaagataagcggagggcagtgctggtggataagaattccaagatgctgatgaagaatggcgttgaggtgaaggagctccagagcctcgagctccctttgacgcctactctgctttccgagaggatacctgggctggaccgcgggctatcagaaaggatctggacagtgttcagggaagaagctttcgttgatgacaaaggatacatgaaagaggatggccgggaaacgccatggaaggatgcattggtcaagaggggcctctgggaagaggtgtctgcgttggctgatcacatccaggaagagctaaatcttgcttatggataccacgagatgacgagcttacacgctgatgagatgtttgattgggttgacaagcacttgagatgagggggctatggtggatcatttcagcatcggtgcagcttctattaaactagttggagaaatgtgtggagtctggagacaatggtcaatgacgaagttcatatgggttcatgtcgagggatcaaaagcgatgaaggacgaacattgggtcttgatcgaggacctagagaag

SEQ ID NO: 36533 - DNA, 2294 bp, Zea Mays
ccaagttccactcccaaaccccctcgattcgtccatccctcgcacgcgctggccgcccgccccccatctccacttctcctcgccgctctcctgaatccttcgcccgaaagcctccgaccgcagaaccttagcgttgccgtccacctccatggaatcgaagcctcacgcgccggcgtctgggctggcaacgccgcggttcaggctgggtaaacagtcgtcgctggcgcccgagcgcggcggcgagggcggtggtgcggggtcggcagatgggtcggccgaggcgaacggcgtcatgagcttccagctcatgtacctggcccacgagggcagcgcggaggggatccgcgagctcctcgacggcggcgtcgaccccaatttccgcgactccgacggccgcacggcgctgcacatcgccgcctgcgagggccacgccgaggtcgtcgagctgctgcttcagagcggcgcggaggccgccgtggaggaccagtggggcagcacgcctttggcggatgcaatgcattatcagaatcatgatgtgatcaagatctttgagaagcatggctccaagcataagattgctccgatgcatgtgaacaatgttcgtgaagttcctgaatatgagattgacccggctgagcttgatttcagtaatggcaatgatttatccaagggcacatttagaaaagcaacatggaggggcattccggttgctgttaagaagctggacgatgatctaattgcggacggcagcaaagtgcaggcattcagagacgagcttgatgtgctgcaacttatacgtcatccaaatgttgtgcaatttttgggcgctgtgacacaaagcaatccaatgatgattgtcatggaatttatgcgcaagggtgacttgcgcactcacttgagtaagaaaggagctctgccaccatcatatgctgtgaagttagctcttgatattgcaagaggaatgaattacttgcatgagcataaacctcaggctatcatccatcgtgatcttgaaccttcataacagtaacatattgagggatgacactggacatctgaaggtggcagattttgatctatgtaagatgctaaaatggagaagaaaagttagagaagataaagcagtcacttctccaggcaatgcttgtaaatatgtggctccagaagtcctgcgaaatgaagagtatgataccaaagtggatgtcttctcattcgctctgatacttcaggaggtaagttgtgatatattgtaaatttgggcatctctgtctccacacagaaggttttatggtgcatttctgtgttctctaaatatttctgccaacatatcttcaggttattgagcaccgttacacagtttactgcgtgttgtttctttaagcataagaacgacacttatttgaacaccaattactccctgcaaaataactcatatggctgtttttgtgcttgttattttcccaactgttgcagatgattgaaggatgccttccttattatgataagaaaaatgatgaaattgagaaggcacataattctaaagaaaggcctccttttcgagctcctccaaagcattatgcccatgggttaagagagttgattgaacagtgctggagcgaaaattctgcagacaggcctgattttagagtaattatcaaccggctgtctgctatccaaaatgagatagctcacagaaaccgttggaaggcgagacctctcaagtgtttcctgagcattgaaggaatgtggaagaaagatcgcaatgagggcagcaccacccgttcatcacgctcatcgcgatcctatttttaaccaccagcacaagctattgatttcaatcgcaagatcatattggtgattgctagaaaatatactcaaatgtatatcatattttcgttttctaaaactatgaaaaaagatggttctgcaactggttgattctcagctgatcatagttttgattgtatatcaggcatgccccttggccccaacccctgctttggcattcccctgggttgggacaatatggataatgccaacttaattatatttatataataatgtgttttgatgtaaatgagatatgttatatatcgtagctattcatacatgttgtattttttcgaaagtaaatattaaatggcttaagttatatgaaatgttcataactaaaaggtgactaatctaactttgatttctaataaatataacttaaaataatacctactaagatgcttctctaaaacatattgtgtatttgttttactaaactataaaaaatacacaacatagaa

SEQ ID NO: 36534 - DNA, 2011 bp, Zea Mays
attccaagttccactcccaaaccccctcgattcgtccatccctcgcacgcgctggccgcccgccccccatctccacttctcctcgccgctctcctgaatccttcgcccgaaagcctccgaccgcagaaccttagcgttgccgtccacctccatggaatcgaagcctcacgcgccggcgtctgggctggcaacgccgcggttcaggctgggtaaacagtcgtcgctggcgcccgagcgcggcggcgagggcggtggtgcggggtcggcagatgggtcggccgaggcgaacggcgtcatgagcttccagctcatgtacctggcccacgagggcagcgcggaggggatccgcgagctcctcgacggcggcgtcgaccccaatttccgcgactccgacggccgcacggcgctgcacatcgccgcctgcgagggccacgccgaggtcgtcgagctgctgcttcagagcggcgcggaggccgccgtggaggaccagtggggcagcacggtgttctgaatattcgcttctttcttgaagattgctccgatgcatgtgaacaatgttcgtgaagttcctgaatatgagattgacccggctgagcttgatttcagtaatggcaatgatttatccaagggcacatttagaaaagcaacatggaggggcattccggttgctgttaagaagctggacgatgatctaattgcggacggcagcaaagtgcaggcattcagagacgagcttgatgtgctgcaacttatacgtcatccaaatgttgtgcaatttttgggcgctgtgacacaaagcaatccaatgatgattgtcatggaatttatgcgcaagggtgacttgcgcactcacttgagtaagaaaggagctctgccaccatcatatgctgtgaagttagctcttgatattgcaagaggaatgaattacttgcatgagcataaacctcaggctatcatccatcgtgatcttgaaccttcataacagtaacatattgagggatgacactggacatctgaaggtggcagattttgatctatgtaagatgctaaaatggagaagaaaagttagagaagataaagcagtcacttctccaggcaatgcttgtaaatatgtggctccagaagtcctgcgaaatgaagagtatgataccaaagtggatgtcttctcattcgctctgatacttcaggagatgattgaaggatgccttccttattatgataagaaaaatgatgaaattgagaaggcacataattctaaagaaaggcctccttttcgagctcctccaaagcattatgcccatgggttaagagagttgattgaacagtgctggagcgaaaattctgcagacaggcctgattttagagtaattatcaaccggctgtctgctatccaaaatgagatagctcacagaaaccgttggaaggcgagacctctcaagtgtttcctgagcattgaaggaatgtggaagaaagatcgcaatgagggcagcaccacccgttcatcacgctcatcgcgatcctatttttaaccaccagcacaagctattgatttcaatcgcaagatcatattggtgattgctagaaaatatactcaaatgtatatcatattttcgttttctaaaactatgaaaaaagatggttctgcaactggttgattctcagctgatcatagttttgattgtatatcaggcatgccccttggccccaacccctgctttggcattcccctgggttgggacaatatggataatgccaacttaattatatttatataataatgtgttttgatgtaaatgagatatgttatatatcgtagctattcatacatgttgtattttttcgaaagtaaatattaaatggcttaagttatatgaaatgttcataactaaaaggtgactaatctaactttgatttctaataaatataacttaaaataatacctactaagatgcttctctaaaacatattgtgtatttgttttactaaactataaaaaatacacaacatagaa

SEQ ID NO: 36535 - DNA, 2048 bp, Zea Mays
attccaagttccactcccaaaccccctcgattcgtccatccctcgcacgcgctggccgcccgccccccatctccacttctcctcgccgctctcctgaatccttcgcccgaaagcctccgaccgcagaaccttagcgttgccgtccacctccatggaatcgaagcctcacgcgccggcgtctgggctggcaacgccgcggttcaggctgggtaaacagtcgtcgctggcgcccgagcgcggcggcgagggcggtggtgcggggtcggcagatgggtcggccgaggcgaacggcgtcatgagcttccagctcatgtacctggcccacgagggcagcgcggaggggatccgcgagctcctcgacggcggcgtcgaccccaatttccgcgactccgacggccgcacggcgctgcacatcgccgcctgcgagggccacgccgaggtcgtcgagctgctgcttcagagcggcgcggaggccgccgtggaggaccagtggggcagcacgcctttggcggatgcaatgcattatcagaatcatgatgtgatcaagatctttgagaagcatggctccaagcataagattgctccgatgcatgtgaacaatgttcgtgaagttcctgaatatgagattgacccggctgagcttgatttcagtaatggcaatgatttatccaagggcacatttagaaaagcaacatggaggggcattccggttgctgttaagaagctggacgatgatctaattgcggacggcagcaaaggcaggcattcagagacgagcttgatgtgctgcaacttatacgtcatccaaatgttgtgcaatttttgggcgctgtgacacaaagcaatccaatgatgattgtcatggaatttatgcgcaagggtgacttgcgcactcacttgagtaagaaaggagctctgccaccatcatatgctgtgaagttagctcttgatattgcaagaggaatgaattacttgcatgagcataaacctcaggctatcatccatcgtgatcttgaaccttctaacatattgagggatgacactggacatctgaaggtggcagattttgatctatgtaagatgctaaaatggagaagaaaagttagagaagataaagcagtcacttctccaggcaatgcttgtaaatatgtggctccagaagtcctgcgaaatgaagagtatgataccaaagtggatgtcttctcattcgctctgatacttcaggagatgattgaaggatgccttccttattatgataagaaaaatgatgaaattgagaaggcacataattctaaagaaaggcctccttttcgagctcctccaaagcattatgcccatgggttaagagagttgattgaacagtgctggagcgaaaattctgcagacaggcctgattttagagtaattatcaaccggctgtctgctatccaaaatgagatagctcacagaaaccgttggaaggcgagacctctcaagtgtttcctgagcattgaaggaatgtggaagaaagatcgcaatgagggcagcaccacccgttcatcacgctcatcgcgatcctatttttaaccaccagcacaagctattgatttcaatcgcaagatcatattggtgattgctagaaaatatactcaaatgtatatcatattttcgttttctaaaactatgaaaaaagatggttctgcaactggttgattctcagctgatcatagttttgattgtatatcaggcatgccccttggccccaacccctgctttggcattcccctgggttgggacaatatggataatgccaacttaattatatttatataataatgtgttttgatgtaaatgagatatgttatatatcgtagctattcatacatgttgtattttttcgaaagtaaatattaaatggcttaagttatatgaaatgttcataactaaaaggtgactaatctaactttgatttctaataaatataacttaaaataatacctactaagatgcttctctaaaacatattgtgtatttgttttactaaactataaaaaatacacaacatagaa

SEQ ID NO: 36536 - DNA, 2061 bp, Zea Mays
atcaattccgactgttattccaagttccactcccaaaccccctcgattcgtccatccctcgcacgcgctggccgcccgccccccatctccacttctcctcgccgctctcctgaatccttcgcccgaaagcctccgaccgcagaaccttagcgttgccgtccacctccatggaatcgaagcctcacgcgccggcgtctgggctggcaacgccgcggttcaggctgggtaaacagtcgtcgctggcgcccgagcgcggcggcgagggcggtggtgcggggtcggcagatgggtcggccgaggcgaacggcgtcatgagcttccagctcatgtacctggcccacgagggcagcgcggaggggatccgcgagctcctcgacggcggcgtcgaccccaatttccgcgactccgacggccgcacggcgctgcacatcgccgcctgcgagggccacgccgaggtcgtcgagctgctgcttcagagcggcgcggaggccgccgtggaggaccagtggggcagcacgcctttggcggatgcaatgcattatcagaatcatgatgtgatcaagatctttgagaagcatggctccaagcataagattgctccgatgcatgtgaacaatgttcgtgaagttcctgaatatgagattgacccggctgagcttgatttcagtaatggcaatgatttatccaagggcacatttagaaaagcaacatggaggggcattccggttgctgttaagaagctggacgatgatctaattgcggacggcagcaaagtgcattcagagacgagcttgatgtgctgcaacttatacgtcatccaaatgttgtgcaatttttgggcgctgtgacacaaagcaatccaatgatgattgtcatggaatttatgcgcaagggtgacttgcgcactcacttgagtaagaaaggagctctgccaccatcatatgctgtgaagttagctcttgatattgcaagaggaatgaattacttgcatgagcataaacctcaggctatcatccatcgtgatcttgaaccttctaacatattgagggatgacactggacatctgaaggtggcagattttgatctatgtaagatgctaaaatggagaagaaaagttagagaagataaagcagtcacttctccaggcaatgcttgtaaatatgtggctccagaagtcctgcgaaatgaagagtatgataccaaagtggatgtcttctcattcgctctgatacttcaggagatgattgaaggatgccttccttattatgataagaaaaatgatgaaattgagaaggcacataattctaaagaaaggcctccttttcgagctcctccaaagcattatgcccatgggttaagagagttgattgaacagtgctggagcgaaaattctgcagacaggcctgattttagagtaattatcaaccggctgtctgctatccaaaatgagatagctcacagaaaccgttggaaggcgagacctctcaagtgtttcctgagcattgaaggaatgtggaagaaagatcgcaatgagggcagcaccacccgttcatcacgctcatcgcgatcctatttttaaccaccagcacaagctattgatttcaatcgcaagatcatattggtgattgctagaaaatatactcaaatgtatatcatattttcgttttctaaaactatgaaaaaagatggttctgcaactggttgattctcagctgatcatagttttgattgtatatcaggcatgccccttggccccaacccctgctttggcattcccctgggttgggacaatatggataatgccaacttaattatatttatataataatgtgttttgatgtaaatgagatatgttatatatcgtagctattcatacatgttgtattttttcgaaagtaaatattaaatggcttaagttatatgaaatgttcataactaaaaggtgactaatctaactttgatttctaataaatataacttaaaataatacctactaagatgcttctctaaaacatattgtgtatttgttttactaaactataaaaaatacacaacatagaa

SEQ ID NO: 36537 - DNA, 2050 bp, Zea Mays
caccgttccaccccacgccatcaattccgactgttattccaagttccactcccaaaccccctcgattcgtccatccctcgcacgcgctggccgcccgccccccatctccacttctcctcgccgctctcctgaatccttcgcccgaaagcctccgaccgcagaaccttagcgttgccgtccacctccatggaatcgaagcctcacgcgccggcgtctgggctggcaacgccgcggttcaggctgggtaaacagtcgtcgctggcgcccgagcgcggcggcgagggcggtggtgcggggtcggcagatgggtcggccgaggcgaacggcgtcatgagcttccagctcatgtacctggcccacgagggcagcgcggaggggatccgcgagctcctcgacggcggcgtcgaccccaatttccgcgactccgacggccgcacggcgctgcacatcgccgcctgcgagggccacgccgaggtcgtcgagctgctgcttcagagcggcgcggaggccgccgtggaggaccagtggggcagcacgcctttggcggatgcaatgcattatcagaatcatgatgtgatcaagatctttgagaagcatggctccaagcataagattgctccgatgcatgtgaacaatgttcgtgaagttcctgaatatgagattgacccggctgagcttgatttcagtaatggcaatgatttatccaagggcacatttagaaaagcaacatggaggggcattccggttgctgttaagaagctggacgatgatctaattgcggacggcagcaaagtgcaggcattcagagacgagcttgatgtgctgcaacttatacgtcatccaaatgttgtgcaatttttgggcgctgtgacacaaagcaatccaatgatgattgtcatggaatttatgcgcaagggtgacttgcgcactcacttgagtaagaaaggagctctgccaccatcatatgctgtgaagttagctcttgatattgcaagaggaatgaattacttgcatgagcataaacctcaggctatcatccatcgtgatcttgaaccttcgtggcagattttgatctatgtaagatgctaaaatggagaagaaaagttagagaagataaagcagtcacttctccaggcaatgcttgtaaatatgtggctccagaagtcctgcgaaatgaagagtatgataccaaagtggatgtcttctcattcgctctgatacttcaggagatgattgaaggatgccttccttattatgataagaaaaatgatgaaattgagaaggcacataattctaaagaaaggcctccttttcgagctcctccaaagcattatgcccatgggttaagagagttgattgaacagtgctggagcgaaaattctgcagacaggcctgattttagagtaattatcaaccggctgtctgctatccaaaatgagatagctcacagaaaccgttggaaggcgagacctctcaagtgtttcctgagcattgaaggaatgtggaagaaagatcgcaatgagggcagcaccacccgttcatcacgctcatcgcgatcctatttttaaccaccagcacaagctattgatttcaatcgcaagatcatattggtgattgctagaaaatatactcaaatgtatatcatattttcgttttctaaaactatgaaaaaagatggttctgcaactggttgattctcagctgatcatagttttgattgtatatcaggcatgccccttggccccaacccctgctttggcattcccctgggttgggacaatatggataatgccaacttaattatatttatataataatgtgttttgatgtaaatgagatatgttatatatcgtagctattcatacatgttgtattttttcgaaagtaaatattaaatggcttaagttatatgaaatgttcataactaaaaggtgactaatctaactttgatttctaataaatataacttaaaataatacctactaagatgcttctctaaaacatattgtgtatttgttttactaaactataaaaaatacacaacatagaa

SEQ ID NO: 36538 - DNA, 2146 bp, Zea Mays
ccgggagttcgtctgctgccagctcagcagccgaaccacccaccctgctatgacccaccgttccaccccacgccatcaattccgactgttattccaagttccactcccaaaccccctcgattcgtccatccctcgcacgcgctggccgcccgccccccatctccacttctcctcgccgctctcctgaatccttcgcccgaaagcctccgaccgcagaaccttagcgttgccgtccacctccatggaatcgaagcctcacgcgccggcgtctgggctggcaacgccgcggttcaggctgggtaaacagtcgtcgctggcgcccgagcgcggcggcgagggcggtggtgcggggtcggcagatgggtcggccgaggcgaacggcgtcatgagcttccagctcatgtacctggcccacgagggcagcgcggaggggatccgcgagctcctcgacggcggcgtcgaccccaatttccgcgactccgacggccgcacggcgctgcacatcgccgcctgcgagggccacgccgaggtcgtcgagctgctgcttcagagcggcgcggaggccgccgtggaggaccagtggggcagcacgcctttggcggatgcaatgcattatcagaatcatgatgtgatcaagatctttgagaagcatggctccaagcataagattgctccgatgcatgtgaacaatgttcgtgaagttcctgaatatgagattgacccggctgagcttgatttcagtaatggcaatgatttatccaagggcacatttagaaaagcaacatggaggggcattccggttgctgttaagaagctggacgatgatctaattgcggacggcagcaaagtgcaggcattcagagacgagcttgatgtgctgcaacttatacgtcatccaaatgttgtgcaatttttgggcgctgtgacacaaagcaatccaatgatgattgtcatggaatttatgcgcaagggtgacttgcgcactcacttgagtaagaaaggagctctgccaccatcatatgctgtgaagttagctcttgatattgcaagaggaatgaattacttgcatgagcataaacctcaggctatcatccatcgtgatcttgaaccttcataacagtaacatattgagggatgacactggacatctgaaggtggcagattttgatctatgtaagatgctaaaatggagaagaaaagttagagaagataaagcagtcacttctccaggcaatgcttgtaaatatgtggctccagaagtcctgcgaaatgaagagtatgataccaaagtggatgtcttctcattcgctctgatacttcaggagatgattgaaggatgccttccttattatgataagaaaaatgatgaaattgagaaggcacataattctaaagaaaggcctccttttcgagctcctccaaagcattatgcccatgggttaagagagttgattgaacagtgctggagcgaaaattctgcagacaggcctgattttagagtaattatcaaccggctgtctgctatccaaaatgagatagctcacagaaaccgttggaaggcgagacctctcaagtgtttcctgagcattgaaggaatgtggaagaaagatcgcaatgagggcagcaccacccgttcatcacgctcatcgcgatcctatttttaaccaccagcacaagctattgatttcaatcgcaagatcatattggtgattgctagaaaatatactcaaatgtatatcatattttcgttttctaaaactatgaaaaaagatggttctgcaactggttgattctcagctgatcatagttttgattgtatatcaggcatgccccttggccccaacccctgctttggcattcccctgggttgggacaatatggataatgccaacttaattatatttatataataatgtgttttgatgtaaatgagatatgttatatatcgtagctattcatacatgttgtattttttcgaaagtaaatattaaatggcttaagttatatgaaatgttcataactaaaaggtgactaatctaactttgatttctaataaatataacttaaaataatacctactaagatgcttctctaaaacatattgtgtatttgttttactaaactataaaaaatacacaacatagaa

SEQ ID NO: 36539 - DNA, 2144 bp, Zea Mays
gttcataccaggtccggtccgggagttcgtctgctgccagctcagcagccgaaccacccaccctgctatgacccaccgttccaccccacgccatcaattccgactgttattccaagttccactcccaaaccccctcgattcgtccatccctcgcacgcgctggccgcccgccccccatctccacttctcctcgccgctctcctgaatccttcgcccgaaagcctccgaccgcagaaccttagcgttgccgtccacctccatggaatcgaagcctcacgcgccggcgtctgggctggcaacgccgcggttcaggctgggtaaacagtcgtcgctggcgcccgagcgcggcggcgagggcggtggtgcggggtcggcagatgggtcggccgaggcgaacggcgtcatgagcttccagctcatgtacctggcccacgagggcagcgcggaggggatccgcgagctcctcgacggcggcgtcgaccccaatttccgcgactccgacggccgcacggcgctgcacatcgccgcctgcgagggccacgccgaggtcgtcgagctgctgcttcagagcggcgcggaggccgccgtggaggaccagtggggcagcacgcctttggcggatgcaatgcattatcagaatcatgatgtgatcaagatctttgagaagcatggctccaagcataagattgctccgatgcatgtgaacaatgttcgtgaagttcctgaatatgagattgacccggctgagcttgatttcagtaatggcaatgatttatccaagggcacatttagaaaagcaacatggaggggcattccggttgctgttaagaagctggacgatgatctaattgcggacggcagcaaagtgcaggcattcagagacgagcttgatgtgctgcaacttatacgtcatccaaatgttgtgcaatttttgggcgctgtgacacaaagcaatccaatgatgattgtcatggaatttatgcgcaagggtgacttgcgcactcacttgagtaagaaaggagctctgccaccatcatatgctgtgaagttagctcttgatattgcaagaggaatgaattacttgcatgagcataaacctcaggctatcatccatcgtgatcttgaaccttctaacatattgagggatgacactggacatctgaaggtggcagattttgatctatgtaagatgctaaaatggagaagaaaagttagagaagataaagcagtcacttctccaggcaatgcttgtaaatatgtggctccagaagtcctgcgaaatgaagagtatgataccaaagtggatgtcttctcattcgctctgatacttcaggagatgattgaaggatgccttccttattatgataagaaaaatgatgaaattgagaaggcacataattctaaagaaaggcctccttttcgagctcctccaaagcattatgcccatgggttaagagatgctggagcgaaaattctgcagacaggcctgattttagagtaattatcaaccggctgtctgctatccaaaatgagatagctcacagaaaccgttggaaggcgagacctctcaagtgtttcctgagcattgaaggaatgtggaagaaagatcgcaatgagggcagcaccacccgttcatcacgctcatcgcgatcctatttttaaccaccagcacaagctattgatttcaatcgcaagatcatattggtgattgctagaaaatatactcaaatgtatatcatattttcgttttctaaaactatgaaaaaagatggttctgcaactggttgattctcagctgatcatagttttgattgtatatcaggcatgccccttggccccaacccctgctttggcattcccctgggttgggacaatatggataatgccaacttaattatatttatataataatgtgttttgatgtaaatgagatatgttatatatcgtagctattcatacatgttgtattttttcgaaagtaaatattaaatggcttaagttatatgaaatgttcataactaaaaggtgactaatctaactttgatttctaataaatataacttaaaataatacctactaagatgcttctctaaaacatattgtgtatttgttttactaaactataaaaaatacacaacatagaa

SEQ ID NO: 36540 - DNA, 2475 bp, Zea Mays
gaactccggttgcagcgggagcggggctcgctagtcattgtccgcggccacgcgatacccgtggcctggccgcctgggttcataccaggtccggtccgggagttcgtctgctgccagctcagcagccgaaccacccaccctgctatgacccaccgttccaccccacgccatcaattccgactgttattccaagttccactcccaaaccccctcgattcgtccatccctcgcacgcgctggccgcccgccccccatctccacttctcctcgccgctctcctgaatccttcgcccgaaagcctccgaccgcagaaccttagcgttgccgtccacctccatggaatcgaagcctcacgcgccggcgtctgggctggcaacgccgcggttcaggctgggtaaacagtcgtcgctggcgcccgagcgcggcggcgagggcggtggtgcggggtcggcagatgggtcggccgaggcgaacggcgtcatgagcttccagctcatgtacctggcccacgagggcagcgcggaggggatccgcgagctcctcgacggcggcgtcgaccccaatttccgcgactccgacggccgcacggcgctgcacatcgccgcctgcgagggccacgccgaggtcgtcgagctgctgcttcagagcggcgcggaggccgccgtggaggaccagtggggcagcacgcctttggcggatgcaatgcattatcagaatcatgatgtgatcaagatctttgagaagcatggctccaagcataagattgctccgatgcatgtgaacaatgttcgtgaagttcctgaatatgagattgacccggctgagcttgatttcagtaatggcaatgatttatccaagggcacatttagaaaagcaacatggaggggcattccggttgctgttaagaagctggacgatgatctaattgcggacggcagcaaagtgcaggcattcagagacgagcttgatgtgctgcaacttatacgtcatccaaatgttgtgcaatttttgggcgctgtgacacaaagcaatccaatgatgattgtcatggaatttatgcgcaagggtgacttgcgcactcacttgagtaagaaaggagctctgccaccatcatatgctgtgaagttagctcttgatattgcaagaggaatgaattacttgcatgagcataaacctcaggctatcatccatcgtgatcttgaaccttctaacatattgagggatgacactggacatctgaaggtggcagattttgatctatgtaagatgctaaaatggagaagaaaagttagagaagataaagcagtcacttctccaggcaatgcttgtaaatatgtggctccagaagtcctgcgaaatgaagagtatgataccaaagtggatgtcttctcattcgctctgatacttcaggaggtaagttgtgatatattgtaaatttgggcatctctgtctccacacagaaggttttatggtgcatttctgtgttctctaaatatttctgccaacatatcttcaggttattgagcaccgttacacagtttactgcgtgttgtttctttaagcataagaacgacacttatttgaacaccaattactccctgcaaaataactcatatggctgtttttgtgcttgttattttcccaactgttgcagatgattgaaggatgccttccttattatgataagaaaaatgatgaaattgagaaggcacataattctaaagaaaggcctccttttcgagctcctccaaagcattatgcccatgggttaagagagttgattgaacagtgctggagcgaaaattctgcagacaggcctgattttagagtaattatcaaccggctgtctgctatccaaaatgagatagctcacagaaaccgttggaaggcgagacctctcaagtgtttcctgagcattgaaggaatgtggaagaaagatcgcaatgagggcagcaccacccgttcatcacgctcatcgcgatcctatttttaaccaccagcacaagctattgatttcaatcgcaagatcatattggtgattgctagaaaatatactcaaatgtatatcatattttcgttttctaaaactatgaaaaaagatggttctgcaactggttgattctcagctgatcatagttttgattgtatatcaggcatgccccttggccccaacccctgctttggcattcccctgggttgggacaatatggataatgccaacttaattatatttatataataatgtgttttgatgtaaatgagatatgttatatatcgtagctattcatacatgttgtattttttcgaaagtaaatattaaatggcttaagttatatgaaatgttcataactaaaaggtgactaatctaactttgatttctaataaatataacttaaaataatacctactaagatgcttctctaaaacatattgtgtatttgttttactaaactataaaaaatacacaacatagaa

SEQ ID NO: 36541 - DNA, 2318 bp, Zea Mays
agatcctccgtccgagtcgatggagtcaacggtggagcggataagctcgtcggtgcagtcctgggtgaaggaccacgagctcgcagccatcggagggcagcaaggagacgagaaaactgcgcaaataatgtagccaaacttttggctttctttacggaatgcaagaaacagaatccacaatttttttgtgattttcagctagacaatgatgggaaaatagtgagtattttttggtcacacgcaagtatgcagggggaatatgcagattatggtgatgctgtgacatttgatacaacacacaagacaaatatatatgataaaccactgggcatgtttattggagctaacaaccatctgcagtgtacattgtttggatttgttttgttgggagatgaaacagttcagacttttgaatgggctttcaattcattcaaaacatgtatgggatgcgagggtccgagagttatgctaacagatcaagatccttcaatgccaattgctctgagaactgtatttccaaaaacagttcacagactgtgtttatggcatgtccagaatagatttatgccattcttaaatgaattatatgcaaggtttgctgataaggattttaaaacaacattccaatctattatacatcatccattaactcctcatgagtttgaatgtgcctgggaaatgatgctagaggaattcaatcttcatgaagatatgactctacgcaaattatatgaaataaggaaagaatggataccggcattttttaaaaatgacttctgtggggtaatggtatctacacaacgaagtgagagcatgaacagattagtgaagcaatcacatgtagatgcgaacacccctctgcatgagttcgctaaacaaatgatgaaaatgttgcatagcaagaaaatgaaagaatcaaaggagacattgatgagcaagggaccaaggacaacagatatattgtataggttcgaagtgagagtctctagggcatacaccagagctgttatgaatagatttgaggaatcaataaaatacgccactgcatacagaatattgaaggtcacaaacggttgtgataaagattggatcgtacaacatacaaaaagatctaataaaattgtgtggggacaacatcaattcaagataacaacagacatagaagctggggagtatacatgcgagtgcaaacagtgggaacatacaggtctattgtgtgttcatcttttaagagccttcatgcatctacaagttgaaaagataccttcaaagtatatattgcaaaggtacactgtctcatcaagaaaagatgtgccgtttgaaagaattaataagagcttcaggggaaaggatggagttactaaatcatacagacagaaaatgttgctaacgaaaacaatgaaagttgttcgccaggcgtgtatgtcaaaagcagggtacgacaagacaatggatgtgttggatgagctcgatggcattctatgccgattagagccagacattggatgtaatgggtcatgtgatgttagtaatgatgaggaaaaccaggaaggagaagtaaataataataatgctggcgttggaatggaagatgacaattcaattacatgccataaaatggatgagcataacactatgactggatgtgaacatgcgttaacattaataacatctggtaaccaggtggacaacatgagaattccacctgaggttggtgatacaagttctccgtgtcacgtagcacacgaccaaatggaacagattggtgcatcctcagaagctaagaagaggttgaattttaatgtggatgttataaatctgaggatgccggatcgtgcaagaccaaaaggacggacaataaaaaatatagaagataggattatgaaactaggtgccaaaagaaaaaaagaagaataggagatgccaattgtgtggaatagcagatggacataacagcagaacgtgtctgtctgtggaagagaacagggcaagactagcaaaactggctaatcgaaagagaggacgaccggccggatcaagactaaacaataaaacaactgctccacagtggaatgaaacatcgactgctaaaaaacatcgtattgatgaagaagtagaaaatgaataagccgctgagcatatggaattaggtgaataatttgaagtgtgactaaagggaggtcgatgaagtataaatttgtaatagcacaatgacctgtgttttagttttggaaattaatattttgcatgactgagttatataatgcattgatataatactataatatgttgcgtaaaactagaccattacacaaatt

SEQ ID NO: 36542 - DNA, 284 bp, Zea Mays
agggaaccgagatcctccgtccgagtcgatggagtcaacggtggagcggataagctcgtcggtgcagtcctgggtgaaggaccacgagctcgcagccatcgcgttagaagtggtggcgatcacagcacgtcttcaggtcgtgggatggcgtggttatggtgaagacatcgcaacgtcatagttcacggtggccacaaatttagagagtgtttggtttgtaggactaatttttagtttattttatttttgttttagtctctaaattgttaaatacggaaactaac

SEQ ID NO: 36543 - DNA, 3531 bp, Zea Mays
ccgctcggtgtttcggccatgatgtcgcggtcgtataccaacctgctcgacctcgcggagggcaacttcgcggcgctgggcccggtcggcggcagcgggcggcagaggcatgggtcgttcgggctgcggcggatgtcgcgggtgatgacggtgccggggacgctgacggagctcgacggcgaggacgagtcggagccggccgcgaccagcagcgtcgcctccgacgtgccctcgtccgtggcggcggaccgcctcatagtggtctcgaatcagttgcccatcgtcgcgcgccgcaggcccgacggccgagggtggtccttctcgtgggacgatgactcgctcctgctccagctccgcgacggcattcccgacgagatggaggtgctcttcgtcggatcactccgcgccgacgtccccgcagccgagcaggacgcggtatcgcaggcgctgctcgaccgattccgctgcgcgccggtgttcctccctgaccacctcaacgaccggttctaccacggcttctgcaagcgccagctctggcctctgttccactacatgctccccttctcatcgcccgcttccgcgtctgccgccgctacctcttcctccgtcgccacttcgtcacccggcaacggttgcttcgaccgcagcgcttgggaggcatacgtgctcgccaacaagttcttctttgagaaggtcgtggaggtaatcaacccagaggatgactacgtctgggttcatgactaccatctcctggcgctgcctacctttctccgccgccgcttcaaccgcctccgcatcggattcttcctccacagccccttcccctcgtccgagatctaccgcaccctccctgttcgcgacgagatactgaaggcgctgctcaattgtgacctcattgggttccacacttttgattacgccaggcacttcctctcgtgctgcagtaggatgctgggaattgaataccagtcaaagcgtgggtacattggattggattactttggccgcactgtagggatcaagatcatgccggtgggagttcatatgggtcagttggagtcgggtctgcgcttgcctgatagggagtggaggctttctgagcttcaacagcagtttcagggcaaaactgtcttgcttggtgtggatgatatggatatctttaaggggatcaatttgaagcttcttgcatttgagaacatgttgaggacacatcccaagtggcaggggagagcagtgttagtgcagattgctaacccagcccgtggaaggggtaaggatctggaagccatccaggctgagattgagcagagctgccagaggatcaatgtagactttggccagtcagggtatagccctgttgttttcatcaatcgtgatgtgtcaagtgtcgagaaggttgcctattatacgatagcggaatgcgtggttgtgactgctgtgagggatgggatgaacttaacaccatatgagtacattgtctgtaggcagggtgcaccaggatctgagtcagtatcagaggtgagtgggccaaagaagagcatgctggttgtgtcagagtttattggctgctcgccgtcactgagtggtgctattagggttaacccatggaatatagaggcaacagcagaggcgatgaatgaggccatttcaatgccagaacaggaaaaacagttgaggcatgagaaacattaccgttatgtcagcagccatgatgttgcttattggtcaaagagcttcatcctagacttggaaagggcttgtagggaccactttaagaggacttgttggggcatagggttgggttttggtttcagggtggtggccttggaccctcatttcagaaagcttaacatggattcaattgttaatgcttatgagatttcagagagcagggctatattgcttgattatgatggaacactggttcctcaaacttccatcaacaaggaacctagtccagaggttttgaacatcatcaataccctttgctcagatagtagaaacatcgtttttcttgtcagtggtagagacaaagatacgttaggaaagtggttctcctcatgtccaaaattggggattgcagctgaacatggttacatcttgaggcaaaggagctgcttgatcacctggaaagtgtactagcaaatgaaccagtctctgtcaagagtggacagttcatcgttgaagtcaagccacagggagtaagcaagggaatagttgccgagaggatacttgcatcagtgaaggagaggggaaagcaggctgatttcgtattgtgcatcggcgatgataggtctgatgaggacatgtttgaaaatattgccgatatcattaagaggaatatggttgctccaagaacatcgctgtttgcatgcactgtgggacaaaaaccaagcaaagccaaattctacctggacgatacatttgaagtggtcgctatgctgagcgcacttgcagatgccactggagctgaactgaaatctgattcggctgatgaattggcggcatctatctcatcacttgatattggtgacgaacaatcagaatccagcgatacaccaattggagggtcttagccagttttctcttgaatttcagaatataatgattatttcaatagtcaattctacagaggggaagcttctcaatctgctgcactccaagtttatccagttgggcaagatagtagtctgtcgctgcaaggcgtagatccatatgttcatagctgactcgccgacttggcatattctttgactttctcattcctggttgaagtaaaatgaaagcctgacagaaggaaagggaactgtgtggctgaagtaattggggaaagttataggagtggcaaatgctaaaggagcccgtgcgcagcttctgatatgatcccttattaacatgacattacaaagtggtgtcactttttgaactatcagtagtaggtagtagcaatctcaagggtgaggtttaaattgattagttgcttcaaaaccagattttggctcctctgtgtttgggttatattttaattaattatccagggttagtatgttgagaattgcctaaatagtttggaaacttaaatcccttttaagattattggggattgagagaaaatgagctattttttcactcaatccccgggaatactggagcagatttaagtttctaaactagcctttaggtgcacgatagcgcgttttcaggtctacttgtctgaggttagggcatgtacaaccttatttaatatgaggtctttttaggagtctaaggttctaagcgaaaaaatacaaaagacggactcttcgtgaagaacccgtctcttcacgaatttatctgtatttctgatctagtgtctcaggattgtatcatacagtcttttaatcgtattttatacttaaaaaagtgaactgatgtttcagagttgtacatgcccttagtatgttgattaccattgccaatcagcactgcatgcttgcgattatgtggccgctttgcttgtagtagtggcaaaggttttatgtggaatggtcg

SEQ ID NO: 36544 - DNA, 3486 bp, Zea Mays
atcaaatcaaagcgggccggctcacctctcgcggcgaagcttttctctccgctcggtgtttcggccatgatgtcgcggtcgtataccaacctgctcgacctcgcggagggcaacttcgcggcgctgggcccggtcggcggcagcgggcggcagaggcatgggtcgttcgggctgcggcggatgtcgcgggtgatgacggtgccggggacgctgacggagctcgacggcgaggacgagtcggagccggccgcgaccagcagcgtcgcctccgacgtgccctcgtccgtggcggcggaccgcctcatagtggtctcgaatcagttgcccatcgtcgcgcgccgcaggcccgacggccgagggtggtccttctcgtgggacgatgactcgctcctgctccagctccgcgacggcattcccgacgagatggaggtgctcttcgtcggatcactccgcgccgacgtccccgcagccgagcaggacgcggtatcgcaggcgctgctcgaccgattccgctgcgcgccggtgttcctccctgaccacctcaacgaccggttctaccacggcttctgcaagcgccagctctggcctctgttccactacatgctccccttctcatcgcccgcttccgcgtctgccgccgctacctcttcctccgtcgccacttcgtcacccggcaacggttgcttcgaccgcagcgcttgggaggcatacgtgctcgccaacaagttcttctttgagaaggtcgtggaggtaatcaacccagaggatgactacgtctgggttcatgactaccatctcctggcgctgcctacctttctccgccgccgcttcaaccgcctccgcatcggattcttcctccacagccccttcccctcgtccgagatctaccgcaccctccctgttcgcgacgagatactgaaggcgctgctcaattgtgacctcattgggttccacacttttgattacgccaggcacttcctctcgtgctgcagtaggatgctgggaattgaataccagtcaaagcgtgggtacattggattggattactttggccgcactgtagggatcaagatcatgccggtgggagttcatatgggtcagttggagtcgggtctgcgcttgcctgatagggagtggaggctttctgagcttcaacagcagtttcagggcaaaactgtcttgcttggtgtggatgatatggatatctttaaggggatcaatttgaagcttcttgcatttgagaacatgttgaggacacatcccaagtggcaggggagagcagtgttagtgcagattgctaacccagcccgtggaaggggtaaggatctggaagccatccaggctgagattgagcagagctgccagaggatcaatgtagactttggccagtcagggtatagccctgttgttttcatcaatcgtgatgtgtcaagtgtcgagaaggttgcctattatacgatagcggaatgcgtggttgtgactgctgtgagggatgggatgaacttaacaccatatgagtacattgtctgtaggcagggtgcaccaggatctgagtcagtatcagaggtgagtgggccaaagaagagcatgctggttgtgtcagagtttattggctgctcgccgtcactgagtggtgctattagggttaacccatggaatatagaggcaacagcagaggcgatgaatgaggccatttcaatgccagaacaggaaaaacagttgaggcatgagaaacattaccgttatgtcagcagccatgatgttgcttattggtcaaagagcttcatcctagacttggaaagggcttgtagggaccactttaagaggacttgttggggcatagggttgggttttggtttcagggtggtggccttggaccctcatttcagaaagcttaacatggattcaattgttaatgcttatgagatttcagagagcagggctatattgcttgattatgatggaacactggttcctcaaacttccatcaacaaggaacctagtccagaggttttgaacatcatcaataccctttgctcagatagtagaaacatcgtttttcttgtcagtggtagagacaaagatacgttaggaaagtggttctcctcatgtccaaaattggggattgcagctgaacatggttacatcttgagggagtaagcaagggaatagttgccgagaggatacttgcatcagtgaaggagaggggaaagcaggctgatttcgtattgtgcatcggcgatgataggtctgatgaggacatgtttgaaaatattgccgatatcattaagaggaatatggttgctccaagaacatcgctgtttgcatgcactgtgggacaaaaaccaagcaaagccaaattctacctggacgatacatttgaagtggtcgctatgctgagcgcacttgcagatgccactggagctgaactgaaatctgattcggctgatgaattggcggcatctatctcatcacttgatattggtgacgaacaatcagaatccagcgatacaccaattggagggtcttagccagttttctcttgaatttcagaatataatgattatttcaatagtcaattctacagaggggaagcttctcaatctgctgcactccaagtttatccagttgggcaagatagtagtctgtcgctgcaaggcgtagatccatatgttcatagctgactcgccgacttggcatattctttgactttctcattcctggttgaagtaaaatgaaagcctgacagaaggaaagggaactgtgtggctgaagtaattggggaaagttataggagtggcaaatgctaaaggagcccgtgcgcagcttctgatatgatcccttattaacatgacattacaaagtggtgtcactttttgaactatcagtagtaggtagtagcaatctcaagggtgaggtttaaattgattagttgcttcaaaaccagattttggctcctctgtgtttgggttatattttaattaattatccagggttagtatgttgagaattgcctaaatagtttggaaacttaaatcccttttaagattattggggattgagagaaaatgagctattttttcactcaatccccgggaatactggagcagatttaagtttctaaactagcctttaggtgcacgatagcgcgttttcaggtctacttgtctgaggttagggcatgtacaaccttatttaatatgaggtctttttaggagtctaaggttctaagcgaaaaaatacaaaagacggactcttcgtgaagaacccgtctcttcacgaatttatctgtatttctgatctagtgtctcaggattgtatcatacagtcttttaatcgtattttatacttaaaaaagtgaactgatgtttcagagttgtacatgcccttagtatgttgattaccattgccaatcagcactgcatgcttgcgattatgtggccgctttgcttgtagtagtggcaaaggttttatgtggaatggtcg

SEQ ID NO: 36545 - DNA, 3656 bp, Zea Mays
ccgctcggtgtttcggccatgatgtcgcggtcgtataccaacctgctcgacctcgcggagggcaacttcgcggcgctgggcccggtcggcggcagcgggcggcagaggcatgggtcgttcgggctgcggcggatgtcgcgggtgatgacggtgccggggacgctgacggagctcgacggcgaggacgagtcggagccggccgcgaccagcagcgtcgcctccgacgtgccctcgtccgtggcggcggaccgcctcatagtggtctcgaatcagttgcccatcgtcgcgcgccgcaggcccgacggccgagggtggtccttctcgtgggacgatgactcgctcctgctccagctccgcgacggcattcccgacgagatggaggtgctcttcgtcggatcactccgcgccgacgtccccgcagccgagcaggacgcggtatcgcaggcgctgctcgaccgattccgctgcgcgccggtgttcctccctgaccacctcaacgaccggttctaccacggcttctgcaagcgccagctctggcctctgttccactacatgctccccttctcatcgcccgcttccgcgtctgccgccgctacctcttcctccgtcgccacttcgtcacccggcaacggttgcttcgaccgcagcgcttgggaggcatacgtgctcgccaacaagttcttctttgagaaggtcgtggaggtaatcaacccagaggatgactacgtctgggttcatgactaccatctcctggcgctgcctacctttctccgccgccgcttcaaccgcctccgcatcggattcttcctccacagccccttcccctcgtccgagatctaccgcaccctccctgttcgcgacgagatactgaaggcgctgctcaattgtgacctcattgggttccacacttttgattacgccaggcacttcctctcgtgctgcagtaggatgctgggaattgaataccagtcaaagcgtgggtacattggattggattactttggccgcactgtagggatcaagatcatgccggtgggagttcatatgggtcagttggagtcgggtctgcgcttgcctgatagggagtggaggctttctgagcttcaacagcagtttcagggcaaaactgtcttgcttggtgtggatgatatggatatctttaaggggatcaatttgaagcttcttgcatttgagaacatgttgaggacacatcccaagtggcaggggagagcagtgttagtgcagattgctaacccagcccgtggaaggggtaaggatctggaagccatccaggctgagattgagcagagctgccagaggatcaatgtagactttggccagtcagggtatagccctgttgttttcatcaatcgtgatgtgtcaagtgtcgagaaggttgcctattatacgatagcggaatgcgtggttgtgactgctgtgagggatgggatgaacttaacaccatatgagtacattgtctgtaggcagggtgcaccaggatctgagtcagtatcagaggtgagtgggccaaagaagagcatgctggttgtgtcagagtttattggctgctcgccgtcactgagtggtgctattagggttaacccatggaatatagaggcaacagcagaggcgatgaatgaggccatttcaatgccagaacaggaaaaacagttgaggcatgagaaacattaccgttatgtcagcagccatgatgttgcttattggtcaaagagcttcatcctagacttggaaagggcttgtagggaccactttaagaggacttgttggggcatagggttgggttttggtttcagggtggtggccttggaccctcatttcagaaagcttaacatggattcaattgttaatgcttatgagatttcagagagcagggctatattgcttgattatgatggaacactggttcctcaaacttccatcaacaaggaacctagtccagaggttttgaacatcatcaataccctttgctcagatagtagaaacatcgtttttcttgtcagtggtagagacaaagatacgttaggaaagtggttctcctcatgtccaaaattggggattgcagctgaacatggttacatcttgaggtggtctagcaaagaagaatggcaaacatgcacccaggccatggactttggatggatgcaaatggcaaagccagtgatgaatttatatacagaagcaactgatggatcctacattgagagaaaagaaagtgccttggtgtggcaccatcaggatgctgacccaggctttggatcctcacaggcaaaggagctgcttgatcacctggaaagtgtactagcaaatgaaccagtctctgtcaagagtggacagttcatcgttgaagtcaagccacagggagtaagcaagggaatagttgccgagaggatacttgcatcagtgaaggagaggggaaagcaggctgatttcgtattgtgcatcggcgatgataggtctgatgaggacatgtttgaaaatattgccgatatcattaagaggaatatggttgctccaagaacatcgctgtttgcatgcactgtgggacaaaaaccaagcaaagccaaattctacctggacgatacatttgaagtggtcgctatgctgagcgcacttgcagatgccactggagctgaactgaaatctgattcggctgatgaattggcggcatctatctcatcacttgatattggtgacgaacaatcagaatccagcgatacaccaattggagggtcttagccagttttctcttgaatttcagaatataatgattatttcaatagtcaattctacagaggggaagcttctcaatctgctgcactccaagtttatccagttgggcaagatagtagtctgtcgctgcaaggcgtagatccatatgttcatagctgactcgccgacttggcatattctttgactttctcattcctggttgaagtaaaatgaaagcctgacagaaggaaagggaactgtgtggctgaagtaattggggaaagttataggagtggcaaatgctaaaggagcccgtgcgcagcttctgatatgatcccttattaacatgacattacaaagtggtgtcactttttgaactatcagtagtaggtagtagcaatctcaaggattcatgtgctgccacaagtgaggatgtcagcgcatgacactacatctgtaggcagatctgttcaagttgtacattgacgctgttggtcacatcaaaccctgcgcaaggaatagtttggatggagcattcttctcccctgtgaagggtggggtgccatcaagcagcattgaaccatcacaacccagtatcttacatgattcctatgattagtagctgaagaaatgtgaagtactaagcatatgtgcagattcgatggcacttgcatcgatcggcgctatagattaccacatgatccaaatgcggtaatagtcccaccaaagattcaaacggtttttttaaatatatatataataccaaaaaaactgccttccggtggctaattcgaatcaatataacgaagtaactgaagggagagaagtttcagataaataaacctttatttcaaggcgaggtatcatatgtgctagagcagcccggatgcagataccccaaacgagatgcttaccgtgaaagcacg

SEQ ID NO: 36546 - DNA, 2655 bp, Zea Mays
ccggctcacctctcgcggcgaagcttttctctccgctcggtgtttcggccatgatgtcgcggtcgtataccaacctgctcgacctcgcggagggcaacttcgcggcgctgggcccggtcggcggcagcgggcggcagaggcatgggtcgttcgggctgcggcggatgtcgcgggtgatgacggtgccggggacgctgacggagctcgacggcgaggacgagtcggagccggccgcgaccagcagcgtcgcctccgacgtgccctcgtccgtggcggcggaccgcctcatagtggtctcgaatcagttgcccatcgtcgcgcgccgcaggcccgacggccgagggtggtccttctcgtgggacgatgactcgctcctgctccagctccgcgacggcattcccgacgagatggaggtgctcttcgtcggatcactccgcgccgacgtccccgcagccgagcaggacgcggtatcgcaggcgctgctcgaccgattccgctgcgcgccggtgttcctccctgaccacctcaacgaccggttctaccacggcttctgcaagcgccagctctggcctctgttccactacatgctccccttctcatcgcccgcttccgcgtctgccgccgctacctcttcctccgtcgccacttcgtcacccggcaacggttgcttcgaccgcagcgcttgggaggcatacgtgctcgccaacaagttcttctttgagaaggtcgtggaggtaatcaacccagaggatgactacgtctgggttcatgactaccatctcctggcgctgcctacctttctccgccgccgcttcaaccgcctccgcatcggattcttcctccacagccccttcccctcgtccgagatctaccgcaccctccctgttcgcgacgagatactgaaggcgctgctcaattgtgacctcattgggttccacacttttgattacgccaggcacttcctctcgtgctgcagtaggatgctgggaattgaataccagtcaaagcgtgggtacattggattggattactttggccgcactgtagggatcaagatcatgccggtgggagttcatatgggtcagttggagtcgggtctgcgcttgcctgatagggagtggaggctttctgagcttcaacagcagtttcagggcaaaactgtcttgcttggtgtggatgatatggatatctttaaggggatcaatttgaagcttcttgcatttgagaacatgttgaggacacatcccaagtggcaggggagagcagtgttagtgcagattgctaacccagcccgtggaaggggtaaggatctggaagccatccaggctgagattgagcagagctgccagaggatcaatgtagactttggccagtcagggtatagccctgttgttttcatcaatcgtgatgtgtcaagtgtcgagaaggttgcctattatacgatagcggaatgcgtggttgtgactgctgtgagggatgggatgaacttaacaccatatgagtacattgtctgtaggcagggtgcaccaggatctgagtcagtatcagaggtgagtgggccaaagaagagcatgctggttgtgtcagagtttattggctgctcgccgtcactgagtggtgctattagggttaacccatggaatatagaggcaacagcagaggcgatgaatgaggccatttcaatgccagaacaggaaaaacagttgaggcatgagaaacattaccgttatgtcagcagccatgatgttgcttattggtcaaagagcttcatcctagacttggaaagggcttgtagggaccactttaagaggacttgttggggcatagggttgggttttggtttcagggtggtggccttggaccctcatttcagaaagcttaacatggattcaattgttaatgcttatgagatttcagagagcagggctatattgcttgattatgatggaacactggttcctcaaacttccatcaacaaggaacctagtccagaggttttgaacatcatcaataccctttgctcagatagtagaaacatcgtttttcttgtcagtggtagagacaaagatacgttaggaaagtggttctcctcatgtccaaaattggggattgcagctgaacatggttacatcttgagattcatgtgctgccacaagtgaggatgtcagcgcatgacactacatctgtaggcagatctgttcaagttgtacattgacgctgttggtcacatcaaaccctgcgcaaggaatagtttggatggagcattcttctcccctgtgaagggtggggtgccatcaagcagcattgaaccatcacaacccagtatcttacatgattcctatgattagtagctgaagaaatgtgaagtactaagcatatgtgcagattcgatggcacttgcatcgatcggcgctatagattaccacatgatccaaatgcggtaatagtcccaccaaagattcaaacggtttttttaaatatatatataataccaaaaaaactgccttccggtggctaattcgaatcaatataacgaagtaactgaagggagagaagtttcagataaataaacctttatttcaaggcgaggtatcatatgtgctagagcagcccggatgcagataccccaaacgagatgcttaccgtgaaagcacg

SEQ ID NO: 36547 - DNA, 3829 bp, Zea Mays
ccacccttcccggccacaccacctctctctctcgagccgccgccaccagatcaaatcaaagcgggccggctcacctctcgcggcgaagcttttctctccgctcggtgtttcggccatgatgtcgcggtcgtataccaacctgctcgacctcgcggagggcaacttcgcggcgctgggcccggtcggcggcagcgggcggcagaggcatgggtcgttcgggctgcggcggatgtcgcgggtgatgacggtgccggggacgctgacggagctcgacggcgaggacgagtcggagccggccgcgaccagcagcgtcgcctccgacgtgccctcgtccgtggcggcggaccgcctcatagtggtctcgaatcagttgcccatcgtcgcgcgccgcaggcccgacggccgagggtggtccttctcgtgggacgatgactcgctcctgctccagctccgcgacggcattcccgacgagatggaggtgctcttcgtcggatcactccgcgccgacgtccccgcagccgagcaggacgcggtatcgcaggcgctgctcgaccgattccgctgcgcgccggtgttcctccctgaccacctcaacgaccggttctaccacggcttctgcaagcgccagctctggcctctgttccactacatgctccccttctcatcgcccgcttccgcgtctgccgccgctacctcttcctccgtcgccacttcgtcacccggcaacggttgcttcgaccgcagcgcttgggaggcatacgtgctcgccaacaagttcttctttgagaaggtcgtggaggtaatcaacccagaggatgactacgtctgggttcatgactaccatctcctggcgctgcctacctttctccgccgccgcttcaaccgcctccgcatcggattcttcctccacagccccttcccctcgtccgagatctaccgcaccctccctgttcgcgacgagatactgaaggcgctgctcaattgtgacctcattgggttccacacttttgattacgccaggcacttcctctcgtgctgcagtaggatgctgggaattgaataccagtcaaagcgtgggtacattggattggattactttggccgcactgtagggatcaagatcatgccggtgggagttcatatgggtcagttggagtcgggtctgcgcttgcctgatagggagtggaggctttctgagcttcaacagcagtttcagggcaaaactgtcttgcttggtgtggatgatatggatatctttaaggggatcaatttgaagcttcttgcatttgagaacatgttgaggacacatcccaagtggcaggggagagcagtgttagtgcagattgctaacccagcccgtggaaggggtaaggatctggaagccatccaggctgagattgagcagagctgccagaggatcaatgtagactttggccagtcagggtatagccctgttgttttcatcaatcgtgatgtgtcaagtgtcgagaaggttgcctattatacgatagcggaatgcgtggttgtgactgctgtgagggatgggatgaacttaacaccatatgagtacattgtctgtaggcagggtgcaccaggatctgagtcagtatcagaggtgagtgggccaaagaagagcatgctggttgtgtcagagtttattggctgctcgccgtcactgagtggtgctattagggttaacccatggaatatagaggcaacagcagaggcgatgaatgaggccatttcaatgccagaacaggaaaaacagttgaggcatgagaaacattaccgttatgtcagcagccatgatgttgcttattggtcaaagagcttcatcctagacttggaaagggcttgtagggaccactttaagaggacttgttggggcatagggttgggttttggtttcagggtggtggccttggaccctcatttcagaaagcttaacatggattcaattgttaatgcttatgagatttcagagagcagggctatattgcttgattatgatggaacactggttcctcaaacttccatcaacaaggaacctagtccagaggttttgaacatcatcaataccctttgctcagatagtagaaacatcgtttttcttgtcagtggtagagacaaagatacgttaggaaagtggttctcctcatgtccaaaattggggattgcagctgaacatggttacatcttgaggtggtctagcaaagaagaatggcaaacatgcacccaggccatggactttggatggatgcaaatggcaaagccagtgatgaatttatatacagaagcaactgatggatcctacattgagagaaaagaaagtgccttggtgtggcaccatcaggatgctgacccaggctttggatcctcacaggcaaaggagctgcttgatcacctggaaagtgtactagcaaatgaaccagtctctgtcaagagtggacagttcatcgttgaagtcaagccacagggagtaagcaagggaatagttgccgagaggatacttgcatcagtgaaggagaggggaaagcaggctgatttcgtattgtgcatcggcgatgataggtctgatgaggacatgtttgaaaatattgccgatatcattaagaggaatatggttgctccaagaacatcgctgtttgcatgcactgtgggacaaaaaccaagcaaagccaaattctacctggacgatacatttgaagtggtcgctatgctgagcgcacttgcagatgccactggagctgaactgaaatctgattcggctgatgaattggcggcatctatctcatcacttgatattggtgacgaacaatcagaatccagcgatacaccaattggagggtcttagccagttttctcttgaatttcagaatataatgattatttcaatagtcaattctacagaggggaagcttctcaatctgctgcactccaagtttatccagttgggcaagatagtagtctgtcgctgcaaggcgtagatccatatgttcatagctgactcgccgacttggcatattctttgactttctcattcctggttgaagtaaaatgaaagcctgacagaaggaaagggaactgtgtggctgaagtaattggggaaagttataggagtggcaaatgctaaaggagcccgtgcgcagcttctgatatgatcccttattaacatgacattacaaagtggtgtcactttttgaactatcagtagtaggtagtagcaatctcaagggtgaggtttaaattgattagttgcttcaaaaccagattttggctcctctgtgtttgggttatattttaattactagattcatgtgctgccacaagtgaggatgtcagcgcatgacactacatctgtaggcagatctgttcaagttgtacattgacgctgttggtcacatcaaaccctgcgcaaggaatagtttggatggagcattcttctcccctgtgaagggtggggtgccatcaagcagcattgaaccatcacaacccagtatcttacatgattcctatgattagtagctgaagaaatgtgaagtactaagcatatgtgcagattcgatggcacttgcatcgatcggcgctatagattaccacatgatccaaatgcggtaatagtcccaccaaagattcaaacggtttttttaaatatatatataataccaaaaaaactgccttccggtggctaattcgaatcaatataacgaagtaactgaagggagagaagtttcagataaataaacctttatttcaaggcgaggtatcatatgtgctagagcagcccggatgcagataccccaaacgagatgcttaccgtgaaagcacg

SEQ ID NO: 36548 - DNA, 1941 bp, Zea Mays
gactcagcacatcgtagattttttgcgccaatatgaggcagggtgcaccaggatctgagtcagtatcagaggtgggtgggccaaagaagagcatgctggttgtgtcagagtttattggctgctcgccgtcactgagtggtgctattagggtcaatccatggaatatagaggcaacagcagaggcgatgaatgaggccatttcaatgccagaacaggaaaaacagttgaggcatgagaaacattaccgttatgtcagcagccatgatgttgcttattggtcaaagagcttcatcctagacttggaaagggcttgtagggaccactttaagaggacatgttggggcatagggttgggttttggtttcagggtggtggccttggacgctcatttcagaaagcttaacatggattcaattgttaatgcttatgagatttcagggagcagggctatattgcttgattatgatggaacactggttcctcaaacttcaatcaacaaggaacctagtccagaggttttgaacatcatcaataccctttgctcagatagtagaaacatcgtttttcttgtcagtggtagagacaaagatatgttaggaaagtggttctcctcatgtccaaaattggggattgcagctgaacatggttacttcttgaggtggtctagcgaagaagagtggcaaacatgcactcaggccatggactttggatggatgcaaatggcaaagccagtgatgaatttgtatacagaagcaactgatggatcctacattgagacaaaagaaagtgccttggtgtggcaccatcaggatgctgacccaggctttggatcctcacaggcaaaggagctgcttgatcacctggaaagtgtactagcaaatgaaccagtctctgtcaagagtggccagttcatcgttgaagtcaaaccacagggagtaagcaagggaatagttgccgagaggatacttgcatcagtgaaggagaggggaaagcaggctgatttcgtattgtgcatcggcgatgataggtccgatgaggacatgtttgaaaatattgccgatatcattaagaggaatatggttgctccaagaacatcattgtttgcatgcactgtgggacaaaaaccaagcaaagccaaattctacctggacgatacatttgaagtggtcgctatgctgagcgcacttgcagatgccactggagctgaactggaatctgattcggctgatgaattggccgcatctatctcatcacttgatattggtgacgaacaatcagaaaccagtgatacaccaattggagggtcttagtcagttttctcttgaatttcagaatataatgattatttcaatagtcaattctacagaggggaagcttctcaatctgctgcactccaagtttctccagttgggcaagatagtagtctgttgctgcaaggcgtagatccatatgttcatagctgactcgccgacttggcatattctttgactttctcatttctggttgaagtaaaatgaaagcctcacagaaggaaagggaactgtgtggctgaagtaattggggggaagttataggagtggcaatttctaaaggagcccgtgcgcagcttctgatatgatcccttattaacatgacattacaaagtggtgtcactttttgaactatcggtagtaggtagtagcaatctcaagggtgaggtttaaattgattagttgcttcaaaaccagattttggctcctctgtgtttgggttatattttaattaattatccagggctagtacgctgagaattgcctaaatagtttggaaacttaaatcccttttaggattttcggggattgagtgagaaaacgagttattttttcactcaatcccccggaacactggaggagatttaagtttttaaactagcctttaggtgaaagatagcgtattttcaga

SEQ ID NO: 36549 - DNA, 2516 bp, Zea Mays
agcaccaatacgctgactcagcacatcgtagattttttgcgccaatatgaggcacttcctctcgtgctgcagtaggatgctgggaattgaataccagtcaaagcgtgggcacattggattggattactttggccgcactgtagggatcaagatcatgccagtgggagttcatatgggtcagttggagtcgggtctgcgcttgcctgatagggagtggaggctttctgagcttcaacagcagtttcagggcaaaactgtcttgcttggtgtggatgatatggatatctttaaggggatcaatttgaagcttcttgcatttgagaacatgttgagaacacatcccaagtggcaggggagagcagtgttagtgcagattgctaacccagcccgtggaaggggtaaggatctggaagccatccaggctgagattgaggagagctgccagaggatcaatggagactttggccagtcagggtatagccctgttgttttcatcgatcgtgatgtgtcaagtgtcgagaagattgcctattatacgatagcggaatgcgtggttgtgactgctgtgagggatgggatgaacttgacaccatatgagtacattgtctgtaggcagggtgcaccaggatctgagtcagtatcagaggtgggtgggccaaagaagagcatgctggttgtgtcagagtttattggctgctcgccgtcactgagtggtgctattagggtcaatccatggaatatagaggcaacagcagaggcgatgaatgaggccatttcaatgccagaacaggaaaaacagttgaggcatgagaaacattaccgttatgtcagcagccatgatgttgcttattggtcaaagagcttcatcctagacttggaaagggcttgtagggaccactttaagaggacatgttggggcatagggttgggttttggtttcagggtggtggccttggacgctcatttcagaaagcttaacatggattcaattgttaatgcttatgagatttcagggagcagggctatattgcttgattatgatggaacactggttcctcaaacttcaatcaacaaggaacctagtccagaggttttgaacatcatcaataccctttgctcagatagtagaaacatcgtttttcttgtcagtggtagagacaaagatatgttaggaaagtggttctcctcatgtccaaaattggggattgcagctgaacatggttacttcttgaggtggtctagcgaagaagagtggcaaacatgcactcaggccatggactttggatggatgcaaatggcaaagccagtgatgaatttgtatacagaagcaactgatggatcctacattgagacaaaagaaagtgccttggtgtggcaccatcaggatgctgacccaggctttggatcctcacaggcaaaggagctgcttgatcacctggaaagtgtactagcaaatgaaccagtctctgtcaagagtggccagttcatcgttgaagtcaaaccacagggagtaagcaagggaatagttgccgagaggatacttgcatcagtgaaggagaggggaaagcaggctgatttcgtattgtgcatcggcgatgataggtccgatgaggacatgtttgaaaatattgccgatatcattaagaggaatatggttgctccaagaacatcattgtttgcatgcactgtgggacaaaaaccaagcaaagccaaattctacctggacgatacatttgaagtggtcgctatgctgagcgcacttgcagatgccactggagctgaactggaatctgattcggctgatgaattggccgcatctatctcatcacttgatattggtgacgaacaatcagaaaccagtgatacaccaattggagggtcttagtcagttttctcttgaatttcagaatataatgattatttcaatagtcaattctacagaggggaagcttctcaatctgctgcactccaagtttctccagttgggcaagatagtagtctgttgctgcaaggcgtagatccatatgttcatagctgactcgccgacttggcatattctttgactttctcatttctggttgaagtaaaatgaaagcctcacagaaggaaagggaactgtgtggctgaagtaattggggggaagttataggagtggcaatttctaaaggagcccgtgcgcagcttctgatatgatcccttattaacatgacattacaaagtggtgtcactttttgaactatcggtagtaggtagtagcaatctcaagggtgaggtttaaattgattagttgcttcaaaaccagattttggctcctctgtgtttgggttatattttaattaattatccagggctagtacgctgagaattgcctaaatagtttggaaacttaaatcccttttaggattttcggggattgagtgagaaaacgagttattttttcactcaatcccccggaacactggaggagatttaagtttttaaactagcctttaggtgaaagatagcgtattttcaga

SEQ ID NO: 36550 - DNA, 1338 bp, Zea Mays
ggagaaataaacaaacaagcttggtctggacttcttcgttaagcggtgtgcacaggtggtctagcgaagaagagtggcaaacatgcactcaggccatggactttggatggatgcaaatggcaaagccagtgatgaatttgtatacagaagcaactgatggatcctacattgagacaaaagaaagtgccttggtgtggcaccatcaggatgctgacccaggctttggatcctcacaggcaaaggagctgcttgatcacctggaaagtgtactagcaaatgaaccagtctctgtcaagagtggccagttcatcgttgaagtcaaaccacagggagtaagcaagggaatagttgccgagaggatacttgcatcagtgaaggagaggggaaagcaggctgatttcgtattgtgcatcggcgatgataggtccgatgaggacatgtttgaaaatattgccgatatcattaagaggaatatggttgctccaagaacatcattgtttgcatgcactgtgggacaaaaaccaagcaaagccaaattctacctggacgatacatttgaagtggtcgctatgctgagcgcacttgcagatgccactggagctgaactggaatctgattcggctgatgaattggccgcatctatctcatcacttgatattggtgacgaacaatcagaaaccagtgatacaccaattggagggtcttagtcagttttctcttgaatttcagaatataatgattatttcaatagtcaattctacagaggggaagcttctcaatctgctgcactccaagtttctccagttgggcaagatagtagtctgttgctgcaaggcgtagatccatatgttcatagctgactcgccgacttggcatattctttgactttctcatttctggttgaagtaaaatgaaagcctcacagaaggaaagggaactgtgtggctgaagtaattggggggaagttataggagtggcaatttctaaaggagcccgtgcgcagcttctgatatgatcccttattaacatgacattacaaagtggtgtcactttttgaactatcggtagtaggtagtagcaatctcaagggtgaggtttaaattgattagttgcttcaaaaccagattttggctcctctgtgtttgggttatattttaattaattatccagggctagtacgctgagaattgcctaaatagtttggaaacttaaatcccttttaggattttcggggattgagtgagaaaacgagttattttttcactcaatcccccggaacactggaggagatttaagtttttaaactagcctttaggtgaaagatagcgtattttcaga

SEQ ID NO: 36551 - DNA, 1304 bp, Zea Mays
gaagaaccaaaaacagaacacggtgtgccctgccctacaaggcttttcagctcccacattgcagcatgttgcggcggctggaatcttttctcactccccccctgtagccatcgagcaggagatctatcaggagagcgcctccttcgtctccctctctttctcctagctccattattggcgctgcgcggggccactagctagcaacaagctcctccaatcatctgcgctgcctgcgcgcggaacaagatgaacaacgtcgaggtgatctacacgccctgggctaatctcaagaagtccccatccatggatgtcggccaggttggcttccacaacccgcggatggtacatgtgcttatagtcgagaagcgtgtcaacgagatcatcaacaggctgaataaaacccgggtagaacgccgggcgccagacttgaaagcggagaaagaggcatcaaatgcagcagaaaaggccgagaggaagatgcagctgaaagagaagaaacggaaggaggagatggaaaggctggagaaggagaaatgggcggagatacggagctacaagggcctcatggtggccgagaagatgacgtccaaccgccagatcgcctccgccggcaagtccatgcaggaaatggaggatgagttcgtctgaagacgactgtcatcgtcactggagtctacatctctctctctctctctctctgtctgtgtgtgtgttgtgtgtgtacgtacatatgtccatgctcgcgtgataacgacgagtcgaagcaaccaaaagatctcatggatcgattattcgatccgttcctgatcctccgttgatctgtgctctgtacataacatgtgctcccagcatggacatgtataggtcacgagaagagctagcgcgtatgtatacaagtaactagtgacgagctgttgctcggagggatcaacatatatggagttcatcaagagaatcggtgcaacacacttgccgccaggagaaccagctgaggtactaaaaatatatggagttcctcagtttccacgatgtccatgcccaaaggggtagcacaggtaaacatattcagaatgccatcatgctttacctaaagattcaaagccatccatcatatgtccatccatcatctctgttaactgacaccaaacctccctagctacagctagcagatatctccatttcattcagaatcactaaagcatcgctcagggagagaaaaaaacaagatccaatgctagttcgggatcaagattttccaaaagtacacacgcatgcatgagcagatatgattattacacaagata

SEQ ID NO: 36552 - DNA, 1119 bp, Zea Mays
atgtagccagctggagcgctttctgtacagttccatgtggacaaggtatcctcggcacacgtctacctgaggctaaagaaaggcgagacgatacacaccatcagcgaggccctcctggaggactgtgcgcagctcgtcaaggctcactccattcaaggtacatgtgcttatagtcgagaagcgtgtcaacgagatcatcaacaggctgaataaaacccgggtagaacgccgggcgccagacttgaaagcggagaaagaggcatcaaatgcagcagaaaaggccgagaggaagatgcagctgaaagagaagaaacggaaggaggagatggaaaggctggagaaggagaaatgggcggagatacggagctacaagggcctcatggtggccgagaagatgacgtccaaccgccagatcgcctccgccggcaagtccatgcaggaaatggaggatgagttcgtctgaagacgactgtcatcgtcactggagtctacatctctctctctctctctctctgtctgtgtgtgtgttgtgtgtgtacgtacatatgtccatgctcgcgtgataacgacgagtcgaagcaaccaaaagatctcatggatcgattattcgatccgttcctgatcctccgttgatctgtgctctgtacataacatgtgctcccagcatggacatgtataggtcacgagaagagctagcgcgtatgtatacaagtaactagtgacgagctgttgctcggagggatcaacatatatggagttcatcaagagaatcggtgcaacacacttgccgccaggagaaccagctgaggtactaaaaatatatggagttcctcagtttccacgatgtccatgcccaaaggggtagcacaggtaaacatattcagaatgccatcatgctttacctaaagattcaaagccatccatcatatgtccatccatcatctctgttaactgacaccaaacctccctagctacagctagcagatatctccatttcattcagaatcactaaagcatcgctcagggagagaaaaaaacaagatccaatgctagttcgggatcaagattttccaaaagtacacacgcatgcatgagcagatatgattattacacaagata

SEQ ID NO: 36553 - DNA, 1326 bp, Zea Mays
gccagcatagcaacgccaacgatggagcaaaagcggcgaagggataaggcccccccgagtggggtcccgtcgcaattctttaatcggacccatcgtggttccacgtggcggtccaaccctctccggggggagaagatcggcaagatgacttgcgtggagacgcgcaacgagacccggccggtccgcctccgcccccgacgccgttatatacacgcccctgtctcccccctcgcctggttccatgtggacaaggtatcctcggcacacgtctacctgaggctaaagaaaggcgagacgatacacaccatcagcgaggccctcctggaggactgtgcgcagctcgtcaaggctcactccattcaaggtacatgtgcttatagtcgagaagcgtgtcaacgagatcatcaacaggctgaataaaacccgggtagaacgccgggcgccagacttgaaagcggagaaagaggcatcaaatgcagcagaaaaggccgagaggaagatgcagctgaaagagaagaaacggaaggaggagatggaaaggctggagaaggagaaatgggcggagatacggagctacaagggcctcatggtggccgagaagatgacgtccaaccgccagatcgcctccgccggcaagtccatgcaggaaatggaggatgagttcgtctgaagacgactgtcatcgtcactggagtctacatctctctctctctctctctctgtctgtgtgtgtgttgtgtgtgtacgtacatatgtccatgctcgcgtgataacgacgagtcgaagcaaccaaaagatctcatggatcgattattcgatccgttcctgatcctccgttgatctgtgctctgtacataacatgtgctcccagcatggacatgtataggtcacgagaagagctagcgcgtatgtatacaagtaactagtgacgagctgttgctcggagggatcaacatatatggagttcatcaagagaatcggtgcaacacacttgccgccaggagaaccagctgaggtactaaaaatatatggagttcctcagtttccacgatgtccatgcccaaaggggtagcacaggtaaacatattcagaatgccatcatgctttacctaaagattcaaagccatccatcatatgtccatccatcatctctgttaactgacaccaaacctccctagctacagctagcagatatctccatttcattcagaatcactaaagcatcgctcagggagagaaaaaaacaagatccaatgctagttcgggatcaagattttccaaaagtacacacgcatgcatgagcagatatgattattacacaagata

SEQ ID NO: 36554 - DNA, 1840 bp, Zea Mays
attaacgaaagcgagagtggaggggccagcatagcaacgccaacgatggagcaaaagcggcgaagggataaggcccccccgagtggggtcccgtcgcaattctttaatcggacccatcgtggttccacgtggcggtccaaccctctccggggggagaagatcggcaagatgacttgcgtggagacgcgcaacgagacccggccggtccgcctccgcccccgacgccgttatatacacgcccctgtctcccccctcgcctggttcgttgccgcacccgctgccgcctgccgtagtgctgctcccggccctccctctaattgctcttgccgctttatgtatttgccgcgcgcggcgacagagaatatacacgagtatatacagtagccgccgccggtggagtctctatctggcagccggccggtcggtcggtactctgctctagaagctagagagatactactctgcaggctagctagctagctagaggtagtagaagaggccggcccggcccgattgaagaataacatagagctgtcagctgctgagcgacgacggcgatggtgctctacttcaaggcgcgtccggacgccggcgactacaccatctacatgggcgccgacaagaacgagaacgaggagctcatcaaatacggcctccccgaggacgtctggttccatgtggacaaggtatcctcggcacacgtctacctgaggctaaagaaaggcgagacgatacacaccatcagcgaggccctcctggaggactgtgcgcagctcgtcaaggctcactccattcaagggaacaagatgaacaacgtcgaggtgatctacacgccctgggctaatctcaagaagtccccatccatggatgtcggccaggtacatgtgcttatagtcgagaagcgtgtcaacgagatcatcaacaggctgaataaaacccgggtagaacgccgggcgccagacttgaaagcggagaaagaggcatcaaatgcagcagaaaaggccgagaggaagatgcagctgaaagagaagaaacggaaggaggagatggaaaggctggagaaggagaaatgggcggagatacggagctacaagggcctcatggtggccgagaagatgacgtccaaccgccagatcgcctccgccggcaagtccatgcaggaaatggaggatgagttcgtctgaagacgactgtcatcgtcactggagtctacatctctctctctctctctctctgtctgtgtgtgtgttgtgtgtgtacgtacatatgtccatgctcgcgtgataacgacgagtcgaagcaaccaaaagatctcatggatcgattattcgatccgttcctgatcctccgttgatctgtgctctgtacataacatgtgctcccagcatggacatgtataggtcacgagaagagctagcgcgtatgtatacaagtaactagtgacgagctgttgctcggagggatcaacatatatggagttcatcaagagaatcggtgcaacacacttgccgccaggagaaccagctgaggtactaaaaatatatggagttcctcagtttccacgatgtccatgcccaaaggggtagcacaggtaaacatattcagaatgccatcatgctttacctaaagattcaaagccatccatcatatgtccatccatcatctctgttaactgacaccaaacctccctagctacagctagcagatatctccatttcattcagaatcactaaagcatcgctcagggagagaaaaaaacaagatccaatgctagttcgggatcaagattttccaaaagtacacacgcatgcatgagcagatatgattattacacaagata

SEQ ID NO: 36555 - DNA, 1799 bp, Zea Mays
aaattaactaggaaacatacatacggactctacagcaggattaacgaaagcgagagtggaggggccagcatagcaacgccaacgatggagcaaaagcggcgaagggataaggcccccccgagtggggtcccgtcgcaattctttaatcggacccatcgtggttccacgtggcggtccaaccctctccggggggagaagatcggcaagatgacttgcgtggagacgcgcaacgagacccggccggtccgcctccgcccccgacgccgttatatacacgcccctgtctcccccctcgcctggttcgttgccgcacccgctgccgcctgccgtagtgctgctcccggccctccctctaattgctcttgccgctttatgtatttgccgcgcgcggcgacagagaatatacacgagtatatacagtagccgccgccggtggagtctctatctggcagccggccggtcggtcggtactctgctctagaagctagagagatactactctgcaggctagctagctagctagaggtagtagaagaggccggcccggcccgattgaagaataacatagagctgtcagctgctgagcgacgacggcgatggtgctctacttcaaggcgcgtccggacgccggcgactacaccatctacatgggcgccgacaagaacgagaacgaggagctcatcaaatacggcctccccgaggacgtctggttccatgtggacaaggtatcctcggcacacgtctacctgaggctaaagaaaggcgagacgatacacaccatcagcgaggccctcctggaggactgtgcgcagctcgtcaaggctcactccattcaaggtacatgtgcttatagtcgagaagcgtgtcaacgagatcatcaacaggctgaataaaacccgggtagaacgccgggcgccagacttgaaagcggagaaagaggcatcaaatgcagcagaaaaggccgagaggaagatgcagctgaaagagaagaaacggaaggaggagatggaaaggctggagaaggagaaatgggcggagatacggagctacaagggcctcatggtggccgagaagatgacgtccaaccgccagatcgcctccgccggcaagtccatgcaggaaatggaggatgagttcgtctgaagacgactgtcatcgtcactggagtctacatctctctctctctctctctctgtctgtgtgtgtgttgtgtgtgtacgtacatatgtccatgctcgcgtgataacgacgagtcgaagcaaccaaaagatctcatggatcgattattcgatccgttcctgatcctccgttgatctgtgctctgtacataacatgtgctcccagcatggacatgtataggtcacgagaagagctagcgcgtatgtatacaagtaactagtgacgagctgttgctcggagggatcaacatatatggagttcatcaagagaatcggtgcaacacacttgccgccaggagaaccagctgaggtactaaaaatatatggagttcctcagtttccacgatgtccatgcccaaaggggtagcacaggtaaacatattcagaatgccatcatgctttacctaaagattcaaagccatccatcatatgtccatccatcatctctgttaactgacaccaaacctccctagctacagctagcagatatctccatttcattcagaatcactaaagcatcgctcagggagagaaaaaaacaagatccaatgctagttcgggatcaagattttccaaaagtacacacgcatgcatgagcagatatgattattacacaagata

SEQ ID NO: 36556 - DNA, 1217 bp, Zea Mays
tgggcggaaaccgaatcactcgggttccatgtggacaaggtatcctcggcacacgtctacctgaggctaaagaaaggcgagacgatacacaccatcagcgaggccctcctggaggactgtgcgcagctcgtcaaggctcactccattcaagggaacaagatgaacaacgtcgaggtgatctacacgccctgggctaatctcaagaagtccccatccatggatgtcggccaggttggcttccacaacccgcggatggtacatgtgcttatagtcgagaagcgtgtcaacgagatcatcaacaggctgaataaaacccgggtagaacgccgggcgccagacttgaaagcggagaaagaggcatcaaatgcagcagaaaaggccgagaggaagatgcagctgaaagagaagaaacggaaggaggagatggaaaggctggagaaggagaaatgggcggagatacggagctacaagggcctcatggtggccgagaagatgacgtccaaccgccagatcgcctccgccggcaagtccatgcaggaaatggaggatgagttcgtctgaagacgactgtcatcgtcactggagtctacatctctctctctctctctctctgtctgtgtgtgtgttgtgtgtgtacgtacatatgtccatgctcgcgtgataacgacgagtcgaagcaaccaaaagatctcatggatcgattattcgatccgttcctgatcctccgttgatctgtgctctgtacataacatgtgctcccagcatggacatgtataggtcacgagaagagctagcgcgtatgtatacaagtaactagtgacgagctgttgctcggagggatcaacatatatggagttcatcaagagaatcggtgcaacacacttgccgccaggagaaccagctgaggtactaaaaatatatggagttcctcagtttccacgatgtccatgcccaaaggggtagcacaggtaaacatattcagaatgccatcatgctttacctaaagattcaaagccatccatcatatgtccatccatcatctctgttaactgacaccaaacctccctagctacagctagcagatatctccatttcattcagaatcactaaagcatcgctcagggagagaaaaaaacaagatccaatgctagttcgggatcaagattttccaaaagtacacacgcatgcatgagcagatatgattattacacaagata

SEQ ID NO: 36557 - DNA, 2820 bp, Zea Mays
atggcaaaagaatcgaaggcagacgcatacagcgctcgggttcacacagcagcagacaatgcattgcgtgcaactgctaatccaaactcttatttcggcaaaggctgccggagaagaaagctcgccgttctgattgagaggtccaccggtaaacggggcggccgactaatcgttgcacaagctcgcggcgcggcgcggcgccgccatgtcgtctccagcgccaacgtcgccggctacgccgtctccaccaccaccggctccggtaccgcccacgccgtccccgcagccgccgactccggcgccggtaccgcccacgccagcgccggtaccaccaactcccgcgccggtgccgcccacgccagcgccgattccgcctacccccgcgccggtgccgcccacgcctacgccgtcccctcctcctccgtctccgtcgccaccaccgccggtgacgccgtccccaccgccgccagcgaccgtaccgacgccatccccacctccaccggcatctcctccaccaccgaccgtgccaacgccatcaccaacgccaccagcatctcctccaccaccggcgaccgcgccaacgccaacacctcctccacctgtactacgcccgcctcctcccagtgctgtcccggcgtcaccaccacctcctgactccgtcccatcaccgcccccgtctcctaacggcgtcccggcgtcacccgcgtctccgccgtcacatcagttattggctccgcctccaccggcctcgtcgaccggaacatcatcaacgtcgtcatcgccctctaaatcatcaagcaacgccaccgtggtgggcataggcgtcgccgtcggggcggttgttctgatcggcctcgccgtcggcctcatttactgcttcgcgggaaggaaacgacgccggcggtcgccgctgccgtctcaggggtttccaggcgagttctacgacccgcggcggggtccaatgaccccgctgcacatgtcgcacgtgcaatcgacgacgccatcctcgacgccgccactgatgcactcgtggcagcagagcagccacggtctgtccgagtccccgctgccgccactgaacccttcgccggccatcacgggcggcacattcgcgtacgacgacctggcggcggcgacggacgggttctcggacgccaacctgctcgggcagggcgggttcgggcatgtgtaccgcggcacggtggccgggcaagaggtggccatcaagaagctgcgggcgggcagcgggcagggcgaccgcgagttccgcgccgaggtggagatcatcagccgtgtgcaccacaagaacctcgtctccctcgtcggctactgcctccatggtgaacaacggctgctcgtctacgagtatgtgcccaacaagaccctcgagttccagcttcacgggagtggcaggccaacattggactggccgaggcggtggaagatcgcggtcggctcggccaagggcctcgcctatctgcacgaagactgtcatcctaagatcatccatcgtgacattaaggcggcgaacatccttctggattataactacgagccaaaggttgcagattttgggttggccaaataccaagcagctgaagtaacctctgtttctacgcgtgtaatggggactttcggatacttggcgccagagtacgctgccacaggcaaagttaacgaccggtccgacgtcttctccttcggcgtgatgcttctggaactgatcactggaaggaaaccaatcatgacatcttcagagtatcagcctgagacattagtttcttgggctaggccattgctgacaagagctgtcgaggaggaaaactatgacgaactgatcgatcccaggctggagaccaactacgacgcgtacgacatggcgcggctggttgcgtgcgccgcggccgccgtgcgccagactgcgcggtcccgcccgcggatgagccaggtcgtccggtacctggagggcgagctgtcggtggaggacctaaacgccggcgtgatgccggggcagagtgcgatgcagcggtcgagcggcggcacgacggaccagatcaaccggctcaggcggatggcgttcgggccgggcgcaggagggagcaccgggaccggggcaatcacggagtacaccagcagcgagttcagcgatcccaccaccgagtacgggctgaacccatccagtgagtacacggccagcagcgcgggcgacacgggggaggtggccgcgggcgcgcaggggcagcagcagtggcacggcaggcgcgcgcccggcgacaccgagaggatgagccggcgcaccaccggcaggcgcacccagtcgtaaacacactggcacacggcattcatttttgcgctttgtcaggctatagtagattgtgatttcgttcgttcgtgtacatgcgcgtgacaaggctgtggtactgaattttgctgtctcttttttttttacttctctgtgtttcggattcatgcaatttttaggccgggtgagtggaggtttaagctgtaaattgtatatgcacgttattggcgctcctcggtaaacaaaagttaagctttgagtatgttagaactcaagttgtgtaatatttctagtaactggcaaggttcgcgagttcaagtttttatgatctgaagaactgacaacaaaggataggtgttaaatttcagaatgtgttcattgtccactttcagcatgtgttcaggttcaggttaactgcagcttctgtttgtttgtcgtgcatccatctgcatagttcttgttctctgttattgtgcttttggcaataactcaaatacttgaatttggatcaaatttct

SEQ ID NO: 36558 - DNA, 3225 bp, Zea Mays
atggcaaaagaatcgaaggcagacgcatacagcgctcgggttcacacagcagcagacaatgcattgcgtgcaactgctaatccaaactcttatttcggcaaaggctgccggagaagaaagctcgccgttctgattgagaggtccaccggtaaacggggcggccgactaatcgttgcacaagctcgcggcgcggcgcggcgccgccatgtcgtctccagcgccaacgtcgccggctacgccgtctccaccaccaccggctccggtaccgcccacgccgtccccgcagccgccgactccggcgccggtaccgcccacgccagcgccggtaccaccaactcccgcgccggtgccgcccacgccagcgccgattccgcctacccccgcgccggtgccgcccacgcctacgccgtcccctcctcctccgtctccgtcgccaccaccgccggtgacgccgtccccaccgccgccagcgaccgtaccgacgccatccccacctccaccggcatctcctccaccaccgaccgtgccaacgccatcaccaacgccaccagcatctcctccaccaccggcgaccgcgccaacgccaacacctcctccacctgtactacgcccgcctcctcccagtgctgtcccggcgtcaccaccacctcctgactccgtcccatcaccgcccccgtctcctaacggcgtcccggcgtcacccgcgtctccgccgtcacatcagttattggctccgcctccaccggcctcgtcgaccggaacatcatcaacgtcgtcatcgccctctaaatcatcaagcaacgccaccgtggtgggcataggcgtcgccgtcggggcggttgttctgatcggcctcgccgtcggcctcatttactgcttcgcgggaaggaaacgacgccggcggtcgccgctgccgtctcaggggtttccaggtacgtacgcgcatatgtacaaaacaaatacaacgtggtcgcctttgttcctcggcgtcccgtcgtggccacgttgatgcgacagtacgcgtcgtgactcgcgacgccgaatgcgggacccttggtggccgagtgataaattggaattccacgggccactattcactccgcgtatcgcgggtgacagttacatcgacgccaagtggcatcgtgtgctcgctcatacggcgtaccgcgcgatgcatgggtggcttcgtaacttggcgtgccatggattgcgagctgtttgtacgcacgcatgcacgcagcggaaaacctgaactggtgcgtgttagcgccagttctctctaaacacttgctggactgaccgatcgttctgctcttccttgtccccggcgccaccaggcgagttctacgacccgcggcggggtccaatgaccccgctgcacatgtcgcacgtgcaatcgacgacgccatcctcgacgccgccactgatgcactcgtggcagcagagcagccacggtctgtccgagtccccgctgccgccactgaacccttcgccggccatcacgggcggcacattcgcgtacgacgacctggcggcggcgacggacgggttctcggacgccaacctgctcgggcagggcgggttcgggcatgtgtaccgcggcacggtggccgggcaagaggtggccatcaagaagctgcgggcgggcagcgggcagggcgaccgcgagttccgcgccgaggtggagatcatcagccgtgtgcaccacaagaacctcgtctccctcgtcggctactgcctccatggtgaacaacggctgctcgtctacgagtatgtgcccaacaagaccctcgagttccagcttcacgggagtggcaggccaacattggactggccgaggcggtggaagatcgcggtcggctcggccaagggcctcgcctatctgcacgaagactgtcatcctaagatcatccatcgtgacattaaggcggcgaacatccttctggattataactacgagccaaaggttgcagattttgggttggccaaataccaagcagctgaagtaacctctgtttctacgcgtgtaatggggactttcggatacttggcgccagagtacgctgccacaggcaaagttaacgaccggtccgacgtcttctccttcggcgtgatgcttctggaactgatcactggaaggaaaccaatcatgacatcttcagagtatcagcctgagacattagtttcttgggctaggccattgctgacaagagctgtcgaggaggaaaactatgacgaactgatcgatcccaggctggagaccaactacgacgcgtacgacatggcgcggctggttgcgtgcgccgcggccgccgtgcgccagactgcgcggtcccgcccgcggatgagccaggtcgtccggtacctggagggcgagctgtcggtggaggacctaaacgccggcgtgatgccggggcagagtgcgatgcagcggtcgagcggcggcacgacggaccagatcaaccggctcaggcggatggcgttcgggccgggcgcaggagggagcaccgggaccggggcaatcacggagtacaccagcagcgagttcagcgatcccaccaccgagtacgggctgaacccatccagtgagtacacggccagcagcgcgggcgacacgggggaggtggccgcgggcgcgcaggggcagcagcagtggcacggcaggcgcgcgcccggcgacaccgagaggatgagccggcgcaccaccggcaggcgcacccagtcgtaaacacactggcacacggcattcatttttgcgctttgtcaggctatagtagattgtgatttcgttcgttcgtgtacatgcgcgtgacaaggctgtggtactgaattttgctgtctcttttttttttacttctctgtgtttcggattcatgcaatttttaggccgggtgagtggaggtttaagctgtaaattgtatatgcacgttattggcgctcctcggtaaacaaaagttaagctttgagtatgttagaactcaagttgtgtaatatttctagtaactggcaaggttcgcgagttcaagtttttatgatctgaagaactgacaacaaaggataggtgttaaatttcagaatgtgttcattgtccactttcagcatgtgttcaggttcaggttaactgcagcttctgtttgtttgtcgtgcatccatctgcatagttcttgttctctgttattgtgcttttggcaataactcaaatacttgaatttggatcaaatttct

SEQ ID NO: 36559 - DNA, 1958 bp, Zea Mays
tctctctcatgatccatagaacaaatcctgatggcactgacgagcctacaagaaatatacaccaatgatccagtaaataagcacagttggaaaagagaaaactcaagaggtagtctagtctagatttttaatgtgtaaacaagctaacatacaccatggtttctaccttcatcctttcatttaaaataattctacattgcacttcgacatgcacagcgcaagtgcaccaagtacaaattttcaagatatattcacaacaataatttgcatctacaaaccaagcagcatgtcatttgcttcgtaaaatacagcttggcaataagctgcaaagacatggatagagattcaaataaacccaaacacacaaaggaaagtgaattgtaatgcccttacagaaaaatagtgccaagtccaacaccaaatcacatgaatgcttgcaggtgggactggggatatggatgcaaggaaaaaaggatctggcctagaagcgtaagtacatatacctgatgagtgatgacaacaaaatgcatagaaaacagtgcttaataacaagaacatccgcttttgagtataaacggcattggaaacacaaactacattagtgaagaggactgtagatgagacaacagttgtcagggccaatggaggcctacggaggggctgcggcagcagcaaccatgggccctccaagggggattagataaggatagttagagataaaattagaagattagttgagattatttaggatattagttgagattatctaggaaagttatcagttagtagtttgttgagagttttaaggagataaggatctctagctagataggagcggccagccggcctatttatgtaatcaatggatgagaaataaaataagcaagaattagaagggaaactcccctcttgctcggccgtgggcagaggccccccggccggcgccctgtgaacagtaccgaaccacctccccaccagcagctccgaccatcgaattccctctccaatccctcaccgatctagcgaccataacaacaggtgtgttgttgctaggcataaagaaaaataaagatacctatgaagtaatatataaacaaaataacagcattgttgatgatgtccacatctgttgagtaccaatacaaaagcacctgcaacaaaaaatggaaaatgtaagtcacctaaaaatggactaaaaacaaatggatttaaacaatgaacttactggaacattagtcacaagtgcaagtatagcagaagacgagaaacagatcagcgagacagcagctaaactggcaacctgcaggaaagaattgtcaatttgaatagagcatgagtatgcatattttcataatattatatctatacgttttttatgaaaggacctctagcgtaaaggttaaggcttccgagtagcaggtctcggctcccgggttcgatccccctcgggggcgaatttcgggcttggttaaaaaaatctcctcgtgtgcgctgcccattcttgggttacgtcctatacgccaccctttggttgggccgttgtagagtgggcggtgacagcccgctagtgatgggaccagggttcgagaattttctcgaccaaaaccatgttttggtctcttcttaatataataccaggaggatggtctttccctcccggccgagttttttttatatctatacgtttttcattagatcctgccaataaatagcaaaggtgcttcacacatatatgtttattcttcaagagaatcaatcaacataatgctttccctgctgcagagatcatacagaatagaagtccttcagcaatgcatgcttttaaagttataattattcacaaaagagtaactaaaatctagatccaaccattcacaagaaacttctaagtttaaacatttttaaacaatactcatatgtcaaaaatgagacccaaaggaacaaaatgctgcattttt

SEQ ID NO: 36560 - DNA, 1614 bp, Zea Mays
tgtgaagtggaacttgatgatatcttcattttttgactttttgtgctttaggctcctcttcttggatcgactgcagcagttagatctgcacatgtatatctttgtttaattatcgtctccgtattgtaagattaatttgagcttccattctacttttgctccacatatgaaacattaaaagatactctaattatgctatttaactccaagggtggaggtggaatgggtgattataaccacctgcaggatggcattttctgctcaatttgtccgttgctgatttcagtcggagattagattagattagatatgtcgctgatggaagtccaactaatagcgaactgaagaccgccgaccttgtgtctacacccgcacattctgttgcatctatacctccttctacaccagcacttcatgttgctcctgcacttttgtctacccctgtcagatgctcatctccatttatcacgccaccatattgttcctcaggttccatttagttgttgaattagttctaaaatcatagtggaaccaaaataatgtgtggatatttgcaaacgagtttctcttgaagtcatggtgtgaggaaaaaagttgattgactggcatgagggtggatacttgactgttgatttaccaatgtctcggggagaagttgtcattgggggtccaaatgtttcgtcattcttgcctaccgctgtccctttgcttcagaatacggtgaaacagaagtccttcattggctcttctcatcttggctcacatgcagtacttgaataccagtttcttcctgagcagccaagtgatgcatatgagaggggaagccagttgcgcttctatgatgctctagcagaagtgttaaactcaagggtagattcgttttctataggatcacactttacccatgtagttgagcaggcacctagctatacatttcacagtcaatcatctggttctagctgtttgtcaaatattattgctagcatggctcaaatccaaatattattgctagcatggctcaaatccacggtcaaaaattggcatccctcaagttgtcagatttgaaagctccctcgcatcccctaaaagattgggttatcatgatgaagaacatgtcacgtggacagaaaaacacaagaactatatttatggatatactatttttttcttcttttgtattattatattcatatccttttttacctttatattattattttttatatatgttgtatttgtctaatattacttcatcataatgaggaagctaagattgctagggaggttgaggctcatgaaaagagaattaaaaaggagcttgagagttgagaagcaaggtctactaaatagaaagaaagaagaacaaatgtagagggaaatggagagacatgatcacgagagatgtaatgaagagaggttcatgcgtgaaaggcaaaggaaagaagaaaattccattagcaacagagacgtatacttataactattatggtagataaaaaatgttacaatgtctctcttctatagaacgaaactgggatatcattcattgatatatgttcgattttattcaataattattatataattgtgcaccgtcgcaacgcacgggcatcg

SEQ ID NO: 36561 - DNA, 1294 bp, Zea Mays
gttactactatacacttgtgaagtggaacttgatgatatcttcattttttgactttttgtgctttaggctcctcttcttggatcgactgcagcagttagatctgcacatgtatatctttgtttaattatcgtctccgtattgtaagattaatttgagcttccattctacttttgctccacatatgaaacattaaaagatactctaattatgctatttaactccaagggtggaggtggaatgggtgattataaccacctgcaggatggcattttctgctcaatttgtccgttgctgatttcagtcgggtaatgttctttctgcacaatgacttttgcttgcaaagtcgagtttggcattatgctttgtgtagatgtatctgagaattgcatgactgcatacccttaacatgaaatttcatttttagagattagattagattagatatgtcgctgatggaagtccaactaatagcgaactgaagaccgccgaccttgtgtctacacccgcacattctgttgcatctatacctccttctacaccagcacttcatgttgctcctgcacttttgtctacccctgtcagatgctcatctccatttatcacgccaccatattgttcctcaggttccatttagttgttgaattagttctaaaatcatagtggaaccaaaataatgtgtggatatttgcaaacgagtttctcttgaagtcatggtgtgaggaaaaaagctgcacaaattgagctgtaaagctaggcttcccaacaaggagttaaaacaacaattcctcaaatttgtgctagaagcaagaggctgttaaagaagtgctctttagcaaaggtttcgtcattcttgcctaccgctgtccctttgcttcagaatacggtgaaacagaagtccttcattggctcttctcatcttggctcacatgcagtacttgaataccagtttcttcctgagcagccaagtgatgcatatgagaggggaagccagttgcgcttctatgatgctctagcagaagtgttaaactcaaggaaagaagaacaaatgtagagggaaatggagagacatgatcacgagagatgtaatgaagagaggttcatgcgtgaaaggcaaaggaaagaagaaaattccattagcaacagagacgtatacttataactattatggtagataaaaaatgttacaatgtctctcttctatagaacgaaactgggatatcattcattgatatatgttcgattttattcaataattattatataattgtgcaccgtcgcaacgcacgggcatcg

SEQ ID NO: 36562 - DNA, 1520 bp, Zea Mays
caaagttactactatacacttgtgaagtggaacttgatgatatcttcattttttgactttttgtgctttaggctcctcttcttggatcgactgcagcagttagatctgcacatgtatatctttgtttaattatcgtctccgtattgtaagattaatttgagcttccattctacttttgctccacatatgaaacattaaaagatactctaattatgctatttaactccaagggtggaggtggaatgggtgattataaccacctgcaggttgtgtacatatctttagtacatatccattatgctatttaactccgaaaggagacaatatgcatcagtttcaacaactttgttgtttccttttcatgctgtcttataggatggcattttctgctcaatttgtccgttgctgatttcagtcggagattagattagattagatatgtcgctgatggaagtccaactaatagcgaactgaagaccgccgaccttgtgtctacacccgcacattctgttgcatctatacctccttctacaccagcacttcatgttgctcctgcacttttgtctacccctgtcagatgctcatctccatttatcacgccaccatattgttcctcaggttccatttagttgttgaattagttctaaaatcatagtggaaccaaaataatgtgtggatatttgcaaacgagtttctcttgaagtcatggtgtgaggaaaaaaggtaatgtccttcacattattctggtttagtataccttgttgattattgacatatgttggtcatgttggtgctccactaccttgttcgtatattaaggcatgctacatttcttaactacgtaccaatgatgtggatacgatttttgcagcaaagctatttttatcctggtgttatcttatctattctcatgacagtgaatttagttttattgttgacctcccacggttcttgacttcctaacatcggccactttatttttagttgattgactggcatgagggtggatacttgactgttgatttaccaatgtctcggggagaagttgtcattgggggtccaaatgtttcgtcattcttgcctaccgctgtccctttgcttcagaatacggtgaaacagaagtccttcattggctcttctcatcttggctcacatgcagtacttgaataccagtttcttcctgagcagccaagtgatgcatatgagaggggaagccagttgcgcttctatgatgctctagcagaagtgttaaactcaaggaaagaagaacaaatgtagagggaaatggagagacatgatcacgagagatgtaatgaagagaggttcatgcgtgaaaggcaaaggaaagaagaaaattccattagcaacagagacgtatacttataactattatggtagataaaaaatgttacaatgtctctcttctatagaacgaaactgggatatcattcattgatatatgttcgattttattcaataattattatataattgtgcaccgtcgcaacgcacgggcatcg

SEQ ID NO: 36563 - DNA, 1289 bp, Zea Mays
attcatggttagtgtacaaagttactactatacacttgtgaagtggaacttgatgatatcttcattttttgactttttgtgctttaggctcctcttcttggatcgactgcagcagttagatctgcacatgtatatctttgtttaattatcgtctccgtattgtaagattaatttgagcttccattctacttttgctccacatatgaaacattaaaagatactctaattatgctatttaactccaagggtggaggtggaatgggtgattataaccacctgcaggttgtgtacatatctttagtacatatccattatgctatttaactccgaaaggagacaatatgcatcagtttcaacaactttgttgtttccttttcatgctgtcttataggatggcattttctgctcaatttgtccgttgctgatttcagtcgggtaatgttctttctgcacaatgacttttgcttgcaaagtcgagtttggcattatgctttgtgtagatgtatctgagaattgcatgactgcatacccttaacatgaaatttcatttttagagattagattagattagatatgtcgctgatggaagtccaactaatagcgaactgaagaccgccgaccttgtgtctacacccgcacattctgttgcatctatacctccttctacaccagcacttcatgttgctcctgcacttttgtctacccctgtcagatgctcatctccatttatcacgccaccatattgttcctcagttgattgactggcatgagggtggatacttgactgttgatttaccaatgtctcggggagaagttgtcattgggggtccaaatgtttcgtcattcttgcctaccgctgtccctttgcttcagaatacggtgaaacagaagtccttcattggctcttctcatcttggctcacatgcagtacttgaataccagtttcttcctgagcagccaagtgatgcatatgagaggggaagccagttgcgcttctatgatgctctagcagaagtgttaaactcaaggaaagaagaacaaatgtagagggaaatggagagacatgatcacgagagatgtaatgaagagaggttcatgcgtgaaaggcaaaggaaagaagaaaattccattagcaacagagacgtatacttataactattatggtagataaaaaatgttacaatgtctctcttctatagaacgaaactgggatatcattcattgatatatgttcgattttattcaataattattatataattgtgcaccgtcgcaacgcacgggcatcg

SEQ ID NO: 36564 - DNA, 1682 bp, Zea Mays
gtgaaaggagattagattagattagatatgtcgctgatggaagtccaactaatagcgaactgaagaccgccgaccttgtgtctacacccgcacattctgttgcatctatacctccttctacaccagcacttcatgttgctcctgcacttttgtctacccctgtcagatgctcatctccatttatcacgccaccatattgttcctcaggtatgcaagcaatttttatttttgatctttctccttgttagcttgattgatctttctccagtatttatttgtgggcttggttaatctaggttccatttagttgttgaattagttctaaaatcatagtggaaccaaaataatgtgtggatatttgcaaacgagtttctcttgaagtcatggtgtgaggaaaaaaggtaatgtccttcacattattctggtttagtataccttgttgattattgacatatgttggtcatgttggtgctccactaccttgttcgtatattaaggcatgctacatttcttaactacgtaccaatgatgtggatacgatttttgcagcaaagctatttttatcctggtgttatcttatctattctcatgacagtgaatttagttttattgttgacctcccacggttcttgacttcctaacatcggccactttatttttagttgattgactggcatgagggtggatacttgactgttgatttaccaatgtctcggggagaagttgtcattgggggtccaaatgtttcgtcattcttgcctaccgctgtccctttgcttcagaatacggtgaaacagaagtccttcattggctcttctcatcttggctcacatgcagtacttgaataccagtttcttcctgagcagccaagtgatgcatatgagaggggaagccagttgcgcttctatgatgctctagcagaagtgttaaactcaagggtagattcgttttctataggatcacactttacccatgtagttgagcaggcacctagctatacatttcacagtcaatcatctggttctagctgtttgtcaaatattattgctagcatggctcaaatccaaatattattgctagcatggctcaaatccacggtcaaaaattggcatccctcaagttgtcagatttgaaagctccctcgcatcccctaaaagattgggttatcatgatgaagaacatgtcacgtggacagaaaaacacaagaactatatttatggatatactatttttttcttcttttgtattattatattcatatccttttttacctttatattattattttttatatatgttgtatttgtctaatattacttcatcataatgaggaagctaagattgctagggaggttgaggctcatgaaaagagaattaaaaaggagcttgagagttgagaagcaaggtctactaaatagaaagaaagaagaacaaatgtagagggaaatggagagacatgatcacgagagatgtaatgaagagaggttcatgcgtgaaaggcaaaggaaagaagaaaattccattagcaacagagacgtatacttataactattatggtagataaaaaatgttacaatgtctctcttctatagaacgaaactgggatatcattcattgatatatgttcgattttattcaataattattatataattgtgcaccgtcgcaacgcacgggcatcg

SEQ ID NO: 36565 - DNA, 1842 bp, Zea Mays
ctcagagaaacaaagagtcttcaaaatggtgaaagggctcctcttcttggatcgactgcagcagttagatctgcacatgtatatctttgtttaattatcgtctccgtattgtaagattaatttgagcttccattctacttttgctccacatatgaaacattaaaagatactctaattatgctatttaactccaagggtggaggtggaatgggtgattataaccacctgcaggatggcattttctgctcaatttgtccgttgctgatttcagtcgggtaatgttctttctgcacaatgacttttgcttgcaaagtcgagtttggcattatgctttgtgtagatgtatctgagaattgcatgactgcatacccttaacatgaaatttcatttttagagattagattagattagatatgtcgctgatggaagtccaactaatagcgaactgaagaccgccgaccttgtgtctacacccgcacattctgttgcatctatacctccttctacaccagcacttcatgttgctcctgcacttttgtctacccctgtcagatgctcatctccatttatcacgccaccatattgttcctcagttgattgactggcatgagggtggatacttgactgttgatttaccaatgtctcggggagaagttgtcattgggggtccaaatgtaactaaaggctatttcaaggatgaagctaaaacaaatgatgattgtgagcccatatatggagaacattataatcaatactgatcctttccataattactgtgttgcgcttgtggcagctgcacaaattgagctgtaaagctaggcttcccaacaaggagttaaaacaacaattcctcaaatttgtgctagaagcaagaggctgttaaagaagtgctctttagcaaaggtttcgtcattcttgcctaccgctgtccctttgcttcagaatacggtgaaacagaagtccttcattggctcttctcatcttggctcacatgcagtacttgaataccagtttcttcctgagcagccaagtgatgcatatgagaggggaagccagttgcgcttctatgatgctctagcagaagtgttaaactcaagggtagattcgttttctataggatcacactttacccatgtagttgagcaggcacctagctatacatttcacagtcaatcatctggttctagctgtttgtcaaatattattgctagcatggctcaaatccaaatattattgctagcatggctcaaatccacggtcaaaaattggcatccctcaagttgtcagatttgaaagctccctcgcatcccctaaaagattgggttatcatgatgaagaacatgtcacgtggacagaaaaacacaagaactatatttatggatatactatttttttcttcttttgtattattatattcatatccttttttacctttatattattattttttatatatgttgtatttgtctaatattacttcatcataatgaggaagctaagattgctagggaggttgaggctcatgaaaagagaattaaaaaggagcttgagagttgagaagcaaggtctactaaatagaaagaaagaagaacaaatgtagagggaaatggagagacatgatcacgagagatgtaatgaagagaggttcatgcgtgaaaggcaaaggaaagaagaaaattccattagcaacagagacgtatacttataactattatggtagataaaaaatgttacaatgtctctcttctatagaacgaaactgggatatcattcattgatatatgttcgattttattcaataattattatataattgtgcaccgtcgcaacgcacgggcatcg

SEQ ID NO: 36566 - DNA, 1926 bp, Zea Mays
ctgaaatgccctggtcagcctgaagaggaaatctctcagagaaacaaagagtcttcaaaatggtgaaaggcgaactgaagaccgccgaccttgtgtctacacccgcacattctgttgcatctatacctccttctacaccagcacttcatgttgctcctgcacttttgtctacccctgtcagatgctcatctccatttatcacgccaccatattgttcctcaggtatgcaagcaatttttatttttgatctttctccttgttagcttgattgatctttctccagtatttatttgtgggcttggttaatctaggttccatttagttgttgaattagttctaaaatcatagtggaaccaaaataatgtgtggatatttgcaaacgagtttctcttgaagtcatggtgtgaggaaaaaaggtaatgtccttcacattattctggtttagtataccttgttgattattgacatatgttggtcatgttggtgctccactaccttgttcgtatattaaggcatgctacatttcttaactacgtaccaatgatgtggatacgatttttgcagcaaagctatttttatcctggtgttatcttatctattctcatgacagtgaatttagttttattgttgacctcccacggttcttgacttcctaacatcggccactttatttttagttgattgactggcatgagggtggatacttgactgttgatttaccaatgtctcggggagaagttgtcattgggggtccaaatgtaactaaaggctatttcaaggatgaagctaaaacaaatgatgattgtgagcccatatatggagaacattataatcaatactgatcctttccataattactgtgttgcgcttgtggcagctgcacaaattgagctgtaaagctaggcttcccaacaaggagttaaaacaacaattcctcaaatttgtgctagaagcaagaggctgttaaagaagtgctctttagcaaaggtttcgtcattcttgcctaccgctgtccctttgcttcagaatacggtgaaacagaagtccttcattggctcttctcatcttggctcacatgcagtacttgaataccagtttcttcctgagcagccaagtgatgcatatgagaggggaagccagttgcgcttctatgatgctctagcagaagtgttaaactcaagggtagattcgttttctataggatcacactttacccatgtagttgagcaggcacctagctatacatttcacagtcaatcatctggttctagctgtttgtcaaatattattgctagcatggctcaaatccaaatattattgctagcatggctcaaatccacggtcaaaaattggcatccctcaagttgtcagatttgaaagctccctcgcatcccctaaaagattgggttatcatgatgaagaacatgtcacgtggacagaaaaacacaagaactatatttatggatatactatttttttcttcttttgtattattatattcatatccttttttacctttatattattattttttatatatgttgtatttgtctaatattacttcatcataatgaggaagctaagattgctagggaggttgaggctcatgaaaagagaattaaaaaggagcttgagagttgagaagcaaggtctactaaatagaaagaaagaagaacaaatgtagagggaaatggagagacatgatcacgagagatgtaatgaagagaggttcatgcgtgaaaggcaaaggaaagaagaaaattccattagcaacagagacgtatacttataactattatggtagataaaaaatgttacaatgtctctcttctatagaacgaaactgggatatcattcattgatatatgttcgattttattcaataattattatataattgtgcaccgtcgcaacgcacgggcatcg

SEQ ID NO: 36567 - DNA, 2515 bp, Zea Mays
atggctgcggcggaggcgcggcgccggtcagcggtctgggccctgctgccgctgctgctgcggctgctccacccggtcgcgctcgtgctggccaacaccgaaggtgcgttcgtggccgggcaattctcagggagggcctcggtgtctgtgtttggttatgctactcagagtgatttgaagttggccctaccctgctctttttaaggctgaaatgccctggtcagcctgaagaggaaatctctcagagaaacaaagagtcttcaaaatggtgaaagggctcctcttcttggatcgactgcagcagttagatctgcacatgtatatctttgtttaattatcgtctccgtattgtaagattaatttgagcttccattctacttttgctccacatatgaaacattaaaagatactctaattatgctatttaactccaagggtggaggtggaatgggtgattataaccacctgcaggttgtgtacatatctttagtacatatccattatgctatttaactccgaaaggagacaatatgcatcagtttcaacaactttgttgtttccttttcatgctgtcttataggatggcattttctgctcaatttgtccgttgctgatttcagtcggattagatatgtcgctgatggaagtccaactaatagcgaactgaagaccgccgaccttgtgtctacacccgcacattctgttgcatctatacctccttctacaccagcacttcatgttgctcctgcacttttgtctacccctgtcagatgctcatctccatttatcacgccaccatattgttcctcaggtatgcaagcaatttttatttttgatctttctccttgttagcttgattgatctttctccagtatttatttgtgggcttggttaatctaggttccatttagttgttgaattagttctaaaatcatagtggaaccaaaataatgtgtggatatttgcaaacgagtttctcttgaagtcatggtgtgaggaaaaaaggtaatgtccttcacattattctggtttagtataccttgttgattattgacatatgttggtcatgttggtgctccactaccttgttcgtatattaaggcatgctacatttcttaactacgtaccaatgatgtggatacgatttttgcagcaaagctatttttatcctggtgttatcttatctattctcatgacagtgaatttagttttattgttgacctcccacggttcttgacttcctaacatcggccactttatttttagttgattgactggcatgagggtggatacttgactgttgatttaccaatgtctcggggagaagttgtcattgggggtccaaatgtaactaaaggctatttcaaggatgaagctaaaacaaatgatgattgtgagcccatatatggagaacattataatcaatactgatcctttccataattactgtgttgcgcttgtggcagctgcacaaattgagctgtaaagctaggcttcccaacaaggagttaaaacaacaattcctcaaatttgtgctagaagcaagaggctgttaaagaagtgctctttagcaaaggtttcgtcattcttgcctaccgctgtccctttgcttcagaatacggtgaaacagaagtccttcattggctcttctcatcttggctcacatgcagtacttgaataccagtttcttcctgagcagccaagtgatgcatatgagaggggaagccagttgcgcttctatgatgctctagcagaagtgttaaactcaagggtagattcgttttctataggatcacactttacccatgtagttgagcaggcacctagctatacatttcacagtcaatcatctggttctagctgtttgtcaaatattattgctagcatggctcaaatccaaatattattgctagcatggctcaaatccacggtcaaaaattggcatccctcaagttgtcagatttgaaagctccctcgcatcccctaaaagattgggttatcatgatgaagaacatgtcacgtggacagaaaaacacaagaactatatttatggatatactatttttttcttcttttgtattattatattcatatccttttttacctttatattattattttttatatatgttgtatttgtctaatattacttcatcataatgaggaagctaagattgctagggaggttgaggctcatgaaaagagaattaaaaaggagcttgagagttgagaagcaaggtctactaaatagaaagaaagaagaacaaatgtagagggaaatggagagacatgatcacgagagatgtaatgaagagaggttcatgcgtgaaaggcaaaggaaagaagaaaattccattagcaacagagacgtatacttataactattatggtagataaaaaatgttacaatgtctctcttctatagaacgaaactgggatatcattcattgatatatgttcgattttattcaataattattatataattgtgcaccgtcgcaacgcacgggcatcg

SEQ ID NO: 36568 - DNA, 1466 bp, Zea Mays
atggctgcggcggaggcgcggcgccggtcagcggtctgggccctgctgccgctgctgctgcggctgctccacccggtcgcgctcgtgctggccaacaccgaaggtgcgttcgtggccgggcaattctcagggagggcctcggtgtctgtgtttggttatgctactcagagtgatttgaattttaacaatatatttagcattcatgatgctcatctccatttatcacgccaccatattgttcctcaggtatgcaagcaatttttatttttgatctttctccttgttagcttgattgatctttctccagtatttatttgtgggcttggttaatctaggttccatttagttgttgaattagttctaaaatcatagtggaaccaaaataatgtgtggatatttgcaaacgagtttctcttgaagtcatggtgtgaggaaaaaaggtaatgtccttcacattattctggtttagtataccttgttgattattgacatatgttggtcatgttggtgctccactaccttgttcgtatattaaggcatgctacatttcttaactacgtaccaatgatgtggatacgatttttgcagcaaagctatttttatcctggtgttatcttatctattctcatgacagtgaatttagttttattgttgacctcccacggttcttgacttcctaacatcggccactttatttttagttgattgactggcatgagggtggatacttgactgttgatttaccaatgtctcggggagaagttgtcattgggggtccaaatgtaactaaaggctatttcaaggatgaagctaaaacaaatgatgattgtgagcccatatatggagaacattataatcaatactgatcctttccataattactgtgttgcgcttgtggcagctgcacaaattgagctgtaaagctaggcttcccaacaaggagttaaaacaacaattcctcaaatttgtgctagaagcaagaggctgttaaagaagtgctctttagcaaaggtttcgtcattcttgcctaccgctgtccctttgcttcagaatacggtgaaacagaagtccttcattggctcttctcatcttggctcacatgcagtacttgaataccagtttcttcctgagcagccaagtgatgcatatgagaggggaagccagttgcgcttctatgatgctctagcagaagtgttaaactcaaggaaagaagaacaaatgtagagggaaatggagagacatgatcacgagagatgtaatgaagagaggttcatgcgtgaaaggcaaaggaaagaagaaaattccattagcaacagagacgtatacttataactattatggtagataaaaaatgttacaatgtctctcttctatagaacgaaactgggatatcattcattgatatatgttcgattttattcaataattattatataattgtgcaccgtcgcaacgcacgggcatcg

SEQ ID NO: 36569 - DNA, 2000 bp, Zea Mays
atggctgcggcggaggcgcggcgccggtcagcggtctgggccctgctgccgctgctgctgcggctgctccacccggtcgcgctcgtgctggccaacaccgaaggtgcgttcgtggccgggcaattctcagggagggcctcggtgtctgtgtttggttatgctactcagagtgatttgaattttaacaatatatttagcattcatggttagtgtacaaagttactactatacacttgtgaagtggaacttgatgatatcttcattttttgactttttgtgctttaggctcctcttcttggatcgactgcagcagttagatctgcacatgtatatctttgtttaattatcgtctccgtattgtaagattaatttgagcttccattctacttttgctccacatatgaaacattaaaagatactctaattatgctatttaactccaagggtggaggtggaatgggtgattataaccacctgcaggttgtgtacatatctttagtacatatccattatgctatttaactccgaaaggagacaatatgcatcagtttcaacaactttgttgtttccttttcatgctgtcttataggatggcattttctgctcaatttgtccgttgctgatttcagtcgggtaatgttctttctgcacaatgacttttgcttgcaaagtcgagtttggcattatgctttgtgtagatgtatctgagaattgcatgactgcatacccttaacatgaaatttcatttttagagattagattagattagatatgtcgctgatggaagtccaactaatagcgaactgaagaccgccgaccttgtgtctacacccgcacattctgttgcatctatacctccttctacaccagcacttcatgttgctcctgcacttttgtctacccctgtcagatgctcatctccatttatcacgccaccatattgttcctcagctgcacaaattgagctgtaaagctaggcttcccaacaaggagttaaaacaacaattcctcaaatttgtgctagaagcaagaggctgttaaagaagtgctctttagcaaaggtttcgtcattcttgcctaccgctgtccctttgcttcagaatacggtgaaacagaagtccttcattggctcttctcatcttggctcacatgcagtacttgaataccagtttcttcctgagcagccaagtgatgcatatgagaggggaagccagttgcgcttctatgatgctctagcagaagtgttaaactcaagggtagattcgttttctataggatcacactttacccatgtagttgagcaggcacctagctatacatttcacagtcaatcatctggttctagctgtttgtcaaatattattgctagcatggctcaaatccaaatattattgctagcatggctcaaatccacggtcaaaaattggcatccctcaagttgtcagatttgaaagctccctcgcatcccctaaaagattgggttatcatgatgaagaacatgtcacgtggacagaaaaacacaagaactatatttatggatatactatttttttcttcttttgtattattatattcatatccttttttacctttatattattattttttatatatgttgtatttgtctaatattacttcatcataatgaggaagctaagattgctagggaggttgaggctcatgaaaagagaattaaaaaggagcttgagagttgagaagcaaggtctactaaatagaaagaaagaagaacaaatgtagagggaaatggagagacatgatcacgagagatgtaatgaagagaggttcatgcgtgaaaggcaaaggaaagaagaaaattccattagcaacagagacgtatacttataactattatggtagataaaaaatgttacaatgtctctcttctatagaacgaaactgggatatcattcattgatatatgttcgattttattcaataattattatataattgtgcaccgtcgcaacgcacgggcatcg

SEQ ID NO: 36570 - DNA, 2012 bp, Zea Mays
atggctgcggcggaggcgcggcgccggtcagcggtctgggccctgctgccgctgctgctgcggctgctccacccggtcgcgctcgtgctggccaacaccgaaggttggccctaccctgctctttttaaggctgaaatgccctggtcagcctgaagaggaaatctctcagagaaacaaagagtcttcaaaatggtgaaagggctcctcttcttggatcgactgcagcagttagatctgcacatgtatatctttgtttaattatcgtctccgtattgtaagattaatttgagcttccattctacttttgctccacatatgaaacattaaaagatactctaattatgctatttaactccaagggtggaggtggaatgggtgattataaccacctgcaggatggcattttctgctcaatttgtccgttgctgatttcagtcggattagatatgtcgctgatggaagtccaactaatagcgaactgaagaccgccgaccttgtgtctacacccgcacattctgttgcatctatacctccttctacaccagcacttcatgttgctcctgcacttttgtctacccctgtcagatgctcatctccatttatcacgccaccatattgttcctcaggttccatttagttgttgaattagttctaaaatcatagtggaaccaaaataatgtgtggatatttgcaaacgagtttctcttgaagtcatggtgtgaggaaaaaaggtaatgtccttcacattattctggtttagtataccttgttgattattgacatatgttggtcatgttggtgctccactaccttgttcgtatattaaggcatgctacatttcttaactacgtaccaatgatgtggatacgatttttgcagcaaagctatttttatcctggtgttatcttatctattctcatgacagtgaatttagttttattgttgacctcccacggttcttgacttcctaacatcggccactttatttttagttgattgactggcatgagggtggatacttgactgttgatttaccaatgtctcggggagaagttgtcattgggggtccaaatgtttcgtcattcttgcctaccgctgtccctttgcttcagaatacggtgaaacagaagtccttcattggctcttctcatcttggctcacatgcagtacttgaataccagtttcttcctgagcagccaagtgatgcatatgagaggggaagccagttgcgcttctatgatgctctagcagaagtgttaaactcaagggtagattcgttttctataggatcacactttacccatgtagttgagcaggcacctagctatacatttcacagtcaatcatctggttctagctgtttgtcaaatattattgctagcatggctcaaatccaaatattattgctagcatggctcaaatccacggtcaaaaattggcatccctcaagttgtcagatttgaaagctccctcgcatcccctaaaagattgggttatcatgatgaagaacatgtcacgtggacagaaaaacacaagaactatatttatggatatactatttttttcttcttttgtattattatattcatatccttttttacctttatattattattttttatatatgttgtatttgtctaatattacttcatcataatgaggaagctaagattgctagggaggttgaggctcatgaaaagagaattaaaaaggagcttgagagttgagaagcaaggtctactaaatagaaagaaagaagaacaaatgtagagggaaatggagagacatgatcacgagagatgtaatgaagagaggttcatgcgtgaaaggcaaaggaaagaagaaaattccattagcaacagagacgtatacttataactattatggtagataaaaaatgttacaatgtctctcttctatagaacgaaactgggatatcattcattgatatatgttcgattttattcaataattattatataattgtgcaccgtcgcaacgcacgggcatcg

SEQ ID NO: 36571 - DNA, 2171 bp, Zea Mays
atggctgcggcggaggcgcggcgccggtcagcggtctgggccctgctgccgctgctgctgcggctgctccacccggtcgcgctcgtgctggccaacaccgaaggtgcgttcgtggccgggcaattctcagggagggcctcggtgtctgtgtttggttatgctactcagagtgatttgaattttaacaatatatttagcattcatggttagtgtacaaagttactactatacacttgtgaagtggaacttgatgatatcttcattttttgactttttgtgctttaggctcctcttcttggatcgactgcagcagttagatctgcacatgtatatctttgtttaattatcgtctccgtattgtaagattaatttgagcttccattctacttttgctccacatatgaaacattaaaagatactctaattatgctatttaactccaagggtggaggtggaatgggtgattataaccacctgcaggttgtgtacatatctttagtacatatccattatgctatttaactccgaaaggagacaatatgcatcagtttcaacaactttgttgtttccttttcatgctgtcttataggatggcattttctgctcaatttgtccgttgctgatttcagtcgggtaatgttctttctgcacaatgacttttgcttgcaaagtcgagtttggcattatgctttgtgtagatgtatctgagaattgcatgactgcatacccttaacatgaaatttcatttttagagattagattagattagatatgtcgctgatggaagtccaactaatagcgaactgaagaccgccgaccttgtgtctacacccgcacattctgttgcatctatacctccttctacaccagcacttcatgttgctcctgcacttttgtctacccctgtcagatgctcatctccatttatcacgccaccatattgttcctcaggtatgcaagcaatttttatttttgatctttctccttgttagcttgattgatctttctccagtatttatttgtgggcttggttaatctaggttccatttagttgttgaattagttctaaaatcatagtggaaccaaaataatgtgtggatatttgcaaacgagtttctcttgaagtcatggtgtgaggaaaaaaggtaatgtccttcacattattctggtttagtataccttgttgattattgacatatgttggtcatgttggtgctccactaccttgttcgtatattaaggcatgctacatttcttaactacgtaccaatgatgtggatacgatttttgcagcaaagctatttttatcctggtgttatcttatctattctcatgacagtgaatttagttttattgttgacctcccacggttcttgacttcctaacatcggccactttatttttagttgattgactggcatgagggtggatacttgactgttgatttaccaatgtctcggggagaagttgtcattgggggtccaaatgtaactaaaggctatttcaaggatgaagctaaaacaaatgatgattgtgagcccatatatggagaacattataatcaatactgatcctttccataattactgtgttgcgcttgtggcagctgcacaaattgagctgtaaagctaggcttcccaacaaggagttaaaacaacaattcctcaaatttgtgctagaagcaagaggctgttaaagaagtgctctttagcaaaggtttcgtcattcttgcctaccgctgtccctttgcttcagaatacggtgaaacagaagtccttcattggctcttctcatcttggctcacatgcagtacttgaataccagtttcttcctgagcagccaagtgatgcatatgagaggggaagccagttgcgcttctatgatgctctagcagaagtgttaaactcaaggaaagaagaacaaatgtagagggaaatggagagacatgatcacgagagatgtaatgaagagaggttcatgcgtgaaaggcaaaggaaagaagaaaattccattagcaacagagacgtatacttataactattatggtagataaaaaatgttacaatgtctctcttctatagaacgaaactgggatatcattcattgatatatgttcgattttattcaataattattatataattgtgcaccgtcgcaacgcacgggcatcg
